United States Patent Application Publication US 2025/0302929 A1 - sequence listing, part 3

SEQ ID NO: 10496 - protein, 63 aa, Artificial Sequence
  Synthetic polypeptide
WLQWLMPVIPALWEAEAGGSRGQEIETILANMEYICPRCESGFIEEVTDDSRESESERERVSA

SEQ ID NO: 10497 - protein, 332 aa, Artificial Sequence
  Synthetic polypeptide
GWAWWLTPVIPALWEAEAGGSLEVRSSRPAWPSWRNTVSTRNTKISQVWWHMPVIPATLEAEEYICPRCESGFIEEVTDDSSFLGGGGSRIDNTTTTHFAELWGHLDHTMFFQDFRPFLSSSPLDQDNRANERGHQTHTDFWGARPPRLPLGRRYRSRGSSRPDRSPAIEGILQHIFAGFFANSAIPGSPHPFSWSGMLHSNPGDYAWGQTGLDAIVTQLLGQLENTGPPPADKEKITSLPTVTVTQEQVDMGLECPVCKEDYTVEEEVRQLPCNHFFHSSCIVPWLELHDTCPVCRKSLNGEDSTRQSQSTEASASNRFSNDSQLHDRWTF

SEQ ID NO: 10498 - protein, 22 aa, Artificial Sequence
  Synthetic polypeptide
SQPLWRLRNIYVPDVNQALLKK

SEQ ID NO: 10499 - protein, 83 aa, Artificial Sequence
  Synthetic polypeptide
GWAWWLTPVIPALWEAEAGGSLEVRSSRPAWPSWRNTVSTRNTKISQVWWHMPVIPATLEAEEYICPRCESGFIEEVTDDSRI

SEQ ID NO: 10500 - protein, 93 aa, Artificial Sequence
  Synthetic polypeptide
GWAWWLTPVIPALWEAEAGGSLEVRSSRPAWPSWRNTVSTRNTKISQVWWHMPVIPATLEAEEYICPRCESGFIEEVTDDSRESESERERVSA

SEQ ID NO: 10501 - protein, 169 aa, Artificial Sequence; identical to SEQ ID NO: 10469
  Synthetic polypeptide

SEQ ID NO: 10502 - protein, 30 aa, Artificial Sequence; identical to SEQ ID NO: 10458
  Synthetic polypeptide

SEQ ID NO: 10503 - protein, 58 aa, Artificial Sequence; identical to SEQ ID NO: 10459
  Synthetic polypeptide

SEQ ID NO: 10504 - protein, 409 aa, Artificial Sequence
  Synthetic polypeptide
RCWRGCGEIGTLLHCWWDCKLVQRLWKAVWQFLRDLELEIPFDPAIPLLGVYPKDYKSCCCKDTCTHMFIAALFTIAKTWNQAKYPAMIDWIKKMWHIYTMEYYAAIKNDEFMSFVGAWMKLETIILSKLLQGQKTKYRMFLLTGHRWDQVKKEDQEATGPRLSRELLDEKEPEVLQDSLDRCYSTPSVYLGLTDSCQPYRSAFYVLEQQRIGLAVDMDEIEKYQEVEEDQDPSCPRLSRELLAEKEPEVLQDSLDRCYSTPSGYLELPDLGQPYRSAVYSLEEQYLGLALDVDRIKKDQEEEEDQGPPCPRLSRELLEVVEPEVLQDSLDVIQLLPVVLNSLTPASPTEVPFMHWRKNMLAFLLTWEKLKRRGRGRKEGEEDQRRKEEGEEKKGKKIKTHHAPGSAAC

SEQ ID NO: 10505 - protein, 484 aa, Artificial Sequence
  Synthetic polypeptide
RCWRGCGEIGTLLHCWWDCKLVQRLWKAVWQFLRDLELEIPFDPAIPLLGVYPKDYKSCCCKDTCTHMFIAALFTIAKTWNQAKYPAMIDWIKKMWHIYTMEYYAAIKNDEFMSFVGAWMKLETIILSKLLQGQKTKYRMFLLTGHRWDQVKKEDQEATGPRLSRELLDEKEPEVLQDSLDRCYSTPSVYLGLTDSCQPYRSAFYVLEQQRIGLAVDMDEIEKYQEVEEDQDPSCPRLSRELLAEKEPEVLQDSLDRCYSTPSGYLELPDLGQPYRSAVYSLEEQYLGLALDVDRIKKDQEEEEDQGPPCPRLSRELLEVVEPEVLQDSLCYSTPSSCLEQPDSCQPYGSSFYALEEKHVGFSLDVGEIEKKGKGKKRRGRRSKKKRRRGRKEGEEDQNPPCPRLSSVLMEVEVPEVLQDSLDRYYSTPSMYFELPDSFQHYRSVFYSFEEQHISFALDMDNRFFTLTVRSLHLVFQMGVIFPQ

SEQ ID NO: 10506 - protein, 169 aa, Artificial Sequence
  Synthetic polypeptide
RCWRGCGEIGTLLHCWWDCKLVQRLWKAVWQFLRDLELEIPFDPAIPLLGVYPKDYKSCCCKDTCTHMFIAALFTIAKTWNQAKYPAMIDWIKKMWHIYTMEYYAAIKNDEFMSFVGAWMKLETIILSKLLQGQKTKYRMFLLTGHRWDQVKKEDQEATGPRLSRELLA

SEQ ID NO: 10507 - protein, 313 aa, Artificial Sequence
  Synthetic polypeptide
RCWRGCGEIGTLLHCWWDCKLVQRLWKAVWQFLRDLELEIPFDPAIPLLGVYPKDYKSCCCKDTCTHMFIAALFTIAKTWNQAKYPAMIDWIKKMWHIYTMEYYAAIKNDEFMSFVGAWMKLETIILSKLLQGQKTKYRMFLLTGHRWDQVKKEDQEATGPRLSRELLDEKEPEVLQDSLDRCYSTPSVYLGLTDSCQPYRSAFYVLEQQRIGLAVDMDEIEKYQEVEEDQDPSCPRLSRELLAEKEPEVLQDSLDRCYSTPSGYLELPDLGQPYRSAVYSLEEQYLGLALDVDRIKKDQEEEEDQGPPCPRN

SEQ ID NO: 10508 - protein, 30 aa, Artificial Sequence; identical to SEQ ID NO: 10458
  Synthetic polypeptide

SEQ ID NO: 10509 - protein, 58 aa, Artificial Sequence; identical to SEQ ID NO: 10459
  Synthetic polypeptide

SEQ ID NO: 10510 - protein, 408 aa, Artificial Sequence
  Synthetic polypeptide
VLERMWRNRTLLHCWWDCKLVQRLWKAVWQFLRDLELEIPFDPAIPLLGVYPKDYKSCCCKDTCTRMFIAALFTIAKTWNQAKYPAMIDWIKKMWHIYTMDYYAAIKNDEFMSFVGAWMKLETIILSKLLQGQKTKYRMFLLTGHRWDQVKKEDQEATGPRLSRELLDEKEPEVLQDSLDRCYSTPSVYLGLTDSCQPYRSAFYVLEQQRIGLAVDMDEIEKYQEVEEDQDPSCPRLSRELLAEKEPEVLQDSLDRCYSTPSGYLELPDLGQPYRSAVYSLEEQYLGLALDVDRIKKDQEEEEDQGPPCPRLSRELLEVVEPEVLQDSLDVIQLLPVVLNSLTPASPTEVPFMHWRKNMLAFLLTWEKLKRRGRGRKEGEEDQRRKEEGEEKKGKKIKTHHAPGSAAC

SEQ ID NO: 10511 - protein, 483 aa, Artificial Sequence
  Synthetic polypeptide
VLERMWRNRTLLHCWWDCKLVQRLWKAVWQFLRDLELEIPFDPAIPLLGVYPKDYKSCCCKDTCTRMFIAALFTIAKTWNQAKYPAMIDWIKKMWHIYTMDYYAAIKNDEFMSFVGAWMKLETIILSKLLQGQKTKYRMFLLTGHRWDQVKKEDQEATGPRLSRELLDEKEPEVLQDSLDRCYSTPSVYLGLTDSCQPYRSAFYVLEQQRIGLAVDMDEIEKYQEVEEDQDPSCPRLSRELLAEKEPEVLQDSLDRCYSTPSGYLELPDLGQPYRSAVYSLEEQYLGLALDVDRIKKDQEEEEDQGPPCPRLSRELLEVVEPEVLQDSLCYSTPSSCLEQPDSCQPYGSSFYALEEKHVGFSLDVGEIEKKGKGKKRRGRRSKKKRRRGRKEGEEDQNPPCPRLSSVLMEVEVPEVLQDSLDRYYSTPSMYFELPDSFQHYRSVFYSFEEQHISFALDMDNRFFTLTVRSLHLVFQMGVIFPQ

SEQ ID NO: 10512 - protein, 168 aa, Artificial Sequence
  Synthetic polypeptide
VLERMWRNRTLLHCWWDCKLVQRLWKAVWQFLRDLELEIPFDPAIPLLGVYPKDYKSCCCKDTCTRMFIAALFTIAKTWNQAKYPAMIDWIKKMWHIYTMDYYAAIKNDEFMSFVGAWMKLETIILSKLLQGQKTKYRMFLLTGHRWDQVKKEDQEATGPRLSRELLA

SEQ ID NO: 10513 - protein, 168 aa, Artificial Sequence
  Synthetic polypeptide
VLERMWRNRTLLHCWWDCKLVQRLWKAVWQFLRDLELEIPFDPAIPLLGVYPKDYKSCCCKDTCTRMFIAALFTIAKTWNQAKYPAMIDWIKKMWHIYTMDYYAAIKNDEFMSFVGAWMKLETIILSKLLQGQKTKYRMFLLTGHRWDQVKKEDQEATGPRLSRELLD

SEQ ID NO: 10514 - protein, 312 aa, Artificial Sequence
  Synthetic polypeptide
VLERMWRNRTLLHCWWDCKLVQRLWKAVWQFLRDLELEIPFDPAIPLLGVYPKDYKSCCCKDTCTRMFIAALFTIAKTWNQAKYPAMIDWIKKMWHIYTMDYYAAIKNDEFMSFVGAWMKLETIILSKLLQGQKTKYRMFLLTGHRWDQVKKEDQEATGPRLSRELLDEKEPEVLQDSLDRCYSTPSVYLGLTDSCQPYRSAFYVLEQQRIGLAVDMDEIEKYQEVEEDQDPSCPRLSRELLAEKEPEVLQDSLDRCYSTPSGYLELPDLGQPYRSAVYSLEEQYLGLALDVDRIKKDQEEEEDQGPPCPRN

SEQ ID NO: 10515 - protein, 68 aa, Artificial Sequence
  Synthetic polypeptide
LSKMITMTMKMFKLRWLRKCRNRLPPGRCRRLKKRKSLRTHWRSVPSLVQIAMALMTPTSHIGNQNHI

SEQ ID NO: 10516 - protein, 16 aa, Artificial Sequence
  Synthetic polypeptide
RFPGCLFGNVLSNCRK

SEQ ID NO: 10517 - protein, 425 aa, Artificial Sequence
  Synthetic polypeptide
KELWTKNEGSQAVFSAMFLVTVENDNDDDEDVQVEVAEKVQKSSSPREMQKAEEKEVPEDSLEECAITCSNSHGPYDSNQPHRKPKSHLRKTKSTQLSLAHPLMLNGRMLYTLSQKMKVMMRKRKKKGQCLPGICRSLKRRKSPRSPGMKVIRLSQFLLKGHRWDQVKKEDQEATGPRLSRELLAEKEPEVLQDSLDRCYSTPSVYLGLTDSCQPYRSAFYVLEQQRVGLAVDMDEIEKYQEVEEDQDPSCPRLSRELLAEKEPEVLQDSLDRCYSTPSGYLELPDLGQPYRSAVYSLEEQYLGLALDVDRIKKDQEEEEDQGPPCPRLSRELLEVVEPEVLQDSLDVIQLLPVVLNSLTPASPTEVPFMHWRKNMLAFLLTWEKLKRRGRGRKEGEEDQRRKEEGEEKKGKKIKTHHAPGSTAC

SEQ ID NO: 10518 - protein, 154 aa, Artificial Sequence
  Synthetic polypeptide
LSKMITMTMKMFKLRWLRKCRNRLPPGRCRRLKKRKSLRTHWRSVPSLVQIAMALMTPTSHIGKPKSHLRKTKSTQLSLAHPLMLNGRMLYTLSQKMKVMMRKRKKKGQCLPGICRSLKRRKSPRSPGMKVIRLSQFLLKGWPHTSLTAAHFTH

SEQ ID NO: 10519 - protein, 2647 aa, Artificial Sequence
  Synthetic polypeptide
KELWTKNEGSQAVFSAMFLVTVENDNDDDEDVQVEVAEKVQKSSSPREMQKAEEKEVPEDSLEECAITCSNSHGPYDSNQPHRKTKITFEEDKVDSTLIGSSSHVEWEDAVHIIPENESDDEEEEEKGPVSPRNLQESEEEEVPQESWDEGYSTLSIPPERLASYQSYSSTFHSLEEQQVCMAVDIGSEYSIVKVIKLQFMAQSQAMPVPTWTDCHDIELKAGHRWDQVKKEDQEATGPRLSRELLAEKEPEVLQDSLDRCYSTPSVYLGLTDSCQPYRSAFYVLEQQRVGLAVDMDEIEKYQEVEEDQDPSCPRLSRELLAEKEPEVLQDSLDRWYSTPSGYLELPDLGQPYRSAVYSLEEQYLGLALDVDRIKKDQEEEEDQGPPCPRLSRELLEVVEPEVLQDSLDRCYSTPSSCLEQPDSCQPYRSSFYALEEKHVGFSLDVGEIEKKGKGKKRRGRRSKKKRRRGRKEGEEDQNPPCPRLSRELLAEKEPEVLQDSLDRWYSTPSVYLGLTDPCQPYRSAFYVLEQQRVGLAVDMDEIEKYQEVEEDQDPSCPRLSRELLAEKEPEVLQDSLDRWYSTPSGYLELPDLGQPYRSAVYSLEEQYLGLALDVDRIKKDQEEEEDQGPPCPRLSRELLEVVEPEVLQDSLDRCYSTPSSCLEQPDSCQPYRSSFYALEEKHVGFSLDVGEIEKKGKGKKRRGRRSKKKRRRGRKEGEEDQNPPCPRLSRELLAEKEPEVLQDSLDRWYSTPSVYLGLTDPCQPYRSAFYVLEQQRVGLAVDMDEIEKYQEVEEDQDPSCPRLSRELLAEKEPEVLQDSLDRWYSTPSGYLELPDLGQPYRSAVYSLEEQYLGLALDVDRIKKDQEEEEDQGPPCPRLSRELLEVVEPEVLQDSLDRCYSTPSSCLEQPDSCQPYRSSFYALEEKHVGFSLDVGEIEKKGKGKKRRGRRSKKKRRRGRKEGEEDQNPPCPRLSRELLAEKEPEVLQDSLDRWYSTPSVYLGLTDPCQPYRSAFYVLEQQRVGLAVDMDEIEKYQEVEEDQDPSCPRLSRELLAEKEPEVLQDSLDRWYSTPSGYLELPDLGQPYRSAVYSLEEQYLGLALDVDRIKKDQEEEEDQGPPCPRLSRELLEVVEPEVLQDSLDRCYSTPSSCLEQPDSCQPYRSSFYALEEKHVGFSLDVGEIEKKGKGKKRRGRRSKKKRRRGRKEGEEDQNPPCPRLSRELLAEKEPEVLQDSLDRWYSTPSVYLGLTDPCQPYRSAFYVLEQQRVGLAVDMDEIEKYQEVEEDQDPSCPRLSRELLAEKEPEVLQDSLDRWYSTPSGYLELPDLGQPYRSAVYSLEEQYLGLALDVDKIEKYQEVEEDQDPSCPRLSRELLAEKEPEVLQDSLDRWYSTPSVYLGLTDPCQPYRSAFYVLEQQRVGLAVDMDEIEKYQEVEEDQDPSCPRLSRELLAEKEPEVLQDSLDRCYSTPSGYLELPDLGQPYRSAVYSLEEQYLGLALDVDRIKKDQEEEEDQGPPCPRLSRELLEVVEPEVLQDSLDRCYSTPSSCLEQPDSCQPYRSSFYALEEKHVGFSLDVGEIEKYQEVEEDQDPSCPRLSRELLAEKEPEVLQDSLDRWYSTPSVYLGLTDPCQPYRSAFYVLEQQRVGLAVDMDEIEKYQEVEEDQDPSCPRLSRELLAEKEPEVLQDSLDRCYSTPSGYLELPDLGQPYRSAVYSLEEQYLGLALDVDRIKKDQEEEEDQGPPCPRLSRELLEVVEPEVLQDSLDRCYSTPSSCLEQPDSCQPYRSSFYALEEKHVGFSLDVGEIEKKGKGKKRRGRRSKKKRRRGRKEGEEDQNPPCPRLSRELLAEKEPEVLQDSLDRWYSTPSVYLGLTDPCQPYRSAFYVLEQQRVGLAVDMDEIEKYQEVEEDQDPSCPRLSRELLAEKEPEVLQDSLDRWYSTPSGYLELPDLGQPYRSAVYSLEEQYLGLALDVDRIKKDQEEEEDQGPPCPRLSRELLEVVEPEVLQDSLDRCYSTPSSCLEQPDSCQPYRSSFYALEEKHVGFSLDVGEIEKKGKGKKRRGRRSKKKRRRGRKEGEEDQNPPCPRLSRELLAEKEPEVLQDSLDRWYSTPSVYLGLTDPCQPYRSAFYVLEQQRVGLAVDMDEIEKYQEVEEDQDPSCPRLSRELLAEKEPEVLQDSLDRCYSTPSGYLELPDLGQPYRSAVYSLEEQYLGLALDVDRIKKDQEEEEDQGPPCPRLSRELLEVVEPEVLQDSLDRCYSTPSSCLEQPDSCQPYRSSFYALEEKHVGFSLDVGEIEKKGKGKKRRGRRSKKKRRRGRKEGEEDQNPPCPRLSRELLAEKEPEVLQDSLDRWYSTPSVYLGLTDPCQPCRSAFYVLEQQRVGLAVDMDEIEKYQEVEEDQDPSCPRLSRELLAEKEPEVLQDSLDRCYSTPSGYLELPDLGQPYRSAVYSLEEQYLGLALDVDRIKKDQEEEEDQGPPCPRLSRELLEVVEPEVLQDSLDRCYSTPSSCLEQPDSCQPYRSSFYALEEKHVGFSLDVGEIEKKGKGKKRRGRRSKKKRRRGRKEGEEDQNPPCPRLNSVLMEVEEPEVLQDSLDRCYSTPSMYFELPDSFQHYRSVFYSFEEQHITFALDMDNSFFTLTVTSLHLVFQMGVIFPQ

SEQ ID NO: 10520 - protein, 452 aa, Artificial Sequence
  Synthetic polypeptide
KELWTKNEGSQAVFSAMFLVTVENDNDDDEDVQVEVAEKVQKSSSPREMQKAEEKEVPEDSLEECAITCSNSHGPYDSNQPHRKTKITFEEDKVDSTLIGSSSHVEWEDAVHIIPENESDDEEEEEKGPVSPRNLQESEEEEVPQESWDEGYSTLSIPPERLASYQSYSSTFHSLEEQQVCMAVDIGRHRWDQVKKEDQEATGPRLSRELLAEKEPEVLQDSLDRCYSTPSVYLGLTDSCQPYRSAFYVLEQQRVGLAVDMDEIEKYQEVEEDQDPSCPRLSRELLAEKEPEVLQDSLDRCYSTPSGYLELPDLGQPYRSAVYSLEEQYLGLALDVDRIKKDQEEEEDQGPPCPRLSRELLEVVEPEVLQDSLDVIQLLPVVLNSLTPASPTEVPFMHWRKNMLAFLLTWEKLKRRGRGRKEGEEDQRRKEEGEEKKGKKIKTHHAPGSTAC

SEQ ID NO: 10521 - protein, 30 aa, Artificial Sequence; identical to SEQ ID NO: 10458
  Synthetic polypeptide

SEQ ID NO: 10522 - protein, 58 aa, Artificial Sequence; identical to SEQ ID NO: 10459
  Synthetic polypeptide

SEQ ID NO: 10523 - protein, 408 aa, Artificial Sequence
  Synthetic polypeptide
VLERMWRNRTLLHCWWDCKLVQRLWKAVWQFLRDLELEIPFDPAIPLLGVYPKDYKSCCCKDTCTHMFIVALFTIAKTWNQAKYPTMIDWIKKMWHIYTMEYYAAIKNDEFMSFVGAWMKLETIILSKLLQGQKTKYRMFLLTGHRWDQVKKEDQEATGPRLSRELLAEKEPEVLQDSLDRCYSTPSVYLGLTDSCQPYRSAFYVLEQQRVGLAVDMDEIEKYQEVEEDQDPSCPRLSRELLAEKEPEVLQDSLDRCYSTPSGYLELPDLGQPYRSAVYSLEEQYLGLALDVDRIKKDQEEEEDQGPPCPRLSRELLEVVEPEVLQDSLDVIQLLPVVLNSLTPASPTEVPFMHWRKNMLAFLLTWEKLKRRGRGRKEGEEDQRRKEEGEEKKGKKIKTHHAPGSTAC

SEQ ID NO: 10524 - protein, 2568 aa, Artificial Sequence
  Synthetic polypeptide
VLERMWRNRTLLHCWWDCKLVQRLWKAVWQFLRDLELEIPFDPAIPLLGVYPKDYKSCCCKDTCTHMFIVALFTIAKTWNQAKYPTMIDWIKKMWHIYTMEYYAAIKNDEFMSFVGAWMKLETIILSKLLQGQKTKYRMFLLTGHRWDQVKKEDQEATGPRLSRELLAEKEPEVLQDSLDRCYSTPSVYLGLTDSCQPYRSAFYVLEQQRVGLAVDMDEIEKYQEVEEDQDPSCPRLSRELLAEKEPEVLQDSLDRWYSTPSGYLELPDLGQPYRSAVYSLEEQYLGLALDVDRIKKDQEEEEDQGPPCPRLSRELLEVVEPEVLQDSLDRCYSTPSSCLEQPDSCQPYRSSFYALEEKHVGFSLDVGEIEKKGKGKKRRGRRSKKKRRRGRKEGEEDQNPPCPRLSRELLAEKEPEVLQDSLDRWYSTPSVYLGLTDPCQPYRSAFYVLEQQRVGLAVDMDEIEKYQEVEEDQDPSCPRLSRELLAEKEPEVLQDSLDRWYSTPSGYLELPDLGQPYRSAVYSLEEQYLGLALDVDRIKKDQEEEEDQGPPCPRLSRELLEVVEPEVLQDSLDRCYSTPSSCLEQPDSCQPYRSSFYALEEKHVGFSLDVGEIEKKGKGKKRRGRRSKKKRRRGRKEGEEDQNPPCPRLSRELLAEKEPEVLQDSLDRWYSTPSVYLGLTDPCQPYRSAFYVLEQQRVGLAVDMDEIEKYQEVEEDQDPSCPRLSRELLAEKEPEVLQDSLDRWYSTPSGYLELPDLGQPYRSAVYSLEEQYLGLALDVDRIKKDQEEEEDQGPPCPRLSRELLEVVEPEVLQDSLDRCYSTPSSCLEQPDSCQPYRSSFYALEEKHVGFSLDVGEIEKKGKGKKRRGRRSKKKRRRGRKEGEEDQNPPCPRLSRELLAEKEPEVLQDSLDRWYSTPSVYLGLTDPCQPYRSAFYVLEQQRVGLAVDMDEIEKYQEVEEDQDPSCPRLSRELLAEKEPEVLQDSLDRWYSTPSGYLELPDLGQPYRSAVYSLEEQYLGLALDVDRIKKDQEEEEDQGPPCPRLSRELLEVVEPEVLQDSLDRCYSTPSSCLEQPDSCQPYRSSFYALEEKHVGFSLDVGEIEKKGKGKKRRGRRSKKKRRRGRKEGEEDQNPPCPRLSRELLAEKEPEVLQDSLDRWYSTPSVYLGLTDPCQPYRSAFYVLEQQRVGLAVDMDEIEKYQEVEEDQDPSCPRLSRELLAEKEPEVLQDSLDRWYSTPSGYLELPDLGQPYRSAVYSLEEQYLGLALDVDKIEKYQEVEEDQDPSCPRLSRELLAEKEPEVLQDSLDRWYSTPSVYLGLTDPCQPYRSAFYVLEQQRVGLAVDMDEIEKYQEVEEDQDPSCPRLSRELLAEKEPEVLQDSLDRCYSTPSGYLELPDLGQPYRSAVYSLEEQYLGLALDVDRIKKDQEEEEDQGPPCPRLSRELLEVVEPEVLQDSLDRCYSTPSSCLEQPDSCQPYRSSFYALEEKHVGFSLDVGEIEKYQEVEEDQDPSCPRLSRELLAEKEPEVLQDSLDRWYSTPSVYLGLTDPCQPYRSAFYVLEQQRVGLAVDMDEIEKYQEVEEDQDPSCPRLSRELLAEKEPEVLQDSLDRCYSTPSGYLELPDLGQPYRSAVYSLEEQYLGLALDVDRIKKDQEEEEDQGPPCPRLSRELLEVVEPEVLQDSLDRCYSTPSSCLEQPDSCQPYRSSFYALEEKHVGFSLDVGEIEKKGKGKKRRGRRSKKKRRRGRKEGEEDQNPPCPRLSRELLAEKEPEVLQDSLDRWYSTPSVYLGLTDPCQPYRSAFYVLEQQRVGLAVDMDEIEKYQEVEEDQDPSCPRLSRELLAEKEPEVLQDSLDRWYSTPSGYLELPDLGQPYRSAVYSLEEQYLGLALDVDRIKKDQEEEEDQGPPCPRLSRELLEVVEPEVLQDSLDRCYSTPSSCLEQPDSCQPYRSSFYALEEKHVGFSLDVGEIEKKGKGKKRRGRRSKKKRRRGRKEGEEDQNPPCPRLSRELLAEKEPEVLQDSLDRWYSTPSVYLGLTDPCQPYRSAFYVLEQQRVGLAVDMDEIEKYQEVEEDQDPSCPRLSRELLAEKEPEVLQDSLDRCYSTPSGYLELPDLGQPYRSAVYSLEEQYLGLALDVDRIKKDQEEEEDQGPPCPRLSRELLEVVEPEVLQDSLDRCYSTPSSCLEQPDSCQPYRSSFYALEEKHVGFSLDVGEIEKKGKGKKRRGRRSKKKRRRGRKEGEEDQNPPCPRLSRELLAEKEPEVLQDSLDRWYSTPSVYLGLTDPCQPCRSAFYVLEQQRVGLAVDMDEIEKYQEVEEDQDPSCPRLSRELLAEKEPEVLQDSLDRCYSTPSGYLELPDLGQPYRSAVYSLEEQYLGLALDVDRIKKDQEEEEDQGPPCPRLSRELLEVVEPEVLQDSLDRCYSTPSSCLEQPDSCQPYRSSFYALEEKHVGFSLDVGEIEKKGKGKKRRGRRSKKKRRRGRKEGEEDQNPPCPRLNSVLMEVEEPEVLQDSLDRCYSTPSMYFELPDSFQHYRSVFYSFEEQHITFALDMDNSFFTLTVTSLHLVFQMGVIFPQ

SEQ ID NO: 10525 - protein, 169 aa, Artificial Sequence; identical to SEQ ID NO: 10469
  Synthetic polypeptide

SEQ ID NO: 10526 - protein, 30 aa, Artificial Sequence; identical to SEQ ID NO: 10458
  Synthetic polypeptide

SEQ ID NO: 10527 - protein, 58 aa, Artificial Sequence; identical to SEQ ID NO: 10459
  Synthetic polypeptide

SEQ ID NO: 10528 - protein, 409 aa, Artificial Sequence; identical to SEQ ID NO: 10504
  Synthetic polypeptide

SEQ ID NO: 10529 - protein, 30 aa, Artificial Sequence; identical to SEQ ID NO: 10458
  Synthetic polypeptide

SEQ ID NO: 10530 - protein, 58 aa, Artificial Sequence; identical to SEQ ID NO: 10459
  Synthetic polypeptide

SEQ ID NO: 10531 - protein, 4135 aa, Artificial Sequence
  Synthetic polypeptide
QFLRDLELEIPFDPAIPLLGVYPNDYKSCCCKDTCTHMFIVALFTIAKTWNQAKYPAMIDWIKKMWHIYTMEYYAAIKNDEFMSFVGAWMKLETIILSKLLQGQKTKYRMFLLTGHRWDQVKKEDQEATGPRLSRELLDEKGPEVLQDSLDRCYSTPSGCLELTDSCQPYRSAFYVLEQQRIGLAVDMDEIEKYQEVEEDQDPSCPRLSRELLDEKEPEVLQDSLDRCYSTPSGYLELPDLGQPYSSAVYSLEEQYLGLALDVDRTKKDQEEEEDQGPPCPRLSRELLEVVEPEVLQDSLDRCYSTPSSCLEQPDSCQPYGSSFYALEEKHVGFSLDVGEIEKKGKGKKRRGRRSKKERRRGRKEGEEDQNPPCPRLSRELLDEKGPEVLQDSLDRSYSTPSGCLELTDSCQPYRSAFYVLEQQRVGLAVDMDEIEKYQEVEEDQDPSCPRLSRELLDEKEPEVLQDSLDRCYSTPSGYLELPDLGQPYSSAVYSLEEQYLGLALDVDRTKKDQEEEEDQGPPCPRLSRELLEVVEPEVLQDSLDRCYSTPSSCLEQPDSCQPYGSSFYALEEKHVGFSLDVGEIEKKGKGKKRRGRRSKKERRRGRKEGEEDQNPPCPRLSRELLDEKGPEVLQDSLDRCYSTPSGCLELTDSCQPYRSAFYVLEQQRVGLAVDMDEIEKYQEVEEDQDPSCPRLSRELLDEKEPEVLQDSLDRCYSTPSGYLELPDLGQPYSSAVYSLEEQYLGLALDVDRTKKDQEEEEDQGPPCPRLSRELLEVVEPEVLQDSLDRCYSTPSSCLEQPDSCQPYGSSFYALEEKHVGFSLDVGEIEKKGKGKKRRGRRSKKERRRGRKEGEEDQNPPCPRLSRELLDEKGPEVLQDSLDRSYSTPSGCLELTDSCQPYRSAFYVLEQQRVGLAVDMDEIEKYQEVEEDQDPSCPRLSRELLDEKEPEVLQDSLDRCYSTPSGYLELPDLGQPYSSAVYSLEEQYLGLALDVDRTKKDQEEEEDQGPPCPRLSRELLEVVEPEVLQDSLDRCYSTPSSCLEQPDSCQPYGSSFYALEEKHVGFSLDVGEIEKKGKGKKRRGRRSKKERRRGRKEGEEDQNPPCPRLSRELLDEKGPEVLQDSLDRCYSTPSGCLELTDSCQPYRSAFYVLEQQRVGLAVDMDEIEKYQEVEEDQDPSCPRLSRELLDEKEPEVLQDSLDRCYSTPSGYLELPDLGQPYSSAVYSLEEQYLGLALDVDRTKKDQEEEEDQGPPCPRLSRELLEVVEPEVLQDSLDRCYSTPSSCLEQPDSCQPYGSSFYALEEKHVGFSLDVGEIEKKGKGKKRRGRRSKKERRRGRKEGEEDQNPPCPRLSRELLDEKGPEVLQDSLDRSYSTPSGCLELTDSCQPYRSAFYVLEQQRVGLAVDMDEIEKYQEVEEDQDPSCPRLSRELLDEKEPEVLQDSLDRCYSTPSGYLELPDLGQPYSSAVYSLEEQYLGLALDVDRTKKDQEEEEDQGPPCPRLSRELLEVVEPEVLQDSLDRCYSTPSSCLEQPDSCQPYGSSFYALEEKHVGFSLDVGEIEKKGKGKKRRGRRSKKERRRGRKEGEEDQNPPCPRLSRELLDEKGPEVLQDSLDRSYSTPSGCLELTDSCQPYRSAFYVLEQQRVGLAVDMDEIEKYQEVEEDQDPSCPRLSRELLDEKEPEVLQDSLDRCYSTPSGYLELPDLGQPYSSAVYSLEEQYLGLALDVDRTKKDQEEEEDQGPPCPRLSRELLEVVEPEVLQDSLDRCYSTPSSCLEQPDSCQPYGSSFYALEEKHVGFSLDVGEIEKKGKGKKRRGRRSKKERRRGRKEGEEDQNPPCPRLSRELLDEKGPEVLQDSLDRSYSTPSGCLELTDSCQPYRSAFYVLEQQRVGLAVDMDEIEKYQEVEEDQDPSCPRLSRELLDEKEPEVLQDSLDRCYSTPSGYLELPDLGQPYSSAVYSLEEQYLGLALDVDRTKKDQEEEEDQGPPCPRLSRELLEVVEPEVLQDSLDRCYSTPSSCLEQPDSCQPYGSSFYALEEKHVGFSLDVGEIEKKGKGKKRRGRRSKKERRRGRKEGEEDQNPPCPRLSRELLDEKGPEVLQDSLDRSYSTPSGCLELTDSCQPYRSAFYVLEQQRVGLAVDMDEIEKYQEVEEDQDPSCPRLSRELLDEKEPEVLQDSLDRCYSTPSGYLELPDLGQPYSSAVYSLEEQYLGLALDVDRTKKDQEEEEDQGPPCPRLSRELLEVVEPEVLQDSLDRCYSTPSSCLEQPDSCQPYGSSFYALEEKHVGFSLDVGEIEKKGKGKKRRGRRSKKERRRGRKEGEEDQNPPCPRLSRELLDEKEPEVLQDSLDRCYSTPSGYLELPDLGQPYSSAVYSLEEQYLGLALDVDRTKKDQEEEEDQGPPCPRLSRELLEVVEPEVLQDSLDRCYSTPSSCLEQPDSCQPYGSSFYALEEKHVGFSLDVGEIEKKGKGKKRRGRRSKKERRRGRKEGEEDQNPPCPRLSRELLDEKEPEVLQDSLDRCYSTPSGYLELPDLGQPYSSAVYSLEEQYLGLALDVDRTKKDQEEEEDQGPPCPRLSRELLEVVEPEVLQDSLDRCYSTPSSCLEQPDSCQPYGSSFYALEEKHVGFSLDVGEIEKKGKGKKRRGRRSKKERRRGRKEGEEDQNPPCPRLSRELLDEKEPEVLQDSLDRCYSTPSGYLELPDLGQPYSSAVYSLEEQYLGLALDVDRTKKDQEEEEDQGPPCPRLSRELLEVVEPEVLQDSLDRCYSTPSSCLEQPDSCQPYGSSFYALEEKHVGFSLDVGEIEKKGKGKKRRGRRSKKERRRGRKEGEEDQNPPCPRLSRELLDEKGPEVLQDSLDRCYSTPSGCLELTDSCQPYRSAFYVLEQQRVGLAVDMDEIEKYQEVEEDQDPSCPRLSRELLDEKEPEVLQDSLDRCYSTPSGYLELPDLGQPYSSAVYSLEEQYLGLALDVDRTKKDQEEEEDQGPPCPRLSRELLEVVEPEVLQDSLDRCYSTPSSCLEQPDSCQPYGSSFYALEEKHVGFSLDVGEIEKKGKGKKRRGRRSKKERRRGRKEGEEDQNPPCPRLSRELLDEKGPEVLQDSLDRCYSTPSGCLELTDSCQPYRSAFYVLEQQRVGLAVDMDEIEKYQEVEEDQDPSCPRLSRELLDEKEPEVLQDSLDRCYSTPSGYLELPDLGQPYSSAVYSLEEQYLGLALDVDRTKKDQEEEEDQGPPCPRLSRELLEVVEPEVLQDSLDRCYSTPSSCLEQPDSCQPYGSSFYALEEKHVGFSLDVGEIEKKGKGKKRRGRRSKKERRRGRKEGEEDQNPPCPRLSRELLDEKGPEVLQDSLDRCYSTPSGCLELTDSCQPYRSAFYVLEQQRVGLAVDMDEIEKYQEVEEDQDPSCPRLSRELLDEKEPEVLQDSLDRCYSTPSGYLELPDLGQPYSSAVYSLEEQYLGLALDVDRTKKDQEEEEDQGPPCPRLSRELLEVVEPEVLQDSLDRCYSTPSSCLEQPDSCQPYGSSFYALEEKHVGFSLDVGEIEKKGKGKKRRGRRSKKERRRGRKEGEEDQTPPCPRLSRELLDEKGPEVLQDSLDRCYSTPSGCLELTDSCQPYRSAFYVLEQQRVGLAVDMDEIEKYQEVEEDQDPSCPRLSRELLDEKEPEVLQDSLDRCYSTPSGYLELPDLGQPYSSAVYSLEEQYLGLALDVDRTKKDQEEEEDQGPPCPRLSRELLEVVEPEVLQDSLDRCYSTPSSCLEQPDSCQPYGSSFYALEEKHVGFSLDVGEIEKKGKGKKRRGRRSKKERRRGRKEGEEDQNPPCPRLSRELLDEKGPEVLQDSLDRCYSTPSGCLELTDSCQPYRSAFYVLEQQRVGLAVDMDEIEKYQEVEEDQDPSCPRLSRELLDEKEPEVLQDSLDRCYSTPSGYLELPDLGQPYSSAVYSLEEQYLGLALDVDRTKKDQEEEEDQGPPCPRLSRELLEVVEPEVLQDSLDRCYSTPSSCLEQPDSCQPYGSSFYALEEKHVGFSLDVGEIEKKGKGKKRRGRRSKKKRRRGRKEGEEDQNPPCPRLNGVLMEVEEPEVLQDSLDGCYSTPSMYFELPDSFQHYRSVFYSFEEQHISFALYVDNRFFTLTVTSLHLVFQMGVIFPQ

SEQ ID NO: 10532 - protein, 355 aa, Artificial Sequence
  Synthetic polypeptide
QFLRDLELEIPFDPAIPLLGVYPNDYKSCCCKDTCTHMFIVALFTIAKTWNQAKYPAMIDWIKKMWHIYTMEYYAAIKNDEFMSFVGAWMKLETIILSKLLQGQKTKYRMFLLTGHRWDQVKKEDQEATGPRLSRELLDEKGPEVLQDSLDRCYSTPSGCLELTDSCQPYRSAFYVLEQQRVGLAVDMDEIEKYQEVEEDQDPSCPRLSRELLDEKEPEVLQDSLDRCYSTPSGYLELPDLGQPYSSAVYSLEEQYLGLALDVDRTKKDQEEEEDQGPPCPRLSRELLEVVEPEVLQDSLDRCYSTPSSCLEQPDSCQPYGSSFYALEEKHVGFSLDVGEIEKKGKGKKRRGRRS

SEQ ID NO: 10533 - protein, 354 aa, Artificial Sequence; identical to SEQ ID NO: 10460
  Synthetic polypeptide

SEQ ID NO: 10534 - protein, 30 aa, Artificial Sequence; identical to SEQ ID NO: 10458
  Synthetic polypeptide

SEQ ID NO: 10535 - protein, 58 aa, Artificial Sequence; identical to SEQ ID NO: 10459
  Synthetic polypeptide

SEQ ID NO: 10536 - protein, 461 aa, Artificial Sequence
  Synthetic polypeptide
LWKAVWQFLRDLELEILFDPAIPLLGVYPNDYKSCCCKDTCTHMFIVALFTIAKTWNQAKYPAMIDWIKKMWHIYTMEYYAAIKNDEFMSFVGAWMKLETIILSKLLQGQKTKYRMFLLTGHRWDQVKKEDQEATGPRLSRELLDEKEPEVLQDSLDRCYSTPSGCLELTDSCQPYRSAFYVLEQQRVGLAIDMDEIEKYQEVEEDQDPSCPRLSRELLDEKEPEVLQDSLDRCYSTPSDYLELPDLGQPYSSAVYSLEEQYLGLALDVDRIKKDQEEEEDQGPPCPRLSRELLEVVEPEVLQDSLDRCYSTPSSCLEQPDSCQPYGSSFYALEEKHVGFSLDVGEIEKKGKGKKRRGRRSKKKRRRGRKEGEDDNPPCPRLYGVLMEVEEPEVLQDSLDRCYSTPSMYFEQPDSFQHYRSVFYSFEEEHISFALYVDNRFFTLTVTSLHLVFQMGVIFPQ

SEQ ID NO: 10537 - protein, 30 aa, Artificial Sequence; identical to SEQ ID NO: 10458
  Synthetic polypeptide

SEQ ID NO: 10538 - protein, 58 aa, Artificial Sequence; identical to SEQ ID NO: 10459
  Synthetic polypeptide

SEQ ID NO: 10539 - protein, 461 aa, Artificial Sequence
  Synthetic polypeptide
LWKAVWQFLRDLELEILFDPAIPLLGVYPNDYKSCCCKDTCTHMFIVALFTIAKTWNQAKYPAMIDWIKKMWHIYTMEYYAAIKNDEFMSFVGAWMKLETIILSKLLQGQKTKYRMFLLTGHRWDQVKKEDQEATGPRLSRELLDEKEPEVLQDSLDRCYSTPSGCLELTDSCQPYRSAFYVLEQQRVGLAIDMDEIEKYQEVEEDQDPSCPRLSRELLDEKEPEVLQDSLDRCYSTPSDYLELPDLGQPYSSAVYSLEEQYLGLALDVDRIKKDQEEEEDQGPPCPRLSRELLEVVEPEVLQDSLDRYYSTPSSCLEQPDSCQPYGSSFYALEEKHVGFSLDVGEIEKKGKGKKRRGRRSKKKRRRGRKEGEDDNPPCPRLNGVLMEVEEPEVLQDSLDRCYSTQSMYFELPDSFQHYRSVFYSFEEEHISFALYVDNRFFTLTVTSLHLVFQMGVIFPQ

SEQ ID NO: 10540 - protein, 30 aa, Artificial Sequence; identical to SEQ ID NO: 10458
  Synthetic polypeptide

SEQ ID NO: 10541 - protein, 58 aa, Artificial Sequence; identical to SEQ ID NO: 10459
  Synthetic polypeptide

SEQ ID NO: 10542 - protein, 461 aa, Artificial Sequence; identical to SEQ ID NO: 10539
  Synthetic polypeptide

SEQ ID NO: 10543 - protein, 21 aa, Artificial Sequence
  Synthetic polypeptide
SFLCFLCLAQCPAHTRSTLDV

SEQ ID NO: 10544 - protein, 326 aa, Artificial Sequence
  Synthetic polypeptide
HSVQHILGQHWTYEGPHGQDHWPASYPECGNNAQSPIDIQTDSVTFDPDLPALQPHGYDQPGTEPLDLHNNGHTVQLSLPSTLYLGGLPRKYVAAQLHLHWGQKGSPGGSEHQINSEATFAELHIVHYDSDSYDSLSEAAERPQGLAVLGILIEVGETKNIAYEHILSHLHEVRHKDQKTSVPPFNLRELLPKQLGQYFRYNGSLTTPPCYQSVLWTVFYRRSQISMEQLEKLQGTLFSTEEEPSKLLVQNYRALQPLNQRMVFASFIQAGSSYTTGEMLSLGVGILVGCLCLLLAVYFIARKIRKKRLENRKSVVFTSAQATTEA

SEQ ID NO: 10545 - protein, 31 aa, Artificial Sequence
  Synthetic polypeptide
HSVQHILGQHWTYEAPPFWISSCLEFHIYGS

SEQ ID NO: 10546 - protein, 42 aa, Artificial Sequence
  Synthetic polypeptide
GWLTMTHQLLWEYILPRRNRKNFGDKQGGKHRRNYKKKSGWA

SEQ ID NO: 10547 - protein, 2 aa, Artificial Sequence
  Synthetic polypeptide
AG

SEQ ID NO: 10548 - protein, 257 aa, Artificial Sequence
  Synthetic polypeptide
MVDNDTPVTLGVYLTKKEQKKLRRQTRREAQKELQEKVRLGLMPPPEPKVRISNLMRVLGTEAVQDPTKVEAHVRAQMAKRQKAHEEANAARKLTAEQRKVKKIKKLKEDISQGVHISVYRVRNLSNPAKKFKIEANAGQLYLTGVVVLHKDVNVVVVEGGPKAQKKFKRLMLHRIKWDEQTSNTKGDDDEESDEEAVKKTNKCVLVWEGTAKDRSFGEMKFKQCPTENMAREHFKKHGAEHYWDLALSESVLESTD

SEQ ID NO: 10549 - protein, 38 aa, Artificial Sequence
  Synthetic polypeptide
EVRSPSARQLPRLRSEEPLRPAATRSGNYTPRLPASRF

SEQ ID NO: 10550 - protein, 226 aa, Artificial Sequence
  Synthetic polypeptide
EVRSLSARQPPDLGITPPDYQPPGFKDGDCEGVIFEGEPMYLNVGEVSTPFHIFKVKVTTERERMENIDSTILSPKQIKTPFQKILRDKDVEDEQEHYTSDDLDIETKMEEQEKNPASSELEEPSLVCEEDEIMRSKESPDLSISHSQVEQLVNKTSELDMSESKTRSGKVFQNKMANGNQPVKSSKENRKRSQHESGRIVLHHFDSSSQESVPKRRKFSEPKEHI

SEQ ID NO: 10551 - protein, 39 aa, Artificial Sequence
  Synthetic polypeptide
GASPPGSHPIWELHPQITSLPVLRMVIVKELYLKGNLCI

SEQ ID NO: 10552 - protein, 93 aa, Artificial Sequence
  Synthetic polypeptide
EVRSLSARQPPDLGITPPDYQPPGFKDGDCEGVIFEGEPMYLNVGEVSTPFHIFKVKVTTERERMENIDSTILSPKQIKTPFQKILRDKDVED

SEQ ID NO: 10553 - protein, 74 aa, Artificial Sequence
  Synthetic polypeptide
EVRSLSARQPPDLGITPPDYQPPGFKDGDCEGVIFEGEPMYLNVGEVSTPFHIFKVKVTTERERMENIDSTILS

SEQ ID NO: 10554 - protein, 4 aa, Artificial Sequence
  Synthetic polypeptide
LAGF

SEQ ID NO: 10555 - protein, 780 aa, Artificial Sequence
  Synthetic polypeptide
EKTERIYTTFLGNSIMGDLRFLLFLIFQIFEMNMYDWLDFDDDGEGNSKFLRCDDDQMSNDKERFARSDDEQSSADKERLARENHSEIERRRRNKMTAYITELSDMVPTCSALARKPDKLTILRMAVSHMKSLRGTGNTSTDGSYKPSFLTDQELKHLILEAADGFLFIVSCETGRVVYVSDSVTPVLNQPQSEWFGSTLYDQVHPDDVDKLREQLSTSENALTGRILDLKTGTVKKEGQQSSMRMCMGSRRSFICRMRCGSSSVDPVSVNRLSFVRNRCRNGLGSVKDGEPHFVVVHCTGYIKAWPPAGVSLPDDDPEAGQGSKFCLVAIGRLQVTSSPNCTDMSNVCQPTEFISRHNIEGIFTFVDHRCVATVGYQPQELLGKNIVEFCHPEDQQLLRDSFQQVVKLKGQVLSVMFRFRSKNQEWLWMRTSSFTFQNPYSDEIEYIICTNTNVKNSSQEPRPTLSNTIQRPQLGPTANLPLEMGSGQLAPRQQQQQTELDMVPGRDGLASYNHSQVVQPVTTTGPEHSKPLEKSDGLFAQDRDPRFSEIYHNINADQSKGISSSTVPATQQLFSQGNTFPPTPRPAENFRNSGLAPPVTIVQPSASAGQMLAQISRHSNPTQGATPTWTPTTRSGFSAQQVATQATAKTRTSQFGVGSFQTPSSFSSMSLPGAPTASPGAAAYPSLTNRGSNFAPETGQTAGQFQTRTAEGVGVWPQWQGQQPHHRSSSSEQHVQQPPAQQPGQPEVFQEMLSMLGDQSNSYNNEEFPDLTMFPPFSE

SEQ ID NO: 10556 - protein, 18 aa, Artificial Sequence
  Synthetic polypeptide
TCMIGWILMMMEKGTVNF

SEQ ID NO: 10557 - protein, 407 aa, Artificial Sequence
  Synthetic polypeptide
EKTERIYTTFLGNSIMGDLRFLLFLIFQIFEMNMYDWLDFDDDGEGNSKFLRCDDDQMSNDKERFARSDDEQSSADKERLARENHSEIERRRRNKMTAYITELSDMVPTCSALARKPDKLTILRMAVSHMKSLRGTGNTSTDGSYKPSFLTDQELKHLILEAADGFLFIVSCETGRVVYVSDSVTPVLNQPQSEWFGSTLYDQVHPDDVDKLREQLSTSENALTGRILDLKTGTVKKEGQQSSMRMCMGSRRSFICRMRCGSSSVDPVSVNRLSFVRNRCRNGLGSVKDGEPHFVVVHCTGYIKAWPPAGVSLPDDDPEAGQGSKFCLVAIGRLQVTSSPNCTDMSNVCQPTEFISRHNIEGIFTFVDHRCVATVGYQPQELLGKNIVEFCHPEDQQLLRDSFQQEL

SEQ ID NO: 10558 - protein, 778 aa, Artificial Sequence
  Synthetic polypeptide
EKTERIYTTFLGNSIMGDLRFLLFLIFQIFEMNMYDWLDFDDDGEGNSKFLRCDDDQMSNDKERFARSDDEQSSADKERLARENHSEIERRRRNKMTAYITELSDMVPTCSALARKPDKLTILRMAVSHMKSLRGTGNTSTDGSYKPSFLTDQELKHLILEAADGFLFIVSCETGRVVYVSDSVTPVLNQPQSEWFGSTLYDQVHPDDVDKLREQLSTSENALTGRILDLKTGTVKKEGQQSSMRMCMGSRRSFICRMRCGSSSVDPVSVNRLSFVRNRCRNGLGSVKDGEPHFVVVHCTGYIKAWPPAGVSLPDDDPEAGQGSKFCLVAIGRLQVTSSPNCTDMSNVCQPTEFISRHNIEGIFTFVDHRCVATVGYQPQELLGKNIVEFCHPEDQQLLRDSFQQVVKLKGQVLSVMFRFRSKNQEWLWMRTSSFTFQNPYSDEIEYIICTNTNVKNSSQEPRPTLSNTIQRPQLGPTANLPLEMGSGQLAPRQQQQQTELDMVPGRDGLASYNHSQVVQPVTTTGPEHSKPLEKSDGLFAQDRDPRFSEIYHNINADQSKGISSSTVPATQQLFSQGNTFPPTPRPAENFSGLAPPVTIVQPSASAGQMLAQISRHSNPTQGATPTWTPTTRSGFSAQQVATQATAKTRTSQFGVGSFQTPSSFSSMSLPGAPTASPGAAAYPSLTNRGSNFAPETGQTAGQFQTRTAEGVGVWPQWQGQQPHHRSSSSEQHVQQPPAQQPGQPEVFQEMLSMLGDQSNSYNNEEFPDLTMFPPFSE

SEQ ID NO: 10559 - protein, 775 aa, Artificial Sequence
  Synthetic polypeptide
EKTERIYTTFLGNSIMGDLRFLLFLIFQIFEMNMYDWLDFDDDGEGNSKFLRCDDDQMSNDKERFARSDDEQSSADKERLARENHSEIERRRRNKMTAYITELSDMVPTCSALARKPDKLTILRMAVSHMKSLRGTGNTSTDGSYKPSFLTDQELKHLILEAADGFLFIVSCETGRVVYVSDSVTPVLNQPQSEWFGSTLYDQVHPDDVDKLREQLSTSENALTGRILDLKTGTVKKEGQQSSMRMCMGSRRSFICRMRCGSSSVDPVSVNRLSFVRNRCRNGLGSVKDGEPHFVVVHCTGYIKAWPPADDDPEAGQGSKFCLVAIGRLQVTSSPNCTDMSNVCQPTEFISRHNIEGIFTFVDHRCVATVGYQPQELLGKNIVEFCHPEDQQLLRDSFQQVVKLKGQVLSVMFRFRSKNQEWLWMRTSSFTFQNPYSDEIEYIICTNTNVKNSSQEPRPTLSNTIQRPQLGPTANLPLEMGSGQLAPRQQQQQTELDMVPGRDGLASYNHSQVVQPVTTTGPEHSKPLEKSDGLFAQDRDPRFSEIYHNINADQSKGISSSTVPATQQLFSQGNTFPPTPRPAENFRNSGLAPPVTIVQPSASAGQMLAQISRHSNPTQGATPTWTPTTRSGFSAQQVATQATAKTRTSQFGVGSFQTPSSFSSMSLPGAPTASPGAAAYPSLTNRGSNFAPETGQTAGQFQTRTAEGVGVWPQWQGQQPHHRSSSSEQHVQQPPAQQPGQPEVFQEMLSMLGDQSNSYNNEEFPDLTMFPPFSE

SEQ ID NO: 10560 - protein, 765 aa, Artificial Sequence
  Synthetic polypeptide
EKTERIYTTFLGNSIMGDLRFLLFLIFQIFEMNMYDWLDFDDDGEGNSKFLRCDDDQMSNDKERFARENHSEIERRRRNKMTAYITELSDMVPTCSALARKPDKLTILRMAVSHMKSLRGTGNTSTDGSYKPSFLTDQELKHLILEAADGFLFIVSCETGRVVYVSDSVTPVLNQPQSEWFGSTLYDQVHPDDVDKLREQLSTSENALTGRILDLKTGTVKKEGQQSSMRMCMGSRRSFICRMRCGSSSVDPVSVNRLSFVRNRCRNGLGSVKDGEPHFVVVHCTGYIKAWPPAGVSLPDDDPEAGQGSKFCLVAIGRLQVTSSPNCTDMSNVCQPTEFISRHNIEGIFTFVDHRCVATVGYQPQELLGKNIVEFCHPEDQQLLRDSFQQVVKLKGQVLSVMFRFRSKNQEWLWMRTSSFTFQNPYSDEIEYIICTNTNVKNSSQEPRPTLSNTIQRPQLGPTANLPLEMGSGQLAPRQQQQQTELDMVPGRDGLASYNHSQVVQPVTTTGPEHSKPLEKSDGLFAQDRDPRFSEIYHNINADQSKGISSSTVPATQQLFSQGNTFPPTPRPAENFRNSGLAPPVTIVQPSASAGQMLAQISRHSNPTQGATPTWTPTTRSGFSAQQVATQATAKTRTSQFGVGSFQTPSSFSSMSLPGAPTASPGAAAYPSLTNRGSNFAPETGQTAGQFQTRTAEGVGVWPQWQGQQPHHRSSSSEQHVQQPPAQQPGQPEVFQEMLSMLGDQSNSYNNEEFPDLTMFPPFSE

SEQ ID NO: 10561 - protein, 6 aa, Artificial Sequence
  Synthetic polypeptide
NEHAGF

SEQ ID NO: 10562 - protein, 777 aa, Artificial Sequence
  Synthetic polypeptide
EKTERIYTTFLGNSIMGDLRFLLFLIFQIFEMNMLDFDDDGEGNSKFLRCDDDQMSNDKERFARSDDEQSSADKERLARENHSEIERRRRNKMTAYITELSDMVPTCSALARKPDKLTILRMAVSHMKSLRGTGNTSTDGSYKPSFLTDQELKHLILEAADGFLFIVSCETGRVVYVSDSVTPVLNQPQSEWFGSTLYDQVHPDDVDKLREQLSTSENALTGRILDLKTGTVKKEGQQSSMRMCMGSRRSFICRMRCGSSSVDPVSVNRLSFVRNRCRNGLGSVKDGEPHFVVVHCTGYIKAWPPAGVSLPDDDPEAGQGSKFCLVAIGRLQVTSSPNCTDMSNVCQPTEFISRHNIEGIFTFVDHRCVATVGYQPQELLGKNIVEFCHPEDQQLLRDSFQQVVKLKGQVLSVMFRFRSKNQEWLWMRTSSFTFQNPYSDEIEYIICTNTNVKNSSQEPRPTLSNTIQRPQLGPTANLPLEMGSGQLAPRQQQQQTELDMVPGRDGLASYNHSQVVQPVTTTGPEHSKPLEKSDGLFAQDRDPRFSEIYHNINADQSKGISSSTVPATQQLFSQGNTFPPTPRPAENFRNSGLAPPVTIVQPSASAGQMLAQISRHSNPTQGATPTWTPTTRSGFSAQQVATQATAKTRTSQFGVGSFQTPSSFSSMSLPGAPTASPGAAAYPSLTNRGSNFAPETGQTAGQFQTRTAEGVGVWPQWQGQQPHHRSSSSEQHVQQPPAQQPGQPEVFQEMLSMLGDQSNSYNNEEFPDLTMFPPFSE

SEQ ID NO: 10563 - protein, 15 aa, Artificial Sequence
  Synthetic polypeptide
TCWILMMMEKGTVNF

SEQ ID NO: 10564 - protein, 404 aa, Artificial Sequence
  Synthetic polypeptide
EKTERIYTTFLGNSIMGDLRFLLFLIFQIFEMNMLDFDDDGEGNSKFLRCDDDQMSNDKERFARSDDEQSSADKERLARENHSEIERRRRNKMTAYITELSDMVPTCSALARKPDKLTILRMAVSHMKSLRGTGNTSTDGSYKPSFLTDQELKHLILEAADGFLFIVSCETGRVVYVSDSVTPVLNQPQSEWFGSTLYDQVHPDDVDKLREQLSTSENALTGRILDLKTGTVKKEGQQSSMRMCMGSRRSFICRMRCGSSSVDPVSVNRLSFVRNRCRNGLGSVKDGEPHFVVVHCTGYIKAWPPAGVSLPDDDPEAGQGSKFCLVAIGRLQVTSSPNCTDMSNVCQPTEFISRHNIEGIFTFVDHRCVATVGYQPQELLGKNIVEFCHPEDQQLLRDSFQQEL

SEQ ID NO: 10565 - protein, 775 aa, Artificial Sequence
  Synthetic polypeptide
EKTERIYTTFLGNSIMGDLRFLLFLIFQIFEMNMLDFDDDGEGNSKFLRCDDDQMSNDKERFARSDDEQSSADKERLARENHSEIERRRRNKMTAYITELSDMVPTCSALARKPDKLTILRMAVSHMKSLRGTGNTSTDGSYKPSFLTDQELKHLILEAADGFLFIVSCETGRVVYVSDSVTPVLNQPQSEWFGSTLYDQVHPDDVDKLREQLSTSENALTGRILDLKTGTVKKEGQQSSMRMCMGSRRSFICRMRCGSSSVDPVSVNRLSFVRNRCRNGLGSVKDGEPHFVVVHCTGYIKAWPPAGVSLPDDDPEAGQGSKFCLVAIGRLQVTSSPNCTDMSNVCQPTEFISRHNIEGIFTFVDHRCVATVGYQPQELLGKNIVEFCHPEDQQLLRDSFQQVVKLKGQVLSVMFRFRSKNQEWLWMRTSSFTFQNPYSDEIEYIICTNTNVKNSSQEPRPTLSNTIQRPQLGPTANLPLEMGSGQLAPRQQQQQTELDMVPGRDGLASYNHSQVVQPVTTTGPEHSKPLEKSDGLFAQDRDPRFSEIYHNINADQSKGISSSTVPATQQLFSQGNTFPPTPRPAENFSGLAPPVTIVQPSASAGQMLAQISRHSNPTQGATPTWTPTTRSGFSAQQVATQATAKTRTSQFGVGSFQTPSSFSSMSLPGAPTASPGAAAYPSLTNRGSNFAPETGQTAGQFQTRTAEGVGVWPQWQGQQPHHRSSSSEQHVQQPPAQQPGQPEVFQEMLSMLGDQSNSYNNEEFPDLTMFPPFSE

SEQ ID NO: 10566 - protein, 772 aa, Artificial Sequence
  Synthetic polypeptide
EKTERIYTTFLGNSIMGDLRFLLFLIFQIFEMNMLDFDDDGEGNSKFLRCDDDQMSNDKERFARSDDEQSSADKERLARENHSEIERRRRNKMTAYITELSDMVPTCSALARKPDKLTILRMAVSHMKSLRGTGNTSTDGSYKPSFLTDQELKHLILEAADGFLFIVSCETGRVVYVSDSVTPVLNQPQSEWFGSTLYDQVHPDDVDKLREQLSTSENALTGRILDLKTGTVKKEGQQSSMRMCMGSRRSFICRMRCGSSSVDPVSVNRLSFVRNRCRNGLGSVKDGEPHFVVVHCTGYIKAWPPADDDPEAGQGSKFCLVAIGRLQVTSSPNCTDMSNVCQPTEFISRHNIEGIFTFVDHRCVATVGYQPQELLGKNIVEFCHPEDQQLLRDSFQQVVKLKGQVLSVMFRFRSKNQEWLWMRTSSFTFQNPYSDEIEYIICTNTNVKNSSQEPRPTLSNTIQRPQLGPTANLPLEMGSGQLAPRQQQQQTELDMVPGRDGLASYNHSQVVQPVTTTGPEHSKPLEKSDGLFAQDRDPRFSEIYHNINADQSKGISSSTVPATQQLFSQGNTFPPTPRPAENFRNSGLAPPVTIVQPSASAGQMLAQISRHSNPTQGATPTWTPTTRSGFSAQQVATQATAKTRTSQFGVGSFQTPSSFSSMSLPGAPTASPGAAAYPSLTNRGSNFAPETGQTAGQFQTRTAEGVGVWPQWQGQQPHHRSSSSEQHVQQPPAQQPGQPEVFQEMLSMLGDQSNSYNNEEFPDLTMFPPFSE

SEQ ID NO: 10567 - protein, 762 aa, Artificial Sequence
  Synthetic polypeptide
EKTERIYTTFLGNSIMGDLRFLLFLIFQIFEMNMLDFDDDGEGNSKFLRCDDDQMSNDKERFARENHSEIERRRRNKMTAYITELSDMVPTCSALARKPDKLTILRMAVSHMKSLRGTGNTSTDGSYKPSFLTDQELKHLILEAADGFLFIVSCETGRVVYVSDSVTPVLNQPQSEWFGSTLYDQVHPDDVDKLREQLSTSENALTGRILDLKTGTVKKEGQQSSMRMCMGSRRSFICRMRCGSSSVDPVSVNRLSFVRNRCRNGLGSVKDGEPHFVVVHCTGYIKAWPPAGVSLPDDDPEAGQGSKFCLVAIGRLQVTSSPNCTDMSNVCQPTEFISRHNIEGIFTFVDHRCVATVGYQPQELLGKNIVEFCHPEDQQLLRDSFQQVVKLKGQVLSVMFRFRSKNQEWLWMRTSSFTFQNPYSDEIEYIICTNTNVKNSSQEPRPTLSNTIQRPQLGPTANLPLEMGSGQLAPRQQQQQTELDMVPGRDGLASYNHSQVVQPVTTTGPEHSKPLEKSDGLFAQDRDPRFSEIYHNINADQSKGISSSTVPATQQLFSQGNTFPPTPRPAENFRNSGLAPPVTIVQPSASAGQMLAQISRHSNPTQGATPTWTPTTRSGFSAQQVATQATAKTRTSQFGVGSFQTPSSFSSMSLPGAPTASPGAAAYPSLTNRGSNFAPETGQTAGQFQTRTAEGVGVWPQWQGQQPHHRSSSSEQHVQQPPAQQPGQPEVFQEMLSMLGDQSNSYNNEEFPDLTMFPPFSE

SEQ ID NO: 10568 - protein, 342 aa, Artificial Sequence
  Synthetic polypeptide
GRAPWLTPEIPALWEAEESGDDEYQGDQSDTEDEVDSDFDIDEGDEPSSDGEAEEPRRKRRVVTKAYKEPLKSLRPRKVNTPAGSSQKAREEKALLPLELQDDGSDSRKSMRQSTAEHTRQTFLRVQERQGQSRRRKGPHCERPLTQEELLREAKITEELNLRSLETYERLEADKKKQVHKKRKCPGPIITYHSVTVPLVGEPGPKEENVDIEGLDPAPSVSALTPHAGTGPVNPPARCSRTFITFSDDATFEEWFPQGRPPKVPVREVCPVTHRPALYRDPVTDIPYATARAFKIIREAYKKYITAHGLPPTASALGPGPPPPEPLPGSGPRALRQKIVIK

SEQ ID NO: 10569 - protein, 61 aa, Artificial Sequence
  Synthetic polypeptide
AGRRGSRLKFQHFGRPRNPEMMSIKGTSQTQRTKWTLTLTLMKGMNHPVMEKQKSQEGSAE

SEQ ID NO: 10570 - protein, 12 aa, Artificial Sequence
  Synthetic polypeptide
NSSTLGGRGIRR

SEQ ID NO: 10571 - protein, 353 aa, Artificial Sequence
  Synthetic polypeptide
GRAPWLTPEIPALWEAEESGDDEYQGDQSDTEDEVDSDFDIDEGDEPSSDGEAEEPRRKRRVVTKAYKEPLKSLRPRKVNTPAGSSQKAREEKALLPLELQDDGSDSRKSMRQSTAEHTRQTFLRVQERQGQSRRRKGPHCERPLTQEELLREAKITEELNLRSLETYERLEADKKKQVHKKRKCPGPIITYHSVTVPLVGEPGPKEENVDIEGSLCFSLSFVLRLDPAPSVSALTPHAGTGPVNPPARCSRTFITFSDDATFEEWFPQGRPPKVPVREVCPVTHRPALYRDPVTDIPYATARAFKIIREAYKKYITAHGLPPTASALGPGPPPPEPLPGSGPRALRQKIVIK

SEQ ID NO: 10572 - protein, 335 aa, Artificial Sequence
  Synthetic polypeptide
SLHSGRPRQTDHLSDCEVLTTLTPDTGRILSKLHTVQPKGKITFCTGIRVAHLALKHRQGKNHKMRIIAFVGSPVEDNEKDLVKLAKRLKKEKVNVDIINFGEEEVNTEKLTAFVNTLNGKDGTGSHLVTVPPGPSLADALISSPILAGEGGAMLGLGASDFEFGVDPSADPELALALRVSMEEQRQRQEEEARRAAAASAAEAGIATTGTEDSDDALLKMTISQQEFGRTGLPDLSSMTEEEQIAYAMQMSLQGAEFGQAESADIDASSAMDTSEPAKEEDDYDVMQDPEFLQSVLENLPGVDPNNEAIRNAMGSLASQATKDGKKDKKEEDKK

SEQ ID NO: 10573 - protein, 338 aa, Artificial Sequence
  Synthetic polypeptide
SLHSGRPRQTDHLSDCEVLTTLTPDTGRILSKLHTVQPKGKITFCTGIRVAHLALKHRQGKNHKMRIIAFVGSPVEDNEKDLVKLAKRLKKEKVNVDIINFGEEEVNTEKLTAFVNTLNGKDGTGSHLVTVPPGPSLADALISSPILAGEGGAMLGLGASDFEFGVDPSADPELALALRVSMEEQRQRQEEEARRAAAASAAEAGIATTGTEGERDSDDALLKMTISQQEFGRTGLPDLSSMTEEEQIAYAMQMSLQGAEFGQAESADIDASSAMDTSEPAKEEDDYDVMQDPEFLQSVLENLPGVDPNNEAIRNAMGSLASQATKDGKKDKKEEDKK

SEQ ID NO: 10574 - protein, 176 aa, Artificial Sequence
  Synthetic polypeptide
SLHSGRPRQTDHLSDCEVLTTLTPDTGRILSKLHTVQPKGKITFCTGIRVAHLALKHRQGKNHKMRIIAFVGSPVEDNEKDLVKLAKRLKKEKVNVDIINFGEEEVNTEKLTAFVNTLNGKDGTGSHLVTVPPGPSLADALISSPILAGEGGAMLGLGASDFEFGVDPSADPELAL

SEQ ID NO: 10575 - protein, 46 aa, Artificial Sequence
  Synthetic polypeptide
EVRSVSAQPPIVWDVGSASTRPRPCLGTEECLCPAATPSGRCWSPG

SEQ ID NO: 10576 - protein, 202 aa, Artificial Sequence
  Synthetic polypeptide
GASPPSRPSSGMWGAPLPGHDPVWELRSVSAQPRPHLGDVGVRGDLVSVKKSLGRNRLLPQGLAVYASPENKKLFEEEKLLRQEGKLEKIQTKAGEATVKFLKSCRLEVGMKNNVKWELNPEIVARHFFKNLGVVVAPHTLKLPEEPITRWGEYWCEVTVNGLDTVRVPMSVVNFEKPKTKRYKYWLAQQAAKAMAPTSPQI

SEQ ID NO: 10577 - protein, 22 aa, Artificial Sequence
  Synthetic polypeptide
GVSLPSRDPIWEMLESGVTWSQ

SEQ ID NO: 10578 - protein, 168 aa, Artificial Sequence
  Synthetic polypeptide
GASPPSRPSSGMWGAPLPGHDPVWELRSVSAQPRPHLGDVGVRGDLVSVKKSLGRNRLLPQGLAVYASPENKKLFEEEKLLRQEGKLEKIQTKAGEALGVVVAPHTLKLPEEPITRWGEYWCEVTVNGLDTVRVPMSVVNFEKPKTKRYKYWLAQQAAKAMAPTSPQI

SEQ ID NO: 10579 - protein, 87 aa, Artificial Sequence
  Synthetic polypeptide
EVRSVSAQPPIVWDVGSASTRPRPCLGTEECLCPAATPSGRARSSWSAGGRYRWPGRAGSRACTGDIASISWWRTRSIGPKKTWSSS

SEQ ID NO: 10580 - protein, 67 aa, Artificial Sequence
  Synthetic polypeptide
GASPPSRPSSGMWGAPLPGHDPVWELRSVSAQPRPHLGGHGHRGALVEGTAGRGGPEAAPAPATSRL

SEQ ID NO: 10581 - protein, 228 aa, Artificial Sequence
  Synthetic polypeptide
GVSLPSRDPIWEGTVIVERWWKVPLAGEGRKPRLHRRHRVYKLVEDTKHRPKENLELILTQSVENVGVRGDLVSVKKSLGRNRLLPQGLAVYASPENKKLFEEEKLLRQEGKLEKIQTKAGEATVKFLKSCRLEVGMKNNVKWELNPEIVARHFFKNLGVVVAPHTLKLPEEPITRWGEYWCEVTVNGLDTVRVPMSVVNFEKPKTKRYKYWLAQQAAKAMAPTSPQI

SEQ ID NO: 10582 - protein, 194 aa, Artificial Sequence
  Synthetic polypeptide
GVSLPSRDPIWEGTVIVERWWKVPLAGEGRKPRLHRRHRVYKLVEDTKHRPKENLELILTQSVENVGVRGDLVSVKKSLGRNRLLPQGLAVYASPENKKLFEEEKLLRQEGKLEKIQTKAGEALGVVVAPHTLKLPEEPITRWGEYWCEVTVNGLDTVRVPMSVVNFEKPKTKRYKYWLAQQAAKAMAPTSPQI

SEQ ID NO: 10583 - protein, 68 aa, Artificial Sequence
  Synthetic polypeptide
GASPPGSRPVQELQQPHLQPWPSVQNLLPPQAQANRALLQWALSWRRRWRPSSTCSTPTRAKRGTSTS

SEQ ID NO: 10584 - protein, 58 aa, Artificial Sequence
  Synthetic polypeptide
EVRSPSTRQPPRLGSEERLRPAAVPSRSSSSHICNLGHLSRTCSHLRPRPTVHCCNGL

SEQ ID NO: 10585 - protein, 147 aa, Artificial Sequence
  Synthetic polypeptide
GAPPPGSRPVWEVRSVSARQPSRPGAPAATFATLAICPEPAPTSGPGQPCTAAMGSELETAMETLINVFHAHSGKEGDKYKLSKKELKELLQTELSGFLDAQKDVDAVDKVMKELDENGDGEVDFQEYVVLVAALTVACNNFFWENS

SEQ ID NO: 10586 - protein, 59 aa, Artificial Sequence
  Synthetic polypeptide
GASPPGSRPVQEAQKDVDAVDKVMKELDENGDGEVDFQEYVVLVAALTVACNNFFWENS

SEQ ID NO: 10587 - protein, 38 aa, Artificial Sequence
  Synthetic polypeptide
EVRSPSTRQPPRLGSEERLRPAAVPSRRPRRMWMLWTR

SEQ ID NO: 10588 - protein, 64 aa, Artificial Sequence
  Synthetic polypeptide
GAPPPGSRPVWEVRSVSARQPSRPGGPEGCGCCGQGDEGARREWRRGGGLPGVCGACGCSHSGL

SEQ ID NO: 10589 - protein, 44 aa, Artificial Sequence
  Synthetic polypeptide
GRAQWLTPVIPALWEPEVDDHLRPGVQDHPSQHSKIQSLRYEGY

SEQ ID NO: 10590 - protein, 24 aa, Artificial Sequence
  Synthetic polypeptide
GGRSLEARSSRPPQPTQQNPVSEV

SEQ ID NO: 10591 - protein, 27 aa, Artificial Sequence
  Synthetic polypeptide
SQLLKRLRQENHLNPGSGGRKAGPGTG

SEQ ID NO: 10592 - protein, 217 aa, Artificial Sequence
  Synthetic polypeptide
TREVEGERRAREQAEAEVASLNRRIQLVEEELDRAQERLATALQKLEEAEKAADESERGMKVIENRALKDEEKMELQEIQLKEAKHIAEEADRKYEEVARKLVIIEGDLERTEERAELAESRCREMDEQIRLMDQNLKCLSAAEEKYSQKEDKYEEEIKILTDKLKEAETRAEFAERSVAKLEKTIDDLEDKLKCTKEEHLCTQRMLDQTLLDLNEM

SEQ ID NO: 10593 - protein, 42 aa, Artificial Sequence
  Synthetic polypeptide
QARWRMPVIPATQEAEAGESLEPGKWREKGGPGNRLRLRWPP

SEQ ID NO: 10594 - protein, 217 aa, Artificial Sequence
  Synthetic polypeptide
TREVEGERRAREQAEAEVASLNRRIQLVEEELDRAQERLATALQKLEEAEKAADESERGMKVIENRALKDEEKMELQEIQLKEAKHIAEEADRKYEEVARKLVIIEGDLERTEERAELAESKCSELEEELKNVTNNLKSLEAQAEKYSQKEDKYEEEIKILTDKLKEAETRAEFAERSVAKLEKTIDDLEDKLKCTKEEHLCTQRMLDQTLLDLNEM

SEQ ID NO: 10595 - protein, 201 aa, Artificial Sequence
  Synthetic polypeptide
TREVEGERRAREQAEAEVASLNRRIQLVEEELDRAQERLATALQKLEEAEKAADEEKMELQEIQLKEAKHIAEEADRKYEEVARKLVIIEGDLERTEERAELAESRCREMDEQIRLMDQNLKCLSAAEEKYSQKEDKYEEEIKILTDKLKEAETRAEFAERSVAKLEKTIDDLEDKLKCTKEEHLCTQRMLDQTLLDLNEM

SEQ ID NO: 10596 - protein, 37 aa, Artificial Sequence
  Synthetic polypeptide
SQLLKRLRQENHLNPGSGGRKPCSGAPGHCPAKAGRS

SEQ ID NO: 10597 - protein, 192 aa, Artificial Sequence
  Synthetic polypeptide
TREVEGESRAQERLATALQKLEEAEKAADESERGMKVIENRALKDEEKMELQEIQLKEAKHIAEEADRKYEEVARKLVIIEGDLERTEERAELAESRCREMDEQIRLMDQNLKCLSAAEEKYSQKEDKYEEEIKILTDKLKEAETRAEFAERSVAKLEKTIDDLEDKLKCTKEEHLCTQRMLDQTLLDLNEM

SEQ ID NO: 10598 - protein, 56 aa, Artificial Sequence
  Synthetic polypeptide
QARWRMPVIPATQEAEAGESLEPGKWREKAVLRSAWPLPCKSWKKLKKLLMRVREV

SEQ ID NO: 10599 - protein, 217 aa, Artificial Sequence
  Synthetic polypeptide
TREVEGERRAREQAEAEVASLNRRIQLVEEELDRAQERLATALQKLEEAEKAADESERGMKVIENRALKDEEKMELQEIQLKEAKHIAEEADRKYEEVARKLVIIEGDLERTEERAELAESRCREMDEQIRLMDQNLKCLSAAEEKYSQKEDKYEEEIKILTDKLKEAETRAEFAERSVAKLEKTIDDLEDELYAQKLKYKAISEELDHALNDMTSI

SEQ ID NO: 10600 - protein, 28 aa, Artificial Sequence
  Synthetic polypeptide
SQLLKRLRQENHLNPGSGGRKAGPGTEV

SEQ ID NO: 10601 - protein, 18 aa, Artificial Sequence
  Synthetic polypeptide
TREVEGERRAREQRYEGY

SEQ ID NO: 10602 - protein, 40 aa, Artificial Sequence
  Synthetic polypeptide
QARWRMPVIPATQEAEAGESLEPGKWREKGGPGNRGMKVI

SEQ ID NO: 10603 - protein, 216 aa, Artificial Sequence
  Synthetic polypeptide
TREVEGERRAREQAEAEVASLNRRIQLVEEELDRAQERLATALQKLEEAEKAADESERGMKVIENRALKDEEKMELQEIQLKEAKHIAEEADRKYEEVARKLVIIEGDLERTEERAELAESRCREMDEQIRLMDQNLKCLSAAEEKYSQKEDKYEEEIKILTDKLKEAETRAEFAERSVAKLEKTIDDLEERLYSQLERNRLLSNELKLTLHDLCD

SEQ ID NO: 10604 - protein, 216 aa, Artificial Sequence
  Synthetic polypeptide
TREVEGERRAREQAEAEVASLNRRIQLVEEELDRAQERLATALQKLEEAEKAADESERGMKVIENRALKDEEKMELQEIQLKEAKHIAEEADRKYEEVARKLVIIEGDLERTEERAELAESKCSELEEELKNVTNNLKSLEAQAEKYSQKEDKYEEEIKILTDKLKEAETRAEFAERSVAKLEKTIDDLEERLYSQLERNRLLSNELKLTLHDLCD

SEQ ID NO: 10605 - protein, 64 aa, Artificial Sequence
  Synthetic polypeptide
TREVEGERRAREQAEAEVASLNRRIQLVEEELDRAQERLATALQKLEEAEKAADESERWMSRLD

SEQ ID NO: 10606 - protein, 203 aa, Artificial Sequence
  Synthetic polypeptide
SQDLHIDLKEEIDIRLSRVQDIKYEPQLLADDDARLLQLETQGNQSCYNYLYRMKALDAIRTSEIPFHSEGRHPRSLMGKNFRSYLLDLRNTSTPFKGVRKALIDTLLDGYETARYGTGVFGQNEYLRYQEALSELATAVKARIGSSQRHHQSAAKDLTQSPEVSPTTIQVTYLPSSQKSKRAKHFLELKSFKDNYNTLESTL

SEQ ID NO: 10607 - protein, 29 aa, Artificial Sequence
  Synthetic polypeptide
TVSFKNAGTMPVLFTTIKPGPTHRLERGD

SEQ ID NO: 10608 - protein, 185 aa, Artificial Sequence
  Synthetic polypeptide
SQDLHIDLKEEIDIRLSRVQDIKYEPQLLADDDARLLQLETQGNQKIPFHSEGRHPRSLMGKNFRSYLLDLRNTSTPFKGVRKALIDTLLDGYETARYGTGVFGQNEYLRYQEALSELATAVKARIGSSQRHHQSAAKDLTQSPEVSPTTIQVTYLPSSQKSKRAKHFLELKSFKDNYNTLESTL

SEQ ID NO: 10609 - protein, 139 aa, Artificial Sequence
  Synthetic polypeptide
SQDLHIDLKEEIDIRLSRVQDIKYEPQLLADDDARLLQLETQGNQSCYNYLYRMKALDAIRTSEIPFHSEGRHPRSLMGKNFRSYLLDLRNTSTPFKGVRKALIDTLLDGYETARYGTGVFGQNEYLRYQEALSELATA

SEQ ID NO: 10610 - protein, 21 aa, Artificial Sequence
  Synthetic polypeptide
TTSPGHGVFPQRILHPSISRL

SEQ ID NO: 10611 - protein, 1236 aa, Artificial Sequence
  Synthetic polypeptide
NRDFPQAAEQHHLDMGYSLSGYYTHPFQGYEHRQLRYQQPGPGSSPSSFLLKQIEFLKGQLPEAPVIGKQTPSLPPSLPGLRPRFPVLLASSTRGRQVDIRGVPRGVHLRSQGLQRGFQHPSPRGRSLPQRGVDCLSSHFQELSIYQDQEQRILKFLEELGEGKATTAHDLSGKLGTPKKEINRVLYSLAKKGKLQKEAGTPPLWKIAVSTQAWNQHSGVVRPDGHSQGAPNSDPSLEPEDRNSTSVSEDLLEPFIAVSAQAWNQHSGVVRPDSHSQGSPNSDPGLEPEDSNSTSALEDPLEFLDMAEIKEKICDYLFNVSDSSALNLAKNIGLTKARDINAVLIDMERQGDVYRQGTTPPIWHLTDKKRERMQIKRNTNSVPETAPAAIPETKRNAEFLTCNIPTSNASNNMVTTEKVENGQEPVIKLENRQEARPEPARLKPPVHYNGPSKAGYVDFENGQWATDDIPDDLNSIRAAPGEFRAIMEMPSFYSHGLPRCSPYKKLTECQLKNPISGLLEYAQFASQTCEFNMIEQSGPPHEPRFKFQVVINGREFPPAEAGSKKVAKQDAAMKAMTILLEEAKAKDSGKSEESSHYSTEKESEKTAESQTPTPSATSFFSGKSPVTTLLECMHKLGNSCEFRLLSKEGPAHEPKFQYCVAVGAQTFPSVSAPSKKVAKQMAAEEAMKALHGEATNSMASDNQPEGMISESLDNLESMMPNKVRKIGELVRYLNTNPVGGLLEYARSHGFAAEFKLVDQSGPPHEPKFVYQAKVGGRWFPAVCAHSKKQGKQEAADAALRVLIGENEKAERMGFTEVTPVTGASLRRTMLLLSRSPEAQPKTLPLTGSTFHDQIAMLSHRCFNTLTNSFQPSLLGRKILAAIIMKKDSEDMGVVVSLGTGNRCVKGDSLSLKGETVNDCHAEIISRRGFIRFLYSELMKYNSQTAKDSIFEPAKGGEKLQIKKTVSFHLYISTAPCGDGALFDKSCSDRAMESTESRHYPVFENPKQGKLRTKVENGEGTIPVESSDIVPTWDGIRLGERLRTMSCSDKILRWNVLGLQGALLTHFLQPIYLKSVTLGYLFSQGHLTRAICCRVTRDGSAFEDGLRHPFIVNHPKVGRVSIYDSKRQSGKTKETSVNWCLADGYDLEILDGTRGTVDGPRNELSRVSKKNIFLLFKKLCSFRYRRDLLRLSYGEAKKAARDYETAKNYFKKGLKDMGYGNWISKPQEEKNFYLCPV

SEQ ID NO: 10612 - protein, 83 aa, Artificial Sequence
  Synthetic polypeptide
NCAQHLLVIDKINLWFMKTPICCCPWELSETETSHRPLNNITWTWGIPSADTTPIHFKAMSTDSSGTSSLGQDLPPVVSCLSK

SEQ ID NO: 10613 - protein, 1210 aa, Artificial Sequence
  Synthetic polypeptide
NRDFPQAAEQHHLDMGYSLSGYYTHPFQGYEHRQLRYQQPGPGSSPSSFLLKQIEFLKGQLPEAPVIGKQTPSLPPSLPGLRPRFPVLLASSTRGRQVDIRGVPRGVHLRSQGLQRGFQHPSPRGRSLPQRGVDCLSSHFQELSIYQDQEQRILKFLEELGEGKATTAHDLSGKLGTPKKEINRVLYSLAKKGKLQKEAGTPPLWKIAVSTQAWNQHSGVVRPDGHSQGAPNSDPSLEPEDRNSTSVSEDLLEPFIAVSAQAWNQHSGVVRPDSHSQGSPNSDPGLEPEDSNSTSALEDPLEFLDMAEIKEKICDYLFNVSDSSALNLAKNIGLTKARDINAVLIDMERQGDVYRQGTTPPIWHLTDKKRERMQIKRNTNSVPETAPAAIPETKRNAEFLTCNIPTSNASNNMVTTEKVENGQEPVIKLENRQEARPEPARLKPPVHYNGPSKAGYVDFENGQWATDDIPDDLNSIRAAPGEFRAIMEMPSFYSHGLPRCSPYKKLTECQLKNPISGLLEYAQFASQTCEFNMIEQSGPPHEPRFKFQVVINGREFPPAEAGSKKVAKQDAAMKAMTILLEEAKAKDSGKSEESSHYSTEKESEKTAESQTPTPSATSFFSGKSPVTTLLECMHKLGNSCEFRLLSKEGPAHEPKFQYCVAVGAQTFPSVSAPSKKVAKQMAAEEAMKALHGEATNSMASDNQPEGMISESLDNLESMMPNKVRKIGELVRYLNTNPVGGLLEYARSHGFAAEFKLVDQSGPPHEPKFVYQAKVGGRWFPAVCAHSKKQGKQEAADAALRVLIGENEKAERMGFTELPLTGSTFHDQIAMLSHRCFNTLTNSFQPSLLGRKILAAIIMKKDSEDMGVVVSLGTGNRCVKGDSLSLKGETVNDCHAEIISRRGFIRFLYSELMKYNSQTAKDSIFEPAKGGEKLQIKKTVSFHLYISTAPCGDGALFDKSCSDRAMESTESRHYPVFENPKQGKLRTKVENGEGTIPVESSDIVPTWDGIRLGERLRTMSCSDKILRWNVLGLQGALLTHFLQPIYLKSVTLGYLFSQGHLTRAICCRVTRDGSAFEDGLRHPFIVNHPKVGRVSIYDSKRQSGKTKETSVNWCLADGYDLEILDGTRGTVDGPRNELSRVSKKNIFLLFKKLCSFRYRRDLLRLSYGEAKKAARDYETAKNYFKKGLKDMGYGNWISKPQEEKNFYLCPV

SEQ ID NO: 10614 - protein, 280 aa, Artificial Sequence
  Synthetic polypeptide
DKIQASSPRIPGLPKSDPWSLKPPGHLLLEPRYHDQQDVTSNFLGAMWLISITFLSIGYGDMVPHTYCGKGVCLLTGIMGAGCTALVVAVVARKLELTKAEKHVHNFMMDTQLTKRIKNAAANVLRETWLIYKHTKLLKKIDHAKVRKHQRKFLQAIHQLRSVKMEQRKLSDQANTLVDLSKMQNVMYDLITELNDRSEDLEKQIGSLESKLEHLTASFNSLPLLIADTLRQQQQQLLSAIIEARGVSVAVGTTHTPISDSPIGVSSTSFPTPYTSSSSC

SEQ ID NO: 10615 - protein, 17 aa, Artificial Sequence
  Synthetic polypeptide
SPLVTCYWSPGTMTSRT

SEQ ID NO: 10616 - protein, 17 aa, Artificial Sequence
  Synthetic polypeptide
PLVSEAPWSPATGAQVP

SEQ ID NO: 10617 - protein, 15 aa, Artificial Sequence
  Synthetic polypeptide
ITSPAFWLITSCLVP

SEQ ID NO: 10618 - protein, 270 aa, Artificial Sequence
  Synthetic polypeptide
PPLYSHSPESPAQPSGSSLPAWYHDQQDVTSNFLGAMWLISITFLSIGYGDMVPHTYCGKGVCLLTGIMGAGCTALVVAVVARKLELTKAEKHVHNFMMDTQLTKRIKNAAANVLRETWLIYKHTKLLKKIDHAKVRKHQRKFLQAIHQLRSVKMEQRKLSDQANTLVDLSKMQNVMYDLITELNDRSEDLEKQIGSLESKLEHLTASFNSLPLLIADTLRQQQQQLLSAIIEARGVSVAVGTTHTPISDSPIGVSSTSFPTPYTSSSSC

SEQ ID NO: 10619 - protein, 28 aa, Artificial Sequence
  Synthetic polypeptide
LLSTPTVLNHQPSLLAHHFLLGTMTSRT

SEQ ID NO: 10620 - protein, 448 aa, Artificial Sequence
  Synthetic polypeptide
PSVLAAALWLLGCAALLRKLTSLSLSLQDSMFSLALKCLISLSTIILLGLIIAYHTREVQLFVIDNGADDWRIAMTYERILYISLEMLVCAIHPIPGEYKFFWTARLAFSYTPSRAEADVDIILSIPMFLRLYLIARVMLLHSKLFTDASSRSIGALNKINFNTRFVMKTLMTICPGTVLLVFSISLWIIAAWTVRVCERYHDQQDVTSNFLGAMWLISITFLSIGYGDMVPHTYCGKGVCLLTGIMGAGCTALVVAVVARKLELTKAEKHVHNFMMDTQLTKRIKNAAANVLRETWLIYKHTKLLKKIDHAKVRKHQRKFLQAIHQLRSVKMEQRKLSDQANTLVDLSKMQNVMYDLITELNDRSEDLEKQIGSLESKLEHLTASFNSLPLLIADTLRQQQQQLLSAIIEARGVSVAVGTTHTPISDSPIGVSSTSFPTPYTSSSSC

SEQ ID NO: 10621 - protein, 12 aa, Artificial Sequence
  Synthetic polypeptide
ASVSRTPCFRWP

SEQ ID NO: 10622 - protein, 55 aa, Artificial Sequence
  Synthetic polypeptide
CSCRSSVASRLCSLVEKTDLFEPQSPGLHVFVGPEMPYQSVHHHPFGLDHRLPHT

SEQ ID NO: 10623 - protein, 47 aa, Artificial Sequence
  Synthetic polypeptide
HFERPRRVDHLSSGVRDQPDQHDLELMSVLSSGSLVHSRNSMLRSMA

SEQ ID NO: 10624 - protein, 14 aa, Artificial Sequence
  Synthetic polypeptide
AQEFETSLTNMTWS

SEQ ID NO: 10625 - protein, 166 aa, Artificial Sequence
  Synthetic polypeptide
RENEAGKRWAGGQDTCVLVLGCCYLTLAWNKSLPLSGPQFPPLSNEGIRSEWQQTHQVRGKPEDQGGGRGCPLDALFPPCRKRALRPGTERKKEENARSSKSAWWVRAPRWRSPPSCPCCSLLGCRCTAVSWPPPSGSPSRAACLVRVSSCSRSLYPPCSWRGRAT

SEQ ID NO: 10626 - protein, 267 aa, Artificial Sequence
  Synthetic polypeptide
FWAAATSLWPGISHFPFLGLSFLPCQMRVSDQSGSRRTRYEESLRTRAVAEDAPSTHYFLPVARGRCVQALRGRKRRTRGVASPRGGYGHLAGALLPPVPAALCWDADVQPSAGLHRVAHHPGRPAWFGSLRVLAHCILPAVGGGGPRRHVPFPFPTQLCPRCTPYSLTPSTRPSIIWRILSLAKDSKQRSSLRFSCASCWLSLHLASSTESVSPPASSSPWLVCTTSTRSPPPCTRQQLQSSHQPRSQARARRETDPECSIKLILC

SEQ ID NO: 10627 - protein, 16 aa, Artificial Sequence
  Synthetic polypeptide
GYQIRVAADAPGTRKA

SEQ ID NO: 10628 - protein, 58 aa, Artificial Sequence
  Synthetic polypeptide
GQARWLTPVIPALWEAKSCTSSSIAAGAQAESGWLSARTSEQYGVFQGCPCCWLLTGC

SEQ ID NO: 10629 - protein, 14 aa, Artificial Sequence
  Synthetic polypeptide
SQHFGRPSPALLPR

SEQ ID NO: 10630 - protein, 246 aa, Artificial Sequence
  Synthetic polypeptide
PGKVAHTCNPSTLGGQVLHFFLDSRWGASRERLAISKDQRAVRSVPGLPLLLAADRLLTGCHLSVDVVLGDVAVTQGRSYWACAVDPASYLVKVGVGLESKLQESFQGAPDVISPRYDPDSGHDSGAEDATVEASPPFAFLTIGMGKILLGSGASSNAGLTGRDGPTAGCTVPLPPRLGICLDYERGRVSFLDAVSFRGLLECPLDCSGPVCPAFCFIGGGAVQLQEPVGTKPERKVTIGGFAKLD

SEQ ID NO: 10631 - protein, 131 aa, Artificial Sequence
  Synthetic polypeptide
PGKVAHTCNPSTLGGQVLHFFLDSRWGASRERLAISKDQRAVRSVPGLPLLLAADRLLTGCHLSVDVVLGDVAVTQGRSYWACAVDPASYLVKVGVGLESKLQESFQGAPDVISPRSDPSGRDGVWGSWWE

SEQ ID NO: 10632 - protein, 39 aa, Artificial Sequence
  Synthetic polypeptide
SQLLGRLRQENRLNPAGGGYDAASSKVPLLRARQPGELP

SEQ ID NO: 10633 - protein, 505 aa, Artificial Sequence
  Synthetic polypeptide
TLQAEVMMPHPRRYHSSERGSRGSYREHYRSRKHKRRRSRSWSSSSDRTRRRRREDSYHVRSRSSYDDRSSDRRVYDRRYCGSYRRNDYSRDRGDAYYDTDYRHSYEYQRENSSYRSQRSSRRKHRRRRRRSRTFSRSSSHSSRRAKSVEDDAEGHLIYHVGDWLQERYEIVSTLGEGTFGRVVQCVDHRRGGARVALKIIKNVEKYKEAARLEINVLEKINEKDPDNKNLCVQMFDWFDYHGHMCISFELLGLSTFDFLKDNNYLPYPIHQVRHMAFQLCQAVKFLHDNKLTHTDLKPENILFVNSDYELTYNLEKKRDERSVKSTAVRVVDFGSATFDHEHHSTIVSTRHYRAPEVILELGWSQPCDVWSIGCIIFEYYVGFTLFQTHDNREHLAMMERILGPIPSRMIRKTRKQKYFYRGRLDWDENTSAGRYVRENCKPLRRYLTSEAEEHHQLFDLIESMLEYEPAKRLTLGEALQHPFFARLRAEPPNKLWDSSRDISR

SEQ ID NO: 10634 - protein, 506 aa, Artificial Sequence
  Synthetic polypeptide
TLQAEVMMPHPRRYHSSERGSRGSYREHYRSRKHKRRRSRSWSSSSDRTRRRRREDSYHVRSRSSYDDRSSDRRVYDRRYCGSYRRNDYSRDRGDAYYDTDYRHSYEYQRENSSYRSQRSSRRKHRRRRRRSRTFSRSSSQHSSRRAKSVEDDAEGHLIYHVGDWLQERYEIVSTLGEGTFGRVVQCVDHRRGGARVALKIIKNVEKYKEAARLEINVLEKINEKDPDNKNLCVQMFDWFDYHGHMCISFELLGLSTFDFLKDNNYLPYPIHQVRHMAFQLCQAVKFLHDNKLTHTDLKPENILFVNSDYELTYNLEKKRDERSVKSTAVRVVDFGSATFDHEHHSTIVSTRHYRAPEVILELGWSQPCDVWSIGCIIFEYYVGFTLFQTHDNREHLAMMERILGPIPSRMIRKTRKQKYFYRGRLDWDENTSAGRYVRENCKPLRRYLTSEAEEHHQLFDLIESMLEYEPAKRLTLGEALQHPFFARLRAEPPNKLWDSSRDISR

SEQ ID NO: 10635 - protein, 504 aa, Artificial Sequence
  Synthetic polypeptide
TLQAEVMMPHPRRYHSSERGSRGSYREHYRSRKHKRRRSRSWSSSSDRTRRRRREDSYHVRSRSYDDRSSDRRVYDRRYCGSYRRNDYSRDRGDAYYDTDYRHSYEYQRENSSYRSQRSSRRKHRRRRRRSRTFSRSSSHSSRRAKSVEDDAEGHLIYHVGDWLQERYEIVSTLGEGTFGRVVQCVDHRRGGARVALKIIKNVEKYKEAARLEINVLEKINEKDPDNKNLCVQMFDWFDYHGHMCISFELLGLSTFDFLKDNNYLPYPIHQVRHMAFQLCQAVKFLHDNKLTHTDLKPENILFVNSDYELTYNLEKKRDERSVKSTAVRVVDFGSATFDHEHHSTIVSTRHYRAPEVILELGWSQPCDVWSIGCIIFEYYVGFTLFQTHDNREHLAMMERILGPIPSRMIRKTRKQKYFYRGRLDWDENTSAGRYVRENCKPLRRYLTSEAEEHHQLFDLIESMLEYEPAKRLTLGEALQHPFFARLRAEPPNKLWDSSRDISR

SEQ ID NO: 10636 - protein, 356 aa, Artificial Sequence
  Synthetic polypeptide
NPISTKIQKKLAGHGGVHLKSQEVPMIPRPHYAQPGCVYFICLLRDDLLLRQGDCVYLMRDSRRTPDGHPVRQSYRLLSHINRDKLDIFRIEKLWKNEKEERFAFGHHYFRPHETHHSPSRRFYHNELFRVPLYEIIPLEAVVGTCCVLDLYTYCKGRPKGVKEQDVYICDYRLDKSAHLFYKIHRNRYPVCTKPYAFDHFPKKLTPKKDFSPHYVPDNYKRNGGRSSWKSERSKPPLKDLGQEDDALPLIEEVLASQEQAANEIPSLEEPEREGATANVSEGEKKTEESSQEPQSTCTPEERRHNQRERLNQILLNLLEKIPGKNAIDVTYLLEEGSGRKLRRRTLFIPENSFRK

SEQ ID NO: 10637 - protein, 6 aa, Artificial Sequence
  Synthetic polypeptide
SLRRFP

SEQ ID NO: 10638 - protein, 40 aa, Artificial Sequence
  Synthetic polypeptide
NTKKISRAWRRAPEVSGGSHDPSAPLCPTWLCLLHLFAPR

SEQ ID NO: 10639 - protein, 980 aa, Artificial Sequence
  Synthetic polypeptide
LTQSNFQSCKVHSCPKSRLIQLKKEKLEYTPGEHEYGLFPAPIHVVFFVSGKYLRQKRIDFQLPYDILWQWKHNQLYKKPDVPLYKKIRSNVYVDVKPLSGYEATTCNCKKPDDDTRKGCVDDCLNRMIFAECSPNTCPCGEQCCNQRIQRHEWVQCLERFRAEEKGWGIRTKEPLKAGQFIIEYLGEVVSEQEFRNRMIEQYHNHSDHYCLNLDSGMVIDSYRMGNEARFINHSCDPNCEMQKWSVNGVYRIGLYALKDMPAGTELTYDYNFHSFNVEKQQLCKCGFEKCRGIIGGKSQRVNGLTSSKNSQPMATHKKSGRSKEKRKSKHKLKKRRGHLSEEPSENINTPTRLTPQLQMKPMSNRERNFVLKHHVFLVRNWEKIRQKQEEVKHTSDNIHSASLYTRWNGICRDDGNIKSDVFMTQFSALQTARSVRTRRLAAAEENIEVARAARLAQIFKEICDGIISYKDSSRQALAAPLLNLPPKKKNADYYEKISDPLDLITIEKQILTGYYKTVEAFDADMLKVFRNAEKYYGRKSPVGRDVCRLRKAYYNARHEASAQIDEIVGETASEADSSETSVSEKENGHEKDDDVIRCICGLYKDEGLMIQCDKCMVWQHCDCMGVNSDVEHYLCEQCDPRPVDREVPMIPRPHYAQPGCVYFICLLRDDLLLRQGDCVYLMRDSRRTPDGHPVRQSYRLLSHINRDKLDIFRIEKLWKNEKEERFAFGHHYFRPHETHHSPSRRFYHNELFRVPLYEIIPLEAVVGTCCVLDLYTYCKGRPKGVKEQDVYICDYRLDKSAHLFYKIHRNRYPVCTKPYAFDHFPKKLTPKKDFSPHYVPDNYKRNGGRSSWKSERSKPPLKDLGQEDDALPLIEEVLASQEQAANEIPSLEEPEREGATANVSEGEKKTEESSQEPQSTCTPEERRHNQRERLNQILLNLLEKIPGKNAIDVTYLLEEGSGRKLRRRTLFIPENSFRK

SEQ ID NO: 10640 - protein, 29 aa, Artificial Sequence
  Synthetic polypeptide
AFTFIHHTLTDSPRATSSPARSIHAQRVD

SEQ ID NO: 10641 - protein, 47 aa, Artificial Sequence
  Synthetic polypeptide
FPRLSHSFTTHSLTHPEQLPVLQGPFMPKESIDPIKEREAGVYSRRA

SEQ ID NO: 10642 - protein, 975 aa, Artificial Sequence
  Synthetic polypeptide
LTQSNFQSCKVHSCPKSRLIQLKKEKLEYTPGEHEYGLFPAPIHVGKYLRQKRIDFQLPYDILWQWKHNQLYKKPDVPLYKKIRSNVYVDVKPLSGYEATTCNCKKPDDDTRKGCVDDCLNRMIFAECSPNTCPCGEQCCNQRIQRHEWVQCLERFRAEEKGWGIRTKEPLKAGQFIIEYLGEVVSEQEFRNRMIEQYHNHSDHYCLNLDSGMVIDSYRMGNEARFINHSCDPNCEMQKWSVNGVYRIGLYALKDMPAGTELTYDYNFHSFNVEKQQLCKCGFEKCRGIIGGKSQRVNGLTSSKNSQPMATHKKSGRSKEKRKSKHKLKKRRGHLSEEPSENINTPTRLTPQLQMKPMSNRERNFVLKHHVFLVRNWEKIRQKQEEVKHTSDNIHSASLYTRWNGICRDDGNIKSDVFMTQFSALQTARSVRTRRLAAAEENIEVARAARLAQIFKEICDGIISYKDSSRQALAAPLLNLPPKKKNADYYEKISDPLDLITIEKQILTGYYKTVEAFDADMLKVFRNAEKYYGRKSPVGRDVCRLRKAYYNARHEASAQIDEIVGETASEADSSETSVSEKENGHEKDDDVIRCICGLYKDEGLMIQCDKCMVWQHCDCMGVNSDVEHYLCEQCDPRPVDREVPMIPRPHYAQPGCVYFICLLRDDLLLRQGDCVYLMRDSRRTPDGHPVRQSYRLLSHINRDKLDIFRIEKLWKNEKEERFAFGHHYFRPHETHHSPSRRFYHNELFRVPLYEIIPLEAVVGTCCVLDLYTYCKGRPKGVKEQDVYICDYRLDKSAHLFYKIHRNRYPVCTKPYAFDHFPKKLTPKKDFSPHYVPDNYKRNGGRSSWKSERSKPPLKDLGQEDDALPLIEEVLASQEQAANEIPSLEEPEREGATANVSEGEKKTEESSQEPQSTCTPEERRHNQRERLNQILLNLLEKIPGKNAIDVTYLLEEGSGRKLRRRTLFIPENSFRK

SEQ ID NO: 10643 - protein, 2831 aa, Artificial Sequence
  Synthetic polypeptide
WQDPSKLYKKADDVAAIECQSEEVIRLHSQGENNPLSKKLSPVHSEMADYINATPSTLLGSRDPDLKDRALLNGGTSVTEKLAQLIATCPPSKSSKTKPKKLGTGTTAGLVSKDLIRKAGVGSVAGIIHKDLIKKPTISTAVGLVTKDPGKKPVFNAAVGLVNKDSVKKLGTGTTAVFINKNLGKKPGTITTVGLLSKDSGKKLGIGIVPGLVHKESGKKLGLGTVVGLVNKDLGKKLGSTVGLVAKDCAKKIVASSAMGLVNKDIGKKLMSCPLAGLISKDAINLKAEALLPTQEPLKASCSTNINNQESQELSESLKDSATSKTFEKNVVRQNKESILEKFSVRKEIINLEKEMFNEGTCIQQDSFSSSEKGSYETSKHEKQPPVYCTSPDFKMGGASDVSTAKSPFSAVGESNLPSPSPTVSVNPLTRSPPETSSQLAPNPLLLSSTTELIEEISESVGKNQFTSESTHLNVGHRSVGHSISIECKGIDKEVNDSKTTHIDIPRISSSLGKKPSLTSESSIHTITPSVVNFTSLFSNKPFLKLGAVSASDKHCQVAESLSTSLQSKPLKKRKGRKPRWTKVVARSTCRSPKGLELERSELFKNVSCSSLSNSNSEPAKFMKNIGPPSFVDHDFLKRRLPKLSKSTAPSLALLADSEKPSHKSFATHKLSSSMCVSSDLLSDIYKPKRGRPKSKEMPQLEGPPKRTLKIPASKVFSLQSKEEQEPPILQPEIEIPSFKQGLSVSPFPKKRGRPKRQMRSPVKMKPPVLSVAPFVATESPSKLESESDNHRSSSDFFESEDQLQDPDDLDDSHRPSVCSMSDLEMEPDKKITKRNNGQLMKTIIRKINKMKTLKRKKLLNQILSSSVESSNKGKVQSKLHNTVSSLAATFGSKLGQQINVSKKGTIYIGKRRGRKPKTVLNGILSGSPTSLAVLEQTAQQAAGSALGQILPPLLPSSASSSEILPSPICSQSSGTSGGQSPVSSDAGFVEPSSVPYLHLHSRQGSMIQTLAMKKASKGRRRLSPPTLLPNSPSHLSELTSLKEATPSPISESHSDETIPSDSGIGTDNNSTSDRAEKFCGQKKRRHSFEHVSLIPPETSTVLSSLKEKHKHKCKRRNHDYLSYDKMKRQKRKRKKKYPQLRNRQDPDFIAELEELISRLSEIRITHRSHHFIPRDLLPTIFRINFNSFYTHPSFPLDPLHYIRKPDLKKKRGRPPKMREAMAEMPFMHSLSFPLSSTGFYPSYGMPYSPSPLTAAPIGLGYYGRYPPTLYPPPPSPSFTTPLPPPSYMHAGHLLLNPAKYHKKKHKLLRQEAFLTTSRTPLLSMSTYPSVPPEMAYGWMVEHKHRHRHKHREHRSSEQPQVSMDTGSSRSVLESLKRYRFGKDAVGERYKHKEKHRCHMSCPHLSPSKSLINREEQWVHREPSESSPLALGLQTPLQIDCSESSPSLSLGGFTPNSEPASSDEHTNLFTSAIGSCRVSNPNSSGRKKLTDSPGLFSAQDTSLNRLHRKESLPSNERAVQTLAGSQPTSDKPSQRPSESTNCSPTRKRSSSESTSSTVNGVPSRSPRLVASGDDSVDSLLQRMVQNEDQEPMEKSIDAVIATASAPPSSSPGRSHSKDRTLGKPDSLLVPAVTSDSCNNSISLLSEKLTSSCSPHHIKRSVVEAMQRQARKMCNYDKILATKKNLDHVNKILKAKKLQRQARTGNNFVKRRPGRPRKCPLQAVVSMQAFQAAQFVNPELNRDEEGAALHLSPDTVTDVIEAVVQSVNLNPEHKKGLKRKGWLLEEQTRKKQKPLPEEEEQENNKSFNEAPVEIPSPSETPAKPSEPESTLQPVLSLIPREKKPPRPPKKKYQKAGLYSDVYKTTDPKSRLIQLKKEKLEYTPGEHEYGLFPAPIHVVFFVSGKYLRQKRIDFQLPYDILWQWKHNQLYKKPDVPLYKKIRSNVYVDVKPLSGYEATTCNCKKPDDDTRKGCVDDCLNRMIFAECSPNTCPCGEQCCNQRIQRHEWVQCLERFRAEEKGWGIRTKEPLKAGQFIIEYLGEVVSEQEFRNRMIEQYHNHSDHYCLNLDSGMVIDSYRMGNEARFINHSCDPNCEMQKWSVNGVYRIGLYALKDMPAGTELTYDYNFHSFNVEKQQLCKCGFEKCRGIIGGKSQRVNGLTSSKNSQPMATHKKSGRSKEKRKSKHKLKKRRGHLSEEPSENINTPTRLTPQLQMKPMSNRERNFVLKHHVFLVRNWEKIRQKQEEVKHTSDNIHSASLYTRWNGICRDDGNIKSDVFMTQFSALQTARSVRTRRLAAAEENIEVARAARLAQIFKEICDGIISYKDSSRQALAAPLLNLPPKKKNADYYEKISDPLDLITIEKQILTGYYKTVEAFDADMLKVFRNAEKYYGRKSPVGRDVCRLRKAYYNARHEASAQIDEIVGETASEADSSETSVSEKENGHEKDDDVIRCICGLYKDEGLMIQCDKCMVWQHCDCMGVNSDVEHYLCEQCDPRPVDREVPMIPRPHYAQPGCVYFICLLRDDLLLRQGDCVYLMRDSRRTPDGHPVRQSYRLLSHINRDKLDIFRIEKLWKNEKEERFAFGHHYFRPHETHHSPSRRFYHNELFRVPLYEIIPLEAVVGTCCVLDLYTYCKGRPKGVKEQDVYICDYRLDKSAHLFYKIHRNRYPVCTKPYAFDHFPKKLTPKKDFSPHYVPDNYKRNGGRSSWKSERSKPPLKDLGQEDDALPLIEEVLASQEQAANEIPSLEEPEREGATANVSEGEKKTEESSQEPQSTCTPEERRHNQRERLNQILLNLLEKIPGKNAIDVTYLLEEGSGRKLRRRTLFIPENSFRK

SEQ ID NO: 10644 - protein, 74 aa, Artificial Sequence
  Synthetic polypeptide
KYKKLANHDGRTLQSCTRKQMMLQPLNASLKKSSVFIHREKTILCLRSCLQYTQKWQIILMQRHLLFLVAGILI

SEQ ID NO: 10645 - protein, 15 aa, Artificial Sequence
  Synthetic polypeptide
PTMMAGPFKVVQESR

SEQ ID NO: 10646 - protein, 2826 aa, Artificial Sequence
  Synthetic polypeptide
WQDPSKLYKKADDVAAIECQSEEVIRLHSQGENNPLSKKLSPVHSEMADYINATPSTLLGSRDPDLKDRALLNGGTSVTEKLAQLIATCPPSKSSKTKPKKLGTGTTAGLVSKDLIRKAGVGSVAGIIHKDLIKKPTISTAVGLVTKDPGKKPVFNAAVGLVNKDSVKKLGTGTTAVFINKNLGKKPGTITTVGLLSKDSGKKLGIGIVPGLVHKESGKKLGLGTVVGLVNKDLGKKLGSTVGLVAKDCAKKIVASSAMGLVNKDIGKKLMSCPLAGLISKDAINLKAEALLPTQEPLKASCSTNINNQESQELSESLKDSATSKTFEKNVVRQNKESILEKFSVRKEIINLEKEMFNEGTCIQQDSFSSSEKGSYETSKHEKQPPVYCTSPDFKMGGASDVSTAKSPFSAVGESNLPSPSPTVSVNPLTRSPPETSSQLAPNPLLLSSTTELIEEISESVGKNQFTSESTHLNVGHRSVGHSISIECKGIDKEVNDSKTTHIDIPRISSSLGKKPSLTSESSIHTITPSVVNFTSLFSNKPFLKLGAVSASDKHCQVAESLSTSLQSKPLKKRKGRKPRWTKVVARSTCRSPKGLELERSELFKNVSCSSLSNSNSEPAKFMKNIGPPSFVDHDFLKRRLPKLSKSTAPSLALLADSEKPSHKSFATHKLSSSMCVSSDLLSDIYKPKRGRPKSKEMPQLEGPPKRTLKIPASKVFSLQSKEEQEPPILQPEIEIPSFKQGLSVSPFPKKRGRPKRQMRSPVKMKPPVLSVAPFVATESPSKLESESDNHRSSSDFFESEDQLQDPDDLDDSHRPSVCSMSDLEMEPDKKITKRNNGQLMKTIIRKINKMKTLKRKKLLNQILSSSVESSNKGKVQSKLHNTVSSLAATFGSKLGQQINVSKKGTIYIGKRRGRKPKTVLNGILSGSPTSLAVLEQTAQQAAGSALGQILPPLLPSSASSSEILPSPICSQSSGTSGGQSPVSSDAGFVEPSSVPYLHLHSRQGSMIQTLAMKKASKGRRRLSPPTLLPNSPSHLSELTSLKEATPSPISESHSDETIPSDSGIGTDNNSTSDRAEKFCGQKKRRHSFEHVSLIPPETSTVLSSLKEKHKHKCKRRNHDYLSYDKMKRQKRKRKKKYPQLRNRQDPDFIAELEELISRLSEIRITHRSHHFIPRDLLPTIFRINFNSFYTHPSFPLDPLHYIRKPDLKKKRGRPPKMREAMAEMPFMHSLSFPLSSTGFYPSYGMPYSPSPLTAAPIGLGYYGRYPPTLYPPPPSPSFTTPLPPPSYMHAGHLLLNPAKYHKKKHKLLRQEAFLTTSRTPLLSMSTYPSVPPEMAYGWMVEHKHRHRHKHREHRSSEQPQVSMDTGSSRSVLESLKRYRFGKDAVGERYKHKEKHRCHMSCPHLSPSKSLINREEQWVHREPSESSPLALGLQTPLQIDCSESSPSLSLGGFTPNSEPASSDEHTNLFTSAIGSCRVSNPNSSGRKKLTDSPGLFSAQDTSLNRLHRKESLPSNERAVQTLAGSQPTSDKPSQRPSESTNCSPTRKRSSSESTSSTVNGVPSRSPRLVASGDDSVDSLLQRMVQNEDQEPMEKSIDAVIATASAPPSSSPGRSHSKDRTLGKPDSLLVPAVTSDSCNNSISLLSEKLTSSCSPHHIKRSVVEAMQRQARKMCNYDKILATKKNLDHVNKILKAKKLQRQARTGNNFVKRRPGRPRKCPLQAVVSMQAFQAAQFVNPELNRDEEGAALHLSPDTVTDVIEAVVQSVNLNPEHKKGLKRKGWLLEEQTRKKQKPLPEEEEQENNKSFNEAPVEIPSPSETPAKPSEPESTLQPVLSLIPREKKPPRPPKKKYQKAGLYSDVYKTTDPKSRLIQLKKEKLEYTPGEHEYGLFPAPIHVGKYLRQKRIDFQLPYDILWQWKHNQLYKKPDVPLYKKIRSNVYVDVKPLSGYEATTCNCKKPDDDTRKGCVDDCLNRMIFAECSPNTCPCGEQCCNQRIQRHEWVQCLERFRAEEKGWGIRTKEPLKAGQFIIEYLGEVVSEQEFRNRMIEQYHNHSDHYCLNLDSGMVIDSYRMGNEARFINHSCDPNCEMQKWSVNGVYRIGLYALKDMPAGTELTYDYNFHSFNVEKQQLCKCGFEKCRGIIGGKSQRVNGLTSSKNSQPMATHKKSGRSKEKRKSKHKLKKRRGHLSEEPSENINTPTRLTPQLQMKPMSNRERNFVLKHHVFLVRNWEKIRQKQEEVKHTSDNIHSASLYTRWNGICRDDGNIKSDVFMTQFSALQTARSVRTRRLAAAEENIEVARAARLAQIFKEICDGIISYKDSSRQALAAPLLNLPPKKKNADYYEKISDPLDLITIEKQILTGYYKTVEAFDADMLKVFRNAEKYYGRKSPVGRDVCRLRKAYYNARHEASAQIDEIVGETASEADSSETSVSEKENGHEKDDDVIRCICGLYKDEGLMIQCDKCMVWQHCDCMGVNSDVEHYLCEQCDPRPVDREVPMIPRPHYAQPGCVYFICLLRDDLLLRQGDCVYLMRDSRRTPDGHPVRQSYRLLSHINRDKLDIFRIEKLWKNEKEERFAFGHHYFRPHETHHSPSRRFYHNELFRVPLYEIIPLEAVVGTCCVLDLYTYCKGRPKGVKEQDVYICDYRLDKSAHLFYKIHRNRYPVCTKPYAFDHFPKKLTPKKDFSPHYVPDNYKRNGGRSSWKSERSKPPLKDLGQEDDALPLIEEVLASQEQAANEIPSLEEPEREGATANVSEGEKKTEESSQEPQSTCTPEERRHNQRERLNQILLNLLEKIPGKNAIDVTYLLEEGSGRKLRRRTLFIPENSFRK

SEQ ID NO: 10647 - protein, 1433 aa, Artificial Sequence
  Synthetic polypeptide
HHLSPADFSFTSPDIDNHHALIEYNEAECSFVLQDFNSRNGTFVNECHIQNVAVKLIPGDILRFGSAGLTYELVIENPPPVSFPWMRGPAPWPGPQPPRATQQPNQAPPPSHIPFHQGVQPAPMQRSWSQAFPRPTVVLPASHRRPVSANKEMFSFVVDDARKPPVIKQVWTNAMKLSEKSVAEGIPGAVPPAEIYVEEDLAQQDKDEIILLLGKEVSRLSDYEIESKYKDVIIANLQNEVAELSQKVSETTTSRQNEKEISQKCQVLDEDIDAKQKEIQSLKSQISALQKGYSKVLCQTLSERNSEITSLKNEGENLKRDNAITSGMVSSLQKDILAKDEQVQQLKEEVSHLKSQNKDKDHQLEALGSRCSVLKEELKQEDAHRELREAQEKELKLCKTQIQDMEKEMKKLRAELRKSCTEQSVISRTLREKSKVEEKLQEDSRRKLLQLQEMGNRESVIKINLERAVGQLEHFRSQVIKATYGRAKPFRDKPVTDQQLIEKITQVTEDNINFQQKKWTLQKETQLSNSKQEETTENIEKLRTSLDSCQACMKISCCSHDLKKEVDLLQHLQVSPPVSGLQKVVLDVLRHALSWLEEVEQLLRDLGILPSSPNKDQVQQFSGNSAVFTAGKAAGASGREGEAERGEARARGEAQSQNQATDGREGGKALEEYITQERNRAKETLEEERKRMQELESLLAQQKKALAKSITQEKNRVKEALEEEQTRVQELEERLARQKEVLESSIAHEKRKAKEALESEKRKVQDLENHLTQQKEISESNIAYEKRKAKEAMEKEKKKVQDLENRLTKQKEELELKEQKEDVLNNKLSDALAMVEETQKTKATESLKAESLALKLNETLAELETTKTKMIMVEERLILQQKMVKALQDEQESQRHGFEEEIMEYKEQIKQHAQTIVSLEEKLQKVTQHHKKIEGEIATLKDNDPAPKEERPQDPLVAPMTESSAKDMAYEHLIDDLLAAQKEILSQQEVIMKLRKDLTEAHSRMSDLRGELNEKQKMELEQNVVLVQQQSKELSVLKEKMAQMSSLVEKKDRELKALEEALRASQEKHRLQLNTEKEQKPRKKTQTCDTSVQIEPVHTEAFSSSQEQQSFSDLGVRCKGSRHEEVIQRQKKALSELRARIKELEKARSPDHKDHQNESFLDLKNLRMENNVQKILLDAKPDLPTLSRIEILAPQNGLCNARFGSAMEKSGKMDVAEALELSEKLYLDMSKTLGSLMNIKNMSGHVSMKYLSRQEREKVNQLRQRDLDLVFDKITQLKNQLGRKEELLRGYEKDVEQLRRSKVSIEMYQSQVAKLEDDIYKEAEEKALLKEALERMEHQLCQEKRINRAIRQQKMRKLRLRELRGAQVHTAAGKDSWDLTPDPSDPGSPAVCRVGRKCRGARTEKRKRIDTLQLCLQRERQAGPAPPACSLNG

SEQ ID NO: 10648 - protein, 50 aa, Artificial Sequence
  Synthetic polypeptide
ALQTFHLRLLTSTTTMHSLNITRRSAALFSRTSIPATARLSTSATFKTWL

SEQ ID NO: 10649 - protein, 16 aa, Artificial Sequence
  Synthetic polypeptide
GLMTSLEPCRLFIYVS

SEQ ID NO: 10650 - protein, 1392 aa, Artificial Sequence
  Synthetic polypeptide
HHLSPADFSFTSPDIDNHHALIEYNEAECSFVLQDFNSRNGTFVNECHIQNVAVKLIPGDILRFGSAGLTYELVIENPPPVSFPWMRGPAPWPGPQPPRATQQPNQAPPPSHIPFHQGVQPAPMQRSWSQAFPRPTVVLPASHRRPVSANKEMFSFVVDDARKPPVIKQVWTNAMKLSEKSVAEGIPGAVPPAEIYVEEDLAQQDKDEIILLLGKEVSRLSDYEIESKYKDVIIANLQNEVAELSQKVSETTTSRQNEKEISQKCQVLDEDIDAKQKEIQSLKSQISALQKGYSKVLCQTLSERNSEITSLKNEGENLKRDNAITSGMVSSLQKDILAKDEQVQQLKEEVSHLKSQNKDKDHQLEALGSRCSVLKEELKQEDAHRELREAQEKELKLCKTQIQDMEKEMKKLRAELRKSCTEQSVISRTLREKSKVEEKLQEDSRRKLLQLQEMGNRESVIKINLERAVGQLEHFRSQVIKATYGRAKPFRDKPVTDQQLIEKITQVTEDNINFQQKKWTLQKETQLSNSKQEETTENIEKLRTSLDSCQACMKISCCSHDLKKEVDLLQHLQVSPPVSGLQKVVLDVLRHALSWLEEVEQLLRDLGILPSSPNKDQVQQFSGNSAVFTAGKAAGASGREGEAERGEARARGEAQSQNQATDGREGGKALEEYITQERNRAKETLEEERKRMQELESLLAQQKKALAKSITQEKNRVKEALEEEQTRVQELEERLARQKEVLESSIAHEKRKAKEALESEKRKVQDLENHLTQQKEISESNIAYEKRKAKEAMEKEKKKVQDLENRLTKQKEELELKEQKEDVLNNKLSDALAMVEETQKTKATESLKAESLALKLNETLAELETTKTKMIMVEERLILQQKMVKALQDEQESQRHGFEEEIMEYKEQIKQHAQTIVSLEEKLQKVTQHHKKIEGEIATLKDNDPAPKEERPQDPLVAPMTESSAKDMAYEHLIDDLLAAQKEILSQQEVIMKLRKDLTEAHSRMSDLRGELNEKQKMELEQNVVLVQQQSKELSVLKEKMAQMSSLVEKKDRELKALEEALRASQEKHRLQLNTEKEQKPRKKTQTCDTSVQIEPVHTEAFSSSQEQQSFSDLGVRCKGSRHEEVIQRQKKALSELRARIKELEKARSPDHKDHQNESFLDLKNLRMENNVQKILLDAKPDLPTLSRIEILAPQNGLCNARFGSAMEKSGKMDVAEALELSEKLYLDMSKTLGSLMNIKNMSGHVSMKYLSRQEREKVNQLRQRDLDLVFDKITQLKNQLGRKEELLRGYEKDVEQLRRSKVSIEMYQSQVAKLEDDIYKEAEEKALLKEALERMEHQLCQEKRINRAIRQQKVGTRKASLKMDQEREMLRKETSSKSSQSLLHSKPSGKY

SEQ ID NO: 10651 - protein, 1356 aa, Artificial Sequence
  Synthetic polypeptide
HHLSPADFSFTSPDIDNHHALIEYNEAECSFVLQDFNSRNGTFVNECHIQNVAVKLIPGDILRFGSAGLTYELVIENPPPVSFPWMRGPAPWPGPQPPRATQQPNQAPPPSHIPFHQGVQPAPMQRSWSQAFPRPTVVLPASHRRPVSANKEMFSFVVDDARKPPVIKQVWTNAMKLSEKSVAEGIPGAVPPAEIYVEEDLAQQDKDEIILLLGKEVSRLSDYEIESKYKDVIIANLQNEVAELSQKVSETTTSRQNEKEISQKCQVLDEDIDAKQKEIQSLKSQISALQKGYSKVLCQTLSERNSEITSLKNEGENLKRDNAITSGMVSSLQKDILAKDEQVQQLKEEVSHLKSQNKDKDHQLEALGSRCSVLKEELKQEDAHRELREAQEKELKLCKTQIQDMEKEMKKLRAELRKSCTEQSVISRTLREKSKVEEKLQEDSRRKLLQLQEMGNRESVIKINLERAVGQLEHFRSQVIKATYGRAKPFRDKPVTDQQLIEKITQVTEDNINFQQKKWTLQKETQLSNSKQEETTENIEKLRTSLDSCQACMKISCCSHDLKKEVDLLQHLQVSPPVSGLQKVVLDVLRHALSWLEEVEQLLRDLGILPSSPNKDQVQQFSGNSAVFTAGKAAGASGREGEAERGEARARGEAQSQNQATDGREGGKALEEYITQERNRAKETLEEERKRMQELESLLAQQKKALAKSITQEKNRVKEALEEEQTRVQELEERLARQKEISESNIAYEKRKAKEAMEKEKKKVQDLENRLTKQKEELELKEQKEDVLNNKLSDALAMVEETQKTKATESLKAESLALKLNETLAELETTKTKMIMVEERLILQQKMVKALQDEQESQRHGFEEEIMEYKEQIKQHAQTIVSLEEKLQKVTQHHKKIEGEIATLKDNDPAPKEERPQDPLVAPMTESSAKDMAYEHLIDDLLAAQKEILSQQEVIMKLRKDLTEAHSRMSDLRGELNEKQKMELEQNVVLVQQQSKELSVLKEKMAQMSSLVEKKDRELKALEEALRASQEKHRLQLNTEKEQKPRKKTQTCDTSVQIEPVHTEAFSSSQEQQSFSDLGVRCKGSRHEEVIQRQKKALSELRARIKELEKARSPDHKDHQNESFLDLKNLRMENNVQKILLDAKPDLPTLSRIEILAPQNGLCNARFGSAMEKSGKMDVAEALELSEKLYLDMSKTLGSLMNIKNMSGHVSMKYLSRQEREKVNQLRQRDLDLVFDKITQLKNQLGRKEELLRGYEKDVEQLRRSKVSIEMYQSQVAKLEDDIYKEAEEKALLKEALERMEHQLCQEKRINRAIRQQKVGTRKASLKMDQEREMLRKETSSKSSQSLLHSKPSGKY

SEQ ID NO: 10652 - protein, 80 aa, Artificial Sequence
  Synthetic polypeptide
LTAVITALWEAKAEGSLELRSLRPAWATKKDLMPWIPLFPSWFPTITQRNLKVVFSIIWKTIGFNMRKLLQKKGKKSCCS

SEQ ID NO: 10653 - protein, 9 aa, Artificial Sequence
  Synthetic polypeptide
DQPGQQRRI

SEQ ID NO: 10654 - protein, 78 aa, Artificial Sequence
  Synthetic polypeptide
AQEFETSLGNKEGFDALDPFIPILVSNYNPKEFESCIQYYLENNWLQHEKAPTEEGKKELLFLSNANPSLLERHCAYL

SEQ ID NO: 10655 - protein, 28 aa, Artificial Sequence
  Synthetic polypeptide
EFETSLGNIARRCLYKKNLKIRPGKRRR

SEQ ID NO: 10656 - protein, 37 aa, Artificial Sequence
  Synthetic polypeptide
KLDPGKGEDEGSQGCPLYQWAPLHHHFSFRHDHVLCL

SEQ ID NO: 10657 - protein, 20 aa, Artificial Sequence
  Synthetic polypeptide
KLDPGKGEDEGSQGCPLYQW

SEQ ID NO: 10658 - protein, 37 aa, Artificial Sequence
  Synthetic polypeptide
RGTSNRLDMCGCPPVISLDKMEQERTNLRTLWFYLVV

SEQ ID NO: 10659 - protein, 35 aa, Artificial Sequence
  Synthetic polypeptide
GVLQIGWICVAVLLSSLWIRWSKREPTSGLFGSTW

SEQ ID NO: 10660 - protein, 17 aa, Artificial Sequence
  Synthetic polypeptide
DGARENQPQDSLVLPGS

SEQ ID NO: 10661 - protein, 29 aa, Artificial Sequence
  Synthetic polypeptide
GRVCWLTPVIPALWEAKVLSWCSGGPPGV

SEQ ID NO: 10662 - protein, 141 aa, Artificial Sequence
  Synthetic polypeptide
SQHFGRPRYYRGAVGALLVFDLTKHQTYAVVERWLKELYDHAEATIVVMLVGNKSDLSQAREVPTEEARMFAENNGLLFLETSALDSTNVELAFETVLKEIFAKVSKQRQNSIRTNAITLGSAQAGQEPGPGEKRACCISL

SEQ ID NO: 10663 - protein, 30 aa, Artificial Sequence
  Synthetic polypeptide
PGVLAHTCNPSTLGGQGTIVVQWGPSWCLT

SEQ ID NO: 10664 - protein, 62 aa, Artificial Sequence
  Synthetic polypeptide
GRVCWLTPVIPALWEAKVGGSLELMNSRPAWATWQNPVSTKNIKNWPGLVVLSWCSGGPPGV

SEQ ID NO: 10665 - protein, 140 aa, Artificial Sequence
  Synthetic polypeptide
KIGRAWWYYRGAVGALLVFDLTKHQTYAVVERWLKELYDHAEATIVVMLVGNKSDLSQAREVPTEEARMFAENNGLLFLETSALDSTNVELAFETVLKEIFAKVSKQRQNSIRTNAITLGSAQAGQEPGPGEKRACCISL

SEQ ID NO: 10666 - protein, 41 aa, Artificial Sequence
  Synthetic polypeptide
AHEFETSLGNMAKSCLYQKYKKLAGLGGTIVVQWGPSWCLT

SEQ ID NO: 10667 - protein, 69 aa, Artificial Sequence
  Synthetic polypeptide
PWASFSLPQLPHLKNGGDDNRTPPHRIMLSTPSLGRKCWSPPALWWTVCETGLQLGGVQVTTGEEGGNL

SEQ ID NO: 10668 - protein, 168 aa, Artificial Sequence
  Synthetic polypeptide
KMGVMIIEPRLTESCSPLLHWDGSAGPRLPSGGQSVKQAFSWAACRLPQGRKEEISDIKEEGNLEAVLNALDKIVEEGKVRKEPAWRPSGIPEKDLHSVMAPYFLQQRDTLRRHVQKQEAENQQLADAVLAGRRQVEELQLQVQAQQQAWQALHREQRELVAVLREPE

SEQ ID NO: 10669 - protein, 28 aa, Artificial Sequence
  Synthetic polypeptide
NPASQNHALHSFIGTEVLVPACPLVDSL

SEQ ID NO: 10670 - protein, 71 aa, Artificial Sequence
  Synthetic polypeptide
PWASFSLPQLPHLKNGGDDNRTPPHRIMLSTPSLGRKCWSPPALWWTVCETGLQLGGVQVTTGEEATRDSL

SEQ ID NO: 10671 - protein, 57 aa, Artificial Sequence
  Synthetic polypeptide
KMGVMIIEPRLTESCSPLLHWDGSAGPRLPSGGQSVKQAFSWAACRLPQGRKLPEIH

SEQ ID NO: 10672 - protein, 36 aa, Artificial Sequence
  Synthetic polypeptide
DQPEQHDYCRYHPNMFGTQVHDEDAFGPNGRHCDDQ

SEQ ID NO: 10673 - protein, 531 aa, Artificial Sequence
  Synthetic polypeptide
GRWITWAQGFETSPSNMTIADIIRTCLGPKSMMKMLLDPMGGIVMTNDGNAILREIQVQHPAAKSMIEISRTQDEEVGDGTTSVIILAGEMLSVAEHFLEQQMHPTVVISAYRKALDDMISTLKKISIPVDISDSDMMLNIINSSITTKAISRWSSLACNIALDAVKMVQFEENGRKEIDIKKYARVEKIPGGIIEDSCVLRGVMINKDVTHPRMRRYIKNPRIVLLDSSLEYKKGESQTDIEITREEDFTRILQMEEEYIQQLCEDIIQLKPDVVITEKGISDLAQHYLMRANITAIRRVRKTDNNRIARACGARIVSRPEELREDDVGTGAGLLEIKKIGDEYFTFITDCKDPKACTILLRGASKEILSEVERNLQDAMQVCRNVLLDPQLVPGGGASEMAVAHALTEKSKAMTGVEQWPYRAVAQALEVIPRTLIQNCGASTIRLLTSLRAKHTQENCETWGVNGETGTLVDMKELGIWEPLAVKLQTYKTAVETAVLLLRIDDIVSGHKKKGDDQSRQGGAPDAGQE

SEQ ID NO: 10674 - protein, 47 aa, Artificial Sequence
  Synthetic polypeptide
GRWITWAQGFETSPSNMTIADIIRTCLGPKSMMKMLLDPMGGIVMTN

SEQ ID NO: 10675 - protein, 238 aa, Artificial Sequence
  Synthetic polypeptide
GRWITWAQGFETSPSNMTIADIIRTCLGPKSMMKMLLDPMGGIVMTNDGNAILREIQVQHPAAKSMIEISRTQDEEVGDGTTSVIILAGEMLSVAEHFLEQQMHPTVVISAYRKALDDMISTLKKISIPVDISDSDMMLNIINSSITTKAISRWSSLACNIALDAVKMVQFEENGRKEIDIKKYARVEKIPGGIIEDSCVLRGVMINKDVTHPRMRRYIKNPRIVLLDSSLEYKKGES

SEQ ID NO: 10676 - protein, 220 aa, Artificial Sequence
  Synthetic polypeptide
GRWITWAQGFETSPSNMTIADIIRTCLGPKSMMKMLLDPMGGIVMTNDGNAILREIQVQHPAAKSMIEISRTQDEEVGDGTTSVIILGEMLSVAEHFLEQQMHPTVVISAYRKALDDMISTLKKISIPVDISDSDMMLNIINSSITTKAISRWSSLACNIALDAVKMVQFEENGRKEIDIKKYARVEKIPGGIIEDSCVLRGVMINKDVTHPRMRRYIKN

SEQ ID NO: 10677 - protein, 37 aa, Artificial Sequence
  Synthetic polypeptide
DQPEQHDYCRYHPNMFGTQVHDEDSSPASSGQVHDRN

SEQ ID NO: 10678 - protein, 140 aa, Artificial Sequence
  Synthetic polypeptide
GRWITWAQGFETSPSNMTIADIIRTCLGPKSMMKIQVQHPAAKSMIEISRTQDEEVGDGTTSVIILAGEMLSVAEHFLEQQMHPTVVISAYRKALDDMISTLKKISIPVDISDSDMMLNIINSSITTKAISRWSSLACNI

SEQ ID NO: 10679 - protein, 147 aa, Artificial Sequence
  Synthetic polypeptide
GRWITWAQGFETSPSNMTIADIIRTCLGPKSMMKMLLDPMGGIVMTNDGNAILREIQVQHPAAKSMIEISRTQDEEVGDGTTSVIILESHSVTMLECGGAILAHCNLCLPAGEMLSVAEHFLEQQMHPTVVISAYRKALDDMISTLK

SEQ ID NO: 10680 - protein, 35 aa, Artificial Sequence
  Synthetic polypeptide
MRTQSVNPEEKFNLETSMLPRLLQISSEHVWDPSP

SEQ ID NO: 10681 - protein, 537 aa, Artificial Sequence
  Synthetic polypeptide
ELNENTKRESGRKVQSGNINAAKTIADIIRTCLGPKSMMKMLLDPMGGIVMTNDGNAILREIQVQHPAAKSMIEISRTQDEEVGDGTTSVIILAGEMLSVAEHFLEQQMHPTVVISAYRKALDDMISTLKKISIPVDISDSDMMLNIINSSITTKAISRWSSLACNIALDAVKMVQFEENGRKEIDIKKYARVEKIPGGIIEDSCVLRGVMINKDVTHPRMRRYIKNPRIVLLDSSLEYKKGESQTDIEITREEDFTRILQMEEEYIQQLCEDIIQLKPDVVITEKGISDLAQHYLMRANITAIRRVRKTDNNRIARACGARIVSRPEELREDDVGTGAGLLEIKKIGDEYFTFITDCKDPKACTILLRGASKEILSEVERNLQDAMQVCRNVLLDPQLVPGGGASEMAVAHALTEKSKAMTGVEQWPYRAVAQALEVIPRTLIQNCGASTIRLLTSLRAKHTQENCETWGVNGETGTLVDMKELGIWEPLAVKLQTYKTAVETAVLLLRIDDIVSGHKKKGDDQSRQGGAPDAGQE

SEQ ID NO: 10682 - protein, 31 aa, Artificial Sequence
  Synthetic polypeptide
MRTQSVNPEEKFNLETSMLPRFKSSIQRPSP

SEQ ID NO: 10683 - protein, 499 aa, Artificial Sequence
  Synthetic polypeptide
ELNENTKRESGRKVQSGNINAAKIQVQHPAAKSMIEISRTQDEEVGDGTTSVIILAGEMLSVAEHFLEQQMHPTVVISAYRKALDDMISTLKKISIPVDISDSDMMLNIINSSITTKAISRWSSLACNIALDAVKMVQFEENGRKEIDIKKYARVEKIPGGIIEDSCVLRGVMINKDVTHPRMRRYIKNPRIVLLDSSLEYKKGESQTDIEITREEDFTRILQMEEEYIQQLCEDIIQLKPDVVITEKGISDLAQHYLMRANITAIRRVRKTDNNRIARACGARIVSRPEELREDDVGTGAGLLEIKKIGDEYFTFITDCKDPKACTILLRGASKEILSEVERNLQDAMQVCRNVLLDPQLVPGGGASEMAVAHALTEKSKAMTGVEQWPYRAVAQALEVIPRTLIQNCGASTIRLLTSLRAKHTQENCETWGVNGETGTLVDMKELGIWEPLAVKLQTYKTAVETAVLLLRIDDIVSGHKKKGDDQSRQGGAPDAGQE

SEQ ID NO: 10684 - protein, 244 aa, Artificial Sequence
  Synthetic polypeptide
ELNENTKRESGRKVQSGNINAAKTIADIIRTCLGPKSMMKMLLDPMGGIVMTNDGNAILREIQVQHPAAKSMIEISRTQDEEVGDGTTSVIILAGEMLSVAEHFLEQQMHPTVVISAYRKALDDMISTLKKISIPVDISDSDMMLNIINSSITTKAISRWSSLACNIALDAVKMVQFEENGRKEIDIKKYARVEKIPGGIIEDSCVLRGVMINKDVTHPRMRRYIKNPRIVLLDSSLEYKKGES

SEQ ID NO: 10685 - protein, 226 aa, Artificial Sequence
  Synthetic polypeptide
ELNENTKRESGRKVQSGNINAAKTIADIIRTCLGPKSMMKMLLDPMGGIVMTNDGNAILREIQVQHPAAKSMIEISRTQDEEVGDGTTSVIILGEMLSVAEHFLEQQMHPTVVISAYRKALDDMISTLKKISIPVDISDSDMMLNIINSSITTKAISRWSSLACNIALDAVKMVQFEENGRKEIDIKKYARVEKIPGGIIEDSCVLRGVMINKDVTHPRMRRYIKN

SEQ ID NO: 10686 - protein, 156 aa, Artificial Sequence
  Synthetic polypeptide
ELNENTKRESGRKVQSGNINAAKIQVQHPAAKSMIEISRTQDEEVGDGTTSVIILAGEMLSVAEHFLEQQMHPTVVISAYRKALDDMISTLKKISIPVDISDSDMMLNIINSSITTKAISRWSSLACNIALDAVKMVQFEENGRKEIDIKKYARVE

SEQ ID NO: 10687 - protein, 146 aa, Artificial Sequence
  Synthetic polypeptide
ELNENTKRESGRKVQSGNINAAKTIADIIRTCLGPKSMMKIQVQHPAAKSMIEISRTQDEEVGDGTTSVIILAGEMLSVAEHFLEQQMHPTVVISAYRKALDDMISTLKKISIPVDISDSDMMLNIINSSITTKAISRWSSLACNI

SEQ ID NO: 10688 - protein, 153 aa, Artificial Sequence
  Synthetic polypeptide
ELNENTKRESGRKVQSGNINAAKTIADIIRTCLGPKSMMKMLLDPMGGIVMTNDGNAILREIQVQHPAAKSMIEISRTQDEEVGDGTTSVIILESHSVTMLECGGAILAHCNLCLPAGEMLSVAEHFLEQQMHPTVVISAYRKALDDMISTLK

SEQ ID NO: 10689 - protein, 37 aa, Artificial Sequence
  Synthetic polypeptide
GQAWWLTPVIPALWETEAGGSRGQEIETILANMPSPI

SEQ ID NO: 10690 - protein, 561 aa, Artificial Sequence
  Synthetic polypeptide
SQHFGRPRQADHEVRRSRLSWLTCHLPYDVTPEQALSHPEVQRRLDIALRNLLAMTDKFLLAITSSVDQIPYGMRYVAKVLKATLAEKFPDATDSEVYKVVGNLLYYRFLNPAVVAPDAFDIVAMAAGGALAAPQRHALGAVAQLLQHAAAGKAFSGQSQHLRVLNDYLEETHLKFRKFIHRACQVPEPEERFAVDEYSDMVAVAKPMVYITVGELVNTHRLLLEHQDCIAPDHQDPLHELLEDLGELPTIPDLIGESIAADGHTDLSKLEVSLTLTNKFEGLEADADDSNTRSLLLSTKQLLADIIQFHPGDTLKEILSLSASREQEAAHKQLMSRRQACTAQTPEPLRRHRSLTAHSLLPLAEKQRRVLRNLRRLEALGLVSARNGYQGLVDELAKDIRNQHRHRHRRKAELVKLQATLQGLSTKTTFYEEQGDYYSQYIRACLDHLAPDSKSSGKGKKQPSLHYTAAQLLEKGVLVEIEDLPASHFRNVIFDITPGDEAGKFEVNAKFLGVDMERFQLHYQDLLQLQYEGVAVMKLFNKAKVNVNLLIFLLNKKFLRK

SEQ ID NO: 10691 - protein, 13 aa, Artificial Sequence
  Synthetic polypeptide
HAISHMMSPRSRP

SEQ ID NO: 10692 - protein, 58 aa, Artificial Sequence
  Synthetic polypeptide
EPSTSETKKKGEQPTGQQRRKHQITYLIHQAKERELELKNTWSENKLSRRQTQAKYGF

SEQ ID NO: 10693 - protein, 37 aa, Artificial Sequence
  Synthetic polypeptide
SPAPARPRRKVSSQQASSGGNTRSHILFIRPRSGSWN

SEQ ID NO: 10694 - protein, 10 aa, Artificial Sequence
  Synthetic polypeptide
AQHQRDQEER

SEQ ID NO: 10695 - protein, 23 aa, Artificial Sequence
  Synthetic polypeptide
AEIAPLRSSPGIRIKRAKRGRFK

SEQ ID NO: 10696 - protein, 628 aa, Artificial Sequence
  Synthetic polypeptide
HRCAPAQELELKEQKEDVLNNKLSDALAMVEETQKTKATESLKAESLALKLNETLAELETTKTKMIMVEERLILQQKMVKALQDEQESQRHGFEEEIMEYKEQIKQHAQTIVSLEEKLQKVTQHHKKIEGEIATLKDNDPAPKEERPQDPLVAPMTESSAKDMAYEHLIDDLLAAQKEILSQQEVIMKLRKDLTEAHSRMSDLRGELNEKQKMELEQNVVLVQQQSKELSVLKEKMAQMSSLVEKKDRELKALEEALRASQEKHRLQLNTEKEQKPRKKTQTCDTSVQIEPVHTEAFSSSQEQQSFSDLGVRCKGSRHEEVIQRQKKALSELRARIKELEKARSPDHKDHQNESFLDLKNLRMENNVQKILLDAKPDLPTLSRIEILAPQNGLCNARFGSAMEKSGKMDVAEALELSEKLYLDMSKTLGSLMNIKNMSGHVSMKYLSRQEREKVNQLRQRDLDLVFDKITQLKNQLGRKEELLRGYEKDVEQLRRSKVSIEMYQSQVAKLEDDIYKEAEEKALLKEALERMEHQLCQEKRINRAIRQQKMRKLRLRELRGAQVHTAAGKDSWDLTPDPSDPGSPAVCRVGRKCRGARTEKRKRIDTLQLCLQRERQAGPAPPACSLNG

SEQ ID NO: 10697 - protein, 10 aa, Artificial Sequence
  Synthetic polypeptide
DSTVALQPRN

SEQ ID NO: 10698 - protein, 587 aa, Artificial Sequence
  Synthetic polypeptide
HRCAPAQELELKEQKEDVLNNKLSDALAMVEETQKTKATESLKAESLALKLNETLAELETTKTKMIMVEERLILQQKMVKALQDEQESQRHGFEEEIMEYKEQIKQHAQTIVSLEEKLQKVTQHHKKIEGEIATLKDNDPAPKEERPQDPLVAPMTESSAKDMAYEHLIDDLLAAQKEILSQQEVIMKLRKDLTEAHSRMSDLRGELNEKQKMELEQNVVLVQQQSKELSVLKEKMAQMSSLVEKKDRELKALEEALRASQEKHRLQLNTEKEQKPRKKTQTCDTSVQIEPVHTEAFSSSQEQQSFSDLGVRCKGSRHEEVIQRQKKALSELRARIKELEKARSPDHKDHQNESFLDLKNLRMENNVQKILLDAKPDLPTLSRIEILAPQNGLCNARFGSAMEKSGKMDVAEALELSEKLYLDMSKTLGSLMNIKNMSGHVSMKYLSRQEREKVNQLRQRDLDLVFDKITQLKNQLGRKEELLRGYEKDVEQLRRSKVSIEMYQSQVAKLEDDIYKEAEEKALLKEALERMEHQLCQEKRINRAIRQQKVGTRKASLKMDQEREMLRKETSSKSSQSLLHSKPSGKY

SEQ ID NO: 10699 - protein, 549 aa, Artificial Sequence
  Synthetic polypeptide
HRCAPAQELELKEQKEDVLNNKLSDALAMVEETQKTKATESLKAESLALKLNETLAELETTKTKMIMVEERLILQQKMVKALQDEQESQRHGFEEEIMEYKEQIKQHAQTIVSLEEKLQKVTQHHKKIEGEIATLKDNDPAPKEERPQDPLVAPMTESSAKDMAYEHLIDDLLAAQKEILSQQEVIMKLRKDLTEAHSRMSDLRGELNEKQKMELEQNVVLVQQQSKELSVLKEKMAQMSSLVEKKDRELKALEEALRASQEKHRLQLNTEKEQKPRKKTQTCDTSVQIEPVHTEAFSSSQEQQSFSDLGVRCKGSRHEEVIQRQKKALSELRARIKELEKARSPDHKDHQNESFLDLKNLRMENNVQKILLDAKPDLPTLSRIEILAPQNGLCNARFGSAMEKSGKMDVAEALELSEKLYLDMSKTLGSLMNIKNMSGHVSMKYLSRQEREKVNQLRQRDLDLVFDKITQLKNQLGRKEELLRGYEKDVEQLRRSKVSIEMYQSQVAKLEDDIYKEAEEKALLKEALERMEHQLCQEKRINRAIRQQK

SEQ ID NO: 10700 - protein, 605 aa, Artificial Sequence
  Synthetic polypeptide
HRCAPAQELELKEQKEDVLNNKLSDALAMVEETQKTKATESLKAESLALKLNETLAELETTKTKMIMVEERLILQQKMVKALQDEQESQRHGFEEEIMEYKEQIKQHAQTIVSLEEKLQKVTQHHKKIEGEIATLKDNDPAPKEERPQDPLVAPMTESSAKDMAYEHLIDDLLAAQKEILSQQEVIMKLRKDLTEAHSRMSDLRGELNEKQKMELEQNVVLVQQQSKELSVLKEKMAQMSSLVEKKDRELKALEEALRASQEKHRLQLNTEKEQKPRKKTQTCDTSVQIEPVHTEAFSSSQEQQSFSDLGVRCKGSRHEEVIQRQKKALSELRARIKELEKARSPDHKDHQNESFLDLKNLRMENNVQKILLDAKPDLPTLSRIEILAPQNGLCNARFGSAMEKSGKMDVAEALELSEKLYLDMSKTLGSLMNIKNMSGHVSMKYLSRQEREKVNQLRQRDLDLVFDKITQLKNQLGRKEELLRGYEKDVEQLRRSKVSIEMYQSQVAKLEDDIYKEAEEKALLKEALERMEHQLCQEKRINRAIRQQKRRVFVEMVKNRMQNSNSQVGTRKASLKMDQEREMLRKETSSKSSQSLLHSKPSGKY

SEQ ID NO: 10701 - protein, 22 aa, Artificial Sequence
  Synthetic polypeptide
LFNLSVHTLENGDVLPVSPDFC

SEQ ID NO: 10702 - protein, 23 aa, Artificial Sequence
  Synthetic polypeptide
YLTSLFTHWKMGMYYLFHQTFVK

SEQ ID NO: 10703 - protein, 1570 aa, Artificial Sequence
  Synthetic polypeptide
PLCSHTGKWGCTTCFTRLLLSSLSSLGDSAPERKSPSHHRQPSDASETTGLVQRCVIIQKDQHGFGFTVSGDRIVLVQSVRPGGAAMKAGVKEGDRIIKVNGTMVTNSSHLEVVKLIKSGAYVALTLLGSSPSSMGISGLQQDPSPAGAPRITSVIPSPPPPPPLPPPQRITGPKPLQDPEVQKHATQILRNMLRQEEKELQRICEVYSRNPASLLEEQIEGARRRVTQLQLKIQQETGGSVDILPLYGDTSQRPSEGRLSLDSQEGDSGLDSGTERFPSLSESLMNRNSVLSDPGLDSPRTSPVIMARVAQHHRRQGSDAAVPSTGDQGVDQSPKPLIIGPEEDYDPGYFNNESDIIFQDLEKLKSRPAHLGVFLRYIFSQADPSPLLFYLCAEVYQQASPKDSRSLGKDIWNIFLEKNAPLRVKIPEMLQAEIDSRLRNSEDARGVLCEAQEAAMPEIQEQIHDYRTKRTLGLGSLYGENDLLDLDGDPLRERQVAEKQLAALGDILSKYEEDRSAPMDFALNTYMSHAGIRLREARPSNTAEKAQSAPDKDKWLPFFPKTKKSSNSKKEKDALEDKKRNPILKYIGKPKSSSQSTFHIPLSPVEVKPGNVRNIIQHFENNQQYDAPEPGTQRLSTGSFPEDLLESDSSRSEIRLGRSESLKGREEMKRSRKAENVPRSRSDVDMDAAAEATRLHQSASSSTSSLSTRSLENPTPPFTPKMGRRSIESPSLGFCTDTLLPHLLEDDLGQLSDLEPEPDAQNWQHTVGKDVVAGLTQREIDRQEVINELFVTEASHLRTLRVLDLIFYQRMKKENLMPREELARLFPNLPELIEIHNSWCEAMKKLREEGPIIKEISDLMLARFDGPAREELQQVAAQFCSYQSIALELIKTKQRKESRFQLFMQEAESHPQCRRLQLRDLIISEMQRLTKYPLLLESIIKHTEGGTSEHEKLCRARDQCREILKYVNEAVKQTENRHRLEGYQKRLDATALERASNPLAAEFKSLDLTTRKMIHEGPLTWRISKDKTLDLHVLLLEDLLVLLQKQDEKLLLKCHSKTAVGSSDSKQTFSPVLKLNAVLIRSVATDKRAFFIICTSKLGPPQIYELVALTSSDKNTWMELLEEAVRNATRHPGAAPMPVHPPPPGPREPAQQGPTPSRVELDDSDVFHGEPEPEELPGGTGSQQRVQGKHQVLLEDPEQEGSAEEEELGVLPCPSTSLDGENRGIRTRNPIHLAFPGPLFMEGLADSALEDVENLRHLILWSLLPGHTMETQAAQEPEDDLTPTPSVISVTSHPWDPGSPGQAPPGGEGDNTQLAGLEGERPEQEDMGLCSLEHLPPRTRNSGIWESPELDRNLAEDASSTEAAGGYKVVRKAEVAGSKVVPALPESGQSEPGPPEVEGGTKATGNCFYVSMPSGPPDSSTDHSEAPMSPPQPDSLPAGQTEPQPQLQGGNDDPRRPSRSPPSLALRDVGMIFHTIEQLTLKLNRLKDMELAHRELLKSLGGESSGGTTPVGSFHTEAARWTDGSLSPPAKEPLASDSRNSHELGPCPEDGSDAPLEDSTADAAASPGP

SEQ ID NO: 10704 - protein, 1530 aa, Artificial Sequence
  Synthetic polypeptide
PLCSHTGKWGCTTCFTRLLLSSLSSLGDSAPERKSPSHHRQPSDASETTGLVQRCVIIQKDQHGFGFTVSGDRIVLVQSVRPGGAAMKAGVKEGDRIIKVNGTMVTNSSHLEVVKLIKSGAYVALTLLGSSPSSMGISGLQQDPSPAGAPRITSVIPSPPPPPPLPPPQRITGPKPLQDPEVQKHATQILRNMLRQEEKELQDILPLYGDTSQRPSEGRLSLDSQEGDSGLDSGTERFPSLSESLMNRNSVLSDPGLDSPRTSPVIMARVAQHHRRQGSDAAVPSTGDQGVDQSPKPLIIGPEEDYDPGYFNNESDIIFQDLEKLKSRPAHLGVFLRYIFSQADPSPLLFYLCAEVYQQASPKDSRSLGKDIWNIFLEKNAPLRVKIPEMLQAEIDSRLRNSEDARGVLCEAQEAAMPEIQEQIHDYRTKRTLGLGSLYGENDLLDLDGDPLRERQVAEKQLAALGDILSKYEEDRSAPMDFALNTYMSHAGIRLREARPSNTAEKAQSAPDKDKWLPFFPKTKKSSNSKKEKDALEDKKRNPILKYIGKPKSSSQSTFHIPLSPVEVKPGNVRNIIQHFENNQQYDAPEPGTQRLSTGSFPEDLLESDSSRSEIRLGRSESLKGREEMKRSRKAENVPRSRSDVDMDAAAEATRLHQSASSSTSSLSTRSLENPTPPFTPKMGRRSIESPSLGFCTDTLLPHLLEDDLGQLSDLEPEPDAQNWQHTVGKDVVAGLTQREIDRQEVINELFVTEASHLRTLRVLDLIFYQRMKKENLMPREELARLFPNLPELIEIHNSWCEAMKKLREEGPIIKEISDLMLARFDGPAREELQQVAAQFCSYQSIALELIKTKQRKESRFQLFMQEAESHPQCRRLQLRDLIISEMQRLTKYPLLLESIIKHTEGGTSEHEKLCRARDQCREILKYVNEAVKQTENRHRLEGYQKRLDATALERASNPLAAEFKSLDLTTRKMIHEGPLTWRISKDKTLDLHVLLLEDLLVLLQKQDEKLLLKCHSKTAVGSSDSKQTFSPVLKLNAVLIRSVATDKRAFFIICTSKLGPPQIYELVALTSSDKNTWMELLEEAVRNATRHPGAAPMPVHPPPPGPREPAQQGPTPSRVELDDSDVFHGEPEPEELPGGTGSQQRVQGKHQVLLEDPEQEGSAEEEELGVLPCPSTSLDGENRGIRTRNPIHLAFPGPLFMEGLADSALEDVENLRHLILWSLLPGHTMETQAAQEPEDDLTPTPSVISVTSHPWDPGSPGQAPPGGEGDNTQLAGLEGERPEQEDMGLCSLEHLPPRTRNSGIWESPELDRNLAEDASSTEAAGGYKVVRKAEVAGSKVVPALPESGQSEPGPPEVEGGTKATGNCFYVSMPSGPPDSSTDHSEAPMSPPQPDSLPAGQTEPQPQLQGGNDDPRRPSRSPPSLALRDVGMIFHTIEQLTLKLNRLKDMELAHRELLKSLGGESSGGTTPVGSFHTEAARWTDGSLSPPAKEPLASDSRNSHELGPCPEDGSDAPLEDSTADAAASPGP

SEQ ID NO: 10705 - protein, 28 aa, Artificial Sequence
  Synthetic polypeptide
WDSSGHLNHHLQNEDISFADPASSTFCV

SEQ ID NO: 10706 - protein, 884 aa, Artificial Sequence
  Synthetic polypeptide
IIIYKMKILASLILQAPLSVFEGDSVVLRCRAKAEVTLNNTIYKNDNVLAFLNKRTDFHIPHACLKDNGAYRCTGYKESCCPVSSNTVKIQVQEPFTRPVLRASSFQPISGNPVTLTCETQLSLERSDVPLRFRFFRDDQTLGLGWSLSPNFQITAMWSKDSGFYWCKAATMPYSVISDSPRSWIQVQIPASHPVLTLSPEKALNFEGTKVTLHCETQEDSLRTLYRFYHEGVPLRHKSVRCERGASISFSLTTENSGNYYCTADNGLGAKPSKAVSLSVTVPVSHPVLNLSSPEDLIFEGAKVTLHCEAQRGSLPILYQFHHEGAALERRSANSAGGVAISFSLTAEHSGNYYCTADNGFGPQRSKAVSLSVTVPVSHPVLTLSSAEALTFEGATVTLHCEVQRGSPQILYQFYHEDMPLWSSSTPSVGRVSFSFSLTEGHSGNYYCTADNGFGPQRSEVVSLFVTVPVSRPILTLRVPRAQAVVGDLLELHCEAPRGSPPILYWFYHEDVTLGSSSAPSGGEASFNLSLTAEHSGNYSCEANNGLVAQHSDTISLSVIVPVSRPILTFRAPRAQAVVGDLLELHCEALRGSSPILYWFYHEDVTLGKISAPSGGGASFNLSLTTEHSGIYSCEADNGLEAQRSEMVTLKVAVPVSRPVLTLRAPGTHAAVGDLLELHCEALRGSPLILYRFFHEDVTLGNRSSPSGGASLNLSLTAEHSGNYSCEADNGLGAQRSETVTLYITGLTANRSGPFATGVAGGLLSIAGLAAGALLLYCWLSRKAGRKPASDPARSPSDSDSQEPTYHNVPAWEELQPVYTNANPRGENVVYSEVRIIQEKKKHAVASDPRHLRNKGSPIIYSEVKVASTPVSGSLFLASSAPHR

SEQ ID NO: 10707 - protein, 666 aa, Artificial Sequence
  Synthetic polypeptide
IIIYKMKILASLILQAPLSVFEGDSVVLRCRAKAEVTLNNTIYKNDNVLAFLNKRTDFHIPHACLKDNGAYRCTGYKESCCPVSSNTVKIQVQEPFTRPVLRASSFQPISGNPVTLTCETQLSLERSDVPLRFRFFRDDQTLGLGWSLSPNFQITAMWSKDSGFYWCKAATMPYSVISDSPRSWIQVQIPASHPVLTLSPEKALNFEGTKVTLHCETQEDSLRTLYRFYHEGVPLRHKSVRCERGASISFSLTTENSGNYYCTADNGLGAKPSKAVSLSVTVPVSHPVLNLSSPEDLIFEGAKVTLHCEAQRGSLPILYQFHHEGAALERRSANSAGGVAISFSLTAEHSGNYYCTADNGFGPQRSKAVSLSVTVPVSHPVLTLSSAEALTFEGATVTLHCEVQRGSPQILYQFYHEDMPLWSSSTPSVGRVSFSFSLTEGHSGNYYCTADNGFGPQRSEVVSLFVTVPVSRPILTLRVPRAQAVVGDLLELHCEAPRGSPPILYWFYHEDVTLGSSSAPSGGEASFNLSLTAEHSGNYSCEANNGLVAQHSDTISLSVIVPVSRPILTFRAPRAQAVVGDLLELHCEALRGSSPILYWFYHEDVTLGKISAPSGGGASFNLSLTTEHSGIYSCEADNGLEAQRSEMVTLKVAGEWALPTSSTSEN

SEQ ID NO: 10708 - protein, 499 aa, Artificial Sequence
  Synthetic polypeptide
IIIYKMKILASLILQAPLSVFEGDSVVLRCRAKAEVTLNNTIYKNDNVLAFLNKRTDFHIPHACLKDNGAYRCTGYKESCCPVSSNTVKIQVQEPFTRPVLRASSFQPISGNPVTLTCETQLSLERSDVPLRFRFFRDDQTLGLGWSLSPNFQITAMWSKDSGFYWCKAATMPYSVISDSPRSWIQVQIPASHPVLTLSPEKALNFEGTKVTLHCETQEDSLRTLYRFYHEGVPLRHKSVRCERGASISFSLTTENSGNYYCTADNGLGAKPSKAVSLSVTVPVSHPVLNLSSPEDLIFEGAKVTLHCEAQRGSLPILYQFHHEGAALERRSANSAGGVAISFSLTAEHSGNYYCTADNGFGPQRSKAVSLSVTVPVSHPVLTLSSAEALTFEGATVTLHCEVQRGSPQILYQFYHEDMPLWSSSTPSVGRVSFSFSLTEGHSGNYYCTADNGFGPQRSEVVSLFVTGKCWVLASHPPLAEFSLTHSFKNLFALSSFLP

SEQ ID NO: 10709 - protein, 28 aa, Artificial Sequence
  Synthetic polypeptide
WDSSGHLNHHLQNEDISLHGPQSSKERE

SEQ ID NO: 10710 - protein, 56 aa, Artificial Sequence
  Synthetic polypeptide
IIIYKMKILASMDHSLPRRESDPHLQGISLLLTTENKMVPSVPWERNTKRNPRQYP

SEQ ID NO: 10711 - protein, 74 aa, Artificial Sequence
  Synthetic polypeptide
WDSSGHLNHHLQNEDISKDTQAHYFPPASMDHSLPRRESDPHLQGISLLLTTENKMVPSVPWERNTKRNPRQYP

SEQ ID NO: 10712 - protein, 969 aa, Artificial Sequence
  Synthetic polypeptide
IIIYKMKILARTPRPIIFLQPPWTTVFQGERVTLTCKGFRFYSPQKTKWYHRYLGKEILRETPDNILEVQESGEYRCQAQGSPLSSPVHLDFSSASLILQAPLSVFEGDSVVLRCRAKAEVTLNNTIYKNDNVLAFLNKRTDFHIPHACLKDNGAYRCTGYKESCCPVSSNTVKIQVQEPFTRPVLRASSFQPISGNPVTLTCETQLSLERSDVPLRFRFFRDDQTLGLGWSLSPNFQITAMWSKDSGFYWCKAATMPYSVISDSPRSWIQVQIPASHPVLTLSPEKALNFEGTKVTLHCETQEDSLRTLYRFYHEGVPLRHKSVRCERGASISFSLTTENSGNYYCTADNGLGAKPSKAVSLSVTVPVSHPVLNLSSPEDLIFEGAKVTLHCEAQRGSLPILYQFHHEGAALERRSANSAGGVAISFSLTAEHSGNYYCTADNGFGPQRSKAVSLSVTVPVSHPVLTLSSAEALTFEGATVTLHCEVQRGSPQILYQFYHEDMPLWSSSTPSVGRVSFSFSLTEGHSGNYYCTADNGFGPQRSEVVSLFVTVPVSRPILTLRVPRAQAVVGDLLELHCEAPRGSPPILYWFYHEDVTLGSSSAPSGGEASFNLSLTAEHSGNYSCEANNGLVAQHSDTISLSVIVPVSRPILTFRAPRAQAVVGDLLELHCEALRGSSPILYWFYHEDVTLGKISAPSGGGASFNLSLTTEHSGIYSCEADNGLEAQRSEMVTLKVAVPVSRPVLTLRAPGTHAAVGDLLELHCEALRGSPLILYRFFHEDVTLGNRSSPSGGASLNLSLTAEHSGNYSCEADNGLGAQRSETVTLYITGLTANRSGPFATGVAGGLLSIAGLAAGALLLYCWLSRKAGRKPASDPARSPSDSDSQEPTYHNVPAWEELQPVYTNANPRGENVVYSEVRIIQEKKKHAVASDPRHLRNKGSPIIYSEVKVASTPVSGSLFLASSAPHR

SEQ ID NO: 10713 - protein, 751 aa, Artificial Sequence
  Synthetic polypeptide
IIIYKMKILARTPRPIIFLQPPWTTVFQGERVTLTCKGFRFYSPQKTKWYHRYLGKEILRETPDNILEVQESGEYRCQAQGSPLSSPVHLDFSSASLILQAPLSVFEGDSVVLRCRAKAEVTLNNTIYKNDNVLAFLNKRTDFHIPHACLKDNGAYRCTGYKESCCPVSSNTVKIQVQEPFTRPVLRASSFQPISGNPVTLTCETQLSLERSDVPLRFRFFRDDQTLGLGWSLSPNFQITAMWSKDSGFYWCKAATMPYSVISDSPRSWIQVQIPASHPVLTLSPEKALNFEGTKVTLHCETQEDSLRTLYRFYHEGVPLRHKSVRCERGASISFSLTTENSGNYYCTADNGLGAKPSKAVSLSVTVPVSHPVLNLSSPEDLIFEGAKVTLHCEAQRGSLPILYQFHHEGAALERRSANSAGGVAISFSLTAEHSGNYYCTADNGFGPQRSKAVSLSVTVPVSHPVLTLSSAEALTFEGATVTLHCEVQRGSPQILYQFYHEDMPLWSSSTPSVGRVSFSFSLTEGHSGNYYCTADNGFGPQRSEVVSLFVTVPVSRPILTLRVPRAQAVVGDLLELHCEAPRGSPPILYWFYHEDVTLGSSSAPSGGEASFNLSLTAEHSGNYSCEANNGLVAQHSDTISLSVIVPVSRPILTFRAPRAQAVVGDLLELHCEALRGSSPILYWFYHEDVTLGKISAPSGGGASFNLSLTTEHSGIYSCEADNGLEAQRSEMVTLKVAGEWALPTSSTSEN

SEQ ID NO: 10714 - protein, 584 aa, Artificial Sequence
  Synthetic polypeptide
IIIYKMKILARTPRPIIFLQPPWTTVFQGERVTLTCKGFRFYSPQKTKWYHRYLGKEILRETPDNILEVQESGEYRCQAQGSPLSSPVHLDFSSASLILQAPLSVFEGDSVVLRCRAKAEVTLNNTIYKNDNVLAFLNKRTDFHIPHACLKDNGAYRCTGYKESCCPVSSNTVKIQVQEPFTRPVLRASSFQPISGNPVTLTCETQLSLERSDVPLRFRFFRDDQTLGLGWSLSPNFQITAMWSKDSGFYWCKAATMPYSVISDSPRSWIQVQIPASHPVLTLSPEKALNFEGTKVTLHCETQEDSLRTLYRFYHEGVPLRHKSVRCERGASISFSLTTENSGNYYCTADNGLGAKPSKAVSLSVTVPVSHPVLNLSSPEDLIFEGAKVTLHCEAQRGSLPILYQFHHEGAALERRSANSAGGVAISFSLTAEHSGNYYCTADNGFGPQRSKAVSLSVTVPVSHPVLTLSSAEALTFEGATVTLHCEVQRGSPQILYQFYHEDMPLWSSSTPSVGRVSFSFSLTEGHSGNYYCTADNGFGPQRSEVVSLFVTGKCWVLASHPPLAEFSLTHSFKNLFALSSFLP

SEQ ID NO: 10715 - protein, 116 aa, Artificial Sequence
  Synthetic polypeptide
IIIYKMKILARTPRPIIFLQPPWTTVFQGERVTLTCKGFRFYSPQKTKWYHRYLGKEILRETPDNILEVQESGEYRCQAQGSPLSSPVHLDFSSEMGFPHAAQANVELLGSSDLLT

SEQ ID NO: 10716 - protein, 22 aa, Artificial Sequence
  Synthetic polypeptide
TREVEVVVSQDRTIVLQPGCSH

SEQ ID NO: 10717 - protein, 508 aa, Artificial Sequence
  Synthetic polypeptide
AKIAPLYSSLDAVTEQADSLTLVAPSSVFEGDSIVLKCQGEQNWKIQKMAYHKDNKELSVFKKFSDFLIQSAVLSDSGNYFCSTKGQLFLWDKTSNIVKIKVQELFQRPVLTASSFQPIEGGPVSLKCETRLSPQRLDVQLQFCFFRENQVLGSGWSSSPELQISAVWSEDTGSYWCKAETVTHRIRKQSLQSQIHVQRIPISNVSLEIRAPGGQVTEGQKLILLCSVAGGTGNVTFSWYREATGTSMGKKTQRSLSAELEIPAVKESDAGKYYCRADNGHVPIQSKVVNIPVRIPVSRPVLTLRSPGAQAAVGDLLELHCEALRGSPPILYQFYHEDVTLGNSSAPSGGGASFNLSLTAEHSGNYSCEANNGLGAQCSEAVPVSISGPDGYRRDLMTAGVLWGLFGVLGFTGVALLLYALFHKISGESSATNEPRGASRPNPQEFTYSSPTPDMEELQPVYVNVGSVDVDVVYSQVWSMQQPESSANIRTLLENKDSQVIYSSVKKS

SEQ ID NO: 10718 - protein, 41 aa, Artificial Sequence
  Synthetic polypeptide
FQLLGKLRQENCLNPGGGGCGEPRSHHCTPAWMQSLNRQIR

SEQ ID NO: 10719 - protein, 202 aa, Artificial Sequence
  Synthetic polypeptide
AKIAPLYSSLDAVTEQADSLTLVAPSSVFEGDSIVLKCQGEQNWKIQKMAYHKDNKELSVFKKFSDFLIQSAVLSDSGNYFCSTKGQLFLWDKTSNIVKIKVQGPDGYRRDLMTAGVLWGLFGVLGFTGVALLLYALFHKISGESSATNEPRGASRPNPQEFTYSSPTPDMEELQPVYVNANIRTLLENKDSQVIYSSVKKS

SEQ ID NO: 10720 - protein, 444 aa, Artificial Sequence
  Synthetic polypeptide
AKIAPLYSSLDAVTEQADSLTLVAPSSVFEGDSIVLKCQGEQNWKIQKMAYHKDNKELSVFKKFSDFLIQSAVLSDSGNYFCSTKGQLFLWDKTSNIVKIKVQELFQRPVLTASSFQPIEGGPVSLKCETRLSPQRLDVQLQFCFFRENQVLGSGWSSSPELQISAVWSEDTGSYWCKAETVTHRIRKQSLQSQIHVQRIPISNVSLEIRAPGGQVTEGQKLILLCSVAGGTGNVTFSWYREATGTSMGKKTQRSLSAELEIPAVKESDAGKYYCRADNGHVPIQSKVVNIPVRIPVSRPVLTLRSPGAQAAVGDLLELHCEALRGSPPILYQFYHEDVTLGNSSAPSGGGASFNLSLTAEHSGNYSCEANNGLGAQCSEAVPVSISGPDGYRRDLMTAGVLWGLFGVLGFTGVALLLYALFHKISGESSATNEPRTPKSSTLL

SEQ ID NO: 10721 - protein, 54 aa, Artificial Sequence
  Synthetic polypeptide
ISLTRSDGFIRGFCFCFFLLFLLWLPCKMCLLPPAMILRLPQPCETPFAPDLDS

SEQ ID NO: 10722 - protein, 31 aa, Artificial Sequence
  Synthetic polypeptide
GFPSHVKLHLHQTWIPSVSIWSAAGGGPPPL

SEQ ID NO: 10723 - protein, 339 aa, Artificial Sequence
  Synthetic polypeptide
NSICTRPGFLASPSGVRLVGGLHRCEGRVEVEQKGQWGTVCDDGWDIKDVAVLCRELGCGAASGTPSGILYEPPAEKEQKVLIQSVSCTGTEDTLAQCEQEEVYDCSHDEDAGASCENPESSFSPVPEGVRLADGPGHCKGRVEVKHQNQWYTVCQTGWSLRAAKVVCRQLGCGRAVLTQKRCNKHAYGRKPIWLSQMSCSGREATLQDCPSGPWGKNTCNHDEDTWVECEDPFDLRLVGGDNLCSGRLEVLHKGVWGSVCDDNWGEKEDQVVCKQLGCGKSLSPSFRDRKCYGPGVGRIWLDNVRCSGEEQSLEQCQHRFWGFHDCTHQEDVAVICSG

SEQ ID NO: 10724 - protein, 240 aa, Artificial Sequence
  Synthetic polypeptide
GVSSASCHGSEASPAMWNYPESSFSPVPEGVRLADGPGHCKGRVEVKHQNQWYTVCQTGWSLRAAKVVCRQLGCGRAVLTQKRCNKHAYGRKPIWLSQMSCSGREATLQDCPSGPWGKNTCNHDEDTWVECEDPFDLRLVGGDNLCSGRLEVLHKGVWGSVCDDNWGEKEDQVVCKQLGCGKSLSPSFRDRKCYGPGVGRIWLDNVRCSGEEQSLEQCQHRFWGFHDCTHQEDVAVICSG

SEQ ID NO: 10725 - protein, 57 aa, Artificial Sequence
  Synthetic polypeptide
FFLIFLLLPPRKECLLLPAMVLRPPQPCGTTQRALSPQSQRVSGWLTALGIARDAWK

SEQ ID NO: 10726 - protein, 23 aa, Artificial Sequence
  Synthetic polypeptide
GLPSHVELPRELFLPSPRGCQAG

SEQ ID NO: 10727 - protein, 347 aa, Artificial Sequence
  Synthetic polypeptide
GVSSASCHGSEASPAMWNSSPSGVRLVGGLHRCEGRVEVEQKGQWGTVCDDGWDIKDVAVLCRELGCGAASGTPSGILYEPPAEKEQKVLIQSVSCTGTEDTLAQCEQEEVYDCSHDEDAGASCENPESSFSPVPEGVRLADGPGHCKGRVEVKHQNQWYTVCQTGWSLRAAKVVCRQLGCGRAVLTQKRCNKHAYGRKPIWLSQMSCSGREATLQDCPSGPWGKNTCNHDEDTWVECEDPFDLRLVGGDNLCSGRLEVLHKGVWGSVCDDNWGEKEDQVVCKQLGCGKSLSPSFRDRKCYGPGVGRIWLDNVRCSGEEQSLEQCQHRFWGFHDCTHQEDVAVICSG

SEQ ID NO: 10728 - protein, 164 aa, Artificial Sequence
  Synthetic polypeptide
FFLIFLLLPPRKECLLLPAMVLRPPQPCGTRLHLECGWWGASTAVKGGWRWNRKASGAPCVMTAGTLRTWLCCAGSWAVELPAEPLVVFCMSHQQKKSKRSSSNQSVAQEQKIHWLSVSKKKFMIVHMMKMLGHRVRTQRALSPQSQRVSGWLTALGIARDAWK

SEQ ID NO: 10729 - protein, 22 aa, Artificial Sequence
  Synthetic polypeptide
GLPSHVELVSIWSAAGGGPPPL

SEQ ID NO: 10730 - protein, 124 aa, Artificial Sequence
  Synthetic polypeptide
ELGRKGSEYFIKGPRPASARSQLTRRWWLDSGPCSPVCCSTTLELCNGPRTGWPWAWARASKPGHGTGLWAPQTLGSTTWRSQMLSSLTTPLTSARPRRPPCALGGPNSPCSSPQRTPGLTEAL

SEQ ID NO: 10731 - protein, 760 aa, Artificial Sequence
  Synthetic polypeptide
VFHKGTQTRFSQEPADQTVVAGQRAVLPCVLLNYSGIVQWTKDGLALGMGQGLKAWPRYRVVGSADAGQYNLEITDAELSDDASYECQATEAALRSRRAKLTVLIPPEDTRIDGGPVILLQAGTPHNLTCRAFNAKPAATIIWFRDGTQQEGAVASTELLKDGKRETTVSQLLINPTDLDIGRVFTCRSMNEAIPSGKETSIELDVHHPPTVTLSIEPQTVQEGERVVFTCQATANPEILGYRWAKGGFLIEDAHESRYETNVDYSFFTEPVSCEVHNKVGSTNVSTLVNVHFAPRIVVDPKPTTTDIGSDVTLTCVWVGNPPLTLTWTKKDSNMGPRPPGSPPEAALSAQVLSNSNQLLLKSVTQADAGTYTCRAIVPRIGVAEREVPLYVNGPPIISSEAVQYAVRGDGGKVECFIGSTPPPDRIAWAWKENFLEVGTLERYTVERTNSGSGVLSTLTINNVMEADFQTHYNCTAWNSFGPGTAIIQLEEREVLPVGIIAGATIGASILLIFFFIALVFFLYRRRKGSRKDVTLRKLDIKVETVNREPLTMHSDREDDTASVSTATRVMKAIYSSFKDDVDLKQDLRCDTIDTREEYEMKDPTNGYYNVRAHEDRPSSRAVLYADYRAPGPARFDGRPSSRLSHSSGYAQLNTYSRGPASDYGPEPTPPGPAAPAGTDTTSQLSYENYEKFNSHPFPGAAGYPTYRLGYPQAPPSGLERTPYEAYDPIGKYATATRFSYTSQHSDYGQRFQQRMQTHV

SEQ ID NO: 10732 - protein, 116 aa, Artificial Sequence
  Synthetic polypeptide
ELGRKGSEYFIKGPRPASARSQLTRRWWLDSGPCSPVCCSTTLELCNGPRTGWPWAWARASKPGHGTGLWAPQTLGSTTWRSQMLSSLTTPLTSARPRRPPCALGGPNSPCSTLLQ

SEQ ID NO: 10733 - protein, 641 aa, Artificial Sequence
  Synthetic polypeptide
VFHKGTQTRFSQEPADQTVVAGQRAVLPCVLLNYSGIVQWTKDGLALGMGQGLKAWPRYRVVGSADAGQYNLEITDAELSDDASYECQATEAALRSRRAKLTVLNPPTVTLSIEPQTVQEGERVVFTCQATANPEILGYRWAKGGFLIEDAHESRYETNVDYSFFTEPVSCEVHNKVGSTNVSTLVNVHFAPRIVVDPKPTTTDIGSDVTLTCVWVGNPPLTLTWTKKDSNMVLSNSNQLLLKSVTQADAGTYTCRAIVPRIGVAEREVPLYVNGPPIISSEAVQYAVRGDGGKVECFIGSTPPPDRIAWAWKENFLEVGTLERYTVERTNSGSGVLSTLTINNVMEADFQTHYNCTAWNSFGPGTAIIQLEEREVLPVGIIAGATIGASILLIFFFIALVFFLYRRRKGSRKDVTLRKLDIKVETVNREPLTMHSDREDDTASVSTATRVMKAIYSSFKDDVDLKQDLRCDTIDTREEYEMKDPTNGYYNVRAHEDRPSSRAVLYADYRAPGPARFDGRPSSRLSHSSGYAQLNTYSRGPASDYGPEPTPPGPAAPAGTDTTSQLSYENYEKFNSHPFPGAAGYPTYRLGYPQAPPSGLERTPYEAYDPIGKYATATRFSYTSQHSDYGQRFQQRMQTHV

SEQ ID NO: 10734 - protein, 744 aa, Artificial Sequence
  Synthetic polypeptide
VFHKGTQTRFSQEPADQTVVAGQRAVLPCVLLNYSGIVQWTKDGLALGMGQGLKAWPRYRVVGSADAGQYNLEITDAELSDDASYECQATEAALRSRRAKLTVLIPPEDTRIDGGPVILLQAGTPHNLTCRAFNAKPAATIIWFRDGTQQEGAVASTELLKDGKRETTVSQLLINPTDLDIGRVFTCRSMNEAIPSGKETSIELDVHHPPTVTLSIEPQTVQEGERVVFTCQATANPEILGYRWAKGGFLIEDAHESRYETNVDYSFFTEPVSCEVHNKVGSTNVSTLVNVHFAPRIVVDPKPTTTDIGSDVTLTCVWVGNPPLTLTWTKKDSNMVLSNSNQLLLKSVTQADAGTYTCRAIVPRIGVAEREVPLYVNGPPIISSEAVQYAVRGDGGKVECFIGSTPPPDRIAWAWKENFLEVGTLERYTVERTNSGSGVLSTLTINNVMEADFQTHYNCTAWNSFGPGTAIIQLEEREVLPVGIIAGATIGASILLIFFFIALVFFLYRRRKGSRKDVTLRKLDIKVETVNREPLTMHSDREDDTASVSTATRVMKAIYSSFKDDVDLKQDLRCDTIDTREEYEMKDPTNGYYNVRAHEDRPSSRAVLYADYRAPGPARFDGRPSSRLSHSSGYAQLNTYSRGPASDYGPEPTPPGPAAPAGTDTTSQLSYENYEKFNSHPFPGAAGYPTYRLGYPQAPPSGLERTPYEAYDPIGKYATATRFSYTSQHSDYGQRFQQRMQTHV

SEQ ID NO: 10735 - protein, 790 aa, Artificial Sequence
  Synthetic polypeptide
ERRERGEKINRARRGQAGRDAAKSSTEEEKQRPEGTQTRFSQEPADQTVVAGQRAVLPCVLLNYSGIVQWTKDGLALGMGQGLKAWPRYRVVGSADAGQYNLEITDAELSDDASYECQATEAALRSRRAKLTVLIPPEDTRIDGGPVILLQAGTPHNLTCRAFNAKPAATIIWFRDGTQQEGAVASTELLKDGKRETTVSQLLINPTDLDIGRVFTCRSMNEAIPSGKETSIELDVHHPPTVTLSIEPQTVQEGERVVFTCQATANPEILGYRWAKGGFLIEDAHESRYETNVDYSFFTEPVSCEVHNKVGSTNVSTLVNVHFAPRIVVDPKPTTTDIGSDVTLTCVWVGNPPLTLTWTKKDSNMGPRPPGSPPEAALSAQVLSNSNQLLLKSVTQADAGTYTCRAIVPRIGVAEREVPLYVNGPPIISSEAVQYAVRGDGGKVECFIGSTPPPDRIAWAWKENFLEVGTLERYTVERTNSGSGVLSTLTINNVMEADFQTHYNCTAWNSFGPGTAIIQLEEREVLPVGIIAGATIGASILLIFFFIALVFFLYRRRKGSRKDVTLRKLDIKVETVNREPLTMHSDREDDTASVSTATRVMKAIYSSFKDDVDLKQDLRCDTIDTREEYEMKDPTNGYYNVRAHEDRPSSRAVLYADYRAPGPARFDGRPSSRLSHSSGYAQLNTYSRGPASDYGPEPTPPGPAAPAGTDTTSQLSYENYEKFNSHPFPGAAGYPTYRLGYPQAPPSGLERTPYEAYDPIGKYATATRFSYTSQHSDYGQRFQQRMQTHV

SEQ ID NO: 10736 - protein, 137 aa, Artificial Sequence
  Synthetic polypeptide
TEQDEARREEMQPRAAPKRRSRGQRGPRPASARSQLTRRWWLDSGPCSPVCCSTTLELCNGPRTGWPWAWARASKPGHGTGLWAPQTLGSTTWRSQMLSSLTTPLTSARPRRPPCALGGPNSPCSSPQRTPGLTEAL

SEQ ID NO: 10737 - protein, 44 aa, Artificial Sequence
  Synthetic polypeptide
KKRERREDKQSKTRPGGKRCSQEQHRRGEAEARGDPDPLQPGAS

SEQ ID NO: 10738 - protein, 671 aa, Artificial Sequence
  Synthetic polypeptide
ERRERGEKINRARRGQAGRDAAKSSTEEEKQRPEGTQTRFSQEPADQTVVAGQRAVLPCVLLNYSGIVQWTKDGLALGMGQGLKAWPRYRVVGSADAGQYNLEITDAELSDDASYECQATEAALRSRRAKLTVLNPPTVTLSIEPQTVQEGERVVFTCQATANPEILGYRWAKGGFLIEDAHESRYETNVDYSFFTEPVSCEVHNKVGSTNVSTLVNVHFAPRIVVDPKPTTTDIGSDVTLTCVWVGNPPLTLTWTKKDSNMVLSNSNQLLLKSVTQADAGTYTCRAIVPRIGVAEREVPLYVNGPPIISSEAVQYAVRGDGGKVECFIGSTPPPDRIAWAWKENFLEVGTLERYTVERTNSGSGVLSTLTINNVMEADFQTHYNCTAWNSFGPGTAIIQLEEREVLPVGIIAGATIGASILLIFFFIALVFFLYRRRKGSRKDVTLRKLDIKVETVNREPLTMHSDREDDTASVSTATRVMKAIYSSFKDDVDLKQDLRCDTIDTREEYEMKDPTNGYYNVRAHEDRPSSRAVLYADYRAPGPARFDGRPSSRLSHSSGYAQLNTYSRGPASDYGPEPTPPGPAAPAGTDTTSQLSYENYEKFNSHPFPGAAGYPTYRLGYPQAPPSGLERTPYEAYDPIGKYATATRFSYTSQHSDYGQRFQQRMQTHV

SEQ ID NO: 10739 - protein, 129 aa, Artificial Sequence
  Synthetic polypeptide
TEQDEARREEMQPRAAPKRRSRGQRGPRPASARSQLTRRWWLDSGPCSPVCCSTTLELCNGPRTGWPWAWARASKPGHGTGLWAPQTLGSTTWRSQMLSSLTTPLTSARPRRPPCALGGPNSPCSTLLQ

SEQ ID NO: 10740 - protein, 774 aa, Artificial Sequence
  Synthetic polypeptide
ERRERGEKINRARRGQAGRDAAKSSTEEEKQRPEGTQTRFSQEPADQTVVAGQRAVLPCVLLNYSGIVQWTKDGLALGMGQGLKAWPRYRVVGSADAGQYNLEITDAELSDDASYECQATEAALRSRRAKLTVLIPPEDTRIDGGPVILLQAGTPHNLTCRAFNAKPAATIIWFRDGTQQEGAVASTELLKDGKRETTVSQLLINPTDLDIGRVFTCRSMNEAIPSGKETSIELDVHHPPTVTLSIEPQTVQEGERVVFTCQATANPEILGYRWAKGGFLIEDAHESRYETNVDYSFFTEPVSCEVHNKVGSTNVSTLVNVHFAPRIVVDPKPTTTDIGSDVTLTCVWVGNPPLTLTWTKKDSNMVLSNSNQLLLKSVTQADAGTYTCRAIVPRIGVAEREVPLYVNGPPIISSEAVQYAVRGDGGKVECFIGSTPPPDRIAWAWKENFLEVGTLERYTVERTNSGSGVLSTLTINNVMEADFQTHYNCTAWNSFGPGTAIIQLEEREVLPVGIIAGATIGASILLIFFFIALVFFLYRRRKGSRKDVTLRKLDIKVETVNREPLTMHSDREDDTASVSTATRVMKAIYSSFKDDVDLKQDLRCDTIDTREEYEMKDPTNGYYNVRAHEDRPSSRAVLYADYRAPGPARFDGRPSSRLSHSSGYAQLNTYSRGPASDYGPEPTPPGPAAPAGTDTTSQLSYENYEKFNSHPFPGAAGYPTYRLGYPQAPPSGLERTPYEAYDPIGKYATATRFSYTSQHSDYGQRFQQRMQTHV

SEQ ID NO: 10741 - protein, 66 aa, Artificial Sequence
  Synthetic polypeptide
DPKRPHFPNFTLLSMPSAFPGQFLLPSLSAYQENSYSSLGSCQRHHFLQDSFLHLRDPDPLQPGAS

SEQ ID NO: 10742 - protein, 815 aa, Artificial Sequence
  Synthetic polypeptide
TVSRILKGLTFPTSHCCLCPLPSQDSFFSLLSLLTRKTPTHPSDLVKDITSYRIRSCTSGTQTRFSQEPADQTVVAGQRAVLPCVLLNYSGIVQWTKDGLALGMGQGLKAWPRYRVVGSADAGQYNLEITDAELSDDASYECQATEAALRSRRAKLTVLIPPEDTRIDGGPVILLQAGTPHNLTCRAFNAKPAATIIWFRDGTQQEGAVASTELLKDGKRETTVSQLLINPTDLDIGRVFTCRSMNEAIPSGKETSIELDVHHPPTVTLSIEPQTVQEGERVVFTCQATANPEILGYRWAKGGFLIEDAHESRYETNVDYSFFTEPVSCEVHNKVGSTNVSTLVNVHFAPRIVVDPKPTTTDIGSDVTLTCVWVGNPPLTLTWTKKDSNMGPRPPGSPPEAALSAQVLSNSNQLLLKSVTQADAGTYTCRAIVPRIGVAEREVPLYVNGPPIISSEAVQYAVRGDGGKVECFIGSTPPPDRIAWAWKENFLEVGTLERYTVERTNSGSGVLSTLTINNVMEADFQTHYNCTAWNSFGPGTAIIQLEEREVLPVGIIAGATIGASILLIFFFIALVFFLYRRRKGSRKDVTLRKLDIKVETVNREPLTMHSDREDDTASVSTATRVMKAIYSSFKDDVDLKQDLRCDTIDTREEYEMKDPTNGYYNVRAHEDRPSSRAVLYADYRAPGPARFDGRPSSRLSHSSGYAQLNTYSRGPASDYGPEPTPPGPAAPAGTDTTSQLSYENYEKFNSHPFPGAAGYPTYRLGYPQAPPSGLERTPYEAYDPIGKYATATRFSYTSQHSDYGQRFQQRMQTHV

SEQ ID NO: 10743 - protein, 165 aa, Artificial Sequence
  Synthetic polypeptide
KASLSQLHTAVYALCLPRTVSSPFSLCLPGKLLLIPRILSKTSLPTGFVPAPQGPRPASARSQLTRRWWLDSGPCSPVCCSTTLELCNGPRTGWPWAWARASKPGHGTGLWAPQTLGSTTWRSQMLSSLTTPLTSARPRRPPCALGGPNSPCSSPQRTPGLTEAL

SEQ ID NO: 10744 - protein, 696 aa, Artificial Sequence
  Synthetic polypeptide
TVSRILKGLTFPTSHCCLCPLPSQDSFFSLLSLLTRKTPTHPSDLVKDITSYRIRSCTSGTQTRFSQEPADQTVVAGQRAVLPCVLLNYSGIVQWTKDGLALGMGQGLKAWPRYRVVGSADAGQYNLEITDAELSDDASYECQATEAALRSRRAKLTVLNPPTVTLSIEPQTVQEGERVVFTCQATANPEILGYRWAKGGFLIEDAHESRYETNVDYSFFTEPVSCEVHNKVGSTNVSTLVNVHFAPRIVVDPKPTTTDIGSDVTLTCVWVGNPPLTLTWTKKDSNMVLSNSNQLLLKSVTQADAGTYTCRAIVPRIGVAEREVPLYVNGPPIISSEAVQYAVRGDGGKVECFIGSTPPPDRIAWAWKENFLEVGTLERYTVERTNSGSGVLSTLTINNVMEADFQTHYNCTAWNSFGPGTAIIQLEEREVLPVGIIAGATIGASILLIFFFIALVFFLYRRRKGSRKDVTLRKLDIKVETVNREPLTMHSDREDDTASVSTATRVMKAIYSSFKDDVDLKQDLRCDTIDTREEYEMKDPTNGYYNVRAHEDRPSSRAVLYADYRAPGPARFDGRPSSRLSHSSGYAQLNTYSRGPASDYGPEPTPPGPAAPAGTDTTSQLSYENYEKFNSHPFPGAAGYPTYRLGYPQAPPSGLERTPYEAYDPIGKYATATRFSYTSQHSDYGQRFQQRMQTHV

SEQ ID NO: 10745 - protein, 157 aa, Artificial Sequence
  Synthetic polypeptide
KASLSQLHTAVYALCLPRTVSSPFSLCLPGKLLLIPRILSKTSLPTGFVPAPQGPRPASARSQLTRRWWLDSGPCSPVCCSTTLELCNGPRTGWPWAWARASKPGHGTGLWAPQTLGSTTWRSQMLSSLTTPLTSARPRRPPCALGGPNSPCSTLLQ

SEQ ID NO: 10746 - protein, 799 aa, Artificial Sequence
  Synthetic polypeptide
TVSRILKGLTFPTSHCCLCPLPSQDSFFSLLSLLTRKTPTHPSDLVKDITSYRIRSCTSGTQTRFSQEPADQTVVAGQRAVLPCVLLNYSGIVQWTKDGLALGMGQGLKAWPRYRVVGSADAGQYNLEITDAELSDDASYECQATEAALRSRRAKLTVLIPPEDTRIDGGPVILLQAGTPHNLTCRAFNAKPAATIIWFRDGTQQEGAVASTELLKDGKRETTVSQLLINPTDLDIGRVFTCRSMNEAIPSGKETSIELDVHHPPTVTLSIEPQTVQEGERVVFTCQATANPEILGYRWAKGGFLIEDAHESRYETNVDYSFFTEPVSCEVHNKVGSTNVSTLVNVHFAPRIVVDPKPTTTDIGSDVTLTCVWVGNPPLTLTWTKKDSNMVLSNSNQLLLKSVTQADAGTYTCRAIVPRIGVAEREVPLYVNGPPIISSEAVQYAVRGDGGKVECFIGSTPPPDRIAWAWKENFLEVGTLERYTVERTNSGSGVLSTLTINNVMEADFQTHYNCTAWNSFGPGTAIIQLEEREVLPVGIIAGATIGASILLIFFFIALVFFLYRRRKGSRKDVTLRKLDIKVETVNREPLTMHSDREDDTASVSTATRVMKAIYSSFKDDVDLKQDLRCDTIDTREEYEMKDPTNGYYNVRAHEDRPSSRAVLYADYRAPGPARFDGRPSSRLSHSSGYAQLNTYSRGPASDYGPEPTPPGPAAPAGTDTTSQLSYENYEKFNSHPFPGAAGYPTYRLGYPQAPPSGLERTPYEAYDPIGKYATATRFSYTSQHSDYGQRFQQRMQTHV

SEQ ID NO: 10747 - protein, 559 aa, Artificial Sequence
  Synthetic polypeptide
HGVFLPDPPTVTLSIEPQTVQEGERVVFTCQATANPEILGYRWAKGGFLIEDAHESRYETNVDYSFFTEPVSCEVHNKVGSTNVSTLVNVHFAPRIVVDPKPTTTDIGSDVTLTCVWVGNPPLTLTWTKKDSNMGPRPPGSPPEAALSAQVLSNSNQLLLKSVTQADAGTYTCRAIVPRIGVAEREVPLYVNGPPIISSEAVQYAVRGDGGKVECFIGSTPPPDRIAWAWKENFLEVGTLERYTVERTNSGSGVLSTLTINNVMEADFQTHYNCTAWNSFGPGTAIIQLEEREVLPVGIIAGATIGASILLIFFFIALVFFLYRRRKGSRKDVTLRKLDIKVETVNREPLTMHSDREDDTASVSTATRVMKAIYSSFKDDVDLKQDLRCDTIDTREEYEMKDPTNGYYNVRAHEDRPSSRAVLYADYRAPGPARFDGRPSSRLSHSSGYAQLNTYSRGPASDYGPEPTPPGPAAPAGTDTTSQLSYENYEKFNSHPFPGAAGYPTYRLGYPQAPPSGLERTPYEAYDPIGKYATATRFSYTSQHSDYGQRFQQRMQTHV

SEQ ID NO: 10748 - protein, 19 aa, Artificial Sequence
  Synthetic polypeptide
MRYSRRASSMEYSYLTLLQ

SEQ ID NO: 10749 - protein, 543 aa, Artificial Sequence
  Synthetic polypeptide
HGVFLPDPPTVTLSIEPQTVQEGERVVFTCQATANPEILGYRWAKGGFLIEDAHESRYETNVDYSFFTEPVSCEVHNKVGSTNVSTLVNVHFAPRIVVDPKPTTTDIGSDVTLTCVWVGNPPLTLTWTKKDSNMVLSNSNQLLLKSVTQADAGTYTCRAIVPRIGVAEREVPLYVNGPPIISSEAVQYAVRGDGGKVECFIGSTPPPDRIAWAWKENFLEVGTLERYTVERTNSGSGVLSTLTINNVMEADFQTHYNCTAWNSFGPGTAIIQLEEREVLPVGIIAGATIGASILLIFFFIALVFFLYRRRKGSRKDVTLRKLDIKVETVNREPLTMHSDREDDTASVSTATRVMKAIYSSFKDDVDLKQDLRCDTIDTREEYEMKDPTNGYYNVRAHEDRPSSRAVLYADYRAPGPARFDGRPSSRLSHSSGYAQLNTYSRGPASDYGPEPTPPGPAAPAGTDTTSQLSYENYEKFNSHPFPGAAGYPTYRLGYPQAPPSGLERTPYEAYDPIGKYATATRFSYTSQHSDYGQRFQQRMQTHV

SEQ ID NO: 10750 - protein, 6 aa, Artificial Sequence
  Synthetic polypeptide
NLQPTL

SEQ ID NO: 10751 - protein, 128 aa, Artificial Sequence
  Synthetic polypeptide
SFKTSSPHCEEPCAHSCAHPGLPPHLVHKLPLSYLQTQDTDAASRRINAPLAAGWSWLRLWLVTLASGVDFPQVSAWMRALPSPDCPGLRTTGEQMQKLLLKENKVKTRKSKRRSGEGSHLTTSILEQ

SEQ ID NO: 10752 - protein, 72 aa, Artificial Sequence
  Synthetic polypeptide
DSCNNFIFLPSLSAPSIHSPCSCQRDLLKPPAHTVKSLVPTAVHILGFLHTLSINCPSATFRPRIQTQPPEE

SEQ ID NO: 10753 - protein, 46 aa, Artificial Sequence
  Synthetic polypeptide
GQVWWYIPIIPALWEAKEACLAVQRRCLELKRGGRHPQALKWRPQT

SEQ ID NO: 10754 - protein, 11 aa, Artificial Sequence
  Synthetic polypeptide
SQHFGRPRKPV

SEQ ID NO: 10755 - protein, 597 aa, Artificial Sequence
  Synthetic polypeptide
PGVVVHTYNPSTLGGQGSLSSSPEEMSGAEEGRETSSGIEVEASDLSLSLTGDDGGPNRTSTESRGTDTESSGEDKDSDSMEDTGHYSINDENRVHDRSEEEEEEEEEEEEEQPRRRVQRKRANRDQDSSDDERALEDWVSSETSALPRPRWQALPALRERELGSSARFVYEACGARVFVQRFRLQHGLEGHTGCVNTLHFNQRGTWLASGSDDLKVVVWDWVRRQPVLDFESGHKSNVFQAKFLPNSGDSTLAMCARDGQVRVAELSATQCCKNTKRVAQHKGASHKLALEPDSPCTFLSAGEDAVVFTIDLRQDRPASKLVVTKEKEKKVGLYTIYVNPANTHQFAVGGRDQFVRIYDQRKIDENENNGVLKKFCPHHLVNSESKANITCLVYSHDGTELLASYNDEDIYLFNSSHSDGAQYVKRYKGHRNNATVKGVNFYGPKSEFVVSGSDCGHIFLWEKSSCQIIQFMEGDKGGVVNCLEPHPHLPVLATSGLDHDVKIWAPTAEASTELTGLKDVIKKNKRERDEDSLHQTDLFDSHMLWFLMHHLRQRRHHRRWREPGVGATDADSDESPSSSDTSDEEEGPDRVQCMPS

SEQ ID NO: 10756 - protein, 417 aa, Artificial Sequence
  Synthetic polypeptide
PGVVVHTYNPSTLGGQGSLSSSPEEMSGAEEGRETSSGIEVEASDLSLSLTGDDGGPNRTSTESRGTDTESSGEDKDSDSMEDTGHYSINDENRVHDRSEEEEEEEEEEEEEQPRRRVQRKRANRDQDSSDDERALEDWVSSETSALPRPRWQALPALRERELGSSARFVYEACGARVFVQRFRLQHGLEGHTGCVNTLHFNQRGTWLASGSDDLKVVVWDWVRRQPVLDFESGHKSNVFQAKFLPNSGDSTLAMCARDGQVRVAELSATQCCKNTKRVAQHKGASHKLALEPDSPCTFLSAGEDAVVFTIDLRQDRPASKLVVTKEKEKKVGLYTIYVNPANTHQFAVGGRDQFVRIYDQRKIDENENNGVLKKFCPHHLSSWPVTMMKTFTSSTPLTVMGPSMLRDTRATEIMPQ

SEQ ID NO: 10757 - protein, 273 aa, Artificial Sequence
  Synthetic polypeptide
PGVVVHTYNPSTLGGQGSLSSSPEEMSGAEEGRETSSGIEVEASDLSLSLTGDDGGPNRTSTESRGTDTESSGEDKDSDSMEDTGHYSINDENRVHDRSEEEEEEEEEEEEEQPRRRVQRKRANRDQDSSDDERALEDWVSSETSALPRPRWQALPALRERELGSSARFVYEACGARVFVQRFRLQHGLEGHTGCVNTLHFNQRGTWLASGSDDLKVVVWDWVRRQPVLDFESGHKSNVFQVRQGSIIATERIRHELEKSELQHGLGADSELL

SEQ ID NO: 10758 - protein, 212 aa, Artificial Sequence
  Synthetic polypeptide
PGVVVHTYNPSTLGGQGSLSSSPEEMSGAEEGRETSSGIEVEASDLSLSLTGDDGGPNRTSTESRGTDTESSGEDKDSDSMEDTGHYSINDENRVHDRSEEEEEEEEEEEEEQPRRRVQRKRANRDQDSSDDERALEDWVSSETSALPRPRWQALPALRERELGSSARFVYEACGARVFVQRFRLQHGLEGHTGCVNTLHFNQRGTWLASGS

SEQ ID NO: 10759 - protein, 109 aa, Artificial Sequence
  Synthetic polypeptide
PGVVVHTYNPSTLGGQGSLSSSPEEMSGAEEGRETSSGIEVEASDLSLSLTGDDGGPNRTSTESRGTDTESSGEDKDSDSMEDTGHYSINDENRVHDRSEEEEEEEEEE

SEQ ID NO: 10760 - protein, 106 aa, Artificial Sequence
  Synthetic polypeptide
PGVVVHTYNPSTLGGQGSLSSSPEEMSGAEEGRETSSGIEVEASDLSLSLTGDDGGPNRTSTESRGTDTESSGEDKDSDSMEDTGHYSINDENRVHDRSEEEEEEE

SEQ ID NO: 10761 - protein, 92 aa, Artificial Sequence
  Synthetic polypeptide
PGVVVHTYNPSTLGGQGSLSSSPEEMSGAEEGRETSSGIEVEASDLSLSLTGDDGGPNRTSTESRGTDTESSGEDKDSDSMEDTGHYSINDE

SEQ ID NO: 10762 - protein, 41 aa, Artificial Sequence
  Synthetic polypeptide
GQVWWYIPIIPALWEAKEACLAVQRRCLELKRGGRHPQALK

SEQ ID NO: 10763 - protein, 40 aa, Artificial Sequence
  Synthetic polypeptide
PGVVVHTYNPSTLGGQGSLSSSPEEMSGAEEGRETSSGIE

SEQ ID NO: 10764 - protein, 32 aa, Artificial Sequence
  Synthetic polypeptide
GRARWLMPVIPALGRLRRVDHEDWGSDFPQRP

SEQ ID NO: 10765 - protein, 958 aa, Artificial Sequence
  Synthetic polypeptide
GGWITRTGVQTFRRDHDRFWVLAAHPNLNLFAAGHDGGMIVFKLERERPAYAVHGNMLHYVKDRFLRQLDFNSSKDVAVMQLRSGSKFPVFNMSYNPAENAVLLCTRASNLENSTYDLYTIPKDADSQNPDAPEGKRSSGLTAVWVARNRFAVLDRMHSLLIKNLKNEITKKVQVPNCDEIFYAGTGNLLLRDADSITLFDVQQKRTLASVKISKVKYVIWSADMSHVALLAKHEHSCPLPLTAIVICNRKLDALCNIHENIRVKSGAWDESGVFIYTTSNHIKYAVTTGDHGIIRTLDLPIYVTRVKGNNVYCLDRECRPRVLTIDPTEFKFKLALINRKYDEVLHMVRNAKLVGQSIIAYLQKKGYPEVALHFVKDEKTRFSLALECGNIEIALEAAKALDDKNCWEKLGEVALLQGNHQIVEMCYQRTKNFDKLSFLYLITGNLEKLRKMMKIAEIRKDMSGHYQNALYLGDVSERVRILKNCGQKSLAYLTAATHGLDEEAESLKETFDPEKETIPDIDPNAKLLQPPAPIMPLDTNWPLLTVSKGFFEGTIASKGKGGALAADIDIDTVGTEGWGEDAELQLDEDGFVEATEGLGDDALGKGQEEGGGWDVEEDLELPPELDISPGAAGGAEDGFFVPPTKGTSPTQIWCNNSQLPVDHILAGSFETAMRLLHDQVGVIQFGPYKQLFLQTYARGRTTYQALPCLPSMYGYPNRNWKDAGLKNGVPAVGLKLNDLIQRLQLCYQLTTVGKFEEAVEKFRSILLSVPLLVVDNKQEIAEAQQLITICREYIVGLSVETERKKLPKETLEQQKRICEMAAYFTHSNLQPVHMILVLRTALNLFFKLKNFKTAATFARRLLELGPKPEVAQQTRKILSACEKNPTDAYQLNYDMHNPFDICAASYRPIYRGKPVEKCPLSGACYSPEFKGQICRVTTVTEIGKDVIGLRISPLQFR

SEQ ID NO: 10766 - protein, 37 aa, Artificial Sequence
  Synthetic polypeptide
PGAVAHACNPSTWEAEAGGSRGLGFRLSAETMIVSGS

SEQ ID NO: 10767 - protein, 949 aa, Artificial Sequence
  Synthetic polypeptide
GGWITRTGVQTFRRDHDRFWVLAAHPNLNLFAAGHDGGMIVFKLERERPAYAVHGNMLHYVKDRFLRQLDFNSSKDVAVMQLRSGSKFPVFNMSYNPAENAVLLCTRASNLENSTYDLYTIPKDADSQNPDAPEGKRSSGLTAVWVARNRFAVLDRMHSLLIKNLKNEITKKVQVPNCDEIFYAGTGNLLLRDADSITLFDVQQKRTLASVKISKVKYVIWSADMSHVALLAKHAIVICNRKLDALCNIHENIRVKSGAWDESGVFIYTTSNHIKYAVTTGDHGIIRTLDLPIYVTRVKGNNVYCLDRECRPRVLTIDPTEFKFKLALINRKYDEVLHMVRNAKLVGQSIIAYLQKKGYPEVALHFVKDEKTRFSLALECGNIEIALEAAKALDDKNCWEKLGEVALLQGNHQIVEMCYQRTKNFDKLSFLYLITGNLEKLRKMMKIAEIRKDMSGHYQNALYLGDVSERVRILKNCGQKSLAYLTAATHGLDEEAESLKETFDPEKETIPDIDPNAKLLQPPAPIMPLDTNWPLLTVSKGFFEGTIASKGKGGALAADIDIDTVGTEGWGEDAELQLDEDGFVEATEGLGDDALGKGQEEGGGWDVEEDLELPPELDISPGAAGGAEDGFFVPPTKGTSPTQIWCNNSQLPVDHILAGSFETAMRLLHDQVGVIQFGPYKQLFLQTYARGRTTYQALPCLPSMYGYPNRNWKDAGLKNGVPAVGLKLNDLIQRLQLCYQLTTVGKFEEAVEKFRSILLSVPLLVVDNKQEIAEAQQLITICREYIVGLSVETERKKLPKETLEQQKRICEMAAYFTHSNLQPVHMILVLRTALNLFFKLKNFKTAATFARRLLELGPKPEVAQQTRKILSACEKNPTDAYQLNYDMHNPFDICAASYRPIYRGKPVEKCPLSGACYSPEFKGQICRVTTVTEIGKDVIGLRISPLQFR

SEQ ID NO: 10768 - protein, 1248 aa, Artificial Sequence
  Synthetic polypeptide
VGEGEETLGKGRALKSDLAQPFTSYVISGLSFHPKRPWILTSLHNGVIQLWDYRMCTLIDKFDEHDGPVRGIDFHKQQPLFVSGGDDYKIKVWNYKLRRCLFTLLGHLDYIRTTFFHHEYPWILSASDDQTIRVWNWQSRTCVCVLTGHNHYVMCAQFHPTEDLVVSASLDQTVRVWDISGLRKKNLSPGAVESDVRGITGVDLFGTTDAVVKHVLEGHDRGVNWAAFHPTMPLIVSGADDRQVKIWRMNESKAWEVDTCRGHYNNVSCAVFHPRQELILSNSEDKSIRVWDMSKRTGVQTFRRDHDRFWVLAAHPNLNLFAAGHDGGMIVFKLERERPAYAVHGNMLHYVKDRFLRQLDFNSSKDVAVMQLRSGSKFPVFNMSYNPAENAVLLCTRASNLENSTYDLYTIPKDADSQNPDAPEGKRSSGLTAVWVARNRFAVLDRMHSLLIKNLKNEITKKVQVPNCDEIFYAGTGNLLLRDADSITLFDVQQKRTLASVKISKVKYVIWSADMSHVALLAKHEHSCPLPLTAIVICNRKLDALCNIHENIRVKSGAWDESGVFIYTTSNHIKYAVTTGDHGIIRTLDLPIYVTRVKGNNVYCLDRECRPRVLTIDPTEFKFKLALINRKYDEVLHMVRNAKLVGQSIIAYLQKKGYPEVALHFVKDEKTRFSLALECGNIEIALEAAKALDDKNCWEKLGEVALLQGNHQIVEMCYQRTKNFDKLSFLYLITGNLEKLRKMMKIAEIRKDMSGHYQNALYLGDVSERVRILKNCGQKSLAYLTAATHGLDEEAESLKETFDPEKETIPDIDPNAKLLQPPAPIMPLDTNWPLLTVSKGFFEGTIASKGKGGALAADIDIDTVGTEGWGEDAELQLDEDGFVEATEGLGDDALGKGQEEGGGWDVEEDLELPPELDISPGAAGGAEDGFFVPPTKGTSPTQIWCNNSQLPVDHILAGSFETAMRLLHDQVGVIQFGPYKQLFLQTYARGRTTYQALPCLPSMYGYPNRNWKDAGLKNGVPAVGLKLNDLIQRLQLCYQLTTVGKFEEAVEKFRSILLSVPLLVVDNKQEIAEAQQLITICREYIVGLSVETERKKLPKETLEQQKRICEMAAYFTHSNLQPVHMILVLRTALNLFFKLKNFKTAATFARRLLELGPKPEVAQQTRKILSACEKNPTDAYQLNYDMHNPFDICAASYRPIYRGKPVEKCPLSGACYSPEFKGQICRVTTVTEIGKDVIGLRISPLQFR

SEQ ID NO: 10769 - protein, 13 aa, Artificial Sequence
  Synthetic polypeptide
SQGSAFTPKDLGS

SEQ ID NO: 10770 - protein, 36 aa, Artificial Sequence
  Synthetic polypeptide
RDFGKRKSTEVRPGTAFYELCNLRAQLSPQKTLDPD

SEQ ID NO: 10771 - protein, 1239 aa, Artificial Sequence
  Synthetic polypeptide
VGEGEETLGKGRALKSDLAQPFTSYVISGLSFHPKRPWILTSLHNGVIQLWDYRMCTLIDKFDEHDGPVRGIDFHKQQPLFVSGGDDYKIKVWNYKLRRCLFTLLGHLDYIRTTFFHHEYPWILSASDDQTIRVWNWQSRTCVCVLTGHNHYVMCAQFHPTEDLVVSASLDQTVRVWDISGLRKKNLSPGAVESDVRGITGVDLFGTTDAVVKHVLEGHDRGVNWAAFHPTMPLIVSGADDRQVKIWRMNESKAWEVDTCRGHYNNVSCAVFHPRQELILSNSEDKSIRVWDMSKRTGVQTFRRDHDRFWVLAAHPNLNLFAAGHDGGMIVFKLERERPAYAVHGNMLHYVKDRFLRQLDFNSSKDVAVMQLRSGSKFPVFNMSYNPAENAVLLCTRASNLENSTYDLYTIPKDADSQNPDAPEGKRSSGLTAVWVARNRFAVLDRMHSLLIKNLKNEITKKVQVPNCDEIFYAGTGNLLLRDADSITLFDVQQKRTLASVKISKVKYVIWSADMSHVALLAKHAIVICNRKLDALCNIHENIRVKSGAWDESGVFIYTTSNHIKYAVTTGDHGIIRTLDLPIYVTRVKGNNVYCLDRECRPRVLTIDPTEFKFKLALINRKYDEVLHMVRNAKLVGQSIIAYLQKKGYPEVALHFVKDEKTRFSLALECGNIEIALEAAKALDDKNCWEKLGEVALLQGNHQIVEMCYQRTKNFDKLSFLYLITGNLEKLRKMMKIAEIRKDMSGHYQNALYLGDVSERVRILKNCGQKSLAYLTAATHGLDEEAESLKETFDPEKETIPDIDPNAKLLQPPAPIMPLDTNWPLLTVSKGFFEGTIASKGKGGALAADIDIDTVGTEGWGEDAELQLDEDGFVEATEGLGDDALGKGQEEGGGWDVEEDLELPPELDISPGAAGGAEDGFFVPPTKGTSPTQIWCNNSQLPVDHILAGSFETAMRLLHDQVGVIQFGPYKQLFLQTYARGRTTYQALPCLPSMYGYPNRNWKDAGLKNGVPAVGLKLNDLIQRLQLCYQLTTVGKFEEAVEKFRSILLSVPLLVVDNKQEIAEAQQLITICREYIVGLSVETERKKLPKETLEQQKRICEMAAYFTHSNLQPVHMILVLRTALNLFFKLKNFKTAATFARRLLELGPKPEVAQQTRKILSACEKNPTDAYQLNYDMHNPFDICAASYRPIYRGKPVEKCPLSGACYSPEFKGQICRVTTVTEIGKDVIGLRISPLQFR

SEQ ID NO: 10772 - protein, 881 aa, Artificial Sequence
  Synthetic polypeptide
GQAQWLTPIIPALWEAEDAPYLDLAPYMPDYYKPQYLLDFEDRLPSSVHGSDSLSLNSFNSVTSTNLEWDDSAIAPSSEDYDFGDVFPAVPSVPSTDWEDGDLTDTVSGPRSTASDLTSSKASTRSPTQRQNPFNEEPAETVSSSDTTPVHTTSQEKEEAQALDPPDACTELEVIRVTKKKKIGKKKKSRSDEEASPLHPACSQKKCAKQGDGDSRNGSPSLGRDSPDTMLASPQEEGEGPSSTTESSERSEPGLLIPEMKDTSMERLGQPLSKVIDQLNGQLDPSTWCSRAEPPDQSFRTGSPGDAPERPPLCDFSEGLSAPMDFYRFTVESPSTVTSGGGHHDPAGLGQPLHVPSSPEAAGQEEEGGGGEGQTPRPLEDTTREAQELEAQLSLVREGPVSEPEPGTQEVLCQLKRDQPSPCLSSAEDSGVDEGQGSPSEMVHSSEFRVDNNHLLLLMIHVFRENEEQLFKMIRMSTGHMEGNLQLLYVLLTDCYVYLLRKGATEKPYLVEEAVSYNELDYVSVGLDQQTVKLVCTNRRKQFLLDTADVALAEFFLASLKSAMIKGCREPPYPSILTDATMEKLALAKFVAQESKCEASAVTVRFYGLVHWEDPTDESLGPTPCHCSPPEGTITKEGMLHYKAGTSYLGKEHWKTCFVVLSNGILYQYPDRTDVIPLLSVNMGGEQCGGCRRANTTDRPHAFQVILSDRPCLELSAESEAEMAEWMQHLCQAVSKGVIPQGVAPSPCIPCCLVLTDDRLFTCHEDCQTSFFRSLGTAKLGDISAVSTEPGKEYCVLEFSQDSQQLLPPWVIYLSCTSELDRLLSALNSGWKTIYQVDLPHTAIQEASNKKKFEDALSLIHSAWQRSDSLCRGRASRDPWC

SEQ ID NO: 10773 - protein, 12 aa, Artificial Sequence
  Synthetic polypeptide
SQHFGRLRMPLT

SEQ ID NO: 10774 - protein, 861 aa, Artificial Sequence
  Synthetic polypeptide
GQAQWLTPIIPALWEAEDAPYLDLAPYMPDYYKPQYLLDFEDRLPSSVHGSDSLSLNSFNSVTSTNLEWDDSAIAPSSEDGDLTDTVSGPRSTASDLTSSKASTRSPTQRQNPFNEEPAETVSSSDTTPVHTTSQEKEEAQALDPPDACTELEVIRVTKKKKIGKKKKSRSDEEASPLHPACSQKKCAKQGDGDSRNGSPSLGRDSPDTMLASPQEEGEGPSSTTESSERSEPGLLIPEMKDTSMERLGQPLSKVIDQLNGQLDPSTWCSRAEPPDQSFRTGSPGDAPERPPLCDFSEGLSAPMDFYRFTVESPSTVTSGGGHHDPAGLGQPLHVPSSPEAAGQEEEGGGGEGQTPRPLEDTTREAQELEAQLSLVREGPVSEPEPGTQEVLCQLKRDQPSPCLSSAEDSGVDEGQGSPSEMVHSSEFRVDNNHLLLLMIHVFRENEEQLFKMIRMSTGHMEGNLQLLYVLLTDCYVYLLRKGATEKPYLVEEAVSYNELDYVSVGLDQQTVKLVCTNRRKQFLLDTADVALAEFFLASLKSAMIKGCREPPYPSILTDATMEKLALAKFVAQESKCEASAVTVRFYGLVHWEDPTDESLGPTPCHCSPPEGTITKEGMLHYKAGTSYLGKEHWKTCFVVLSNGILYQYPDRTDVIPLLSVNMGGEQCGGCRRANTTDRPHAFQVILSDRPCLELSAESEAEMAEWMQHLCQAVSKGVIPQGVAPSPCIPCCLVLTDDRLFTCHEDCQTSFFRSLGTAKLGDISAVSTEPGKEYCVLEFSQDSQQLLPPWVIYLSCTSELDRLLSALNSGWKTIYQVDLPHTAIQEASNKKKFEDALSLIHSAWQRSDSLCRGRASRDPWC

SEQ ID NO: 10775 - protein, 15 aa, Artificial Sequence
  Synthetic polypeptide
QEFKTGLGNMVTWYI

SEQ ID NO: 10776 - protein, 28 aa, Artificial Sequence
  Synthetic polypeptide
RSSRLAWATWSLGTYDRGLRQQRDSEHL

SEQ ID NO: 10777 - protein, 225 aa, Artificial Sequence
  Synthetic polypeptide
GVQDWPGQHGHLVHMTVVSGSNVTLNISESLPENYKQLTWFYTFDQKIVEWDSRKSKYFESKFKGRVRLDPQSGALYISKVQKEDNSTYIMRVLKKTGNEQEWKIKLQVLDPVPKPVIKIEKIEDMDDNCYLKLSCVIPGESVNYTWYGDKRPFPKELQNSVLETTLMPHNYSRCYTCQVSNSVSSKNGTVCLSPPCTLARSFGVEWIASWLVVTVPTILGLLLT

SEQ ID NO: 10778 - protein, 151 aa, Artificial Sequence
  Synthetic polypeptide
GVQDWPGQHGHLVHMTVVSGSNVTLNISESLPENYKQLTWFYTFDQKIVEWDSRKSKYFESKFKGRVRLDPQSGALYISKVQKEDNSTYIMRVLKKTGNEQEWKIKLQVLGESGEPKSKSPLQWPQMDHCRASWEAWGTLGEEERKTSGQV

SEQ ID NO: 10779 - protein, 65 aa, Artificial Sequence
  Synthetic polypeptide
GQAWWLMLVIPALWEAEAGGQEMETILANKDPPVCRAHGPRLLPPEQPSLLQAMPCEAECCGVLL

SEQ ID NO: 10780 - protein, 55 aa, Artificial Sequence
  Synthetic polypeptide
SQHFGRLRQAVKRWRPSWPTRILLSVEPTDQGCYPLNNHLFCKPCHVKRSAAGCC

SEQ ID NO: 10781 - protein, 28 aa, Artificial Sequence
  Synthetic polypeptide
GRRSRDGDHPGQQGSSCLSSPRTKAATP

SEQ ID NO: 10782 - protein, 25 aa, Artificial Sequence
  Synthetic polypeptide
SQHFGRQEDHKVSFSVMQESVEVWP

SEQ ID NO: 10783 - protein, 42 aa, Artificial Sequence
  Synthetic polypeptide
QGAVAHACNPSTLGGRRITRSLFQSCRSQSKCGHNNCFSHED

SEQ ID NO: 10784 - protein, 42 aa, Artificial Sequence
  Synthetic polypeptide
RARWLTPVIPALWEAGGSQGLFFSHAGVSRSVAIITAFLMKT

SEQ ID NO: 10785 - protein, 29 aa, Artificial Sequence
  Synthetic polypeptide
SQHFGRQEDHKSCRSQSKCGHNNCFSHED

SEQ ID NO: 10786 - protein, 38 aa, Artificial Sequence
  Synthetic polypeptide
QGAVAHACNPSTLGGRRITSHAGVSRSVAIITAFLMKT

SEQ ID NO: 10787 - protein, 29 aa, Artificial Sequence
  Synthetic polypeptide
RARWLTPVIPALWEAGGSQVMQESVEVWP

SEQ ID NO: 10788 - protein, 245 aa, Artificial Sequence
  Synthetic polypeptide
QGAVAHACNPSTLGGRRITSHAGVSRSVAIITAFLMKTDQLPFEKAYEKLQILKPEAKMNEGFEWQLKLYQAMGYEVDTSSAIYKQYRLQKVTEKYPELQNLPQELFAVDPTTVSQGLKDEVLYKCRKCRRSLFRSSSILDHREGSGPIAFAHKRMTPSSMLTTGRQAQCTSYFIEPVQWMESALLGVMDGQLLCPKCSAKLGSFNWYGEQCSCGRWITPAFQIHKNRVDEMKILPVLGSQTGKI

SEQ ID NO: 10789 - protein, 196 aa, Artificial Sequence
  Synthetic polypeptide
ARGAWLSFPQIAAPQEPTSKAFVVLRCLQNVFSKKLLSGDKYRFSAPELQFYTSAAAVAMLVPARVFFTDVPVIGRSGKSFSYNQDVVLLLLTDGVLFHLQSVTAYALMGKISPVTFSVASTVKHALSIWLSVIVFGNKITSLSAVGTALVTVGVLLYNKARQHQQEALQSLAAATGRAPDDTVEPLLPQDPRQHP

SEQ ID NO: 10790 - protein, 47 aa, Artificial Sequence
  Synthetic polypeptide
GVCKMFFQKSCSAGTNTGSRPRSCSSTPAPLRWPCSSRPGFSLRTSQ

SEQ ID NO: 10791 - protein, 227 aa, Artificial Sequence
  Synthetic polypeptide
AQRWASAPVEPSDEVTALVHGVTAASGGTLSQRCLAKLPADCCPTGANIKSICCFEVFAKCFFKKAAQRGQIQVLGPGAAVLHQRRCGGHARPGPGFLYGRPSDREEWEELQLQPGRGAAASDRRSPVPPSERHGVRPHGENLPGDFQRRQHRETCLVHLAQRNRFRQQDHQLVGRWHSPGDRWGPALQQSQATPAGGAAEPGCSHWPGPRRHSGAAASTGPQAASL

SEQ ID NO: 10792 - protein, 174 aa, Artificial Sequence
  Synthetic polypeptide
CLPNHVELAKEIKIKLGILLQKPDSVGDLVIPYNEKPEKPAKTQKTSLDEALQWRDSLDKLLQNNYGLASFKSFLKSEFSEENLEFWIACEDYKKIKSPAKMAEKAKQIYEEFIQTEAPKEVNIDHFTKDITMKNLVEPSLSSFDMAQKRIHALMEKDSLPRFVRSEFYQELIK

SEQ ID NO: 10793 - protein, 86 aa, Artificial Sequence
  Synthetic polypeptide
RGALCHDYKFPDASPTMWNWPRRLRSSWEFSSRSQTQLVTLSFRTMRSQRNQPRPRKPRWTRPCSGVIPWTNSCRTTMDLPVSKVS

SEQ ID NO: 10794 - protein, 44 aa, Artificial Sequence
  Synthetic polypeptide
WLYKHLAIPALHSFSLLPPCEEVPYAMIISFLMPPQPCGTGQGD

SEQ ID NO: 10795 - protein, 178 aa, Artificial Sequence
  Synthetic polypeptide
CLPNHVELAKEIKIKLGILLQKPDSVGDLVIPYNEKPEKPAKTQKTSLDEALQWRDSLDKLLQNNYGLASFKSFLKSEFSEENLEFWIACEDYKKIKSPAKMAEKAKQIYEEFIQTEAPKEVGLWVNIDHFTKDITMKNLVEPSLSSFDMAQKRIHALMEKDSLPRFVRSEFYQELIK

SEQ ID NO: 10796 - protein, 93 aa, Artificial Sequence
  Synthetic polypeptide
GVSPFTWLSFFLTCYHDCEASPGTWNWPRRLRSSWEFSSRSQTQLVTLSFRTMRSQRNQPRPRKPRWTRPCSGVIPWTNSCRTTMDLPVSKVS

SEQ ID NO: 10797 - protein, 56 aa, Artificial Sequence
  Synthetic polypeptide
LNYEGSLPHTVLMVVSKSHEIWWFYKGFPLSLGSHSFLPATMIVRPPQARGTGQGD

SEQ ID NO: 10798 - protein, 174 aa, Artificial Sequence
  Synthetic polypeptide
GLPRHVELAKEIKIKLGILLQKPDSVGDLVIPYNEKPEKPAKTQKTSLDEALQWRDSLDKLLQNNYGLASFKSFLKSEFSEENLEFWIACEDYKKIKSPAKMAEKAKQIYEEFIQTEAPKEVNIDHFTKDITMKNLVEPSLSSFDMAQKRIHALMEKDSLPRFVRSEFYQELIK

SEQ ID NO: 10799 - protein, 178 aa, Artificial Sequence
  Synthetic polypeptide
GLPRHVELAKEIKIKLGILLQKPDSVGDLVIPYNEKPEKPAKTQKTSLDEALQWRDSLDKLLQNNYGLASFKSFLKSEFSEENLEFWIACEDYKKIKSPAKMAEKAKQIYEEFIQTEAPKEVGLWVNIDHFTKDITMKNLVEPSLSSFDMAQKRIHALMEKDSLPRFVRSEFYQELIK

SEQ ID NO: 10800 - protein, 17 aa, Artificial Sequence
  Synthetic polypeptide
GQVGSWLAIRRPSPRLT

SEQ ID NO: 10801 - protein, 21 aa, Artificial Sequence
  Synthetic polypeptide
ARWEAGWPSEDRPHGSPDFCY

SEQ ID NO: 10802 - protein, 143 aa, Artificial Sequence
  Synthetic polypeptide
PGGKLAGHQKTVPTAHLTFVIDCTHGKQLSLAATASPPQAPSPNRGLVTPPMKTYIVFCGENWPHLTRVTPMGGGCLAQARATLPLCRGSVASASFPVSPLCPQEVPEAKGKPVKAAPVRSSTWGTVKDSLKALSSCVCGQAD

SEQ ID NO: 10803 - protein, 28 aa, Artificial Sequence
  Synthetic polypeptide
SQHFGRPKRADHEVGSWLAIRRPSPRLT

SEQ ID NO: 10804 - protein, 41 aa, Artificial Sequence
  Synthetic polypeptide
PGAVPHACNPSTLGGRSGQIMRWEAGWPSEDRPHGSPDFCY

SEQ ID NO: 10805 - protein, 70 aa, Artificial Sequence
  Synthetic polypeptide
GRARWLTPVIPALWEAEAGRSPEEKKMILWPSNHPSKCLGKKKFITEKMKREKKNVGIIAIQQKGGSMLE

SEQ ID NO: 10806 - protein, 17 aa, Artificial Sequence
  Synthetic polypeptide
SQHFGKPRQADHQRRRR

SEQ ID NO: 10807 - protein, 726 aa, Artificial Sequence
  Synthetic polypeptide
PGAVAHACNPSTLGSRGRQITRGEEDDSLAIKPPQQMSRKEKVHHRKDEKRKEKCRHHSHSAEGGKHARVKEREHERRKRHREEQDKARREWERQKRREMAREHSRRERDRLEQLERKRERERKMREQQKEQREQKERERRAEERRKEREARREVSAHHRTMREDYSDKVKASHWSRSPPRPPRERFELGDGRKPVKEEKMEERDLLSDLQDISDSERKTSSAESSSAESGSGSEEEEEEEEEEEEEGSTSEESEEEEEEEEEEEEETGSNSEEASEQSAEEVSEEEMSEDEERENENHLLVVPESRFDRDSGESEEAEEEVGEGTPQSSALTEGDYVPDSPALLPIELKQELPKYLPALQGCRSVEEFQCLNRIEEGTYGVVYRAKDKKTDEIVALKRLKMEKEKEGFPITSLREINTILKAQHPNIVTVREIVVGSNMDKIYIVMNYVEHDLKSLMETMKQPFLPGEVKTLMIQLLRGVKHLHDNWILHRDLKTSNLLLSHAGILKVGDFGLAREYGSPLKAYTPVVVTQWYRAPELLLGAKEYSTAVDMWSVGCIFGELLTQKPLFPGNSEIDQINKVFKELGTPSEKIWPGYSELPVVKKMTFSEHPYNNLRKRFGALLSDQGFDLMNKFLTYFPGRRISAEDGLKHEYFRETPLPIDPSMFPTWPAKSEQQRVKRGTSPRPPEGGLGYSQLGDDDLKETGFHLTTTNQGASAAGPGFSLKF

SEQ ID NO: 10808 - protein, 366 aa, Artificial Sequence
  Synthetic polypeptide
PGAVAHACNPSTLGSRGRQITRGEEDDSLAIKPPQQMSRKEKVHHRKDEKRKEKCRHHSHSAEGGKHARVKEREHERRKRHREEQDKARREWERQKRREMAREHSRRERDRLEQLERKRERERKMREQQKEQREQKERERRAEERRKEREARREVSAHHRTMREDYSDKVKASHWSRSPPRPPRERFELGDGRKPGEARPAPAQKPAQLKEEKMEERDLLSDLQDISDSERKTSSAESSSAESGSGSEEEEEEEEEEEEEGSTSEESEEEEEEEEEEEEETGSNSEEASEQSAEEVSEEEMSEDEERENENHLLVVPESRFDRDSGESEEAEEEVGLPERRGVPVPEQDRGGHLWSGLQSKRQENR

SEQ ID NO: 10809 - protein, 60 aa, Artificial Sequence
  Synthetic polypeptide
GRARWLTPVIPALWEAEAGRSPEEKKMILWPSNHPSKCLGKKKFITEKMKREKKNGSMLE

SEQ ID NO: 10810 - protein, 725 aa, Artificial Sequence
  Synthetic polypeptide
PGAVAHACNPSTLGSRGRQITRGEEDDSLAIKPPQQMSRKEKVHHRKDEKRKEKWKHARVKEREHERRKRHREEQDKARREWERQKRREMAREHSRRERGNDGVCLFRDRLEQLERKRERERKMREQQKEQREQKERERRAEERRKEREARREVSAHHRTMREDYSDKVKASHWSRSPPRPPRERFELGDGRKPVKEEKMEERDLLSDLQDISDSERKTSSAESSSAESGSGSEEEEEEEEEEEEEGSTSEESEEEEEEEEEEEEETGSNSEEASEQSAEEVSEEEMSEDEERENENHLLVVPESRFDRDSGESEEAEEEVGEGTPQSSALTEGDYVPDSPALLPIELKQELPKYLPALQGCRSVEEFQCLNRIEEGTYGVVYRAKDKKTDEIVALKRLKMEKEKEGFPITSLREINTILKAQHPNIVTVREIVVGSNMDKIYIVMNYVEHDLKSLMETMKQPFLPGEVKTLMIQLLRGVKHLHDNWILHRDLKTSNLLLSHAGILKVGDFGLAREYGSPLKAYTPVVVTQWYRAPELLLGAKEYSTAVDMWSVGCIFGELLTQKPLFPGNSEIDQINKVFKELGTPSEKIWPGYSELPVVKKMTFSEHPYNNLRKRFGALLSDQGFDLMNKFLTYFPGRRISAEDGLKHEYFRETPLPIDPSMFPTWPAKSEQQRVKRGTSPRPPEGGLGYSQLGDDDLKETGFHLTTTNQGASAAGPGFSLKF

SEQ ID NO: 10811 - protein, 716 aa, Artificial Sequence
  Synthetic polypeptide
PGAVAHACNPSTLGSRGRQITRGEEDDSLAIKPPQQMSRKEKVHHRKDEKRKEKWKHARVKEREHERRKRHREEQDKARREWERQKRREMAREHSRRERDRLEQLERKRERERKMREQQKEQREQKERERRAEERRKEREARREVSAHHRTMREDYSDKVKASHWSRSPPRPPRERFELGDGRKPVKEEKMEERDLLSDLQDISDSERKTSSAESSSAESGSGSEEEEEEEEEEEEEGSTSEESEEEEEEEEEEEEETGSNSEEASEQSAEEVSEEEMSEDEERENENHLLVVPESRFDRDSGESEEAEEEVGEGTPQSSALTEGDYVPDSPALLPIELKQELPKYLPALQGCRSVEEFQCLNRIEEGTYGVVYRAKDKKTDEIVALKRLKMEKEKEGFPITSLREINTILKAQHPNIVTVREIVVGSNMDKIYIVMNYVEHDLKSLMETMKQPFLPGEVKTLMIQLLRGVKHLHDNWILHRDLKTSNLLLSHAGILKVGDFGLAREYGSPLKAYTPVVVTQWYRAPELLLGAKEYSTAVDMWSVGCIFGELLTQKPLFPGNSEIDQINKVFKELGTPSEKIWPGYSELPVVKKMTFSEHPYNNLRKRFGALLSDQGFDLMNKFLTYFPGRRISAEDGLKHEYFRETPLPIDPSMFPTWPAKSEQQRVKRGTSPRPPEGGLGYSQLGDDDLKETGFHLTTTNQGASAAGPGFSLKF

SEQ ID NO: 10812 - protein, 729 aa, Artificial Sequence
  Synthetic polypeptide
PGAVAHACNPSTLGSRGRQITRGEEDDSLAIKPPQQMSRKEKVHHRKDEKRKEKWKHARVKEREHERRKRHREEQDKARREWERQKRREMAREHSRRERDRLEQLERKRERERKMREQQKEQREQKERERRAEERRKEREARREVSAHHRTMREDYSDKVKASHWSRSPPRPPRERFELGDGRKPGEARPAPAQKPAQLKEEKMEERDLLSDLQDISDSERKTSSAESSSAESGSGSEEEEEEEEEEEEEGSTSEESEEEEEEEEEEEEETGSNSEEASEQSAEEVSEEEMSEDEERENENHLLVVPESRFDRDSGESEEAEEEVGEGTPQSSALTEGDYVPDSPALLPIELKQELPKYLPALQGCRSVEEFQCLNRIEEGTYGVVYRAKDKKTDEIVALKRLKMEKEKEGFPITSLREINTILKAQHPNIVTVREIVVGSNMDKIYIVMNYVEHDLKSLMETMKQPFLPGEVKTLMIQLLRGVKHLHDNWILHRDLKTSNLLLSHAGILKVGDFGLAREYGSPLKAYTPVVVTQWYRAPELLLGAKEYSTAVDMWSVGCIFGELLTQKPLFPGNSEIDQINKVFKELGTPSEKIWPGYSELPVVKKMTFSEHPYNNLRKRFGALLSDQGFDLMNKFLTYFPGRRISAEDGLKHEYFRETPLPIDPSMFPTWPAKSEQQRVKRGTSPRPPEGGLGYSQLGDDDLKETGFHLTTTNQGASAAGPGFSLKF

SEQ ID NO: 10813 - protein, 353 aa, Artificial Sequence
  Synthetic polypeptide
PGAVAHACNPSTLGSRGRQITRGEEDDSLAIKPPQQMSRKEKVHHRKDEKRKEKCRHHSHSAEGGKHARVKEREHERRKRHREEQDKARREWERQKRREMAREHSRRERDRLEQLERKRERERKMREQQKEQREQKERERRAEERRKEREARREVSAHHRTMREDYSDKVKASHWSRSPPRPPRERFELGDGRKPVKEEKMEERDLLSDLQDISDSERKTSSAESSSAESGSGSEEEEEEEEEEEEEGSTSEESEEEEEEEEEEEEETGSNSEEASEQSAEEVSEEEMSEDEERENENHLLVVPESRFDRDSGESEEAEEEVGLPERRGVPVPEQDRGGHLWSGLQSKRQENR

SEQ ID NO: 10814 - protein, 178 aa, Artificial Sequence
  Synthetic polypeptide
PGAVAHACNPSTLGSRGRQITRGEEDDSLAIKPPQQMSRKEKVHHRKDEKRKEKWKHARVKEREHERRKRHREEQDKARREWERQKRREMAREHSRRESVCTSPNDERGLQRQSESQPLESQPASAAAGAVRVGRRPEASKRRENGRKGPAVRLTGHQRQREEDQLGRVLVSGIRLRF

SEQ ID NO: 10815 - protein, 97 aa, Artificial Sequence
  Synthetic polypeptide
PGAVAHACNPSTLGSRGRQITRGEEDDSLAIKPPQQMSRKEKVHHRKDEKRKEKWKHARVKEREHERRKRHREEQDKARREWERQKRREMAREHSRR

SEQ ID NO: 10816 - protein, 48 aa, Artificial Sequence
  Synthetic polypeptide
TCPFSFYRELLLAKCGQQCQQFRGHQALTRASRDWKHELPIHQPRISG

SEQ ID NO: 10817 - protein, 376 aa, Artificial Sequence
  Synthetic polypeptide
HVLSHFTVNSFWLNVVNSVSSSEDIKPLPGLPGIGNMNYPSTSPGSLVKHICAICGDRSSGKHYGVYSCEGCKGFFKRTIRKDLIYTCRDNKDCLIDKRQRNRCQYCRYQKCLVMGMKREAVQEERQRSRERAESEAECATSGHEDMPVERILEAELAVEPKTESYGDMNMENSTNDPVTNICHAADKQLFTLVEWAKRIPHFSDLTLEDQVILLRAGWNELLIASFSHRSVSVQDGILLATGLHVHRSSAHSAGVGSIFDRVLTELVSKMKDMQMDKSELGCLRAIVLFNPDAKGLSNPSEVETLREKVYATLEAYTKQKYPEQPGRFAKLLLRLPALRSIGLKCLEHLFFFKLIGDTPIDTFLMEMLETPLQIT

SEQ ID NO: 10818 - protein, 4 aa, Artificial Sequence
  Synthetic polypeptide
TPSG

SEQ ID NO: 10819 - protein, 56 aa, Artificial Sequence
  Synthetic polypeptide
LFPSPHPFCIHISNDSICHTKQRLFPCLTSSLEGRLHHFHLHISGGTVCGGLQPGS

SEQ ID NO: 10820 - protein, 383 aa, Artificial Sequence
  Synthetic polypeptide
RADYIIFIFISQVGQCVVVFSQAPSGRAPLSPSLNSRPSPISATPPALVPETREYRSQSPVRSMDEAPCVNGRWGTLRPRAQRQTPSGSREGSLSPARGDGSPILNGGSLSPGTAAVGGSSLDSPVQAISPSTPSAPEGYDLKIGLSLAPRRGSLPDQKDLRLGSIDLNWDLKPASSSNPMDGMDNRTVGGSMRHPPEQTNGVHTPPHVASALAGAVSPGALRRSLEAIKAMSSKGPSASAALSPPLGSSPGSPGSQSLSSGETVPIPRPGPAQGDGHSLPPIARRLGHHPPQSLNVGKPLYQSMNCKPMQMYVLDIKDTKEKGRVKWKVFNSSSVVGPPETSLHTVVQGRGELIIFGGLMDKKQNVKYYPKTNALYFVRAKR

SEQ ID NO: 10821 - protein, 35 aa, Artificial Sequence
  Synthetic polypeptide
PRGQTTSFSSSYLRWDSVWWSSARLLVGEPHSAPV

SEQ ID NO: 10822 - protein, 246 aa, Artificial Sequence
  Synthetic polypeptide
RADYIIFIFISQVGQCVVVFSQAPSGRAPLSPSLNSRPSPISATPPALVPETREYRSQSPVRSMDEAPCVNGRWGTLRPRAQRQTPSGSREGSLSPARGDGSPILNGGSLSPGTAAVGGSSLDSPVQAISPSTPSAPEGYDLKIGLSLAPRRGSLPDQKDLRLGSIDLNWDLKPASSSNPMDGMDNRTVGGSMRHPPEQTNGVHTPPHVASALAGAVSPGALRRSLEAIKAMSSKGPSASAALSPP

SEQ ID NO: 10823 - protein, 15 aa, Artificial Sequence
  Synthetic polypeptide
IISCPGEGQAGNCLT

SEQ ID NO: 10824 - protein, 11 aa, Artificial Sequence
  Synthetic polypeptide
AAPAKVKLGTA

SEQ ID NO: 10825 - protein, 187 aa, Artificial Sequence
  Synthetic polypeptide
LCQPLIDHKLPRRRSSWELPDLREGRVKAISDSDGVSYPWYGNTTETVTLVGPTNKISRFSVSMNDNFYPSVTWAVPVSDSNVPLLTRIKRDQSFTTWLVAMNTTTKEKIILQTIKWRMRVDIEVDPLQLLGQRARLVGRTQQEQPRILSRMEPIPPNALVKPNANDAQVLMWRPKRGPPLVVIPPK

SEQ ID NO: 10826 - protein, 10 aa, Artificial Sequence
  Synthetic polypeptide
TPSQAGNCLT

SEQ ID NO: 10827 - protein, 27 aa, Artificial Sequence
  Synthetic polypeptide
ALVFKDRIAVKALLFAGYELQVKLGTA

SEQ ID NO: 10828 - protein, 194 aa, Artificial Sequence
  Synthetic polypeptide
LWCLKTGLQSKLCCLLAMNSKSSWELPDLREGRVKAISDSDGVSYPWYGNTTETVTLVGPTNKISRFSVSMNDNFYPSVTWAVPVSDSNVPLLTRIKRDQSFTTWLVAMNTTTKEKIILQTIKWRMRVDIEVDPLQLLGQRARLVGRTQQEQPRILSRMEPIPPNALVKPNANDAQVLMWRPKRGPPLVVIPPK

SEQ ID NO: 10829 - protein, 214 aa, Artificial Sequence
  Synthetic polypeptide
AQEFKTSPGNKAQDPISTKNAKISLGYGGVHLKSQPLGRLRSSWELPDLREGRVKAISDSDGVSYPWYGNTTETVTLVGPTNKISRFSVSMNDNFYPSVTWAVPVSDSNVPLLTRIKRDQSFTTWLVAMNTTTKEKIILQTIKWRMRVDIEVDPLQLLGQRARLVGRTQQEQPRILSRMEPIPPNALVKPNANDAQVLMWRPKRGPPLVVIPPK

SEQ ID NO: 10830 - protein, 23 aa, Artificial Sequence
  Synthetic polypeptide
PGVWWCAPEVPATREAEVKLGTA

SEQ ID NO: 10831 - protein, 76 aa, Artificial Sequence
  Synthetic polypeptide
RTQWNTPVIPALWEANVGGSPEIKSSRPAWSTWCSPSVLSWFHEGCPGRKHSVGEPYLSLSWNPNHSALLAQCMLL

SEQ ID NO: 10832 - protein, 658 aa, Artificial Sequence
  Synthetic polypeptide
SQHFGRPTWADRLRSRVQDQPGQHGVAHQCYHGFMKAVQEGNIQWESRTYPYPGTPITQRFSHSACYYDANQSMYVFGGCTQSSCNAAFNDLWRLDLNSKEWIRPLASGSYPSPKAGATLVVYKDLLVLFGGWTRPSPYPLHQPERFFDEIHTYSPSKNWWNCIVTTHGPPPMAGHSSCVIDDKMIVFGGSLGSRQMSNDVWVLDLEQWAWSKPNISGPSPHPRGGQSQIVIDDATILILGGCGGPNALFKDAWLLHMHSGPWAWQPLKVENEEHGAPELWCHPACRVGQCVVVFSQAPSGRAPLSPSLNSRPSPISATPPALVPETREYRSQSPVRSMDEAPCVNGRWGTLRPRAQRQTPSGSREGSLSPARGDGSPILNGGSLSPGTAAVGGSSLDSPVQAISPSTPSAPEGYDLKIGLSLAPRRGSLPDQKDLRLGSIDLNWDLKPASSSNPMDGMDNRTVGGSMRHPPEQTNGVHTPPHVASALAGAVSPGALRRSLEAIKAMSSKGPSASAALSPPLGSSPGSPGSQSLSSGETVPIPRPGPAQGDGHSLPPIARRLGHHPPQSLNVGKPLYQSMNCKPMQMYVLDIKDTKEKGRVKWKVFNSSSVVGPPETSLHTVVQGRGELIIFGGLMDKKQNVKYYPKTNALYFVRAKR

SEQ ID NO: 10833 - protein, 12 aa, Artificial Sequence
  Synthetic polypeptide
DQEFKTSLVNMV

SEQ ID NO: 10834 - protein, 166 aa, Artificial Sequence
  Synthetic polypeptide
ETGSGHDGKQDMRHASLHPSALTSTQQTLRLEIDRRLEKKLKITQKESRKSKSPPKVPIVIQDDSLPAGPPPQIRILKRPTSNGVVSSPNSTSRPTLPVKSLAQREAEYAEARKRILGSASPEEEQEKPILDRPTRISQPEDSRQPNNVIRQPLGPDGSQGFKQRR

SEQ ID NO: 10835 - protein, 3 aa, Artificial Sequence
  Synthetic polypeptide
DWK

SEQ ID NO: 10836 - protein, 57 aa, Artificial Sequence
  Synthetic polypeptide
REAGHETCLITSFSIDINTTDLKTGNRQTVGKKTEDHTKREQEIQISSQSAHCDSGR

SEQ ID NO: 10837 - protein, 165 aa, Artificial Sequence
  Synthetic polypeptide
ETGSGHDGKQDMRHASLHPSALTSTQQTLRLEIDRRLEKKLKITQKERKSKSPPKVPIVIQDDSLPAGPPPQIRILKRPTSNGVVSSPNSTSRPTLPVKSLAQREAEYAEARKRILGSASPEEEQEKPILDRPTRISQPEDSRQPNNVIRQPLGPDGSQGFKQRR

SEQ ID NO: 10838 - protein, 56 aa, Artificial Sequence
  Synthetic polypeptide
REAGHETCLITSFSIDINTTDLKTGNRQTVGKKTEDHTKREEIQISSQSAHCDSGR

SEQ ID NO: 10839 - protein, 47 aa, Artificial Sequence
  Synthetic polypeptide
ETGSGHDGKQDMRHASLHPSALTSTQQTLRLQEIQISSQSAHCDSGR

SEQ ID NO: 10840 - protein, 120 aa, Artificial Sequence
  Synthetic polypeptide
DCRKSKSPPKVPIVIQDDSLPAGPPPQIRILKRPTSNGVVSSPNSTSRPTLPVKSLAQREAEYAEARKRILGSASPEEEQEKPILDRPTRISQPEDSRQPNNVIRQPLGPDGSQGFKQRR

SEQ ID NO: 10841 - protein, 36 aa, Artificial Sequence
  Synthetic polypeptide
REAGHETCLITSFSIDINTTDLKTAGNPNLLPKCPL

SEQ ID NO: 10842 - protein, 40 aa, Artificial Sequence
  Synthetic polypeptide
PSSDRRIKATLSAKQGWCEQKMNVWGRMLTAIIHYIDIRK

SEQ ID NO: 10843 - protein, 155 aa, Artificial Sequence
  Synthetic polypeptide
AENECLGKNVDSHNTLYRYKEIDRRLEKKLKITQKESRKSKSPPKVPIVIQDDSLPAGPPPQIRILKRPTSNGVVSSPNSTSRPTLPVKSLAQREAEYAEARKRILGSASPEEEQEKPILDRPTRISQPEDSRQPNNVIRQPLGPDGSQGFKQRR

SEQ ID NO: 10844 - protein, 154 aa, Artificial Sequence
  Synthetic polypeptide
AENECLGKNVDSHNTLYRYKEIDRRLEKKLKITQKERKSKSPPKVPIVIQDDSLPAGPPPQIRILKRPTSNGVVSSPNSTSRPTLPVKSLAQREAEYAEARKRILGSASPEEEQEKPILDRPTRISQPEDSRQPNNVIRQPLGPDGSQGFKQRR

SEQ ID NO: 10845 - protein, 16 aa, Artificial Sequence
  Synthetic polypeptide
IAHKPMVWTFRSSLCL

SEQ ID NO: 10846 - protein, 793 aa, Artificial Sequence
  Synthetic polypeptide
TNEKAKKSEITVYFHKVTPSVPASPASPSSFLSSAISESARPLLFLLLSLLSMKTRMKIFVMIHFHLMNSTQTNGLDFQKQPVPVGGAISTAQAQAFLGHLHQVQLAGTSLQAAAQSLNVQSKSNEESGDSQQPSQPSQQPSVQAAIPQTQLMLAGGQITGLTLTPAQQQLLLQQAQAQAQLLAAAVQQHSASQQHSAAGATISASAATPMTQIPLSQPIQIAQDLQQLQQLQQQNLNLQQFVLVHPTTNLQPAQFIISQTPQGQQGLLQAQNLLTQLPQQSQANLLQSQPSITLTSQPATPTRTIAATPIQTLPQSQSTPKRIDTPSLEEPSDLEELEQFAKTFKQRRIKLGFTQGDVGLAMGKLYGNDFSQTTISRFEALNLSFKNMCKLKPLLEKWLNDAENLSSDSSLSSPSALNSPGIEGLSRRRKKRTSIETNIRVALEKSFLENQKPTSEEITMIADQLNMEKEVIRVWFCNRRQKEKRINPPSSGGTSSSPIKAIFPSPTSLVATTPSLVTSSAATTLTVSPVLPLTSAAVTNLSVTGTSDTTSNNTATVISTAPPASSAVTSPSLSPSPSASASTSEASSASETSTTQTTSTPLSSPLGTSQVMVTASGLQTAAAAALQGAAQLPANASLAAMAAAAGLNPSLMAPSQFAAGGALLSLNPGTLSGALSPALMSNSTLATIQALASGGSLPITSLDATGNLVFANAGGAPNIVTAPLFLNPQNLSLLTSNPVSLVSAAAASAGNSAPVASLHATSTSAESIQNSLFTVASASGAASTTTTASKAQ

SEQ ID NO: 10847 - protein, 304 aa, Artificial Sequence
  Synthetic polypeptide
TNEKAKKSEITVYFHKVTPSVPASPASPSSFLSSAISESARPLLFLLLSLLSMKTRMKIFVMIHFHLMNSTQTNGLDFQKQPVPVGGAISTAQAQAFLGHLHQVQLAGTSLQAAAQSLNVQSKSNEESGDSQQPSQPSQQPSVQAAIPQTQLMLAGGQITGLTLTPAQQQLLLQQAQAQAQLLAAAVQQHSASQQHSAAGATISASAATPMTQIPLSQPIQIAQDLQQLQQLQQQNLNLQQFVLVHPTTNLQPAQFIISQTPQGQQGLLQAQNLLTQLPQQSQANLLQSQPSITLTSQIWPSPA

SEQ ID NO: 10848 - protein, 730 aa, Artificial Sequence
  Synthetic polypeptide
TNEKAKKSEITVYFHKVTPSVPASPASPSSFLSSAISESARPLLFLLLSLLSMKTRMKIFVMIHFHLMNSTQTNGLDFQKQPVPVGGAISTAQAQAFLGHLHQVQLAGTSLQAAAQSLNVQSKSNEESGDSQQPSQPSQQPSVQAAIPQTQLMLAGGQITGDLQQLQQLQQQNLNLQQFVLVHPTTNLQPAQFIISQTPQGQQGLLQAQNLLTQLPQQSQANLLQSQPSITLTSQPATPTRTIAATPIQTLPQSQSTPKRIDTPSLEEPSDLEELEQFAKTFKQRRIKLGFTQGDVGLAMGKLYGNDFSQTTISRFEALNLSFKNMCKLKPLLEKWLNDAENLSSDSSLSSPSALNSPGIEGLSRRRKKRTSIETNIRVALEKSFLENQKPTSEEITMIADQLNMEKEVIRVWFCNRRQKEKRINPPSSGGTSSSPIKAIFPSPTSLVATTPSLVTSSAATTLTVSPVLPLTSAAVTNLSVTGTSDTTSNNTATVISTAPPASSAVTSPSLSPSPSASASTSEASSASETSTTQTTSTPLSSPLGTSQVMVTASGLQTAAAAALQGAAQLPANASLAAMAAAAGLNPSLMAPSQFAAGGALLSLNPGTLSGALSPALMSNSTLATIQALASGGSLPITSLDATGNLVFANAGGAPNIVTAPLFLNPQNLSLLTSNPVSLVSAAAASAGNSAPVASLHATSTSAESIQNSLFTVASASGAASTTTTASKAQ

SEQ ID NO: 10849 - protein, 703 aa, Artificial Sequence
  Synthetic polypeptide
TNEKAKKSEITVYFHKVTPSVPASPASPSSFLSSAISESARPLLFLLLSLLSMKTRMKIFVMIHFHLMNSTQTNGLDFQKQPVPVGGAISTAQAQAFLGHLHQVQLAGTSLQAAAQSLNVQSKSNEESGDSQQPSQPSQQPSVQAAIPQTQLMLAGGQITGLTLTPAQQQLLLQQAQAQAQLLAAAVQQHSASQQHSAAGATISASAATPMTQIPLSQPIQIAQDLQQLQQLQQQNLNLQQFVLVHPTTNLQPAQFIISQTPQGQQGLLQAQNLLTQLPQQSQANLLQSQPSITLTSQPATPTRTIAATPIQTLPQSQSTPKRIDTPSLEEPSDLEELEQFAKTFKQRRIKLGFTQGDVGLAMGKLYGNDFSQTTISRFEALNLSFKNMCKLKPLLEKWLNDAENLSSDSSLSSPSALNSPGIEGLSRRRKKRTSIETNIRVALEKSFLENQKPTSEEITMIADQLNMEKEVIRVWFCNRRQKEKRINPPSSGGTSSSPIKAIFPSPTSLVATTPSLVTSSAATTLTVSPVLPLTSAAVTNLSVTGTSDTTSNNTATVISTAPPASSAVTSPSLSPSPSASASTSEASSASETSTTQTTSTPLSSPLGTSQVMVTASGLQTAAAAALQGAAQLPANASLAAMAAAAGLNPSLMAPSQFAAGGALLSLNPGTLSGALSPALMSNSTLATIQGLLHGLENFLTKN

SEQ ID NO: 10850 - protein, 46 aa, Artificial Sequence
  Synthetic polypeptide
EAEAGGSLEAMSSRLQCAMIMPVNNHCTPAWVTHSCFWWLSSNNIT

SEQ ID NO: 10851 - protein, 104 aa, Artificial Sequence
  Synthetic polypeptide
HTLASGGSLPITSLDATGNLVFANAGGAPNIVTAPLFLNPQNLSLLTSNPVSLVSAAAASAGNSAPVASLHATSTSAESIQNSLFTVASASGAASTTTTASKAQ

SEQ ID NO: 10852 - protein, 18 aa, Artificial Sequence
  Synthetic polypeptide
PLHPSVGNTLLLLVALFQ

SEQ ID NO: 10853 - protein, 64 aa, Artificial Sequence
  Synthetic polypeptide
LRGNKIYQQPMSLEEDPEPQMRTAAPANTDFSLRHRALACWIPNSATCWMESSSSMVSFSLPCS

SEQ ID NO: 10854 - protein, 64 aa, Artificial Sequence
  Synthetic polypeptide
ELQPQPTLISALGTELWPAGSQTLLPAGWNPLHLWCHSHCLVPESEVQQERRRPRVPAGPEPAL

SEQ ID NO: 10855 - protein, 34 aa, Artificial Sequence
  Synthetic polypeptide
HRTENQTLHVITRESICYTDHDFGTDQLLQETWI

SEQ ID NO: 10856 - protein, 137 aa, Artificial Sequence
  Synthetic polypeptide
YVAIKKNEFTSFAAGSHHSQQTNTGQKTKHCMLSLENPYATLTMTLAQTNFCKKHGFDPQSPLCVHIMLSGTVTKVNETEMDIAKHSLFIRHPEMKTWPSSHNWFFAKLNITNIWVLDYFGGPKIVTPEEYYNVTVQ

SEQ ID NO: 10857 - protein, 37 aa, Artificial Sequence
  Synthetic polypeptide
KRMSSRPLQQEAIILSKLTQDRKPNTACYHSRIHMLH

SEQ ID NO: 10858 - protein, 31 aa, Artificial Sequence
  Synthetic polypeptide
GLQLTFLRLRTVPSIYIKSLRKKRIYPKIKT

SEQ ID NO: 10859 - protein, 97 aa, Artificial Sequence
  Synthetic polypeptide
WAQPPKPSLNISKLGAVRGWEQLHQPLQSDSEKALLQSHPEADWSTHGRSMRKLITGLIFLKIWTCTVRTSTDLPQTENCSQYIHQVTEEEENLSKD

SEQ ID NO: 10860 - protein, 30 aa, Artificial Sequence
  Synthetic polypeptide
FSTAFPGGSAVLGTSQAFATMLSCTPWCTP

SEQ ID NO: 10861 - protein, 64 aa, Artificial Sequence
  Synthetic polypeptide
SQLHFQEVARCLAHRKPLLLCCPVPHGVPHEDHREPGCDGTCLHLASLAHRLPATPVWLVIRGV

SEQ ID NO: 10862 - protein, 414 aa, Artificial Sequence
  Synthetic polypeptide
RGAWHIASLCYYAVLYPMVYPMKITGNRAVMALVYIWLHSLIGCLPPLFGWSSVEFDEFKWMCVAAWHREPGYTAFWQIWCALFPFLVMLVCYGFIFRVARVKARKVHCGTVVIVEEDAQRTGRKNSSTSTSSSGSRRNAFQGVVYSANQCKALITILVVLGAFMVTWGPYMVVIASEALWGKSSVSPSLETWATWLSFASAVCHPLIYGLWNKTVRKELLGMCFGDRYYREPFVQRQRTSRLFSISNRITDLGLSPHLTALMAGGQPLGHSSSTGDTGFSCSQDSGTDMMLLEDYTSDDNPPSHCTCPPKRRSSVTFEDEVEQIKEAAKNSILHVKAEVHKSLDSYAASLAKAIEAEAKINLFGEEALPGVLVTARTVPGGGFGGRRGSRTLVSQRLQLQSIEEGDVLAAEQR

SEQ ID NO: 10863 - protein, 23 aa, Artificial Sequence
  Synthetic polypeptide
ALWLAPVVPALWEAETDVSSPKD

SEQ ID NO: 10864 - protein, 388 aa, Artificial Sequence
  Synthetic polypeptide
SQHFGRLRRMFPVLKISVTGLDPNAMYSLLLDFVPTDSHRWKYVNGEWVPAGKPEVSSHSCVYIHPDSPNFGAHWMKAPISFSKVKLTNKLNGGGQIMLNSLHKYEPQVHIVRVGSAHRMVTNCSFPETQFIAVTAYQNEEITALKIKYNPFAKAFLDAKERNHLRDVPEAISESQHVTYSHLGGWIFSNPDGVCTAGNSNYQYAAPLPLPAPHTHHGCEHYSGLRGHRQAPYPSAYMHRNHSPSVNLIESSSNNLQVFSGPDSWTSLSSTPHASILSVPHTNGPINPGPSPYPCLWTISNGAGGPSGPGPEVHASTPGAFLLGNPAVTSPPSVLSTQAPTSAGVEVLGEPSLTSIAVSTWTAVASHPFAGWGGPGAGGHHSPSSLDG

SEQ ID NO: 10865 - protein, 325 aa, Artificial Sequence
  Synthetic polypeptide
SQHFGRLRRMFPVLKISVTGLDPNAMYSLLLDFVPTDSHRWKYVNGEWVPAGKPEVSSHSCVYIHPDSPNFGAHWMKAPISFSKVKLTNKLNGGGQIMLNSLHKYEPQVHIVRVGSAHRMVTNCSFPETQFIAVTAYQNEEITALKIKYNPFAKAFLDAKERNHLRDVPEAISESQHVTYSHLNLIESSSNNLQVFSGPDSWTSLSSTPHASILSVPHTNGPINPGPSPYPCLWTISNGAGGPSGPGPEVHASTPGAFLLGNPAVTSPPSVLSTQAPTSAGVEVLGEPSLTSIAVSTWTAVASHPFAGWGGPGAGGHHSPSSLDG

SEQ ID NO: 10866 - protein, 63 aa, Artificial Sequence
  Synthetic polypeptide
GRARWLTPVIPALWEVEAGGSRGQEMRPSWPTRERSCCSPESAEGQGGEGAPGEEDGRAQWAG

SEQ ID NO: 10867 - protein, 223 aa, Artificial Sequence
  Synthetic polypeptide
DHPGQHGNAAVVLRSRLKVRVVKELRGKKTAVHNGLGENGSQAAGLDMDVGKQAMQYQVLNEVVIDRGPSSYLSNVDVYLDGHLITTVQGDGVIVSTPTGSTAYAAAAGASMIHPNVPAIMITPICPHSLSFRPIVVPAGVELKIMLSPEARNTAWVSFDGRKRQEIRHGDSISITTSCYPLPSICVRDPVSDWFESLAQCLHWNVRKKQAHFEEEEEEEEEG

SEQ ID NO: 10868 - protein, 42 aa, Artificial Sequence
  Synthetic polypeptide
PGAVAHACHPSTVGGRGGRITRSRDETILANTGTQLLFSGVG

SEQ ID NO: 10869 - protein, 43 aa, Artificial Sequence
  Synthetic polypeptide
GRARWLTPVIPALWEVEAGGSRGQEMRPSWPTRERSCCSPESA

SEQ ID NO: 10870 - protein, 17 aa, Artificial Sequence
  Synthetic polypeptide
DHPGQHGNAAVVLRSRL

SEQ ID NO: 10871 - protein, 41 aa, Artificial Sequence
  Synthetic polypeptide
GRARWLTPVIPALWEVEAGGSRGQEMRPSWPTRERSCCSPE

SEQ ID NO: 10872 - protein, 15 aa, Artificial Sequence
  Synthetic polypeptide
DHPGQHGNAAVVLRS

SEQ ID NO: 10873 - protein, 41 aa, Artificial Sequence
  Synthetic polypeptide
PGAVAHACHPSTVGGRGGRITRSRDETILANTGTQLLFSGV

SEQ ID NO: 10874 - protein, 18 aa, Artificial Sequence
  Synthetic polypeptide
HRRWVISAFPSEDCWERS

SEQ ID NO: 10875 - protein, 21 aa, Artificial Sequence
  Synthetic polypeptide
FLHFHLRTVGKDPDGYPRCRF

SEQ ID NO: 10876 - protein, 30 aa, Artificial Sequence
  Synthetic polypeptide
TSEGTDSGCATLRAVTLTARVHGFILEVES

SEQ ID NO: 10877 - protein, 388 aa, Artificial Sequence
  Synthetic polypeptide
HSLRGSTASFLKSNHSERFVFIAEWYDPNASLLRRYELLFYPGDGSVEMHDVKNHRTFLKRTKYDNLHLEDLFIGNKVNVFSRQLVLIDYGDQYTARQLGSRKEKTLALIKPDAISKAGEIIEIINKAGFTITKLKMMMLSRKEALDFHVDHQSRPFFNELIQFITTGPIIAMEILRDDAICEWKRLLGPANSGVARTDASESIRALFGTDGIRNAAHGPDSFASAAREMELFFPSSGGCGPANTAKFTNCTCCIVKPHAVSEGLLGKILMAIRDAGFEISAMQMFNMDRVNVEEFYEVYKGVVTEYHDMVTEMYSGPCVAMEIQQNNATKTFREFCGPADPEIARHLRPGTLRAIFGKTKIQNAVHCTDLPEDGLLEVQYFFKILDN

SEQ ID NO: 10878 - protein, 40 aa, Artificial Sequence
  Synthetic polypeptide
SRIIVKDSFSLQSGMIQMLHFFDVMSFYFTQGMDLLKCMM

SEQ ID NO: 10879 - protein, 351 aa, Artificial Sequence
  Synthetic polypeptide
HSLRGSTASFLKSNHSERFVFIAEWYDPNASLLRRYELLFYPGDGSVEMHDVKNHRTFLKRTKYDNLHLEDLFIGNKVNVFSRQLVLIDYGDQYTARQLGSRKEKTLALIKPDAISKAGEIIEIINKAGFTITKLKMMMLSRKEALDFHVDHQSRPFFNELIQFITTGPIIAMEILRDDAICEWKRLLGPANSGVARTDASESIRALFGTDGIRNAAHGPDSFASAAREMELFFPSSGGCGPANTAKFTNCTCCIVKPHAVSEGLLGKILMAIRDAGFEISAMQMFNMDRVNVEEFYEVYKGVVTEYHDMVTEMYSGPCVAMEIQQNNATKTFREFCGPADPTPKSPISHK

SEQ ID NO: 10880 - protein, 268 aa, Artificial Sequence
  Synthetic polypeptide
HSLRGSTASFLKSNHSERFVFIAEWYDPNASLLRRYELLFYPGDGSVEMHDVKNHRTFLKRTKYDNLHLEDLFIGNKVNVFSRQLVLIDYGDQYTARQLGSRKEKTLALIKPDAISKAGEIIEIINKAGFTITKLKMMMLSRKEALDFHVDHQSRPFFNELIQFITTGPIIAMEILRDDAICEWKRLLGPANSGVARTDASESIRALFGTDGIRNAAHGPDSFASAAREMELFFPSSGGCGPANTAKFTNCTCCIVKPHAVSEVRRNP

SEQ ID NO: 10881 - protein, 30 aa, Artificial Sequence
  Synthetic polypeptide
SCPLCYNEAQKPSLEARVMPLNFPACGTES

SEQ ID NO: 10882 - protein, 788 aa, Artificial Sequence
  Synthetic polypeptide
TSQPAELKVKGGNIDVHPSEKALIVHYEVEATILGEMGDPMLGERKECQKIIRLKSLNANTDITSLARKVVEECKLIHPSKLNEVEQLLYYLQNRRDSLSGKEKKEKSSKPKDPPPFEGMEIDEVANINDMDEYIELLYEDIPDKVRGSALILQLARNPDNLEELLLNETALGALARVLREDWKQSVELATNIIYIFFCFSSFSQFHGLITHYKIGALCMNIIDHELKRHELWQEELSKKKKAVDEDPENQTLRKDYEKTFKKYQGLVVKQEQLLRVALYLLLNLAEDTRTELKMRNKNIVHMLVKALDRDNFELLILVVSFLKKLSIFMENKNDMVEMDIVEKLVKMIPCEHEDLLNITLRLLLNLSFDTGLRNKMVQVGLLPKLTALLGNDNYKQIAMCVLYHISMDDRFKSMFAYTDCIPQLMKMLFECSDERIDLELISFCINLAANKRNVQLICEGNGLKMLMKRALKFKDPLLMKMIRNISQHDGPTKNLFIDYVGDLAAQISNDEEEEFVIECLGTLANLTIPDLDWELVLKEYKLVPYLKDKLKPGAAEDDLVLEVVIMIGTVSMDDSCAALLAKSGIIPALIELLNAQQEDDEFVCQIIYVFYQMVFHQATRDVIIKETQAPAYLIDLMHDKNNEIRKVCDNTLDIIAEYDEEWAKKIQSEKFRWHNSQWLEMVESRQMDESEQYLYGDDRIEPYIHEGDILERPDLFYNSDGLIASEGAISPDFFNDYHLQNGDVVGQHSFPGSLGMDGFGQPVGILGRPATAYGFRPDEPYYYGYGS

SEQ ID NO: 10883 - protein, 22 aa, Artificial Sequence
  Synthetic polypeptide
AMITPLHSSLGAGDWVWQLRTE

SEQ ID NO: 10884 - protein, 656 aa, Artificial Sequence
  Synthetic polypeptide
SRHCTPAWVLVIGCGNSELSEQLYDVGYRDIVNIDISEVVIKQMKECNATRRPQMSFLKMDMTQMEFPDASFQVVLDKGTLDAVLTDEEEKTLQQVDRMLAEVGRVLQVGGRYLCISLAQAHILKKAVGHFSREGWMVRVHQVANSQDQVLEAEPQFSLPVFAFIMTKFRPVPGSALQIFELCAQEQRKPVRLESAERLAEAVQERQQYAWLCSQLRRKARLGSVSLDLCDGDTGEPRYTLHVVDSPTVKPSRDNHFAIFIIPQGRETEWLFGMDEGRKQLAASAGFRRLITVALHRGQQYESMDHIQAELSARVMELAPAGMPTQQQVPFLSVGGDIGVRTVQHQDCSPLSGDYVIEDVQGDDKRYFRRLIFLSNRNVVQSEARLLKDVSHKAQKKRKKDRKKQRPADAEDLPAAPGQSIDKSYLCCEHHKAMIAGLALLRNPELLLEIPLALLVVGLGGGSLPLFVHDHFPKSCIDAVEIDPSMLEVATQWFGFSQSDRMKVHIADGLDYIASLAGGGEARPCYDVIMFDVDSKDPTLGMSCPPPAFVEQSFLQKVKSILTPEGVFILNLVCRDLGLKDSVLAGLKAVFPLLYVRRIEGEVNEILFCQLHPEQKLATPELLETAQALERTLRKPGRGWDDTYVLSDMLKTVKIV

SEQ ID NO: 10885 - protein, 21 aa, Artificial Sequence
  Synthetic polypeptide
AQEVEAAVSHDHATALQPGCW

SEQ ID NO: 10886 - protein, 500 aa, Artificial Sequence
  Synthetic polypeptide
SRHCTPAWVLVIGCGNSELSEQLYDVGYRDIVNIDISEVVIKQMKECNATRRPQMSFLKMDMTQMEFPDASFQVVLDKGTLDAVLTDEEEKTLQQVDRMLAEVGRVLQGRETEWLFGMDEGRKQLAASAGFRRLITVALHRGQQYESMDHIQAELSARVMELAPAGMPTQQQVPFLSVGGDIGVRTVQHQDCSPLSGDYVIEDVQGDDKRYFRRLIFLSNRNVVQSEARLLKDVSHKAQKKRKKDRKKQRPADAEDLPAAPGQSIDKSYLCCEHHKAMIAGLALLRNPELLLEIPLALLVVGLGGGSLPLFVHDHFPKSCIDAVEIDPSMLEVATQWFGFSQSDRMKVHIADGLDYIASLAGGGEARPCYDVIMFDVDSKDPTLGMSCPPPAFVEQSFLQKVKSILTPEGVFILNLVCRDLGLKDSVLAGLKAVFPLLYVRRIEGEVNEILFCQLHPEQKLATPELLETAQALERTLRKPGRGWDDTYVLSDMLKTVKIV

SEQ ID NO: 10887 - protein, 450 aa, Artificial Sequence
  Synthetic polypeptide
GRSQDGQIGTASVYSSQHERRRRLVISAFPSELANFPRLCEETERIVANHIREREGKTKDQVLLLIDIQVSYINTNHEDFIGFANAQQRSSQVHKKTTVGNQVIRKGWLTISNIGIMKGGSKGYWFVLTAESLSWYKDDEEKEKKYMLPLDNLKVRDVEKSFMSSKHIFALFNTEQRNVYKDYRFLELACDSQEDVDSWKASLLRAGVYPDKSVGNNKAENDENGQAENFSMDPQLERQVETIRNLVDSYMSIINKCIRDLIPKTIMHLMINNVKDFINSELLAQLYSSEDQNTLMEESAEQAQRRDEMLRMYQALKEALGIIGDISTATVSTPAPPPVDDSWIQHSRRSPPPSPTTQRRPTLSAPLARPTSGRGPAPAIPSPGPHSGAPPVPFRPGPLPPFPSSSDSFGAPPQVPSRPTRAPPSVPSRRPPPSPTRPTIIRPLESSLLD

SEQ ID NO: 10888 - protein, 39 aa, Artificial Sequence
  Synthetic polypeptide
FLHFHLSWQTSPDSARKRKGLLLTTFVSEKGRQRTRYCY

SEQ ID NO: 10889 - protein, 142 aa, Artificial Sequence
  Synthetic polypeptide
GRSQDGQIGTASVYSSQHERRRRLVISAFPSELANFPRLCEETERIVANHIREREGKTKDQVLLLIDIQVSYINTNHEDFIGFANAQQRSSQVHKKTTVGNQVIRKGWLTISNIGIMKGGSKGYWFVLTAESLSWYKDDENI

SEQ ID NO: 10890 - protein, 456 aa, Artificial Sequence
  Synthetic polypeptide
GRSQDGQIGTASVYSSQHERRRRLVISAFPSELANFPRLCEETERIVANHIREREGKTKDQVLLLIDIQVSYINTNHEDFIGFANAQQRSSQVHKKTTVGNQGTNLPPSRQIVIRKGWLTISNIGIMKGGSKGYWFVLTAESLSWYKDDEEKEKKYMLPLDNLKVRDVEKSFMSSKHIFALFNTEQRNVYKDYRFLELACDSQEDVDSWKASLLRAGVYPDKSVAENDENGQAENFSMDPQLERQVETIRNLVDSYMSIINKCIRDLIPKTIMHLMINNVKDFINSELLAQLYSSEDQNTLMEESAEQAQRRDEMLRMYQALKEALGIIGDISTATVSTPAPPPVDDSWIQHSRRSPPPSPTTQRRPTLSAPLARPTSGRGPAPAIPSPGPHSGAPPVPFRPGPLPPFPSSSDSFGAPPQVPSRPTRAPPSVPSRRPPPSPTRPTIIRPLESSLLD

SEQ ID NO: 10891 - protein, 446 aa, Artificial Sequence
  Synthetic polypeptide
GRSQDGQIGTASVYSSQHERRRRLVISAFPSELANFPRLCEETERIVANHIREREGKTKDQVLLLIDIQVSYINTNHEDFIGFANAQQRSSQVHKKTTVGNQVIRKGWLTISNIGIMKGGSKGYWFVLTAESLSWYKDDEEKEKKYMLPLDNLKVRDVEKSFMSSKHIFALFNTEQRNVYKDYRFLELACDSQEDVDSWKASLLRAGVYPDKSVAENDENGQAENFSMDPQLERQVETIRNLVDSYMSIINKCIRDLIPKTIMHLMINNVKDFINSELLAQLYSSEDQNTLMEESAEQAQRRDEMLRMYQALKEALGIIGDISTATVSTPAPPPVDDSWIQHSRRSPPPSPTTQRRPTLSAPLARPTSGRGPAPAIPSPGPHSGAPPVPFRPGPLPPFPSSSDSFGAPPQVPSRPTRAPPSVPSRRPPPSPTRPTIIRPLESSLLD

SEQ ID NO: 10892 - protein, 226 aa, Artificial Sequence
  Synthetic polypeptide
GRSQDGQIGTASVYSSQHERRRRLVISAFPSELANFPRLCEETERIVANHIREREGKTKDQVLLLIDIQVSYINTNHEDFIGFANAQQRSSQVHKKTTVGNQVIRKGWLTISNIGIMKGGSKGYWFVLTAESLSWYKDDEEKEKKYMLPLDNLKVRDVEKSFMSSKHIFALFNTEQRNVYKDYRFLELACDSQEDVDSWKASLLRAGVYPDKSVVSWIYLLCKNYY

SEQ ID NO: 10893 - protein, 142 aa, Artificial Sequence
  Synthetic polypeptide
GRSQDGQIGTASVYSSQHERRRRLVISAFPSELANFPRLCEETERIVANHIREREGKTKDQVLLLIDIQVSYINTNHEDFIGFANAQQRSSQVHKKTTVGNQVIRKGWLTISNIGIMKGGSKGYWFVLTAESLSWYKDDEEK

SEQ ID NO: 10894 - protein, 8 aa, Artificial Sequence
  Synthetic polypeptide
GLPSHVEL

SEQ ID NO: 10895 - protein, 394 aa, Artificial Sequence
  Synthetic polypeptide
VSLSKSDGFIRGFCFCFFLIFFSQPPCKKCLSSPTMILRPSQPCGTVIRKGWLTISNIGIMKGGSKGYWFVLTAESLSWYKDDEEKEKKYMLPLDNLKVRDVEKSFMSSKHIFALFNTEQRNVYKDYRFLELACDSQEDVDSWKASLLRAGVYPDKSVGNNKAENDENGQAENFSMDPQLERQVETIRNLVDSYMSIINKCIRDLIPKTIMHLMINNVKDFINSELLAQLYSSEDQNTLMEESAEQAQRRDEMLRMYQALKEALGIIGDISTATVSTPAPPPVDDSWIQHSRRSPPPSPTTQRRPTLSAPLARPTSGRGPAPAIPSPGPHSGAPPVPFRPGPLPPFPSSSDSFGAPPQVPSRPTRAPPSVPSRRPPPSPTRPTIIRPLESSLLD

SEQ ID NO: 10896 - protein, 52 aa, Artificial Sequence
  Synthetic polypeptide
EVPFISHHDSEAFPAMWNCDSQGVAHHQQHWHHERRLEGILVRPYCGKLVLV

SEQ ID NO: 10897 - protein, 86 aa, Artificial Sequence
  Synthetic polypeptide
VSLSKSDGFIRGFCFCFFLIFFSQPPCKKCLSSPTMILRPSQPCGTVIRKGWLTISNIGIMKGGSKGYWFVLTAESLSWYKDDENI

SEQ ID NO: 10898 - protein, 390 aa, Artificial Sequence
  Synthetic polypeptide
VSLSKSDGFIRGFCFCFFLIFFSQPPCKKCLSSPTMILRPSQPCGTVIRKGWLTISNIGIMKGGSKGYWFVLTAESLSWYKDDEEKEKKYMLPLDNLKVRDVEKSFMSSKHIFALFNTEQRNVYKDYRFLELACDSQEDVDSWKASLLRAGVYPDKSVAENDENGQAENFSMDPQLERQVETIRNLVDSYMSIINKCIRDLIPKTIMHLMINNVKDFINSELLAQLYSSEDQNTLMEESAEQAQRRDEMLRMYQALKEALGIIGDISTATVSTPAPPPVDDSWIQHSRRSPPPSPTTQRRPTLSAPLARPTSGRGPAPAIPSPGPHSGAPPVPFRPGPLPPFPSSSDSFGAPPQVPSRPTRAPPSVPSRRPPPSPTRPTIIRPLESSLLD

SEQ ID NO: 10899 - protein, 170 aa, Artificial Sequence
  Synthetic polypeptide
VSLSKSDGFIRGFCFCFFLIFFSQPPCKKCLSSPTMILRPSQPCGTVIRKGWLTISNIGIMKGGSKGYWFVLTAESLSWYKDDEEKEKKYMLPLDNLKVRDVEKSFMSSKHIFALFNTEQRNVYKDYRFLELACDSQEDVDSWKASLLRAGVYPDKSVVSWIYLLCKNYY

SEQ ID NO: 10900 - protein, 86 aa, Artificial Sequence
  Synthetic polypeptide
VSLSKSDGFIRGFCFCFFLIFFSQPPCKKCLSSPTMILRPSQPCGTVIRKGWLTISNIGIMKGGSKGYWFVLTAESLSWYKDDEEK

SEQ ID NO: 10901 - protein, 1029 aa, Artificial Sequence
  Synthetic polypeptide
PQPPGHRPAPVHGLLGTRRTTGGEQQSSDYTKPGDIDPTSVASPKDPEDIPTFDEWKKKVMEVEKEKSQSMHASSNGGSHATKKVQKNRNNYASVECGAKILAANPEAKSTSAILIENMDLYMLNPCSTKIWFVIELCEPIQVKQLDIANYELFSSTPKDFLVSISDRYPTNKWIKLGTFHGRDERNVQSFPLDEQMYAKYVKVELLSHFGSEHFCPLSLIRVFGTSMVEEYEEIADSQYHSERQELFDEDYDYPLDYNTGEDKSSKNLLGSATNAILNMVNIAANILGAKTEDLTEGNKSISENATATAAPKMPESTPVSTPVPSPEYVTTEVHTHDMEPSTPDTPKESPIVQLVQEEEEEASPSTVTLLGSGEQEDESSPWFESETQIFCSELTTICCISSFSEYIYKWCSVRVALYRQRSRTALSKGKDYLVLAQPPLLLPAESVDVSVLQPLSGELENTNIEREAETVVLGDLSSSMHQDDLVNHTVDAVELEPSHSQTLSQSLLLDITPEINPLPKIEVSESVEYEAGHIPSPVIPQESSVEIDNETEQKSESFSSIEKPSITYETNKVNELMDNIIKEDVNSMQIFTKLSETIVPPINTATVPDNEDGEAKMNIADTAKQTLISVVDSSSLPEVKEEEQSPEDALLRGLQRTATDFYAELQNSTDLGYANGNLVHGSNQKESVFMRLNNRIKALEVNMSLSGRYLEELSQRYRKQMEEMQKAFNKTIVKLQNTSRIAEEQDQRQTEAIQLLQAQLTNMTQLVSNLSATVAELKREVSDRQSYLVISLVLCVVLGLMLCMQRCRNTSQFDGDYISKLPKSNQYPSPKRCFSSYDDMNLKRRTSFPLMRSKSLQLTGKEVDPNDLYIVEPLKFSPEKKKKRCKYKIEKIETIKPEEPLHPIANGDIKGRKPFTNQRDFSNMGEVYHSSYKGPPSEGSSETSSQSEESYFCGISACTSLCNGQSQKTKTEKRALKRRRSKVQDQGKLIKTLIQTKSGSLPSLHDIIKGNKEITVGTFGVTAVSGHI

SEQ ID NO: 10902 - protein, 25 aa, Artificial Sequence
  Synthetic polypeptide
EPGARQVVSSRALIIQNQETLTLHQ

SEQ ID NO: 10903 - protein, 4 aa, Artificial Sequence
  Synthetic polypeptide
AAEL

SEQ ID NO: 10904 - protein, 702 aa, Artificial Sequence
  Synthetic polypeptide
PQPPGHRPAPVHGLLGTRRTTGGEQQSSDYTKPGDIDPTSVASPKDPEDIPTFDEWKKKVMEVEKEKSQSMHASSNGGSHATKKVQKNRNNYASVECGAKILAANPEAKSTSAILIENMDLYMLNPCSTKIWFVIELCEPIQVKQLDIANYELFSSTPKDFLVSISDRYPTNKWIKLGTFHGRDERNVQSFPLDEQMYAKYVKMFIKYIKVELLSHFGSEHFCPLSLIRVFGTSMVEEYEEIADSQYHSERQELFDEDYDYPLDYNTGEDKSSKNLLGSATNAILNMVNIAANILGAKTEDLTEGNKSISENATATAAPKMPESTPVSTPVPSPEYVTTEVHTHDMEPSTPDTPKESPIVQLVQEEEEEASPSTVTLLGSGEQEDESSPWYRKQMEEMQKAFNKTIVKLQNTSRIAEEQDQRQTEAIQLLQAQLTNMTQLVSNLSATVAELKREVSDRQSYLVISLVLCVVLGLMLCMQRCRNTSQFDGDYISKLPKSNQYPSPKRCFSSYDDMNLKRRTSFPLMRSKSLQLTGKEVDPNDLYIVEPLKFSPEKKKKRCKYKIEKIETIKPEEPLHPIANGDIKGRKPFTNQRDFSNMGEVYHSSYKGPPSEGSSETSSQSEESYFCGISACTSLCNGQSQKTKTEKRALKRRRSKVQDQGKLIKTLIQTKSGSLPSLHDIIKGNKEITVGTFGVTAVSGHI

SEQ ID NO: 10905 - protein, 1036 aa, Artificial Sequence
  Synthetic polypeptide
PQPPGHRPAPVHGLLGTRRTTGGEQQSSDYTKPGDIDPTSVASPKDPEDIPTFDEWKKKVMEVEKEKSQSMHASSNGGSHATKKVQKNRNNYASVECGAKILAANPEAKSTSAILIENMDLYMLNPCSTKIWFVIELCEPIQVKQLDIANYELFSSTPKDFLVSISDRYPTNKWIKLGTFHGRDERNVQSFPLDEQMYAKYVKMFIKYIKVELLSHFGSEHFCPLSLIRVFGTSMVEEYEEIADSQYHSERQELFDEDYDYPLDYNTGEDKSSKNLLGSATNAILNMVNIAANILGAKTEDLTEGNKSISENATATAAPKMPESTPVSTPVPSPEYVTTEVHTHDMEPSTPDTPKESPIVQLVQEEEEEASPSTVTLLGSGEQEDESSPWFESETQIFCSELTTICCISSFSEYIYKWCSVRVALYRQRSRTALSKGKDYLVLAQPPLLLPAESVDVSVLQPLSGELENTNIEREAETVVLGDLSSSMHQDDLVNHTVDAVELEPSHSQTLSQSLLLDITPEINPLPKIEVSESVEYEAGHIPSPVIPQESSVEIDNETEQKSESFSSIEKPSITYETNKVNELMDNIIKEDVNSMQIFTKLSETIVPPINTATVPDNEDGEAKMNIADTAKQTLISVVDSSSLPEVKEEEQSPEDALLRGLQRTATDFYAELQNSTDLGYANGNLVHGSNQKESVFMRLNNRIKALEVNMSLSGRYLEELSQRYRKQMEEMQKAFNKTIVKLQNTSRIAEEQDQRQTEAIQLLQAQLTNMTQLVSNLSATVAELKREVSDRQSYLVISLVLCVVLGLMLCMQRCRNTSQFDGDYISKLPKSNQYPSPKRCFSSYDDMNLKRRTSFPLMRSKSLQLTGKEVDPNDLYIVEPLKFSPEKKKKRCKYKIEKIETIKPEEPLHPIANGDIKGRKPFTNQRDFSNMGEVYHSSYKGPPSEGSSETSSQSEESYFCGISACTSLCNGQSQKTKTEKRALKRRRSKVQDQGKLIKTLIQTKSGSLPSLHDIIKGNKEITVGTFGVTAVSGHI

SEQ ID NO: 10906 - protein, 1732 aa, Artificial Sequence
  Synthetic polypeptide
DQVQWLTPIIPVLQEAEAGGPPEVRSSRPAWPTWDLLQLGGELARTSRAVQEAGLGLSTGLRLAESRAEAALEKQALLQAQLEEQLRDKVLREKDLAQQQMQSDLDKADLSARVTELGLAVKRLEKQNLEKDQVNKDLTEKLEALESLRLQEQAALETEDGEGLQQTLRDLAQAVLSDSESGVQLSGSERTADASNGSLRGLSGQRTPSPPRRSSPGRGRSPRRGPSPACSDSSTLALIHSALHKRQLQVQDMRGRYEASQDLLGTLRKQLSDSESERRALEEQLQRLRDKTDGAMQAHEDAQREVQRLRSANELLSREKSNLAHSLQVAQQQAEELRQEREKLQAAQEELRRQRDRLEEEQEDAVQDGARVRRELERSHRQLEQLEGKRSVLAKELVEVREALSRATLQRDMLQAEKAEVAEALTKAEAGRVELELSMTKLRAEEASLQDSLSKLSALNESLAQDKLDLNRLVAQLEEEKSALQGRQRQAEQEATVAREEQERLEELRLEQEVARQGLEGSLRVAEQAQEALEQQLPTLRHERSQLQEQLAQLSRQLSGREQELEQARREAQRQVEALERAAREKEALAKEHAGLAVQLVAAEREGRTLSEEATRLRLEKEALEGSLFEVQRQLAQLEARREQLEAEGQALLLAKETLTGELAGLRQQIIATQEKASLDKELMAQKLVQAEREAQASLREQRAAHEEDLQRLQREKEAAWRELEAERAQLQSQLQREQEELLARLEAEKEELSEEIAALQQERDEGLLLAESEKQQALSLKESEKTALSEKLMGTRHSLATISLEMERQKRDAQSRQEQDRSTVNALTSELRDLRAQREEAAAAHAQEVRRLQEQARDLGKQRDSCLREAEELRTQLRLLEDARDGLRRELLEAQRKLRESQEGREVQRQEAGELRRSLGEGAKEREALRRSNEELRSAVKKAESERISLKLANEDKEQKLALLEEARTAVGKEAGELRTGLQEVERSRLEARRELQELRRQMKMLDSENTRLGRELAELQGRLALGERAEKESRRETLGLRQRLLKGEASLEVMRQELQVAQRKLQEQEGEFRTRERRLLGSLEEARGTEKQQLDHARGLELKLEAARAEAAELGLRLSAAEGRAQGLEAELARVEVQRRAAEAQLGGLRSALRRGLGLGRAPSPAPRPVPGSPARDAPAEGSGEGLNSPSTLECSPGSQPPSPGPATSPASPDLDPEAVRGALREFLQELRSAQRERDELRTQTSALNRQLAEMEAERDSATSRARQLQKAVAESEEARRSVDGRLSGVQAELALQEESVRRSERERRATLDQVATLERSLQATESELRASQEKISKMKANETKLEGDKRRLKEVLDASESRTVKLELQRRSLEGELQRSRLGLSDREAQAQALQDRVDSLQRQVADSEVKAGTLQLTVERLNGALAKVEESEGALRDKVRGLTEALAQSSASLNSTRDKNLHLQKALTACEHDRQVLQERLDAARQALSEARKQSSSLGEQVQTLRGEVADLELQRVEAEGQLQQLREVLRQRQEGEAAALNTVQKLQDERRLLQERLGSLQRALAQLEAEKREVERSALRLEKDRVALRRTLDKVEREKLRSHEDTVRLSAEKGRLDRTLTGAELELAEAQRQIQQLEAQVVVLEQSHSPAQLEVDAQQQQLELQQEVERLRSAQAQTERTLEARERAHRQRVRGLEEQVSTLKGQLQQELRRSSAPFSPPSGPPEK

SEQ ID NO: 10907 - protein, 47 aa, Artificial Sequence
  Synthetic polypeptide
SQYFRRPRRADHLRSGVRDQPGQHGTCCSWEGSWPGHHELSRRRAWD

SEQ ID NO: 10908 - protein, 85 aa, Artificial Sequence
  Synthetic polypeptide
GQEFETSLANMGPAAAGRGAGPDITSCPGGGPGTEHGPTAGREPGRGSPGETGPAAGPAGGAAAGQGAPREGPGAAADAKRPGQG

SEQ ID NO: 10909 - protein, 1166 aa, Artificial Sequence
  Synthetic polypeptide
DQVQWLTPIIPVLQEAEAGGPPEVRSSRPAWPTWDLLQLGGELARTSRAVQEAGLGLSTGLRLAESRAEAALEKQALLQAQLEEQLRDKVLREKDLAQQQMQSDLDKADLSARVTELGLAVKRLEKQNLEKDQVNKDLTEKLEALESLRLQEQAALETEDGEGLQQTLRDLAQAVLSDSESGVQLSGSERTADASNGSLRGLSGQRTPSPPRRSSPGRGRSPRRGPSPACSDSSTLALIHSALHKRQLQVQDMRGRYEASQDLLGTLRKQLSDSESERRALEEQLQRLRDKTDGAMQAHEDAQREVQRLRSANELLSREKSNLAHSLQVAQQQAEELRQEREKLQAAQEELRRQRDRLEEEQEDAVQDGARVRRELERSHRQLEQLEGKRSVLAKELVEVREALSRATLQRDMLQAEKAEVAEALTKAEAGRVELELSMTKLRAEEASLQDSLSKLSALNESLAQDKLDLNRLVAQLEEEKSALQGRQRQAEQEATVAREEQERLEELRLEQEVARQGLEGSLRVAEQAQEALEQQLPTLRHERSQLQEQLAQLSRQLSGREQELEQARREAQRQVEALERAAREKEALAKEHAGLAVQLVAAEREGRTLSEEATRLRLEKEALEGSLFEVQRQLAQLEARREQLEAEGQALLLAKETLTGELAGLRQQIIATQEKASLDKELMAQKLVQAEREAQASLREQRAAHEEDLQRLQREKEAAWRELEAERAQLQSQLQREQEELLARLEAEKEELSEEIAALQQERDEGLLLAESEKQQALSLKESEKTALSEKLMGTRHSLATISLEMERQKRDAQSRQEQDRSTVNALTSELRDLRAQREEAAAAHAQEVRRLQEQARDLGKQRDSCLREAEELRTQLRLLEDARDGLRRELLEAQRKLRESQEGREVQRQEAGELRRSLGEGAKEREALRRSNEELRSAVKKAESERISLKLANEDKEQKLALLEEARTAVGKEAGELRTGLQEVERSRLEARRELQELRRQMKMLDSENTRLGRELAELQGRLALGERAEKESRRETLGLRQRLLKGEASLEVMRQELQVAQRKLQEQEGEFRTRERRLLGSLEEARGTEKQQLDHARGLELKLEAARAEAAELGLRLSAAEGRAQGLEAELARVEVQRRAAEAQLGGLRSALRRGLGLGRAPS

SEQ ID NO: 10910 - protein, 40 aa, Artificial Sequence
  Synthetic polypeptide
IPETVQKSACICVHTQAHISARRGAGVLVQFSKESANNKR

SEQ ID NO: 10911 - protein, 49 aa, Artificial Sequence
  Synthetic polypeptide
GVLESLKLCKSLRAFVCTLRLTFLQGEELVSLSSSQRNLQTTKDEDAGQ

SEQ ID NO: 10912 - protein, 766 aa, Artificial Sequence
  Synthetic polypeptide
NCAKVCVHLCAHSGSHFCKERSWCPCPVLKGICKQQKMKMLDSENTRLGRELAELQGRLALGERAEKESRRETLGLRQRLLKGEASLEVMRQELQVAQRKLQEQEGEFRTRERRLLGSLEEARGTEKQQLDHARGLELKLEAARAEAAELGLRLSAAEGRAQGLEAELARVEVQRRAAEAQLGGLRSALRRGLGLGRAPSPAPRPVPGSPARDAPAEGSGEGLNSPSTLECSPGSQPPSPGPATSPASPDLDPEAVRGALREFLQELRSAQRERDELRTQTSALNRQLAEMEAERDSATSRARQLQKAVAESEEARRSVDGRLSGVQAELALQEESVRRSERERRATLDQVATLERSLQATESELRASQEKISKMKANETKLEGDKRRLKEVLDASESRTVKLELQRRSLEGELQRSRLGLSDREAQAQALQDRVDSLQRQVADSEVKAGTLQLTVERLNGALAKVEESEGALRDKVRGLTEALAQSSASLNSTRDKNLHLQKALTACEHDRQVLQERLDAARQALSEARKQSSSLGEQVQTLRGEVADLELQRVEAEGQLQQLREVLRQRQEGEAAALNTVQKLQDERRLLQERLGSLQRALAQLEAEKREVERSALRLEKDRVALRRTLDKVEREKLRSHEDTVRLSAEKGRLDRTLTGAELELAEAQRQIQQLEAQVVVLEQSHSPAQLEVDAQQQQLELQQEVERLRSAQAQTERTLEARERAHRQRVRGLEEQVSTLKGQLQQELRRSSAPFSPPSGPPEK

SEQ ID NO: 10913 - protein, 200 aa, Artificial Sequence
  Synthetic polypeptide
NCAKVCVHLCAHSGSHFCKERSWCPCPVLKGICKQQKMKMLDSENTRLGRELAELQGRLALGERAEKESRRETLGLRQRLLKGEASLEVMRQELQVAQRKLQEQEGEFRTRERRLLGSLEEARGTEKQQLDHARGLELKLEAARAEAAELGLRLSAAEGRAQGLEAELARVEVQRRAAEAQLGGLRSALRRGLGLGRAPS

SEQ ID NO: 10914 - protein, 760 aa, Artificial Sequence
  Synthetic polypeptide
GQAQWLTPIISALWEAEASGLLEPRSSRPAWMKMLDSENTRLGRELAELQGRLALGERAEKESRRETLGLRQRLLKGEASLEVMRQELQVAQRKLQEQEGEFRTRERRLLGSLEEARGTEKQQLDHARGLELKLEAARAEAAELGLRLSAAEGRAQGLEAELARVEVQRRAAEAQLGGLRSALRRGLGLGRAPSPAPRPVPGSPARDAPAEGSGEGLNSPSTLECSPGSQPPSPGPATSPASPDLDPEAVRGALREFLQELRSAQRERDELRTQTSALNRQLAEMEAERDSATSRARQLQKAVAESEEARRSVDGRLSGVQAELALQEESVRRSERERRATLDQVATLERSLQATESELRASQEKISKMKANETKLEGDKRRLKEVLDASESRTVKLELQRRSLEGELQRSRLGLSDREAQAQALQDRVDSLQRQVADSEVKAGTLQLTVERLNGALAKVEESEGALRDKVRGLTEALAQSSASLNSTRDKNLHLQKALTACEHDRQVLQERLDAARQALSEARKQSSSLGEQVQTLRGEVADLELQRVEAEGQLQQLREVLRQRQEGEAAALNTVQKLQDERRLLQERLGSLQRALAQLEAEKREVERSALRLEKDRVALRRTLDKVEREKLRSHEDTVRLSAEKGRLDRTLTGAELELAEAQRQIQQLEAQVVVLEQSHSPAQLEVDAQQQQLELQQEVERLRSAQAQTERTLEARERAHRQRVRGLEEQVSTLKGQLQQELRRSSAPFSPPSGPPEK

SEQ ID NO: 10915 - protein, 22 aa, Artificial Sequence
  Synthetic polypeptide
SQHFGRRRPVDCLSPGVRDQPG

SEQ ID NO: 10916 - protein, 14 aa, Artificial Sequence
  Synthetic polypeptide
AQEFETSLDEDAGQ

SEQ ID NO: 10917 - protein, 194 aa, Artificial Sequence
  Synthetic polypeptide
GQAQWLTPIISALWEAEASGLLEPRSSRPAWMKMLDSENTRLGRELAELQGRLALGERAEKESRRETLGLRQRLLKGEASLEVMRQELQVAQRKLQEQEGEFRTRERRLLGSLEEARGTEKQQLDHARGLELKLEAARAEAAELGLRLSAAEGRAQGLEAELARVEVQRRAAEAQLGGLRSALRRGLGLGRAPS

SEQ ID NO: 10918 - protein, 7 aa, Artificial Sequence
  Synthetic polypeptide
HDEDAGQ

SEQ ID NO: 10919 - protein, 740 aa, Artificial Sequence
  Synthetic polypeptide
AQEFETSLGNMMKMLDSENTRLGRELAELQGRLALGERAEKESRRETLGLRQRLLKGEASLEVMRQELQVAQRKLQEQEGEFRTRERRLLGSLEEARGTEKQQLDHARGLELKLEAARAEAAELGLRLSAAEGRAQGLEAELARVEVQRRAAEAQLGGLRSALRRGLGLGRAPSPAPRPVPGSPARDAPAEGSGEGLNSPSTLECSPGSQPPSPGPATSPASPDLDPEAVRGALREFLQELRSAQRERDELRTQTSALNRQLAEMEAERDSATSRARQLQKAVAESEEARRSVDGRLSGVQAELALQEESVRRSERERRATLDQVATLERSLQATESELRASQEKISKMKANETKLEGDKRRLKEVLDASESRTVKLELQRRSLEGELQRSRLGLSDREAQAQALQDRVDSLQRQVADSEVKAGTLQLTVERLNGALAKVEESEGALRDKVRGLTEALAQSSASLNSTRDKNLHLQKALTACEHDRQVLQERLDAARQALSEARKQSSSLGEQVQTLRGEVADLELQRVEAEGQLQQLREVLRQRQEGEAAALNTVQKLQDERRLLQERLGSLQRALAQLEAEKREVERSALRLEKDRVALRRTLDKVEREKLRSHEDTVRLSAEKGRLDRTLTGAELELAEAQRQIQQLEAQVVVLEQSHSPAQLEVDAQQQQLELQQEVERLRSAQAQTERTLEARERAHRQRVRGLEEQVSTLKGQLQQELRRSSAPFSPPSGPPEK

SEQ ID NO: 10920 - protein, 174 aa, Artificial Sequence
  Synthetic polypeptide
AQEFETSLGNMMKMLDSENTRLGRELAELQGRLALGERAEKESRRETLGLRQRLLKGEASLEVMRQELQVAQRKLQEQEGEFRTRERRLLGSLEEARGTEKQQLDHARGLELKLEAARAEAAELGLRLSAAEGRAQGLEAELARVEVQRRAAEAQLGGLRSALRRGLGLGRAPS

SEQ ID NO: 10921 - protein, 18 aa, Artificial Sequence
  Synthetic polypeptide
WLHNSVNEAGKGSTAPAP

SEQ ID NO: 10922 - protein, 90 aa, Artificial Sequence
  Synthetic polypeptide
ANHLTALCQPCLGRGKRGRAQQPQHLRMQPWVPATISRTCHLPSLSRPGPGGSARGPPGIPARAAECPERTGRTSDPDQCPESPAGRDGG

SEQ ID NO: 10923 - protein, 559 aa, Artificial Sequence
  Synthetic polypeptide
LLCASLAWEEGSGEGLNSPSTLECSPGSQPPSPGPATSPASPDLDPEAVRGALREFLQELRSAQRERDELRTQTSALNRQLAEMEAERDSATSRARQLQKAVAESEEARRSVDGRLSGVQAELALQEESVRRSERERRATLDQVATLERSLQATESELRASQEKISKMKANETKLEGDKRRLKEVLDASESRTVKLELQRRSLEGELQRSRLGLSDREAQAQALQDRVDSLQRQVADSEVKAGTLQLTVERLNGALAKVEESEGALRDKVRGLTEALAQSSASLNSTRDKNLHLQKALTACEHDRQVLQERLDAARQALSEARKQSSSLGEQVQTLRGEVADLELQRVEAEGQLQQLREVLRQRQEGEAAALNTVQKLQDERRLLQERLGSLQRALAQLEAEKREVERSALRLEKDRVALRRTLDKVEREKLRSHEDTVRLSAEKGRLDRTLTGAELELAEAQRQIQQLEAQVVVLEQSHSPAQLEVDAQQQQLELQQEVERLRSAQAQTERTLEARERAHRQRVRGLEEQVSTLKGQLQQELRRSSAPFSPPSGPPEK

SEQ ID NO: 10924 - protein, 25 aa, Artificial Sequence
  Synthetic polypeptide
KSLNCFVPALPGKREAGKGSTAPAP

SEQ ID NO: 10925 - protein, 17 aa, Artificial Sequence
  Synthetic polypeptide
LQHSGRPRLPVLLPIPG

SEQ ID NO: 10926 - protein, 213 aa, Artificial Sequence
  Synthetic polypeptide
MDMVAHACNCNTLGGQGYLSCCRFLDDNQIVTSSGDTTCALWDIETGQQTTTFTGHTGDVMSLSLAPDTRLFVSGACDASAKLWDVREGMCRQTFTGHESDINAICFFPNGNAFATGSDDATCRLFDLRADQELMTYSHDNIICGITSVSFSKSGRLLLAGYDDFNCNVWDALKADRAGVLAGHDNRVSCLGVTDDGMAVATGSWDSFLKIWN

SEQ ID NO: 10927 - protein, 60 aa, Artificial Sequence
  Synthetic polypeptide
WTWWLMPVTATLWEAKVTCPAADSWMTIRSSPALETPRVPCGTSRPASRRPRLPDTLEMS

SEQ ID NO: 10928 - protein, 49 aa, Artificial Sequence
  Synthetic polypeptide
MDMVAHACNCNTLGGQGYLSCCRFLDDNQIVTSSGDTTCALWDIETGQQ

SEQ ID NO: 10929 - protein, 49 aa, Artificial Sequence
  Synthetic polypeptide
WTWWLMPVTATLWEAKVTCPAADSWMTIRSSPALETPRVPCGTSRPASR

SEQ ID NO: 10930 - protein, 38 aa, Artificial Sequence
  Synthetic polypeptide
MDMVAHACNCNTLGGQGYLSCCRFLDDNQIVTSSGDTT

SEQ ID NO: 10931 - protein, 38 aa, Artificial Sequence
  Synthetic polypeptide
WTWWLMPVTATLWEAKVTCPAADSWMTIRSSPALETPR

SEQ ID NO: 10932 - protein, 143 aa, Artificial Sequence
  Synthetic polypeptide
SVAGVKVQEARASCRGHILVLLPIVARPWAHGLTHSPRLGSLPDGLYECILCACCSTSCPSYWWNGDKYLGPAVLMQAYRWMIDSRDDFTEERLAKLQDPFSLYRCHTIMNCTRTCPKGLNPGKAIAEIKKMMATYKEKKASV

SEQ ID NO: 10933 - protein, 48 aa, Artificial Sequence
  Synthetic polypeptide
LTLLALVPYLTGSTSAFSVPAVAPAAPATGGTETNIWGLQFLCRPIAG

SEQ ID NO: 10934 - protein, 607 aa, Artificial Sequence
  Synthetic polypeptide
KLLDFECTNIRPGETGMDVTSRCTLGDPNKLPEGVPQPARMPYISDKHPRQTLEVINLLRKHRELCDVVLVVGAKKIYAHRVILSACSPYFRAMFTGELAESRQTEVVIRDIDERAMELLIDFAYTSQITVEEGNVQTLLPAACLLQLAEIQEACCEFLKRQLDPSNCLGIRAFADTHSCRELLRIADKFTQHNFQEVMESEEFMLLPANQLIDIISSDELNVRSEEQVFNAVMAWVKYSIQERRPQLPQVLQHVRLPLLSPKFLVGTVGSDPLIKSDEECRDLVDEAKNYLLLPQERPLMQGPRTRPRKPIRCGEVLFAVGGWCSGDAISSVERYDPQTNEWRMVASMSKRRCGVGVSVLDDLLYAVGGHDGSSYLNSVERYDPKTNQWSSDVAPTSTCRTSVGVAVLGGFLYAVGGQDGVSCLNIVERYDPKENKWTRVASMSTRRLGVAVAVLGGFLYAVGGSDGTSPLNTVERYNPQENRWHTIAPMGTRRKHLGCAVYQDMIYAVGGRDDTTELSSAERYNPRTNQWSPVVAMTSRRSGVGLAVVNGQLMAVGGFDGTTYLKTIEVFDPDANTWRLYGGMNYRRLGGGVGVIKMTHCESHIW

SEQ ID NO: 10935 - protein, 23 aa, Artificial Sequence
  Synthetic polypeptide
CSATESFLILSVPTFDQERLEWM

SEQ ID NO: 10936 - protein, 27 aa, Artificial Sequence
  Synthetic polypeptide
KKSLSSSLLLCVVGLKTQSIMRKPRNV

SEQ ID NO: 10937 - protein, 33 aa, Artificial Sequence
  Synthetic polypeptide
YIYTMEFYSVMKMNEVLIQPGRPLNTLLSERSP

SEQ ID NO: 10938 - protein, 1059 aa, Artificial Sequence
  Synthetic polypeptide
VKEVPEQQPITLCSGVEDTKHYEEAKKCVEELALYLKPLSSARGVGLNSTTQSVLSRPMQRKLVTLVHCQLVEEEGRIRAMRAARSLGERTVTELILQHQNPQQLSSNLWAAVRARGCQFLGPAMQEEALKLVLLALEDGSALSRKVLVLFVVQRLEPRFPQASKTSIGHVVQLLYRASCFKVTKRDEDSSLMQLKEEFRTYEALRREHDSQIVQIAMEAGLRIAPDQWSSLLYGDQSHKSHMQSIIDKLQTPASFAQSVQELTIALQRTGDPANLNRLRPHLELLANIDPSPDAPPPTWEQLENGLVAVRTVVHGLVDYIQNHSKKGADQQQPPQHSKYKTYMCRDMKQRGGCPRGASCTFAHSQEELEKFRKMNKRLVPRRPLSASLGQLNEVGLPSAAILPDEGAVDLPSRKPPALPNGIVSTGNTVTQLIPRGTDPSYDSSLKPGKIDHLSSSAPGSPPDLLESVPKSISALPVNPHSIPPRGPADLPPMPVTKPLQMVPRGSQLYPAQQTDVYYQDPRGAAPPFEPAPYQQGMYYTPPPQCVSRFVRPPPSAPEPAPPYLDHYPPYLQERVVNSQYGTQPQQYPPIYPSHYDGRRVYPAPSYTREEIFRESPIPIEIPPAAVPSYVPESRERYQQIESYYPVAPHPTQIRPSYLREPPYSRLPPPPQPHPSLDELHRRRKEIMAQLEERKVISPPPFAPSPTLPPTFHPEEFLDEDLKVAGKYKGNDYSQYSPWSCDTIGSYIGTKDAKPKDVVAAGSVEMMNVESKGMRDQRLDLQRRAAETSDDDLIPFGDRPTVSRFGAISRTSKTIYQGAGPMQAMAPQGAPTKSINISDYSPYGTHGGWGASPYSPHQNIPSQGHFSERERISMSEVASHGKPLPSAEREQLRLELQQLNHQISQQTQLRGLEAVSNRLVLQREANTLAGQSQPPPPPPPKWPGMISSEQLSLELHQVEREIGKRTRELSMENQCSLDMKSKLNTSKQAENGQPEPQNKVPAEDLTLTFSDVPNGSALTQENISLLSNKTSSLNLSEDPEGGGDNNDSQRSGVTPSSAP

SEQ ID NO: 10939 - protein, 1051 aa, Artificial Sequence
  Synthetic polypeptide
VKEVPEQQPITLCSGVEDTKHYEEAKKCVEELALYLKPLSSARGVGLNSTTQSVLSRPMQRKLVTLVHCQLVEEEGRIRAMRAARSLGERTVTELILQHQNPQQLSSNLWAAVRARGCQFLGPAMQEEALKLVLLALEDGSALSRKVLVLFVVQRLEPRFPQASKTSIGHVVQLLYRASCFKVTKRDEDSSLMQLKEEFRTYEALRREHDSQIVQIAMEAGLRIAPDQWSSLLYGDQSHKSHMQSIIDKLQTPASFAQSVQELTIALQRTGDPANLNRLRPHLELLANIDPSPDAPPPTWEQLENGLVAVRTVVHGLVDYIQNHSKKGADQQQPPQHSKYKTYMCRDMKQRGGCPRGASCTFAHSQEELEKFRKMNKRLVPRRPLSASLGQLNEVGLPSAAILPDEGAVDLPSRKPPALPNGIVSTGNTVTQLIPRGTDPSYDSSLKPGKIDHLSSSAPGSPPDLLESVPKSISALPVNPHSIPPRGPADLPPMPVTKPLQMVPRGSQLYPAQQTDVYYQDPRGAAPPFEPAPYQQGMYYTPPPQCVSRFVRPPPSAPEPAPPYLDHYPPYLQERVVNSQYGTQPQQYPPIYPSHYDGRRVYPAPSYTREEIFRESPIPIEIPPAAVPSYVPESRERYQQIESYYPVAPHPTQIRPSYLREPPYSRLPPPPQPHPSLDELHRRRKEIMAQLEERKVISPPPFAPSPTLPPTFHPEEFLDEDLKVAGKYKGNDYSQYSPWSCDTIGSYIGTKDAKPKDVVAAGSVEMMNVESKGMRDQRLDLQRRAAETSDDDLIPFGDRPTVSRFGAISRTSKTIYQGAGPMQAMAPQGAPTKSINISDYSPYGTHGGWGASPYSPHQNIPSQGHFSERERISMSEVASHGKPLPSAEREQLRLELQQLNHQISQQTQLRGLEREANTLAGQSQPPPPPPPKWPGMISSEQLSLELHQVEREIGKRTRELSMENQCSLDMKSKLNTSKQAENGQPEPQNKVPAEDLTLTFSSDVPNGSALTQENISLLSNKTSSLNLSEDPEGGGDNNDSQRSGVTPSSAP

SEQ ID NO: 10940 - protein, 612 aa, Artificial Sequence
  Synthetic polypeptide
PVLPALWEAKVGRLLEIVSNGDEQLEKAMEEILRDSEKRPSSLLVDCQSSSEISDHSFGDIPASQTNKPSLQLILDPSNTEISTPRPSSPGGLPEEDSVLFNKLTYLGCMKVSSPRNEVEALRAMATMKSSSQYPFPVTLYVPNVPEGSVRIIDQSSNVEIASFPIYKVLFCARGHDGTTESNCFAFTESSHGSEEFQIHVFSCEIKEAVSRILYSFCTAFKRSSRQVSDVKDSVIPTPDSDVFTFSVSLEVKEDDGKGNFSPVPKDRDKFYFKLKQGIEKKVVITVQQLSNKELAIERCFGMLLSPGRNVKNSDMHLLDMESMGKSYDGRAYVITGMWNPNAPVFLALNEETPKDKQVYMTVAVDMVVTEVVEPVRFLLETVVRVYPANERFWYFSRKTFTETFFMRLKQSEGKGHTNAGDAIYEVVSLQRESDKEEPVTPTSGGGPMSPQDDEAEEESDNELSSGTGDVSKDCPEKILYSWGELLGKWHSNLGARPKGLSTLVKSGVPEALRAEVWQLLAGCHDNQAMLDRYRILITKQQMKFSLTPRQTIHLVKYEGSMKVSMTPCNQLQFDIRLDVLITYTFCFSSFPEPELYKYVLKHQLIKRLNAC

SEQ ID NO: 10941 - protein, 23 aa, Artificial Sequence
  Synthetic polypeptide
PGVVAHSLYSQHFGRPRWADCLR

SEQ ID NO: 10942 - protein, 785 aa, Artificial Sequence
  Synthetic polypeptide
PVLPALWEAKVGRLLEIVSNGDEQLEKAMEEILRDSEKRPSSLLVDCQSSSEISDHSFGDIPASQTNKPSLQLILDPSNTEISTPRPSSPGGLPEEDSVLFNKLTYLGCMKVSSPRNEVEALRAMATMKSSSQYPFPVTLYVPNVPEGSVRIIDQSSNVEIASFPIYKVLFCARGHDGTTESNCFAFTESSHGSEEFQIHVFSCEIKEAVSRILYSFCTAFKRSSRQVSDVKDSVIPTPDSDVFTFSVSLEVKEDDGKGNFSPVPKDRDKFYFKLKQGIEKKVVITVQQLSNKELAIERCFGMLLSPGRNVKNSDMHLLDMESMGKSYDGRAYVITGMWNPNAPVFLALNEETPKDKQVYMTVAVDMVVTEVVEPVRFLLETVVRVYPANERFWYFSRKTFTETFFMRLKQSEGKGHTNAGDAIYEVVSLQRESDKEEPVTPTSGGGPMSPQDDEAEEESDNELSSGTGDVSKDCPEKILYSWGELLGKWHSNLGARPKGLSTLVKSGVPEALRAEVWQLLAGCHDNQAMLDRYRILITKDSAQESVITRDIHRTFPAHDYFKDTGGDGQESLYKICKAYSVYDEDIGYCQGQSFLAAVLLLHMPEEQAFCVLVKIMYDYGLRDLYRNNFEDLHCKFYQLERLMQEQLPDLHSHFSDLNLEAHMYASQWFLTLFTAKFPLCMVFHIIDLLLCEGLNIIFHVALALLKTSKEDLLQADFEGALKFFRVQLPKRYRAEENARRLMEQACNIKVPTKKLKKYEKEYQTMRESQLQQEDPMDRYKFVYL

SEQ ID NO: 10943 - protein, 552 aa, Artificial Sequence
  Synthetic polypeptide
PVLPALWEAKVGRLLEIVSNGDEQLEKAMEEILRDSEKRPSSLLVDCQSSSEISDHSFGDIPASQTNKPSLQLILDPSNTEISTPRPSSPGGLPEEDSVLFNKLTYLGCMKVSSPRNEVEALRAMATMKSSSQYPFPVTLYVPNVPEGSVRIIDQSSNVEIASFPIYKVLFCARGHDGTTESNCFAFTESSHGSEEFQIHVFSCEIKEAVSRILYSFCTAFKRSSRQVSDVKDSVIPTPDSDVFTFSVSLEVKEDDGKGNFRLLVIPIPFEYFSPVPKDRDKFYFKLKQGIEKKVVITVQQLSNKELAIERCFGMLLSPGRNVKNSDMHLLDMESMGKSYDGRAYVITGMWNPNAPVFLALNEETPKDKQVYMTVAVDMVVTEVVEPVRFLLETVVRVYPANERFWYFSRKTFTETFFMRLKQSEGKGHTNAGDAIYEVVSLQRESDKEEPVTPTSGGGPMSPQDDEAEEESDNELSSGTGDVSKDCPEKILYSWGELLGKWHSNLGARPKGLSTLVKSGVPEALRAEVWQLLAGCHDNQAMLDRYRILITK

SEQ ID NO: 10944 - protein, 306 aa, Artificial Sequence
  Synthetic polypeptide
KEWRRGGRREGKKEGESMGKSYDGRAYVITGMWNPNAPVFLALNEETPKDKQVYMTVAVDMVVTEVVEPVRFLLETVVRVYPANERFWYFSRKTFTETFFMRLKQSEGKGHTNAGDAIYEVVSLQRESDKEEPVTPTSGGGPMSPQDDEAEEESDNELSSGTGDVSKDCPEKILYSWGELLGKWHSNLGARPKGLSTLVKSGVPEALRAEVWQLLAGCHDNQAMLDRYRILITKQQMKFSLTPRQTIHLVKYEGSMKVSMTPCNQLQFDIRLDVLITYTFCFSSFPEPELYKYVLKHQLIKRLNAC

SEQ ID NO: 10945 - protein, 54 aa, Artificial Sequence
  Synthetic polypeptide
KNGEEEEGEKGRKRENPWERAMMGELMSSLACGTPMHQYFWHLTRKPQKISKYT

SEQ ID NO: 10946 - protein, 21 aa, Artificial Sequence
  Synthetic polypeptide
RMEKRRKERREERGRIHGKEL

SEQ ID NO: 10947 - protein, 479 aa, Artificial Sequence
  Synthetic polypeptide
KEWRRGGRREGKKEGESMGKSYDGRAYVITGMWNPNAPVFLALNEETPKDKQVYMTVAVDMVVTEVVEPVRFLLETVVRVYPANERFWYFSRKTFTETFFMRLKQSEGKGHTNAGDAIYEVVSLQRESDKEEPVTPTSGGGPMSPQDDEAEEESDNELSSGTGDVSKDCPEKILYSWGELLGKWHSNLGARPKGLSTLVKSGVPEALRAEVWQLLAGCHDNQAMLDRYRILITKDSAQESVITRDIHRTFPAHDYFKDTGGDGQESLYKICKAYSVYDEDIGYCQGQSFLAAVLLLHMPEEQAFCVLVKIMYDYGLRDLYRNNFEDLHCKFYQLERLMQEQLPDLHSHFSDLNLEAHMYASQWFLTLFTAKFPLCMVFHIIDLLLCEGLNIIFHVALALLKTSKEDLLQADFEGALKFFRVQLPKRYRAEENARRLMEQACNIKVPTKKLKKYEKEYQTMRESQLQQEDPMDRYKFVYL

SEQ ID NO: 10948 - protein, 234 aa, Artificial Sequence
  Synthetic polypeptide
KEWRRGGRREGKKEGESMGKSYDGRAYVITGMWNPNAPVFLALNEETPKDKQVYMTVAVDMVVTEVVEPVRFLLETVVRVYPANERFWYFSRKTFTETFFMRLKQSEGKGHTNAGDAIYEVVSLQRESDKEEPVTPTSGGGPMSPQDDEAEEESDNELSSGTGDVSKDCPEKILYSWGELLGKWHSNLGARPKGLSTLVKSGVPEALRAEVWQLLAGCHDNQAMLDRYRILITK

SEQ ID NO: 10949 - protein, 14 aa, Artificial Sequence
  Synthetic polypeptide
QGNTVGSDFLPLQP

SEQ ID NO: 10950 - protein, 578 aa, Artificial Sequence
  Synthetic polypeptide
RATQWVQISYHSSHEPLPLAYAVLYLTCVDISLDCDLNCEGRQDRNFVDKRQWVWGPSGYGGILLVNCDRDDPSCDVQDNCDQHVHCLQDLEDMSVMVLRTQGPAALFDDHKLVLHTSSYDAKRAQVFHICGPEDVCEAYRHVLGQDKVSYEVPRLHGDEERFFVEGLSFPDAGFTGLISFHVTLLDDSNEDFSASPIFTDTVVFRVAPWIMTPSTLPPLEVYVCRVRNNTCFVDAVAELARKAGCKLTICPQAENRNDRWIQDEMELGYVQAPHKTLPVVFDSPRNGELQDFPYKRILGPDFGYVTREPRDRSVSGLDSFGNLEVSPPVVANGKEYPLGRILIGGNLPGSSGRRVTQVVRDFLHAQKVQPPVELFVDWLAVGHVDEFLSFVPAPDGKGFRMLLASPGACFKLFQEKQKCGHGRALLFQGVVDDEQVKTISINQVLSNKDLINYNKFVQSCIDWNREVLKRELGLAECDIIDIPQLFKTERKKATAFFPDLVNMLVLGKHLGIPKPFGPIINGCCCLEEKVRSLLEPLGLHCTFIDDFTPYHMLHGEVHCGTNVCRKPFSFKWWNMVP

SEQ ID NO: 10951 - protein, 36 aa, Artificial Sequence
  Synthetic polypeptide
GQHSGFRFPTTPAMSLCPWPMRCSTSPVLTSLWIAT

SEQ ID NO: 10952 - protein, 213 aa, Artificial Sequence
  Synthetic polypeptide
LCSSFTFCHCCESSSAVWNLKLWSTNLDNSVASIEAKANVCCVKFSPSSRYHLAFGCADHCVHYYDLRNTKQPIMVFKGHRKAVSYAKFVSGEEIVSASTDSQLKLWNVGKPYCLRSFKGHINEKNFVGLASNGDYIACGSENNSLYLYYKGLSKTLLTFKFDTVKSVLDKDRKEDDTNEFVSAVCWRALPDGESNVLIAANSQGTIKVLELV

SEQ ID NO: 10953 - protein, 22 aa, Artificial Sequence
  Synthetic polypeptide
VLLSRVELEAVVYQSRQLSGKH

SEQ ID NO: 10954 - protein, 92 aa, Artificial Sequence
  Synthetic polypeptide
ISLMRSDGFKNGSLLAKALFSCLLPCEMYLSSSTMIVRLPQPCGTESWSHPFPAWGPQQLVQWTPSGTQDKLAAQLTQVPGVPLQRDQTLRT

SEQ ID NO: 10955 - protein, 86 aa, Artificial Sequence
  Synthetic polypeptide
GFPSHVELKAGLILSQLGDLSSWCNGLLQEPKISLRRSSLKYLGCRYSEIKPYGLDWAELSRDLRKTCEEQTLSIPYNDYGDSKEI

SEQ ID NO: 10956 - protein, 256 aa, Artificial Sequence
  Synthetic polypeptide
VAHQTKVCRIRDNMGLGSVLILRPSVSHFSWLSLPSSSVQYDPETTVPLPSEQTPLAARPRSISESSASSAKEDEKESSDEADKNSPRNTAQRGKLGDGKEHTKSSGFGWFSWFRSKPTKNASPAGDEDSSDSPDSEETPRASSPHQAGLGLSLTPSPESPPLPDVSAFSRGRGGGEGRGSASSGGAAAGAGVGGLSGPESVSFELCSNPGVLLPPPALKGAVPLYNPSQVPQLPTATSLNRPNRLAQRRYPTQPC

SEQ ID NO: 10957 - protein, 121 aa, Artificial Sequence
  Synthetic polypeptide
AFLPLQYNMILRQQSHCLLSRHHWLLDHEVFLRVPPVQPRRMRRSPLMRLIKTLPEILPREASSEMGRSIQRAQGLAGSAGFDRSPPRTHPPLETRTPQTALTLRRPPEHLLPTRLAWASH

SEQ ID NO: 10958 - protein, 6 aa, Artificial Sequence
  Synthetic polypeptide
ADTIGC

SEQ ID NO: 10959 - protein, 20 aa, Artificial Sequence
  Synthetic polypeptide
WEVLGDGRTQDSEYSIGPYM

SEQ ID NO: 10960 - protein, 97 aa, Artificial Sequence
  Synthetic polypeptide
GMEEPRILNTPLDLTCERTTHPPSVLWSVTLHRDNNVGAEVLHPHRQPVGIAQQGEGDTCGRGTGAADRFHQRAMPEENCQCPFRGSVSRVPTRGRH

SEQ ID NO: 10961 - protein, 1226 aa, Artificial Sequence
  Synthetic polypeptide
ILHWTLHVKGPPTHRLSCGQSPYTETTTWERKYCILTDSQLVLLNKEKEIPVEGGQEQQTDSTKGRCLRRTVSVPSEGQFPEYPPEGATKLEVPAERSPRRRSISGTSTSEKPNSMDTANTSPFKVPGFFSKRLKGSIKRTKSQSKLDRNTSFRLPSLRSTDDRSRGLPKLKESRSHESLLSPCSTVECLDLGRGEPVSVKPLHSSILGQDFCFEVTYLSGSKCFSCNSASERDKWMENLRRTVQPNKDNCRRAENVLRLWIIEAKDLAPKKKYFCELCLDDTLFARTTSKTKADNIFWGEHFEFFSLPPLHSITVHIYKDVEKKKKKDKNNYVGLVNIPTASVTGRQFVEKWYPVSTPTPNKGKTGGPSIRIKSRFQTITILPMEQYKEFAEFVTSNYTMLCSVLEPVISVRNKEELACALVHILQSTGRAKDFLTDLVMSEVDRCGEHDVLIFRENTIATKSIEEYLKLVGQQYLHDALGEFIKALYESDENCEVDPSKCSSSELIDHQSNLKMCCELAFCKIINSYCVFPRELKEVFASWKQQCLNRGKQDISERLISASLFLRFLCPAIMSPSLFNLMQEYPDDRTSRTLTLIAKVIQNLANFAKFGNKEEYMAFMNDFLEHEWGGMKRFLLEISNPDTISNTPGFDGYIDLGRELSVLHSLLWEVVSQLDKGENSFLQATVAKLGPLPRVLADITKSLTNPTPIQQQLRRFTEHNSSPNVSGSLSSGLQKIFEDPTDSDLHKLKSPSQDNTDSYFRGKTLLLVQQASSQSMTYSEKDERESSLPNGRSVSLMDLQDTHAAQVEHASVMLDVPIRLTGSQLSITQVASIKQLRETQSTPQSAPQVRRPLHPALNQPGGLQPLSFQNPVYHLNNPIPAMPKASIDSSLENLSTASSRSQSNSEDFKLSGPSNSSMEDFTKRSTQSEDFSRRHTVPDRHIPLALPRQNSTGQAQIRKVDQGGLGARAKAPPSLPHSASLRSTGSMSVVSAALVAEPVQNGSRSRQQSSSSRESPVPKVRAIQRQQTQQVQSPVDSATMSPVERTAAWVLNNGQYEEDVEETEQNLDEAKHAEKYEQEITKLKERLRVSSRRLEEYERRLLVQEQQMQKLLLEYKARLEDSEERLRRQQEEKDSQMKSIISRLMAVEEELKKDHAEMQAVIDAKQKIIDAQEKRIVSLDSANTRLMSALTQVKERYSMQVRNGISPTNPTKLSITENGEFKNSSC

SEQ ID NO: 10962 - protein, 1219 aa, Artificial Sequence
  Synthetic polypeptide
ILHWTLHVKGPPTHRLSCGQSPYTETTTWERKYCILTDSQLVLLNKEKEIPVEGGQEQQTDSTKGRCLRRTVSVPSEGQFPEYPPEGATKLEVPAERSPRRRSISGTSTSEKPNSMDTANTSPFKVPGFFSKRLKGSIKRTKSQSKLDRNTSFRLPSLRSTDDRSRGLPKLKESRSHESLLSPCSTVECLDLGRGEPVSVKPLHSSILGQDFCFEVTYLSGSKCFSCNSASERDKWMENLRRTVQPNKDNCRRAENVLRLWIIEAKDLAPKKKYFCELCLDDTLFARTTSKTKADNIFWGEHFEFFSLPPLHSITVHIYKDVEKKKKKDKNNYVGLVNIPTASVTGRQFVEKWYPVSTPTPNKGKTGGPSIRIKSRFQTITILPMEQYKEFAEFVTSNYTMLCSVLEPVISVRNKEELACALVHILQSTGRAKDFLTDLVMSEVDRCGEHDVLIFRENTIATKSIEEYLKLVGQQYLHDALGEFIKALYESDENCEVDPSKCSSSELIDHQSNLKMCCELAFCKIINSYCVFPRELKEVFASWKQQCLNRGKQDISERLISASLFLRFLCPAIMSPSLFNLMQEYPDDRTSRTLTLIAKVIQNLANFAKFGNKEEYMAFMNDFLEHEWGGMKRFLLEISNPDTISNTPGFDGYIDLGRELSVLHSLLWEVVSQLDKATVAKLGPLPRVLADITKSLTNPTPIQQQLRRFTEHNSSPNVSGSLSSGLQKIFEDPTDSDLHKLKSPSQDNTDSYFRGKTLLLVQQASSQSMTYSEKDERESSLPNGRSVSLMDLQDTHAAQVEHASVMLDVPIRLTGSQLSITQVASIKQLRETQSTPQSAPQVRRPLHPALNQPGGLQPLSFQNPVYHLNNPIPAMPKASIDSSLENLSTASSRSQSNSEDFKLSGPSNSSMEDFTKRSTQSEDFSRRHTVPDRHIPLALPRQNSTGQAQIRKVDQGGLGARAKAPPSLPHSASLRSTGSMSVVSAALVAEPVQNGSRSRQQSSSSRESPVPKVRAIQRQQTQQVQSPVDSATMSPVERTAAWVLNNGQYEEDVEETEQNLDEAKHAEKYEQEITKLKERLRVSSRRLEEYERRLLVQEQQMQKLLLEYKARLEDSEERLRRQQEEKDSQMKSIISRLMAVEEELKKDHAEMQAVIDAKQKIIDAQEKRIVSLDSANTRLMSALTQVKERYSMQVRNGISPTNPTKLSITENGEFKNSSC

SEQ ID NO: 10963 - protein, 47 aa, Artificial Sequence
  Synthetic polypeptide
GEGSKMAEQEQLQSTAPSMSNTEDRYLFVRFNIHRFSIPINWQHSRK

SEQ ID NO: 10964 - protein, 386 aa, Artificial Sequence
  Synthetic polypeptide
ATQKTGIYLSDLTYIDSAYPSTGSILENEQRSNLMNNILRIISDLQQSCEYDIPMLPHVQKYLNSVQYIEELQKFVEDDNYKLSLKIEPGTSTPRSAASREDLVGPEVGASPQSGRKSVAAEGALLPQTPPSPRNLIPHGHRKCHSLGYNFIHKMNTAEFKSATFPNAGPRHLLDDSVMEPHAPSRGQAESSTLSSGISIGSSDGSELSEETSWPAFERNRLYHSLGPVTRVARNGYRSHMKASSSAESEDLAVHLYPGAVTIQGVLRRKTLLKEGKKPTVASWTKYWAALCGTQLFYYAAKSLKATERKHFKSTSNKNVSVIGWMVMMADDPEHPDLFLLTDSEKGNSYKFQAGNRMNAMLWFKHLSAACQSNKQQVPTNLMTFE

SEQ ID NO: 10965 - protein, 30 aa, Artificial Sequence
  Synthetic polypeptide
GGFQDGRTGTTPVYSSQHEQHRRQVSICQI

SEQ ID NO: 10966 - protein, 360 aa, Artificial Sequence
  Synthetic polypeptide
ATQKTGIYLSDLTYIDSAYPSTGSILENEQRSNLMNNILRIISDLQQSCEYDIPMLPHVQKYLNSVQYIEELQKFVEDDNYKLSLKIEPGTSTPRSAASREDLVGPEVGASPQSGRKSVAAEGALLPQTPPSPRNLIPHGHRKCHSLGYNFIHKMNTAEFKSATFPNAGPRHLLDDSVMEPHAPSRGQAESSTLSSGISIGSSDGSELSEETSWPAFESSAESEDLAVHLYPGAVTIQGVLRRKTLLKEGKKPTVASWTKYWAALCGTQLFYYAAKSLKATERKHFKSTSNKNVSVIGWMVMMADDPEHPDLFLLTDSEKGNSYKFQAGNRMNAMLWFKHLSAACQSNKQQVPTNLMTFE

SEQ ID NO: 10967 - protein, 104 aa, Artificial Sequence
  Synthetic polypeptide
ATQKTGIYLSDLTYIDSAYPSTGSILENEQRSNLMNNILRIISDLQQSCEYDIPMLPHVQKYLNSVQYIEELQKFVEDDNYKLSLKIEPGTSTPRSAASREDLV

SEQ ID NO: 10968 - protein, 56 aa, Artificial Sequence
  Synthetic polypeptide
TSIKRRTGGLWYIHTLACYTAMRTPATCSSVDESTHMILGERSQTKEYILYDSVGS

SEQ ID NO: 10969 - protein, 3 aa, Artificial Sequence
  Synthetic polypeptide
FRR

SEQ ID NO: 10970 - protein, 53 aa, Artificial Sequence
  Synthetic polypeptide
RAWPPGPGRAWASWAGPCSGYGSPGRGREEPALRGCAPGWGPSAGGGPRLELQ

SEQ ID NO: 10971 - protein, 948 aa, Artificial Sequence
  Synthetic polypeptide
GRGHRGRAGLGHHGQGHAPAMGPRAGAERNLLYEDAHRAGAPRQAEDLGWSSSEFESYSEDSGEEAKPEVEVEPAKHRVSFQPKLSPDLTRLKERYARTKRDILALRVGGRDMQELKHKYDCKMTQLMKAAKSGTKDGLEKTRMAVMRKVSFLHRKDVLGDSEEEDMGLLEVSVSDIKPPAPELGPMPEGLSPQQVVRRHILGSIVQSEGSYVESLKRILQDYRNPLMEMEPKALSARKCQVVFFRVKEILHCHSMFQIALSSRVAEWDSTEKIGDLFVASFSKSMVLDVYSDYVNNFTSAMSIIKKACLTKPAFLEFLKRRQVCSPDRVTLYGLMVKPIQRFPQFILLLQDMLKNTPRGHPDRLSLQLALTELETLAEKLNEQKRLADQVAEIQQLTKSVSDRSSLNKLLTSGQRQLLLCETLTETVYGDRGQLIKSKERRVFLLNDMLVCANINFKGQLEISSLVPLGPKYVVKWNTALPQVQVVEVGQDGGTYDKDNVLIQHSGAKKASASGQAQNKVYLGPPRLFQELQDLQKDLAVVEQITLLISTLHGTYQNLNMTVAQDWCLALQRLMRVKEEEIHSANKCRLRLLLPGKPDKSGRPISFMVVFITPNPLSKISWVNRLHLAKIGLREENQPGWLCPDEDKKSKAPFWCPILACCIPAFSSRALSLQLGALVHSPVNCPLLGFSAVSTSLPQGYLWVGGGQEGAGGQVEIFSLNRPSPRTVKSFPLAAPVLCMEYIPELEEEAESRDESPTVADPSATVHPTICLGLQDGSILLYSSVDTGTQCLVSCRSPGLQPVLCLRHSPFHLLAGLQDGTLAAYPRTSGGVLWDLESPPVCLTVGPGPVRTLLSLEDAVWASCGPWVTVLEATTLQPQQSFEAHQDEAVSVTHMVKAGSGVWMAFSSGTSIRLFHTETLEHLQEINIATRTTFLLPDRSLIKCSPRA

SEQ ID NO: 10972 - protein, 47 aa, Artificial Sequence
  Synthetic polypeptide
GVATGAGQGLGIMGRAMLRLWVPGQGQRGTCSTRMRTGLGPLGRRRT

SEQ ID NO: 10973 - protein, 1160 aa, Artificial Sequence
  Synthetic polypeptide
GRGHRGRAGLGHHGQGHAPAMGPRAGAERNLLYEDAHRAGAPRQAEDLGWSSSEFESYSEDSGEEAKPEVEVEPAKHRVSFQPKLSPDLTRLKERYARTKRDILALRVGGRDMQELKHKYDCKMTQLMKAAKSGTKDGLEKTRMAVMRKVSFLHRKDVLGDSEEEDMGLLEVSVSDIKPPAPELGPMPEGLSPQQVVRRHILGSIVQSEGSYVESLKRILQDYRNPLMEMEPKALSARKCQVVFFRVKEILHCHSMFQIALSSRVAEWDSTEKIGDLFVASFSKSMVLDVYSDYVNNFTSAMSIIKKACLTKPAFLEFLKRRQVCSPDRVTLYGLMVKPIQRFPQFILLLQDMLKNTPRGHPDRLSLQLALTELETLAEKLNEQKRLADQVAEIQQLTKSVSDRSSLNKLLTSGQRQLLLCETLTETVYGDRGQLIKSKERRVFLLNDMLVCANINFKPANHRGQLEISSLVPLGPKYVVKWNTALPQVQVVEVGQDGGTYDKDNVLIQHSGAKKASASGQAQNKVYLGPPRLFQELQDLQKDLAVVEQITLLISTLHGTYQNLNMTVAQDWCLALQRLMRVKEEEIHSANKCRLRLLLPGKPDKSGRPISFMVVFITPNPLSKISWVNRLHLAKIGLREENQPGWLCPDEDKKSKAPFWCPILACCIPAFSSRALSLQLGALVHSPVNCPLLGFSAVSTSLPQGYLWVGGGQEGAGGQVEIFSLNRPSPRTVKSFPLAAPVLCMEYIPELEEEAESRDESPTVADPSATVHPTICLGLQDGSILLYSSVDTGTQCLVSCRSPGLQPVLCLRHSPFHLLAGLQDGTLAAYPRTSGGVLWDLESPPVCLTVGPGPVRTLLSLEDAVWASCGPWVTVLEATTLQPQQSFEAHQDEAVSVTHMVKAGSGVWMAFSSGTSIRLFHTETLEHLQEINIATRTTFLLPGQKHLCVTSLLICQGLLWVGTDQGVIVLLPVPRLEGIPKITGKGMVSLNGHCGPVAFLAVATSILAPDILRSDQEEAEGPRAEEDKPDGQAHEPMPDSHVGRELTRKKGILLQYRLRSTAHLPGPLLSMREPAPADGAALEHSEEDGSIYEMADDPDIWVRSRPCARDAHRKEICSVAIISGGQGYRNFGSALGSSGRQAPCGETDSTLLIWQVPLML

SEQ ID NO: 10974 - protein, 1121 aa, Artificial Sequence
  Synthetic polypeptide
GRGHRGRAGLGHHGQGHAPAMGPRAGAERNLLYEDAHRAGAPRQAEDLGWSSSEFESYSEDSGEEAKPEVEVEPAKHRVSFQPKMTQLMKAAKSGTKDGLEKTRMAVMRKVSFLHRKDVLGDSEEEDMGLLEVSVSDIKPPAPELGPMPEGLSPQQVVRRHILGSIVQSEGSYVESLKRILQDYRNPLMEMEPKALSARKCQVVFFRVKEILHCHSMFQIALSSRVAEWDSTEKIGDLFVASFSKSMVLDVYSDYVNNFTSAMSIIKKACLTKPAFLEFLKRRQVCSPDRVTLYGLMVKPIQRFPQFILLLQDMLKNTPRGHPDRLSLQLALTELETLAEKLNEQKRLADQVAEIQQLTKSVSDRSSLNKLLTSGQRQLLLCETLTETVYGDRGQLIKSKERRVFLLNDMLVCANINFKPANHRGQLEISSLVPLGPKYVVKWNTALPQVQVVEVGQDGGTYDKDNVLIQHSGAKKASASGQAQNKVYLGPPRLFQELQDLQKDLAVVEQITLLISTLHGTYQNLNMTVAQDWCLALQRLMRVKEEEIHSANKCRLRLLLPGKPDKSGRPISFMVVFITPNPLSKISWVNRLHLAKIGLREENQPGWLCPDEDKKSKAPFWCPILACCIPAFSSRALSLQLGALVHSPVNCPLLGFSAVSTSLPQGYLWVGGGQEGAGGQVEIFSLNRPSPRTVKSFPLAAPVLCMEYIPELEEEAESRDESPTVADPSATVHPTICLGLQDGSILLYSSVDTGTQCLVSCRSPGLQPVLCLRHSPFHLLAGLQDGTLAAYPRTSGGVLWDLESPPVCLTVGPGPVRTLLSLEDAVWASCGPWVTVLEATTLQPQQSFEAHQDEAVSVTHMVKAGSGVWMAFSSGTSIRLFHTETLEHLQEINIATRTTFLLPGQKHLCVTSLLICQGLLWVGTDQGVIVLLPVPRLEGIPKITGKGMVSLNGHCGPVAFLAVATSILAPDILRSDQEEAEGPRAEEDKPDGQAHEPMPDSHVGRELTRKKGILLQYRLRSTAHLPGPLLSMREPAPADGAALEHSEEDGSIYEMADDPDIWVRSRPCARDAHRKEICSVAIISGGQGYRNFGSALGSSGRQAPCGETDSTLLIWQVPLML

SEQ ID NO: 10975 - protein, 8 aa, Artificial Sequence
  Synthetic polypeptide
GLPSHVEL

SEQ ID NO: 10976 - protein, 20 aa, Artificial Sequence
  Synthetic polypeptide
EGPFTFHHDCEASPATWNCD

SEQ ID NO: 10977 - protein, 638 aa, Artificial Sequence
  Synthetic polypeptide
GETPFAWLSFSLCLPLCKRGLSPSTMIVRPPQPRGTVIERNRVILARRLYLNEKGWNKYTKHFIILLSNKDTEDLALLQKLTQKWRNLVNKLKQEVEQMEESTSETLKIVKDGLIKWQEFFNEKDILSPNKGNIFNSVLLDFKQWQKILNEKKEEFTGDVLLSKYDTLKIIKHLQENWADIGLGIFNRHKSLEGEMPSERQYMEEIIKNIQKLYKEYEIRINGDNGYSKILPSLISSLDFCSFKLENLEFPDTPLEEWQEIDEKINEMKSHLDILLNLTGIVPQHIDVDSVSVLQAYIFNMIQQWLLKIGNEINNGNIELQHHMDELHISMIQWMVNLLILMIPNFTDQDCLLKLEEESAEKHDIGVARLELDAIELTRKLYQYSSYLSSCCKGMVTAMALSKSTNSHKNATEDLYEVDKLKKECYEWINTCSCLLSNIKGRKITLLTYEEIERLLEEEAVKEFIEPEIDESFKEDEEESKEDRKLQEENKERAEEQPSTSTEKEKLIRFIGEDENVHSKPLFETDVLSSWRESAKQGTLAQKYLEAMAVIEHMQEKLLEVENRARQAEEKFEDAYEKLHHTLIKNKDLEELVMTSRKESKEEKENQDEREVKEEEEQQEEEEVRSAENSSKSPKKGH

SEQ ID NO: 10978 - protein, 281 aa, Artificial Sequence
  Synthetic polypeptide
GETPFAWLSFSLCLPLCKRGLSPSTMIVRPPQPRGTVIERNRVILARRLYLNEKGWNKYTKHFIILLSNKDTEDLALLQKLTQKWRNLVNKLKQEVEQMEESTSETLKIVKDGLIKWQEFFNEKDILSPNKGNIFNSVLLDFKQWQKILNEKKEEFTGDVLLSKYDTLKIIKHLQENWADIGLGIFNRHKSLEGEMPSERQYMEEIIKNIQKLYKEYEIRINGDNETGSHRVAQAGLKLLGSSDHPTSAPQSAGIRGIIHRTWPWVNFYIVCEVTPKFFQV

SEQ ID NO: 10979 - protein, 155 aa, Artificial Sequence
  Synthetic polypeptide
GETPFAWLSFSLCLPLCKRGLSPSTMIVRPPQPRGTVIERNRVILARRLYLNEKGWNKYTKHFIILLSNKDTEDLALLQKLTQKWRNLVNKLKQEVEQMEESTSETLKIVKDGLIKWQEFFNEKDILSPNKGNIFNSVLLDFKQWQKVTPKFFQV

SEQ ID NO: 10980 - protein, 564 aa, Artificial Sequence
  Synthetic polypeptide
GETPFAWLSFSLCLPLCKRGLSPSTMIVRPPQPRGTVIERNRVILARRLYLNEKGWNKYTKHFIILLSNKDTEDLALLQKLTQKWRNLVNKLKQEVEQMEESTSETLKIVKDGLIKWQEFFNEKDILSPNKGNIFNSVLLDFKQWQKILNEKKEEFTGDVLLSKYDTLKIIKHLQENWADIGLGIFNRHKSLEGEMPSERQYMEEIIKNIQKLYKEYEIRINGDNGYSKILPSLISSLDFCSFKLENLEFPDTPLEEWQEIDEKINEMKSHLDILLNLTGIVPQHIDVDSVSVLQAYIFNMIQQWLLKIGNEINNGNIELQHHMDELHISMIQWMVNLLILMIPNFTDQDCLLKLEEESAEKHDIGVARLELDAIELTRKLYQYSSYLSSCCKGMVTAMALSKSTNSHKNATEDLYEVDKLKQPSTSTEKEKLIRFIGEDENVHSKPLFETDVLSSWRESAKQGTLAQKYLEAMAVIEHMQEKLLEVENRARQAEEKFEDAYEKLHHTLIKNKDLEELVMTSRKESKEEKENQDEREVKEEEEQQEEEEVRSAENSSKSPKKGH

SEQ ID NO: 10981 - protein, 604 aa, Artificial Sequence
  Synthetic polypeptide
GETPFAWLSFSLCLPLCKRGLSPSTMIVRPPQPRGTDTEDLALLQKLTQKWRNLVNKLKQEVEQMEESTSETLKIVKDGLIKWQEFFNEKDILSPNKGNIFNSVLLDFKQWQKILNEKKEEFTGDVLLSKYDTLKIIKHLQENWADIGLGIFNRHKSLEGEMPSERQYMEEIIKNIQKLYKEYEIRINGDNGYSKILPSLISSLDFCSFKLENLEFPDTPLEEWQEIDEKINEMKSHLDILLNLTGIVPQHIDVDSVSVLQAYIFNMIQQWLLKIGNEINNGNIELQHHMDELHISMIQWMVNLLILMIPNFTDQDCLLKLEEESAEKHDIGVARLELDAIELTRKLYQYSSYLSSCCKGMVTAMALSKSTNSHKNATEDLYEVDKLKKECYEWINTCSCLLSNIKGRKITLLTYEEIERLLEEEAVKEFIEPEIDESFKEDEEESKEDRKLQEENKERAEEQPSTSTEKEKLIRFIGEDENVHSKPLFETDVLSSWRESAKQGTLAQKYLEAMAVIEHMQEKLLEVENRARQAEEKFEDAYEKLHHTLIKNKDLEELVMTSRKESKEEKENQDEREVKEEEEQQEEEEVRSAENSSKSPKKGH

SEQ ID NO: 10982 - protein, 18 aa, Artificial Sequence
  Synthetic polypeptide
GLPSHVELTLKTLHCCRS

SEQ ID NO: 10983 - protein, 247 aa, Artificial Sequence
  Synthetic polypeptide
GETPFAWLSFSLCLPLCKRGLSPSTMIVRPPQPRGTDTEDLALLQKLTQKWRNLVNKLKQEVEQMEESTSETLKIVKDGLIKWQEFFNEKDILSPNKGNIFNSVLLDFKQWQKILNEKKEEFTGDVLLSKYDTLKIIKHLQENWADIGLGIFNRHKSLEGEMPSERQYMEEIIKNIQKLYKEYEIRINGDNETGSHRVAQAGLKLLGSSDHPTSAPQSAGIRGIIHRTWPWVNFYIVCEVTPKFFQV

SEQ ID NO: 10984 - protein, 121 aa, Artificial Sequence
  Synthetic polypeptide
GETPFAWLSFSLCLPLCKRGLSPSTMIVRPPQPRGTDTEDLALLQKLTQKWRNLVNKLKQEVEQMEESTSETLKIVKDGLIKWQEFFNEKDILSPNKGNIFNSVLLDFKQWQKVTPKFFQV

SEQ ID NO: 10985 - protein, 530 aa, Artificial Sequence
  Synthetic polypeptide
GETPFAWLSFSLCLPLCKRGLSPSTMIVRPPQPRGTDTEDLALLQKLTQKWRNLVNKLKQEVEQMEESTSETLKIVKDGLIKWQEFFNEKDILSPNKGNIFNSVLLDFKQWQKILNEKKEEFTGDVLLSKYDTLKIIKHLQENWADIGLGIFNRHKSLEGEMPSERQYMEEIIKNIQKLYKEYEIRINGDNGYSKILPSLISSLDFCSFKLENLEFPDTPLEEWQEIDEKINEMKSHLDILLNLTGIVPQHIDVDSVSVLQAYIFNMIQQWLLKIGNEINNGNIELQHHMDELHISMIQWMVNLLILMIPNFTDQDCLLKLEEESAEKHDIGVARLELDAIELTRKLYQYSSYLSSCCKGMVTAMALSKSTNSHKNATEDLYEVDKLKQPSTSTEKEKLIRFIGEDENVHSKPLFETDVLSSWRESAKQGTLAQKYLEAMAVIEHMQEKLLEVENRARQAEEKFEDAYEKLHHTLIKNKDLEELVMTSRKESKEEKENQDEREVKEEEEQQEEEEVRSAENSSKSPKKGH

SEQ ID NO: 10986 - protein, 217 aa, Artificial Sequence
  Synthetic polypeptide
GRALRLKPVILAVWEAKDWCFSTPKDTWDDSWQPSGLVNGTKVEVHKPEVLGAQEKNTGTNRTQKQLDINGSSDSSTLPKLEEFCTSLTQSEQSADGSQSEPNNSQTQPKQIQLSTAAPCSTTAVDDSAEKPSGSVESSPEILKNEDFSSSRAITLYKDKRQESVDQLSLILSYECQISQKLYIPRSTATAALGAAARLATSRSLLHWYPSVKRMEA

SEQ ID NO: 10987 - protein, 26 aa, Artificial Sequence
  Synthetic polypeptide
QFGRPRTGVFLPLKIHGMILGSLQAL

SEQ ID NO: 10988 - protein, 23 aa, Artificial Sequence
  Synthetic polypeptide
PGTAAQACNPSSLGGQGLVFFYP

SEQ ID NO: 10989 - protein, 18 aa, Artificial Sequence
  Synthetic polypeptide
ILGNMGSYPGSLTYRNYI

SEQ ID NO: 10990 - protein, 1093 aa, Artificial Sequence
  Synthetic polypeptide
KLEYLETWVLILDLLLTETTSDQSDIEGRIRALKDELRKRKSVVNQLKKEQKKRQKERLKAQEASLIKQLESYDEFIKKTEAELSQDLETSPTAKPQIKTLSSASEKPKIKPLTPLHRSETAKNWKSLTESERSRGSLESIAEHVDASLSGSERSVSERSLSAYAKRVNEWDSRTEDFQTPSPVLRSSRKIREESGDSLENVPALHLLKELNATSRILDMSDGKVGESSKKSEIKEIEYTKLKKSKIEDAFSKEGKSDVLLKLVLEQGDSSEILSKKDLPLDSENVQKDLVGLAIENLHKSEEMLKERQSDQDMNHSPNIQSGKDIHEQKNTKEKDLSWSEHLFAPKEIPYSEDFEVSSFKKEISAELYKDDFEVSSLLSLRKDSQSCRDKPQPMRSSTSGATSFGSNEEISECLSEKSLSIHSNVHSDRLLELKSPTELMKSKERSDVEHEQQVTESPSLASVPTADELFDFHIGDRVLIGNVQPGILRFKGETSFAKGFWAGVELDKPEGNNNGTYDGIAYFECKEKHGIFAPPQKISHIPENFDDYVDINEDEDCYSDERYQCYNQEQNDTEGPKDREKDVSEYFYEKSLPSVNDIEASVNRSRSLKIETDNVQDISGVLEAHVHQQSSVDSQISSKENKDLISDATEKVSIAAEDDTLDNTFSEELEKQQQFTEEEDNLYAEASEKLCTPLLDLLTREKNQLEAQLKSSLNEEKKSKQQLEKISLLTDSLLKVFVKDTVNQLQQIKKTRDEKIQLSNQELLGDDQKKVTPQDLSQNVEEQSPSISGCFLSSELEDEKEEISSPDMCPRPESPVFGASGQEELAKRLAELELSREFLSALGDDQDWFDEDFGLSSSHKIQKNKAEETIVPLMAEPKRVTQQPCETLLAVPHTAEEVEILVHNAAEELWKWKELGHDLHSISIPTKLLGCASKGLDIESTSKRVYKQAVFDLTKEIFEEIFAEDPNLNQPVWMKPCRINSSYFRRVKNPNNLDEIKSFIASEVLKLFSLKKEPNHKTDWQKMMKFGRKKRDRVDHILVQELHEEEAQWVNYDEDELCVKMQLADGIFETLIKDTIDVLNQISEKQGRMLLV

SEQ ID NO: 10991 - protein, 32 aa, Artificial Sequence
  Synthetic polypeptide
NLNTWKHGFLSWISYLPKLHLTRVILKVGSEL

SEQ ID NO: 10992 - protein, 79 aa, Artificial Sequence
  Synthetic polypeptide
KLEYLETWVLILDLLLTETTSDQSDIEGRIRALKDELRKRKSVVNQLKKEQKKRQKERLKAQEASLIKQLEVRHRKKGV

SEQ ID NO: 10993 - protein, 78 aa, Artificial Sequence
  Synthetic polypeptide
HFGRLRRADHSSSRPLPRTAREQYFQWLVLTCRHCGRGSLTPWSPIMTRGPQPVPHWSLPSWRRLMDSLREITKSTWL

SEQ ID NO: 10994 - protein, 24 aa, Artificial Sequence
  Synthetic polypeptide
GGQITVLQGLYQERLGSSISSGWC

SEQ ID NO: 10995 - protein, 640 aa, Artificial Sequence
  Synthetic polypeptide
PIILTLWEAEAGRSQFFKAFTKNGSGAVFPVAGADVQTLRERLIDALESHHDTWPPACPPLEPAKLEEIDGFFARNNEEYLALIFEKGGSYLGREVALDLSQHKGVAVRRVLNTEANVVRKFGVTDFPSCYLLFRNGSVSRVPVLMESRSFYTAYLQRLSGLTREAAQTTVAPTTANKIAPTVWKLADRSKIYMADLESALHYILRIEVGRFPVLEGQRLVALKKFVAVLAKYFPGRPLVQNFLHSVNEWLKRQKRNKIPYSFFKTALDDRKEGAVLAKKVNWIGCQGSEPHFRGFPCSLWVLFHFLTVQAARQNVDHSQEAAKAKEVLPAIRGYVHYFFGCRDCASHFEQMAAASMHRVGSPNAAVLWLWSSHNRVNARLAGAPSEDPQFPKVQWPPRELCSACHNERLDVPVWDVEATLNFLKAHFSPSNIILDFPAAGSAARRDVQNVAAAPELAMGALELESRNSTLDPGKPEMMKSPTNTTPHVPAEGPEASRPPKLHPGLRAAPGQEPPEHMAELQRNEQEQPLGQWHLSKRDTGAALLAESRAEKNRLWGPLEVRRVGRSSKQLVDIPEGQLEARAGRGRGQWLQVLGGGFSYLDISLCVGLYSLSFMGLLAMYTYFQAKIRALKGHAGHPAA

SEQ ID NO: 10996 - protein, 30 aa, Artificial Sequence
  Synthetic polypeptide
HFGRLRRADHSSSRPLPRTAREQYFQAGGD

SEQ ID NO: 10997 - protein, 39 aa, Artificial Sequence
  Synthetic polypeptide
GGQITVLQGLYQERLGSSISRLEEIDGFFARNNEEYLAL

SEQ ID NO: 10998 - protein, 48 aa, Artificial Sequence
  Synthetic polypeptide
PIILTLWEAEAGRSQFFKAFTKNGSGAVFPGWRRLMDSLREITKSTWL

SEQ ID NO: 10999 - protein, 497 aa, Artificial Sequence
  Synthetic polypeptide
PIILTLWEAEAGRSQFFKAFTKNGSGAVFPVAGADVQTLRERLIDALESHHDTWPPACPPLEPAKLEEIDGFFARNNEEYLALIFEKGGSYLGREVALDLSQHKGVAVRRVLNTEANVVRKFGVTDFPSCYLLFRNGSVSRVPVLMESRSFYTAYLQRLSGLTREAAQTTVAPTTANKIAPTVWKLADRSKIYMADLESALHYILRIEVGRFPVLEGQRLVALKKFVAVLAKYFPGRPLVQNFLHSVNEWLKRQKRNKIPYSFFKTALDDRKEGAVLAKKVNWIGCQGSEPHFRGFPCSLWVLFHFLTVQAARQNVDHSQEAAKAKEVLPAIRGYVHYFFGCRDCASHFEQMAAASMHRVGSPNAAVLWLWSSHNRVNARLAGAPSEDPQFPKVQWPPRELCSACHNERLDVPVWDVEATLNFLKAHFSPSNIILDFPAAGSAARRDVQNVAAAPELAMGALELESRNSTLDPGKPEMMKSPTNTTPHVPAEGPELI

SEQ ID NO: 11000 - protein, 35 aa, Artificial Sequence
  Synthetic polypeptide
GPNAYKVLSQHQHMMTQRLELSGPGPPSQPSSWRH

SEQ ID NO: 11001 - protein, 245 aa, Artificial Sequence
  Synthetic polypeptide
STPAHDDSEAGAKRPRTTITAKQLETLKNAYKNSPKPARHVREQLSSETGLDMRVVQVWFQNRRAKEKRLKKDAGRHRWGQFYKSVKRSRGSSKQEKESSAEDCGVSDSELSFREDQILSELGHTNRIYGNVGDVTGGQLMNGSFSMDGTGQSYQDLRDGSPYGIPQSPSSISSLPSHAPLLNGLDYTVDSNLGIIAHAGQGVSQTLRAMAGGPTSDISTGSSVGYPDFPTSPGSWLDEMDHPPF

SEQ ID NO: 11002 - protein, 27 aa, Artificial Sequence
  Synthetic polypeptide
STPAHDDSEAGAKRPRTTITAKQLETL

SEQ ID NO: 11003 - protein, 62 aa, Artificial Sequence
  Synthetic polypeptide
RDNEGQTALHYASACEFLDIVELLLQSGADPTLRDQDGCLPEEVTGCKTVSLVLQRHTTGKA

SEQ ID NO: 11004 - protein, 35 aa, Artificial Sequence
  Synthetic polypeptide
PSGLVVGQRGAHCPEGTMKAKQLYIMPLPVSFWIL

SEQ ID NO: 11005 - protein, 30 aa, Artificial Sequence
  Synthetic polypeptide
ALGQLWTRQALDSLLDLSWARGEPTALKGQ

SEQ ID NO: 11006 - protein, 1205 aa, Artificial Sequence
  Synthetic polypeptide
PQTDRASTSPGNPGRKQVPGPCSNLRNPNLHRGPKTGSGTASPVEGTSAVEWSGPEPQLDNGHPPRPWPCPQENRTSSLMAPQPPRVWGVQLQGPSVLESKVRALKEKMTVAKQGVSPCSASQEWSSPKKPQCRRGKAGRAGTPSEGSFLPGAVVAPRTQNLPDGQLDGSINEEQPARDGGPRLPRPPAPGREYCNRGSPWPPEAEWTLPDHDRGPLLGPSSLQQSPIHGVTPGRPGGPGHCNKIIHIPSPRTGRSYPFPDGVVTEADLDSTSLTSEEVFVPRTALLGERWRAGDLEALGAGSSVLSLSDRVERNRLLLQEMLNVSGQSPRKVGTPAWTPSWDTAAPERPVGDVDWASGTSLQDSGQNRTVGPNPEPVLSPRHEEATHLLQRARMKARTRPLRASHDIVPTITQGSRDGHRSPARDPRTTPACRDSLQNGHTSDSSSGESSGGHRPRRGPSPSHVRFEDESAREAEFRHLERLQQRQRQVLSTVLQAADQGPLRSKPDLADYINGAPRLRDAGQGTFHRLVGSLDRRGHPAPPAPGSERRCQACGSCIDDPRPAQGKAPPVPRTLQELQAACGMERVLGGLSSPLRLLPAEPRLHMEWIRETHIGDTVCPAEVDSALDSTDNSDNCRTDSEEAGTSQAGWACGRTQGSSPRLRLRGSRPRGHRWSKKAEAELPWGLQAQQHLPRADDVEVENEVKEGRGHTPEGTLFLREDAKPPDLELKRVSLGPQWQPGPGLGSHQPHPLDSRTPCRTAYATTAPMTPESSGPGGQAQVTESHESLEIVSPSSLQQSHAEPSAPHQAWQPTASLCPEGWAPTPPPSRKTTSPVSHRKAALAGLLRLGDQTEPVGIPRPPSRSAVLRTCELPPSQTQPSRPQVRHPLLALSTNNCNNSAPRGLQEPYGGAVHEGRVERGPCSREPEPPLENSRDGGPQGFLGSADVATINSTGITLSLSSEESESSKESEGSLQRTGSGSGGHVLSRASAGAGTGPGSPSAAPLDQNKKRSSSIASTLGLKKLFSALGQSSRPKLGKSRSYSVEQLQPAPPGLTSQSRAPSLQSLHPVSPSHQRRKAASFQNLHSLLSSKGNRSSLYLVAGPGDHSAAGRPAKTSPRRALSVEDVGAPSLARTVGRLVEVFPDGTSQLQLQRSPGGTFGFCVASGNGRPDSGMPSPLPQPHGWGGLSKQGRAFWLWSEAFLVFG

SEQ ID NO: 11007 - protein, 53 aa, Artificial Sequence
  Synthetic polypeptide
GTRICIEGPRQGVEQPAPWRGPQLWSGVVLSHSWITDTPQDPGLALRKTEHPA

SEQ ID NO: 11008 - protein, 275 aa, Artificial Sequence
  Synthetic polypeptide
GLPSHAELILATAGTHFNTHVDLRTLRAVRVLRPLKLVSGIPSLQIVLKSIMKAMVPLLQIGLLLFFAILMFAIIGLEFYSGKLHRACFMNNSGILEGFDPPHPCGVQGCPAGYECKDWIGPNDGITQFDNILFAVLTVFQCITMEGWTTVLYNTNDALGATWNWLYFIPLIIIGSFFVLNLVLGVLSGEFAKERERVENRRAFMKLRRQQQIERELNGYRAWIDKAEEVMLAEENKNAGTSALEVLRRATIKRSRTEAMTRDSSDEHCVDISSV

SEQ ID NO: 11009 - protein, 63 aa, Artificial Sequence
  Synthetic polypeptide
VLTRSDGFIRGSSPLAQHFSFLLPCEESVLLPLCHDSKFPEASPATLNSSWPLQEPTSILTWT

SEQ ID NO: 11010 - protein, 35 aa, Artificial Sequence
  Synthetic polypeptide
THPGHCRNPLQYSRGPEDPPGCACPAAFEARVRDT

SEQ ID NO: 11011 - protein, 2150 aa, Artificial Sequence
  Synthetic polypeptide
GLPSHAELILATAGTHFNTHVDLRTLRAVRVLRPLKLVSGIPSLQIVLKSIMKAMVPLLQIGLLLFFAILMFAIIGLEFYSGKLHRACFMNNSGILEGFDPPHPCGVQGCPAGYECKDWIGPNDGITQFDNILFAVLTVFQCITMEGWTTVLYNTNDALGATWNWLYFIPLIIIGSFFVLNLVLGVLSGEFAKERERVENRRAFMKLRRQQQIERELNGYRAWIDKAEEVMLAEENKNAGTSALEVLRRATIKRSRTEAMTRDSSDEHCVDISSVGTPLARASIKSAKVDGVSYFRHKERLLRISIRHMVKSQVFYWIVLSLVALNTACVAIVHHNQPQWLTHLLYYAEFLFLGLFLLEMSLKMYGMGPRLYFHSSFNCFDFGVTVGSIFEVVWAIFRPGTSFGISVLRALRLLRIFKITKYWASLRNLVVSLMSSMKSIISLLFLLFLFIVVFALLGMQLFGGRFNFNDGTPSANFDTFPAAIMTVFQILTGEDWNEVMYNGIRSQGGVSSGMWSAIYFIVLTLFGNYTLLNVFLAIAVDNLANAQELTKDEQEEEEAFNQKHALQKAKEVSPMSAPNMPSIERDRRRRHHMSMWEPRSSHLRERRRRHHMSVWEQRTSQLRKHMQMSSQEALNREEAPTMNPLNPLNPLSSLNPLNAHPSLYRRPRAIEGLALGLALEKFEEERISRGGSLKGDGGDRSSALDNQRTPLSLGQREPPWLARPCHGNCDPTQQEAGGGEAVVTFEDRARHRQSQRRSRHRRVRTEGKESSSASRSRSASQERSLDEAMPTEGEKDHELRGNHGAKEPTIQEERAQDLRRTNSLMVSRGSGLAGGLDEADTPLVLPHPELEVGKHVVLTEQEPEGSSEQALLGNVQLDMGRVISQSEPDLSCITANTDKATTESTSVTVAIPDVDPLVDSTVVHISNKTDGEASPLKEAEIREDEEEVEKKKQKKEKRETGKAMVPHSSMFIFSTTNPIRRACHYIVNLRYFEMCILLVIAASSIALAAEDPVLTNSERNKVLRYFDYVFTGVFTFEMVIKMIDQGLILQDGSYFRDLWNILDFVVVVGALVAFALANSMKTNKGRDIKTIKSLRVLRVLRPLKTIKRLPKLKAVFDCVVTSLKNVFNILIVYKLFMFIFAVIAVQLFKGKFFYCTDSSKDTEKECIGNYVDHEKNKMEVKGREWKRHEFHYDNIIWALLTLFTVSTGEGWPQVLQHSVDVTEEDRGPSRSNRMEMSIFYVVYFVVFPFFFVNIFVALIIITFQEQGDKMMEECSLEKNERACIDFAISAKPLTRYMPQNRHTFQYRVWHFVVSPSFEYTIMAMIALNTVVLMMKYYSAPCTYELALKYLNIAFTMVFSLECVLKVIAFGFLNYFRDTWNIFDFITVIGSITEIILTDSKLVNTSGFNMSFLKLFRAARLIKLLRQGYTIRILLWTFVQSFKALPYVCLLIAMLFFIYAIIGMQVFGNIKLDEESHINRHNNFRSFFGSLMLLFRSATGEAWQEIMLSCLGEKGCEPDTTAPSGQNENERCGTDLAYVYFVSFIFFCSFLMLNLFVAVIMDNFEYLTRDSSILGPHHLDEFVRVWAEYDRAACGRIHYTEMYEMLTLMSPPLGLGKRCPSKVAYKRLVLMNMPVAEDMTVHFTSTLMALIRTALDIKIAKGGADRQQLDSELQKETLAIWPHLSQKMLDLLVPMPKASDLTVGKIYAAMMIMDYYKQSKVKKQRQQLEEQKNAPMFQRMEPSSLPQEIIANAKALPYLQQDPVSGLSGRSGYPSMSPLSPQDIFQLACMDPADDGQFQERQSLEPEVSELKSVQPSNHGIYLPSDTQEHAGSGRASSMPRLTVDPQVVTDPSSMRRSFSTIRDKRSNSSWLEEFSMERSSENTYKSRRRSYHSSLRLSAHRLNSDSGHKSDTHRSGGRERGRSKERKHLLSPDVSRCNSEERGTQADWESPERRQSRSPSEGRSQTPNRQGTGSLSESSIPSVSDTSTPRRSRRQLPPVPPKPRPLLSYSSLIRHAGSISPPADGSEEGSPLTSQALESNNACLTESSNSPHPQQSQHASPQRYISEPYLALHEDSHASDCGEEETLTFEAAVATSLGRSNTIGSAPPLRHSWQMPNGHYRRRRRGGPGPGMMCGAVNNLLSDTEEDDKC

SEQ ID NO: 11012 - protein, 2088 aa, Artificial Sequence
  Synthetic polypeptide
GLPSHAELILATAGTHFNTHVDLRTLRAVRVLRPLKLVSGIPSLQIVLKSIMKAMVPLLQIGLLLFFAILMFAIIGLEFYSGKLHRACFMNNSGILEGFDPPHPCGVQGCPAGYECKDWIGPNDGITQFDNILFAVLTVFQCITMEGWTTVLYNTNDALGATWNWLYFIPLIIIGSFFVLNLVLGVLSGEFAKERERVENRRAFMKLRRQQQIERELNGYRAWIDKAEEVMLAEENKNAGTSALEVLRRATIKRSRTEAMTRDSSDEHCVDISSVGTPLARASIKSAKVDGVSYFRHKERLLRISIRHMVKSQVFYWIVLSLVALNTACVAIVHHNQPQWLTHLLYYAEFLFLGLFLLEMSLKMYGMGPRLYFHSSFNCFDFGVTVGSIFEVVWAIFRPGTSFGISVLRALRLLRIFKITKYWASLRNLVVSLMSSMKSIISLLFLLFLFIVVFALLGMQLFGGRFNFNDGTPSANFDTFPAAIMTVFQILTGEDWNEVMYNGIRSQGGVSSGMWSAIYFIVLTLFGNYTLLNVFLAIAVDNLANAQELTKDEQEEEEAFNQKHALQKAKEVSPMSAPNMPSIERERRRRHHMSVWEQRTSQLRKHMQMSSQEALNREEAPTMNPLNPLNPLSSLNPLNAHPSLYRRPRAIEGLALGLALEKFEEERISRGGSLKGDGGDRSSALDNQRTPLSLGQREPPWLARPCHGNCDPTQQEAGGGEAVVTFEDRARHRQSQRRSRHRRVRTEGKESSSASRSRSASQERSLDEAMPTEGEKDHELRGNHGAKEPTIQEERAQDLRRTNSLMVSRGSGLAGGLDEADTPLVLPHPELEVGKHVVLTEQEPEGSSEQALLGNVQLDMGRVISQSEPDLSCITANTDKATTESTSVTVAIPDVDPLVDSTVVHISNKTDGEASPLKEAEIREDEEEVEKKKQKKEKRETGKAMVPHSSMFIFSTTNPIRRACHYIVNLRYFEMCILLVIAASSIALAAEDPVLTNSERNKVLRYFDYVFTGVFTFEMVIKMIDQGLILQDGSYFRDLWNILDFVVVVGALVAFALANSMKTNKGRDIKTIKSLRVLRVLRPLKTIKRLPKLKAVFDCVVTSLKNVFNILIVYKLFMFIFAVIAVQLFKGKFFYCTDSSKDTEKECIGNYVDHEKNKMEVKGREWKRHEFHYDNIIWALLTLFTVSTGEGWPQVLQHSVDVTEEDRGPSRSNRMEMSIFYVVYFVVFPFFFVNIFVALIIITFQEQGDKMMEECSLEKNERACIDFAISAKPLTRYMPQNRHTFQYRVWHFVVSPSFEYTIMAMIALNTVVLMMKYYSAPCTYELALKYLNIAFTMVFSLECVLKVIAFGFLNYFRDTWNIFDFITVIGSITEIILTDSKLVNTSGFNMSFLKLFRAARLIKLLRQGYTIRILLWTFVQSFKALPYVCLLIAMLFFIYAIIGMQVFGNIKLDEESHINRHNNFRSFFGSLMLLFRSATGEAWQEIMLSCLGEKGCEPDTTAPSGQNENERCGTDLAYVYFVSFIFFCSFLMLNLFVAVIMDNFEYLTRDSSILGPHHLDEFVRVWAEYDRAACGRIPYKDMYKLVRVISPPLGLGENCPYRVACKRLVLMNMPVAEDMTVHFTSTLMALIRTALDIKIAKGGADRQQLDSELQKETLAIWPHLSQKMLDLLVPMPKASDLTVGKIYAAMMIMDYYKQSKVKKQRQQLEEQKNAPMFQRMEPSSLPQEIIANAKALPYLQQDPVSGLSGRSGYPSMSPLSPQDIFQLACMDPADDGQFQERQSLVVTDPSSMRRSFSTIRDKRSNSSWLEEFSMERSSENTYKSRRRSYHSSLRLSAHRLNSDSGHKSDTHRSGGRERGRSKERKHLLSPDVSRCNSEERGTQADWESPERRQSRSPSEGRSQTPNRQGTGSLSESSIPSVSDTSTPRRSRRQLPPVPPKPRPLLSYSSLIRHAGSISPPADGSEEGSPLTSQALESNNACLTESSNSPHPQQSQHASPQRYISEPYLALHEDSHASDCGEEETLTFEAAVATSLGRSNTIGSAPPLRHSWQMPNGHYRRRRRGGPGPGMMCGAVNNLLSDTEEDDKC

SEQ ID NO: 11013 - protein, 2107 aa, Artificial Sequence
  Synthetic polypeptide
GLPSHAELILATAGTHFNTHVDLRTLRAVRVLRPLKLVSGIPSLQIVLKSIMKAMVPLLQIGLLLFFAILMFAIIGLEFYSGKLHRACFMNNSGILEGFDPPHPCGVQGCPAGYECKDWIGPNDGITQFDNILFAVLTVFQCITMEGWTTVLYNTNDALGATWNWLYFIPLIIIGSFFVLNLVLGVLSGEFAKERERVENRRAFMKLRRQQQIERELNGYRAWIDKAEEVMLAEENKNAGTSALEVLRRATIKRSRTEAMTRDSSDEHCVDISSVGTPLARASIKSAKVDGVSYFRHKERLLRISIRHMVKSQVFYWIVLSLVALNTACVAIVHHNQPQWLTHLLYYAEFLFLGLFLLEMSLKMYGMGPRLYFHSSFNCFDFGVTVGSIFEVVWAIFRPGTSFGISVLRALRLLRIFKITKYWASLRNLVVSLMSSMKSIISLLFLLFLFIVVFALLGMQLFGGRFNFNDGTPSANFDTFPAAIMTVFQILTGEDWNEVMYNGIRSQGGVSSGMWSAIYFIVLTLFGNYTLLNVFLAIAVDNLANAQELTKDEQEEEEAFNQKHALQKAKEVSPMSAPNMPSIERDRRRRHHMSMWEPRSSHLRERRRRHHMSVWEQRTSQLRKHMQMSSQEALNREEAPTMNPLNPLNPLSSLNPLNAHPSLYRRPRAIEGLALGLALEKFEEERISRGGSLKGDGGDRSSALDNQRTPLSLGQREPPWLARPCHGNCDPTQQEAGGGEAVVTFEDRARHRQSQRRSRHRRVRTEGKESSSASRSRSASQERSLDEAMPTEGEKDHELRGNHGAKEPTIQEERAQDLRRTNSLMVSRGSGLAGGLDEADTPLVLPHPELEVGKHVVLTEQEPEGSSEQALLGNVQLDMGRVISQSEPDLSCITANTDKATTESTSVTVAIPDVDPLVDSTVVHISNKTDGEASPLKEAEIREDEEEVEKKKQKKEKRETGKAMVPHSSMFIFSTTNPIRRACHYIVNLRYFEMCILLVIAASSIALAAEDPVLTNSERNKVLRYFDYVFTGVFTFEMVIKMIDQGLILQDGSYFRDLWNILDFVVVVGALVAFALANALGTNKGRDIKTIKSLRVLRVLRPLKTIKRLPKLKAVFDCVVTSLKNVFNILIVYKLFMFIFAVIAVQLFKGKFFYCTDSSKDTEKECIGNYVDHEKNKMEVKGREWKRHEFHYDNIIWALLTLFTVSTGEGWPQVLQHSVDVTEEDRGPSRSNRMEMSIFYVVYFVVFPFFFVNIFVALIIITFQEQGDKMMEECSLEKNERACIDFAISAKPLTRYMPQNRHTFQYRVWHFVVSPSFEYTIMAMIALNTVVLMMKYYSAPCTYELALKYLNIAFTMVFSLECVLKVIAFGFLNYFRDTWNIFDFITVIGSITEIILTDSKLVNTSGFNMSFLKLFRAARLIKLLRQGYTIRILLWTFVQSFKALPYVCLLIAMLFFIYAIIGMQVFGNIKLDEESHINRHNNFRSFFGSLMLLFRSATGEAWQEIMLSCLGEKGCEPDTTAPSGQNENERCGTDLAYVYFVSFIFFCSFLMLNLFVAVIMDNFEYLTRDSSILGPHHLDEFVRVWAEYDRAACGRIHYTEMYEMLTLMSPPLGLGKRCPSKVAYKRLVLMNMPVAEDMTVHFTSTLMALIRTALDIKIAKGGADRQQLDSELQKETLAIWPHLSQKMLDLLVPMPKASDLTVGKIYAAMMIMDYYKQSKVKKQRQQLEEQKNAPMFQRMEPSSLPQEIIANAKALPYLQQDPVSGLSGRSGYPSMSPLSPQDIFQLACMDPADDGQFQERQSLVVTDPSSMRRSFSTIRDKRSNSSWLEEFSMERSSENTYKSRRRSYHSSLRLSAHRLNSDSGHKSDTHRSGGRERGRSKERKHLLSPDVSRCNSEERGTQADWESPERRQSRSPSEGRSQTPNRQGTGSLSESSIPSVSDTSTPRRSRRQLPPVPPKPRPLLSYSSLIRHAGSISPPADGSEEGSPLTSQALESNNACLTESSNSPHPQQSQHASPQRYISEPYLALHEDSHASDCGEEETLTFEAAVATSLGRSNTIGSAPPLRHSWQMPNGHYRRRRRGGPGPGMMCGAVNNLLSDTEEDDKC

SEQ ID NO: 11014 - protein, 2088 aa, Artificial Sequence
  Synthetic polypeptide
GLPSHAELILATAGTHFNTHVDLRTLRAVRVLRPLKLVSGIPSLQIVLKSIMKAMVPLLQIGLLLFFAILMFAIIGLEFYSGKLHRACFMNNSGILEGFDPPHPCGVQGCPAGYECKDWIGPNDGITQFDNILFAVLTVFQCITMEGWTTVLYNTNDALGATWNWLYFIPLIIIGSFFVLNLVLGVLSGEFAKERERVENRRAFMKLRRQQQIERELNGYRAWIDKAEEVMLAEENKNAGTSALEVLRRATIKRSRTEAMTRDSSDEHCVDISSVGTPLARASIKSAKVDGVSYFRHKERLLRISIRHMVKSQVFYWIVLSLVALNTACVAIVHHNQPQWLTHLLYYAEFLFLGLFLLEMSLKMYGMGPRLYFHSSFNCFDFGVTVGSIFEVVWAIFRPGTSFGISVLRALRLLRIFKITKYWASLRNLVVSLMSSMKSIISLLFLLFLFIVVFALLGMQLFGGRFNFNDGTPSANFDTFPAAIMTVFQILTGEDWNEVMYNGIRSQGGVSSGMWSAIYFIVLTLFGNYTLLNVFLAIAVDNLANAQELTKDEQEEEEAFNQKHALQKAKEVSPMSAPNMPSIERERRRRHHMSVWEQRTSQLRKHMQMSSQEALNREEAPTMNPLNPLNPLSSLNPLNAHPSLYRRPRAIEGLALGLALEKFEEERISRGGSLKGDGGDRSSALDNQRTPLSLGQREPPWLARPCHGNCDPTQQEAGGGEAVVTFEDRARHRQSQRRSRHRRVRTEGKESSSASRSRSASQERSLDEAMPTEGEKDHELRGNHGAKEPTIQEERAQDLRRTNSLMVSRGSGLAGGLDEADTPLVLPHPELEVGKHVVLTEQEPEGSSEQALLGNVQLDMGRVISQSEPDLSCITANTDKATTESTSVTVAIPDVDPLVDSTVVHISNKTDGEASPLKEAEIREDEEEVEKKKQKKEKRETGKAMVPHSSMFIFSTTNPIRRACHYIVNLRYFEMCILLVIAASSIALAAEDPVLTNSERNKVLRYFDYVFTGVFTFEMVIKMIDQGLILQDGSYFRDLWNILDFVVVVGALVAFALANALGTNKGRDIKTIKSLRVLRVLRPLKTIKRLPKLKAVFDCVVTSLKNVFNILIVYKLFMFIFAVIAVQLFKGKFFYCTDSSKDTEKECIGNYVDHEKNKMEVKGREWKRHEFHYDNIIWALLTLFTVSTGEGWPQVLQHSVDVTEEDRGPSRSNRMEMSIFYVVYFVVFPFFFVNIFVALIIITFQEQGDKMMEECSLEKNERACIDFAISAKPLTRYMPQNRHTFQYRVWHFVVSPSFEYTIMAMIALNTVVLMMKYYSAPCTYELALKYLNIAFTMVFSLECVLKVIAFGFLNYFRDTWNIFDFITVIGSITEIILTDSKLVNTSGFNMSFLKLFRAARLIKLLRQGYTIRILLWTFVQSFKALPYVCLLIAMLFFIYAIIGMQVFGNIKLDEESHINRHNNFRSFFGSLMLLFRSATGEAWQEIMLSCLGEKGCEPDTTAPSGQNENERCGTDLAYVYFVSFIFFCSFLMLNLFVAVIMDNFEYLTRDSSILGPHHLDEFVRVWAEYDRAACGRIHYTEMYEMLTLMSPPLGLGKRCPSKVAYKRLVLMNMPVAEDMTVHFTSTLMALIRTALDIKIAKGGADRQQLDSELQKETLAIWPHLSQKMLDLLVPMPKASDLTVGKIYAAMMIMDYYKQSKVKKQRQQLEEQKNAPMFQRMEPSSLPQEIIANAKALPYLQQDPVSGLSGRSGYPSMSPLSPQDIFQLACMDPADDGQFQERQSLVVTDPSSMRRSFSTIRDKRSNSSWLEEFSMERSSENTYKSRRRSYHSSLRLSAHRLNSDSGHKSDTHRSGGRERGRSKERKHLLSPDVSRCNSEERGTQADWESPERRQSRSPSEGRSQTPNRQGTGSLSESSIPSVSDTSTPRRSRRQLPPVPPKPRPLLSYSSLIRHAGSISPPADGSEEGSPLTSQALESNNACLTESSNSPHPQQSQHASPQRYISEPYLALHEDSHASDCGEEETLTFEAAVATSLGRSNTIGSAPPLRHSWQMPNGHYRRRRRGGPGPGMMCGAVNNLLSDTEEDDKC

SEQ ID NO: 11015 - protein, 2131 aa, Artificial Sequence
  Synthetic polypeptide
GLPSHAELILATAGTHFNTHVDLRTLRAVRVLRPLKLVSGIPSLQIVLKSIMKAMVPLLQIGLLLFFAILMFAIIGLEFYSGKLHRACFMNNSGILEGFDPPHPCGVQGCPAGYECKDWIGPNDGITQFDNILFAVLTVFQCITMEGWTTVLYNTNDALGATWNWLYFIPLIIIGSFFVLNLVLGVLSGEFAKERERVENRRAFMKLRRQQQIERELNGYRAWIDKAEEVMLAEENKNAGTSALEVLRRATIKRSRTEAMTRDSSDEHCVDISSVGTPLARASIKSAKVDGVSYFRHKERLLRISIRHMVKSQVFYWIVLSLVALNTACVAIVHHNQPQWLTHLLYYAEFLFLGLFLLEMSLKMYGMGPRLYFHSSFNCFDFGVTVGSIFEVVWAIFRPGTSFGISVLRALRLLRIFKITKYWASLRNLVVSLMSSMKSIISLLFLLFLFIVVFALLGMQLFGGRFNFNDGTPSANFDTFPAAIMTVFQILTGEDWNEVMYNGIRSQGGVSSGMWSAIYFIVLTLFGNYTLLNVFLAIAVDNLANAQELTKDEQEEEEAFNQKHALQKAKEVSPMSAPNMPSIERERRRRHHMSVWEQRTSQLRKHMQMSSQEALNREEAPTMNPLNPLNPLSSLNPLNAHPSLYRRPRAIEGLALGLALEKFEEERISRGGSLKGDGGDRSSALDNQRTPLSLGQREPPWLARPCHGNCDPTQQEAGGGEAVVTFEDRARHRQSQRRSRHRRVRTEGKESSSASRSRSASQERSLDEAMPTEGEKDHELRGNHGAKEPTIQEERAQDLRRTNSLMVSRGSGLAGGLDEADTPLVLPHPELEVGKHVVLTEQEPEGSSEQALLGNVQLDMGRVISQSEPDLSCITANTDKATTESTSVTVAIPDVDPLVDSTVVHISNKTDGEASPLKEAEIREDEEEVEKKKQKKEKRETGKAMVPHSSMFIFSTTNPIRRACHYIVNLRYFEMCILLVIAASSIALAAEDPVLTNSERNKVLRYFDYVFTGVFTFEMVIKMIDQGLILQDGSYFRDLWNILDFVVVVGALVAFALANALGTNKGRDIKTIKSLRVLRVLRPLKTIKRLPKLKAVFDCVVTSLKNVFNILIVYKLFMFIFAVIAVQLFKGKFFYCTDSSKDTEKECIGNYVDHEKNKMEVKGREWKRHEFHYDNIIWALLTLFTVSTGEGWPQVLQHSVDVTEEDRGPSRSNRMEMSIFYVVYFVVFPFFFVNIFVALIIITFQEQGDKMMEECSLEKNERACIDFAISAKPLTRYMPQNRHTFQYRVWHFVVSPSFEYTIMAMIALNTVVLMMKYYSAPCTYELALKYLNIAFTMVFSLECVLKVIAFGFLNYFRDTWNIFDFITVIGSITEIILTDSKLVNTSGFNMSFLKLFRAARLIKLLRQGYTIRILLWTFVQSFKALPYVCLLIAMLFFIYAIIGMQVFGNIKLDEESHINRHNNFRSFFGSLMLLFRSATGEAWQEIMLSCLGEKGCEPDTTAPSGQNENERCGTDLAYVYFVSFIFFCSFLMLNLFVAVIMDNFEYLTRDSSILGPHHLDEFVRVWAEYDRAACGRIHYTEMYEMLTLMSPPLGLGKRCPSKVAYKRLVLMNMPVAEDMTVHFTSTLMALIRTALDIKIAKGGADRQQLDSELQKETLAIWPHLSQKMLDLLVPMPKASDLTVGKIYAAMMIMDYYKQSKVKKQRQQLEEQKNAPMFQRMEPSSLPQEIIANAKALPYLQQDPVSGLSGRSGYPSMSPLSPQDIFQLACMDPADDGQFQERQSLEPEVSELKSVQPSNHGIYLPSDTQEHAGSGRASSMPRLTVDPQVVTDPSSMRRSFSTIRDKRSNSSWLEEFSMERSSENTYKSRRRSYHSSLRLSAHRLNSDSGHKSDTHRSGGRERGRSKERKHLLSPDVSRCNSEERGTQADWESPERRQSRSPSEGRSQTPNRQGTGSLSESSIPSVSDTSTPRRSRRQLPPVPPKPRPLLSYSSLIRHAGSISPPADGSEEGSPLTSQALESNNACLTESSNSPHPQQSQHASPQRYISEPYLALHEDSHASDCGEEETLTFEAAVATSLGRSNTIGSAPPLRHSWQMPNGHYRRRRRGGPGPGMMCGAVNNLLSDTEEDDKC

SEQ ID NO: 11016 - protein, 2150 aa, Artificial Sequence
  Synthetic polypeptide
GLPSHAELILATAGTHFNTHVDLRTLRAVRVLRPLKLVSGIPSLQIVLKSIMKAMVPLLQIGLLLFFAILMFAIIGLEFYSGKLHRACFMNNSGILEGFDPPHPCGVQGCPAGYECKDWIGPNDGITQFDNILFAVLTVFQCITMEGWTTVLYNTNDALGATWNWLYFIPLIIIGSFFVLNLVLGVLSGEFAKERERVENRRAFMKLRRQQQIERELNGYRAWIDKAEEVMLAEENKNAGTSALEVLRRATIKRSRTEAMTRDSSDEHCVDISSVGTPLARASIKSAKVDGVSYFRHKERLLRISIRHMVKSQVFYWIVLSLVALNTACVAIVHHNQPQWLTHLLYYAEFLFLGLFLLEMSLKMYGMGPRLYFHSSFNCFDFGVTVGSIFEVVWAIFRPGTSFGISVLRALRLLRIFKITKYWASLRNLVVSLMSSMKSIISLLFLLFLFIVVFALLGMQLFGGRFNFNDGTPSANFDTFPAAIMTVFQILTGEDWNEVMYNGIRSQGGVSSGMWSAIYFIVLTLFGNYTLLNVFLAIAVDNLANAQELTKDEQEEEEAFNQKHALQKAKEVSPMSAPNMPSIERDRRRRHHMSMWEPRSSHLRERRRRHHMSVWEQRTSQLRKHMQMSSQEALNREEAPTMNPLNPLNPLSSLNPLNAHPSLYRRPRAIEGLALGLALEKFEEERISRGGSLKGDGGDRSSALDNQRTPLSLGQREPPWLARPCHGNCDPTQQEAGGGEAVVTFEDRARHRQSQRRSRHRRVRTEGKESSSASRSRSASQERSLDEAMPTEGEKDHELRGNHGAKEPTIQEERAQDLRRTNSLMVSRGSGLAGGLDEADTPLVLPHPELEVGKHVVLTEQEPEGSSEQALLGNVQLDMGRVISQSEPDLSCITANTDKATTESTSVTVAIPDVDPLVDSTVVHISNKTDGEASPLKEAEIREDEEEVEKKKQKKEKRETGKAMVPHSSMFIFSTTNPIRRACHYIVNLRYFEMCILLVIAASSIALAAEDPVLTNSERNKVLRYFDYVFTGVFTFEMVIKMIDQGLILQDGSYFRDLWNILDFVVVVGALVAFALANALGTNKGRDIKTIKSLRVLRVLRPLKTIKRLPKLKAVFDCVVTSLKNVFNILIVYKLFMFIFAVIAVQLFKGKFFYCTDSSKDTEKECIGNYVDHEKNKMEVKGREWKRHEFHYDNIIWALLTLFTVSTGEGWPQVLQHSVDVTEEDRGPSRSNRMEMSIFYVVYFVVFPFFFVNIFVALIIITFQEQGDKMMEECSLEKNERACIDFAISAKPLTRYMPQNRHTFQYRVWHFVVSPSFEYTIMAMIALNTVVLMMKYYSAPCTYELALKYLNIAFTMVFSLECVLKVIAFGFLNYFRDTWNIFDFITVIGSITEIILTDSKLVNTSGFNMSFLKLFRAARLIKLLRQGYTIRILLWTFVQSFKALPYVCLLIAMLFFIYAIIGMQVFGNIKLDEESHINRHNNFRSFFGSLMLLFRSATGEAWQEIMLSCLGEKGCEPDTTAPSGQNENERCGTDLAYVYFVSFIFFCSFLMLNLFVAVIMDNFEYLTRDSSILGPHHLDEFVRVWAEYDRAACGRIHYTEMYEMLTLMSPPLGLGKRCPSKVAYKRLVLMNMPVAEDMTVHFTSTLMALIRTALDIKIAKGGADRQQLDSELQKETLAIWPHLSQKMLDLLVPMPKASDLTVGKIYAAMMIMDYYKQSKVKKQRQQLEEQKNAPMFQRMEPSSLPQEIIANAKALPYLQQDPVSGLSGRSGYPSMSPLSPQDIFQLACMDPADDGQFQERQSLEPEVSELKSVQPSNHGIYLPSDTQEHAGSGRASSMPRLTVDPQVVTDPSSMRRSFSTIRDKRSNSSWLEEFSMERSSENTYKSRRRSYHSSLRLSAHRLNSDSGHKSDTHRSGGRERGRSKERKHLLSPDVSRCNSEERGTQADWESPERRQSRSPSEGRSQTPNRQGTGSLSESSIPSVSDTSTPRRSRRQLPPVPPKPRPLLSYSSLIRHAGSISPPADGSEEGSPLTSQALESNNACLTESSNSPHPQQSQHASPQRYISEPYLALHEDSHASDCGEEETLTFEAAVATSLGRSNTIGSAPPLRHSWQMPNGHYRRRRRGGPGPGMMCGAVNNLLSDTEEDDKC

SEQ ID NO: 11017 - protein, 10 aa, Artificial Sequence
  Synthetic polypeptide
EYSNSVYYDQ

SEQ ID NO: 11018 - protein, 143 aa, Artificial Sequence
  Synthetic polypeptide
PFCIVFSCAKQECENIPTQYIMTNDALGATWNWLYFIPLIIIGSFFVLNLVLGVLSGEFAKERERVENRRAFMKLRRQQQIERELNGYRAWIDKAEEVMLAEENKNAGTSALEVLRRATIKRSRTEAMTRDSSDEHCVDISSV

SEQ ID NO: 11019 - protein, 2018 aa, Artificial Sequence
  Synthetic polypeptide
PFCIVFSCAKQECENIPTQYIMTNDALGATWNWLYFIPLIIIGSFFVLNLVLGVLSGEFAKERERVENRRAFMKLRRQQQIERELNGYRAWIDKAEEVMLAEENKNAGTSALEVLRRATIKRSRTEAMTRDSSDEHCVDISSVGTPLARASIKSAKVDGVSYFRHKERLLRISIRHMVKSQVFYWIVLSLVALNTACVAIVHHNQPQWLTHLLYYAEFLFLGLFLLEMSLKMYGMGPRLYFHSSFNCFDFGVTVGSIFEVVWAIFRPGTSFGISVLRALRLLRIFKITKYWASLRNLVVSLMSSMKSIISLLFLLFLFIVVFALLGMQLFGGRFNFNDGTPSANFDTFPAAIMTVFQILTGEDWNEVMYNGIRSQGGVSSGMWSAIYFIVLTLFGNYTLLNVFLAIAVDNLANAQELTKDEQEEEEAFNQKHALQKAKEVSPMSAPNMPSIERDRRRRHHMSMWEPRSSHLRERRRRHHMSVWEQRTSQLRKHMQMSSQEALNREEAPTMNPLNPLNPLSSLNPLNAHPSLYRRPRAIEGLALGLALEKFEEERISRGGSLKGDGGDRSSALDNQRTPLSLGQREPPWLARPCHGNCDPTQQEAGGGEAVVTFEDRARHRQSQRRSRHRRVRTEGKESSSASRSRSASQERSLDEAMPTEGEKDHELRGNHGAKEPTIQEERAQDLRRTNSLMVSRGSGLAGGLDEADTPLVLPHPELEVGKHVVLTEQEPEGSSEQALLGNVQLDMGRVISQSEPDLSCITANTDKATTESTSVTVAIPDVDPLVDSTVVHISNKTDGEASPLKEAEIREDEEEVEKKKQKKEKRETGKAMVPHSSMFIFSTTNPIRRACHYIVNLRYFEMCILLVIAASSIALAAEDPVLTNSERNKVLRYFDYVFTGVFTFEMVIKMIDQGLILQDGSYFRDLWNILDFVVVVGALVAFALANSMKTNKGRDIKTIKSLRVLRVLRPLKTIKRLPKLKAVFDCVVTSLKNVFNILIVYKLFMFIFAVIAVQLFKGKFFYCTDSSKDTEKECIGNYVDHEKNKMEVKGREWKRHEFHYDNIIWALLTLFTVSTGEGWPQVLQHSVDVTEEDRGPSRSNRMEMSIFYVVYFVVFPFFFVNIFVALIIITFQEQGDKMMEECSLEKNERACIDFAISAKPLTRYMPQNRHTFQYRVWHFVVSPSFEYTIMAMIALNTVVLMMKYYSAPCTYELALKYLNIAFTMVFSLECVLKVIAFGFLNYFRDTWNIFDFITVIGSITEIILTDSKLVNTSGFNMSFLKLFRAARLIKLLRQGYTIRILLWTFVQSFKALPYVCLLIAMLFFIYAIIGMQVFGNIKLDEESHINRHNNFRSFFGSLMLLFRSATGEAWQEIMLSCLGEKGCEPDTTAPSGQNENERCGTDLAYVYFVSFIFFCSFLMLNLFVAVIMDNFEYLTRDSSILGPHHLDEFVRVWAEYDRAACGRIHYTEMYEMLTLMSPPLGLGKRCPSKVAYKRLVLMNMPVAEDMTVHFTSTLMALIRTALDIKIAKGGADRQQLDSELQKETLAIWPHLSQKMLDLLVPMPKASDLTVGKIYAAMMIMDYYKQSKVKKQRQQLEEQKNAPMFQRMEPSSLPQEIIANAKALPYLQQDPVSGLSGRSGYPSMSPLSPQDIFQLACMDPADDGQFQERQSLEPEVSELKSVQPSNHGIYLPSDTQEHAGSGRASSMPRLTVDPQVVTDPSSMRRSFSTIRDKRSNSSWLEEFSMERSSENTYKSRRRSYHSSLRLSAHRLNSDSGHKSDTHRSGGRERGRSKERKHLLSPDVSRCNSEERGTQADWESPERRQSRSPSEGRSQTPNRQGTGSLSESSIPSVSDTSTPRRSRRQLPPVPPKPRPLLSYSSLIRHAGSISPPADGSEEGSPLTSQALESNNACLTESSNSPHPQQSQHASPQRYISEPYLALHEDSHASDCGEEETLTFEAAVATSLGRSNTIGSAPPLRHSWQMPNGHYRRRRRGGPGPGMMCGAVNNLLSDTEEDDKC

SEQ ID NO: 11020 - protein, 1956 aa, Artificial Sequence
  Synthetic polypeptide
PFCIVFSCAKQECENIPTQYIMTNDALGATWNWLYFIPLIIIGSFFVLNLVLGVLSGEFAKERERVENRRAFMKLRRQQQIERELNGYRAWIDKAEEVMLAEENKNAGTSALEVLRRATIKRSRTEAMTRDSSDEHCVDISSVGTPLARASIKSAKVDGVSYFRHKERLLRISIRHMVKSQVFYWIVLSLVALNTACVAIVHHNQPQWLTHLLYYAEFLFLGLFLLEMSLKMYGMGPRLYFHSSFNCFDFGVTVGSIFEVVWAIFRPGTSFGISVLRALRLLRIFKITKYWASLRNLVVSLMSSMKSIISLLFLLFLFIVVFALLGMQLFGGRFNFNDGTPSANFDTFPAAIMTVFQILTGEDWNEVMYNGIRSQGGVSSGMWSAIYFIVLTLFGNYTLLNVFLAIAVDNLANAQELTKDEQEEEEAFNQKHALQKAKEVSPMSAPNMPSIERERRRRHHMSVWEQRTSQLRKHMQMSSQEALNREEAPTMNPLNPLNPLSSLNPLNAHPSLYRRPRAIEGLALGLALEKFEEERISRGGSLKGDGGDRSSALDNQRTPLSLGQREPPWLARPCHGNCDPTQQEAGGGEAVVTFEDRARHRQSQRRSRHRRVRTEGKESSSASRSRSASQERSLDEAMPTEGEKDHELRGNHGAKEPTIQEERAQDLRRTNSLMVSRGSGLAGGLDEADTPLVLPHPELEVGKHVVLTEQEPEGSSEQALLGNVQLDMGRVISQSEPDLSCITANTDKATTESTSVTVAIPDVDPLVDSTVVHISNKTDGEASPLKEAEIREDEEEVEKKKQKKEKRETGKAMVPHSSMFIFSTTNPIRRACHYIVNLRYFEMCILLVIAASSIALAAEDPVLTNSERNKVLRYFDYVFTGVFTFEMVIKMIDQGLILQDGSYFRDLWNILDFVVVVGALVAFALANSMKTNKGRDIKTIKSLRVLRVLRPLKTIKRLPKLKAVFDCVVTSLKNVFNILIVYKLFMFIFAVIAVQLFKGKFFYCTDSSKDTEKECIGNYVDHEKNKMEVKGREWKRHEFHYDNIIWALLTLFTVSTGEGWPQVLQHSVDVTEEDRGPSRSNRMEMSIFYVVYFVVFPFFFVNIFVALIIITFQEQGDKMMEECSLEKNERACIDFAISAKPLTRYMPQNRHTFQYRVWHFVVSPSFEYTIMAMIALNTVVLMMKYYSAPCTYELALKYLNIAFTMVFSLECVLKVIAFGFLNYFRDTWNIFDFITVIGSITEIILTDSKLVNTSGFNMSFLKLFRAARLIKLLRQGYTIRILLWTFVQSFKALPYVCLLIAMLFFIYAIIGMQVFGNIKLDEESHINRHNNFRSFFGSLMLLFRSATGEAWQEIMLSCLGEKGCEPDTTAPSGQNENERCGTDLAYVYFVSFIFFCSFLMLNLFVAVIMDNFEYLTRDSSILGPHHLDEFVRVWAEYDRAACGRIPYKDMYKLVRVISPPLGLGENCPYRVACKRLVLMNMPVAEDMTVHFTSTLMALIRTALDIKIAKGGADRQQLDSELQKETLAIWPHLSQKMLDLLVPMPKASDLTVGKIYAAMMIMDYYKQSKVKKQRQQLEEQKNAPMFQRMEPSSLPQEIIANAKALPYLQQDPVSGLSGRSGYPSMSPLSPQDIFQLACMDPADDGQFQERQSLVVTDPSSMRRSFSTIRDKRSNSSWLEEFSMERSSENTYKSRRRSYHSSLRLSAHRLNSDSGHKSDTHRSGGRERGRSKERKHLLSPDVSRCNSEERGTQADWESPERRQSRSPSEGRSQTPNRQGTGSLSESSIPSVSDTSTPRRSRRQLPPVPPKPRPLLSYSSLIRHAGSISPPADGSEEGSPLTSQALESNNACLTESSNSPHPQQSQHASPQRYISEPYLALHEDSHASDCGEEETLTFEAAVATSLGRSNTIGSAPPLRHSWQMPNGHYRRRRRGGPGPGMMCGAVNNLLSDTEEDDKC

SEQ ID NO: 11021 - protein, 1975 aa, Artificial Sequence
  Synthetic polypeptide
PFCIVFSCAKQECENIPTQYIMTNDALGATWNWLYFIPLIIIGSFFVLNLVLGVLSGEFAKERERVENRRAFMKLRRQQQIERELNGYRAWIDKAEEVMLAEENKNAGTSALEVLRRATIKRSRTEAMTRDSSDEHCVDISSVGTPLARASIKSAKVDGVSYFRHKERLLRISIRHMVKSQVFYWIVLSLVALNTACVAIVHHNQPQWLTHLLYYAEFLFLGLFLLEMSLKMYGMGPRLYFHSSFNCFDFGVTVGSIFEVVWAIFRPGTSFGISVLRALRLLRIFKITKYWASLRNLVVSLMSSMKSIISLLFLLFLFIVVFALLGMQLFGGRFNFNDGTPSANFDTFPAAIMTVFQILTGEDWNEVMYNGIRSQGGVSSGMWSAIYFIVLTLFGNYTLLNVFLAIAVDNLANAQELTKDEQEEEEAFNQKHALQKAKEVSPMSAPNMPSIERDRRRRHHMSMWEPRSSHLRERRRRHHMSVWEQRTSQLRKHMQMSSQEALNREEAPTMNPLNPLNPLSSLNPLNAHPSLYRRPRAIEGLALGLALEKFEEERISRGGSLKGDGGDRSSALDNQRTPLSLGQREPPWLARPCHGNCDPTQQEAGGGEAVVTFEDRARHRQSQRRSRHRRVRTEGKESSSASRSRSASQERSLDEAMPTEGEKDHELRGNHGAKEPTIQEERAQDLRRTNSLMVSRGSGLAGGLDEADTPLVLPHPELEVGKHVVLTEQEPEGSSEQALLGNVQLDMGRVISQSEPDLSCITANTDKATTESTSVTVAIPDVDPLVDSTVVHISNKTDGEASPLKEAEIREDEEEVEKKKQKKEKRETGKAMVPHSSMFIFSTTNPIRRACHYIVNLRYFEMCILLVIAASSIALAAEDPVLTNSERNKVLRYFDYVFTGVFTFEMVIKMIDQGLILQDGSYFRDLWNILDFVVVVGALVAFALANALGTNKGRDIKTIKSLRVLRVLRPLKTIKRLPKLKAVFDCVVTSLKNVFNILIVYKLFMFIFAVIAVQLFKGKFFYCTDSSKDTEKECIGNYVDHEKNKMEVKGREWKRHEFHYDNIIWALLTLFTVSTGEGWPQVLQHSVDVTEEDRGPSRSNRMEMSIFYVVYFVVFPFFFVNIFVALIIITFQEQGDKMMEECSLEKNERACIDFAISAKPLTRYMPQNRHTFQYRVWHFVVSPSFEYTIMAMIALNTVVLMMKYYSAPCTYELALKYLNIAFTMVFSLECVLKVIAFGFLNYFRDTWNIFDFITVIGSITEIILTDSKLVNTSGFNMSFLKLFRAARLIKLLRQGYTIRILLWTFVQSFKALPYVCLLIAMLFFIYAIIGMQVFGNIKLDEESHINRHNNFRSFFGSLMLLFRSATGEAWQEIMLSCLGEKGCEPDTTAPSGQNENERCGTDLAYVYFVSFIFFCSFLMLNLFVAVIMDNFEYLTRDSSILGPHHLDEFVRVWAEYDRAACGRIHYTEMYEMLTLMSPPLGLGKRCPSKVAYKRLVLMNMPVAEDMTVHFTSTLMALIRTALDIKIAKGGADRQQLDSELQKETLAIWPHLSQKMLDLLVPMPKASDLTVGKIYAAMMIMDYYKQSKVKKQRQQLEEQKNAPMFQRMEPSSLPQEIIANAKALPYLQQDPVSGLSGRSGYPSMSPLSPQDIFQLACMDPADDGQFQERQSLVVTDPSSMRRSFSTIRDKRSNSSWLEEFSMERSSENTYKSRRRSYHSSLRLSAHRLNSDSGHKSDTHRSGGRERGRSKERKHLLSPDVSRCNSEERGTQADWESPERRQSRSPSEGRSQTPNRQGTGSLSESSIPSVSDTSTPRRSRRQLPPVPPKPRPLLSYSSLIRHAGSISPPADGSEEGSPLTSQALESNNACLTESSNSPHPQQSQHASPQRYISEPYLALHEDSHASDCGEEETLTFEAAVATSLGRSNTIGSAPPLRHSWQMPNGHYRRRRRGGPGPGMMCGAVNNLLSDTEEDDKC

SEQ ID NO: 11022 - protein, 1956 aa, Artificial Sequence
  Synthetic polypeptide
PFCIVFSCAKQECENIPTQYIMTNDALGATWNWLYFIPLIIIGSFFVLNLVLGVLSGEFAKERERVENRRAFMKLRRQQQIERELNGYRAWIDKAEEVMLAEENKNAGTSALEVLRRATIKRSRTEAMTRDSSDEHCVDISSVGTPLARASIKSAKVDGVSYFRHKERLLRISIRHMVKSQVFYWIVLSLVALNTACVAIVHHNQPQWLTHLLYYAEFLFLGLFLLEMSLKMYGMGPRLYFHSSFNCFDFGVTVGSIFEVVWAIFRPGTSFGISVLRALRLLRIFKITKYWASLRNLVVSLMSSMKSIISLLFLLFLFIVVFALLGMQLFGGRFNFNDGTPSANFDTFPAAIMTVFQILTGEDWNEVMYNGIRSQGGVSSGMWSAIYFIVLTLFGNYTLLNVFLAIAVDNLANAQELTKDEQEEEEAFNQKHALQKAKEVSPMSAPNMPSIERERRRRHHMSVWEQRTSQLRKHMQMSSQEALNREEAPTMNPLNPLNPLSSLNPLNAHPSLYRRPRAIEGLALGLALEKFEEERISRGGSLKGDGGDRSSALDNQRTPLSLGQREPPWLARPCHGNCDPTQQEAGGGEAVVTFEDRARHRQSQRRSRHRRVRTEGKESSSASRSRSASQERSLDEAMPTEGEKDHELRGNHGAKEPTIQEERAQDLRRTNSLMVSRGSGLAGGLDEADTPLVLPHPELEVGKHVVLTEQEPEGSSEQALLGNVQLDMGRVISQSEPDLSCITANTDKATTESTSVTVAIPDVDPLVDSTVVHISNKTDGEASPLKEAEIREDEEEVEKKKQKKEKRETGKAMVPHSSMFIFSTTNPIRRACHYIVNLRYFEMCILLVIAASSIALAAEDPVLTNSERNKVLRYFDYVFTGVFTFEMVIKMIDQGLILQDGSYFRDLWNILDFVVVVGALVAFALANALGTNKGRDIKTIKSLRVLRVLRPLKTIKRLPKLKAVFDCVVTSLKNVFNILIVYKLFMFIFAVIAVQLFKGKFFYCTDSSKDTEKECIGNYVDHEKNKMEVKGREWKRHEFHYDNIIWALLTLFTVSTGEGWPQVLQHSVDVTEEDRGPSRSNRMEMSIFYVVYFVVFPFFFVNIFVALIIITFQEQGDKMMEECSLEKNERACIDFAISAKPLTRYMPQNRHTFQYRVWHFVVSPSFEYTIMAMIALNTVVLMMKYYSAPCTYELALKYLNIAFTMVFSLECVLKVIAFGFLNYFRDTWNIFDFITVIGSITEIILTDSKLVNTSGFNMSFLKLFRAARLIKLLRQGYTIRILLWTFVQSFKALPYVCLLIAMLFFIYAIIGMQVFGNIKLDEESHINRHNNFRSFFGSLMLLFRSATGEAWQEIMLSCLGEKGCEPDTTAPSGQNENERCGTDLAYVYFVSFIFFCSFLMLNLFVAVIMDNFEYLTRDSSILGPHHLDEFVRVWAEYDRAACGRIHYTEMYEMLTLMSPPLGLGKRCPSKVAYKRLVLMNMPVAEDMTVHFTSTLMALIRTALDIKIAKGGADRQQLDSELQKETLAIWPHLSQKMLDLLVPMPKASDLTVGKIYAAMMIMDYYKQSKVKKQRQQLEEQKNAPMFQRMEPSSLPQEIIANAKALPYLQQDPVSGLSGRSGYPSMSPLSPQDIFQLACMDPADDGQFQERQSLVVTDPSSMRRSFSTIRDKRSNSSWLEEFSMERSSENTYKSRRRSYHSSLRLSAHRLNSDSGHKSDTHRSGGRERGRSKERKHLLSPDVSRCNSEERGTQADWESPERRQSRSPSEGRSQTPNRQGTGSLSESSIPSVSDTSTPRRSRRQLPPVPPKPRPLLSYSSLIRHAGSISPPADGSEEGSPLTSQALESNNACLTESSNSPHPQQSQHASPQRYISEPYLALHEDSHASDCGEEETLTFEAAVATSLGRSNTIGSAPPLRHSWQMPNGHYRRRRRGGPGPGMMCGAVNNLLSDTEEDDKC

SEQ ID NO: 11023 - protein, 1999 aa, Artificial Sequence
  Synthetic polypeptide
PFCIVFSCAKQECENIPTQYIMTNDALGATWNWLYFIPLIIIGSFFVLNLVLGVLSGEFAKERERVENRRAFMKLRRQQQIERELNGYRAWIDKAEEVMLAEENKNAGTSALEVLRRATIKRSRTEAMTRDSSDEHCVDISSVGTPLARASIKSAKVDGVSYFRHKERLLRISIRHMVKSQVFYWIVLSLVALNTACVAIVHHNQPQWLTHLLYYAEFLFLGLFLLEMSLKMYGMGPRLYFHSSFNCFDFGVTVGSIFEVVWAIFRPGTSFGISVLRALRLLRIFKITKYWASLRNLVVSLMSSMKSIISLLFLLFLFIVVFALLGMQLFGGRFNFNDGTPSANFDTFPAAIMTVFQILTGEDWNEVMYNGIRSQGGVSSGMWSAIYFIVLTLFGNYTLLNVFLAIAVDNLANAQELTKDEQEEEEAFNQKHALQKAKEVSPMSAPNMPSIERERRRRHHMSVWEQRTSQLRKHMQMSSQEALNREEAPTMNPLNPLNPLSSLNPLNAHPSLYRRPRAIEGLALGLALEKFEEERISRGGSLKGDGGDRSSALDNQRTPLSLGQREPPWLARPCHGNCDPTQQEAGGGEAVVTFEDRARHRQSQRRSRHRRVRTEGKESSSASRSRSASQERSLDEAMPTEGEKDHELRGNHGAKEPTIQEERAQDLRRTNSLMVSRGSGLAGGLDEADTPLVLPHPELEVGKHVVLTEQEPEGSSEQALLGNVQLDMGRVISQSEPDLSCITANTDKATTESTSVTVAIPDVDPLVDSTVVHISNKTDGEASPLKEAEIREDEEEVEKKKQKKEKRETGKAMVPHSSMFIFSTTNPIRRACHYIVNLRYFEMCILLVIAASSIALAAEDPVLTNSERNKVLRYFDYVFTGVFTFEMVIKMIDQGLILQDGSYFRDLWNILDFVVVVGALVAFALANALGTNKGRDIKTIKSLRVLRVLRPLKTIKRLPKLKAVFDCVVTSLKNVFNILIVYKLFMFIFAVIAVQLFKGKFFYCTDSSKDTEKECIGNYVDHEKNKMEVKGREWKRHEFHYDNIIWALLTLFTVSTGEGWPQVLQHSVDVTEEDRGPSRSNRMEMSIFYVVYFVVFPFFFVNIFVALIIITFQEQGDKMMEECSLEKNERACIDFAISAKPLTRYMPQNRHTFQYRVWHFVVSPSFEYTIMAMIALNTVVLMMKYYSAPCTYELALKYLNIAFTMVFSLECVLKVIAFGFLNYFRDTWNIFDFITVIGSITEIILTDSKLVNTSGFNMSFLKLFRAARLIKLLRQGYTIRILLWTFVQSFKALPYVCLLIAMLFFIYAIIGMQVFGNIKLDEESHINRHNNFRSFFGSLMLLFRSATGEAWQEIMLSCLGEKGCEPDTTAPSGQNENERCGTDLAYVYFVSFIFFCSFLMLNLFVAVIMDNFEYLTRDSSILGPHHLDEFVRVWAEYDRAACGRIHYTEMYEMLTLMSPPLGLGKRCPSKVAYKRLVLMNMPVAEDMTVHFTSTLMALIRTALDIKIAKGGADRQQLDSELQKETLAIWPHLSQKMLDLLVPMPKASDLTVGKIYAAMMIMDYYKQSKVKKQRQQLEEQKNAPMFQRMEPSSLPQEIIANAKALPYLQQDPVSGLSGRSGYPSMSPLSPQDIFQLACMDPADDGQFQERQSLEPEVSELKSVQPSNHGIYLPSDTQEHAGSGRASSMPRLTVDPQVVTDPSSMRRSFSTIRDKRSNSSWLEEFSMERSSENTYKSRRRSYHSSLRLSAHRLNSDSGHKSDTHRSGGRERGRSKERKHLLSPDVSRCNSEERGTQADWESPERRQSRSPSEGRSQTPNRQGTGSLSESSIPSVSDTSTPRRSRRQLPPVPPKPRPLLSYSSLIRHAGSISPPADGSEEGSPLTSQALESNNACLTESSNSPHPQQSQHASPQRYISEPYLALHEDSHASDCGEEETLTFEAAVATSLGRSNTIGSAPPLRHSWQMPNGHYRRRRRGGPGPGMMCGAVNNLLSDTEEDDKC

SEQ ID NO: 11024 - protein, 2018 aa, Artificial Sequence
  Synthetic polypeptide
PFCIVFSCAKQECENIPTQYIMTNDALGATWNWLYFIPLIIIGSFFVLNLVLGVLSGEFAKERERVENRRAFMKLRRQQQIERELNGYRAWIDKAEEVMLAEENKNAGTSALEVLRRATIKRSRTEAMTRDSSDEHCVDISSVGTPLARASIKSAKVDGVSYFRHKERLLRISIRHMVKSQVFYWIVLSLVALNTACVAIVHHNQPQWLTHLLYYAEFLFLGLFLLEMSLKMYGMGPRLYFHSSFNCFDFGVTVGSIFEVVWAIFRPGTSFGISVLRALRLLRIFKITKYWASLRNLVVSLMSSMKSIISLLFLLFLFIVVFALLGMQLFGGRFNFNDGTPSANFDTFPAAIMTVFQILTGEDWNEVMYNGIRSQGGVSSGMWSAIYFIVLTLFGNYTLLNVFLAIAVDNLANAQELTKDEQEEEEAFNQKHALQKAKEVSPMSAPNMPSIERDRRRRHHMSMWEPRSSHLRERRRRHHMSVWEQRTSQLRKHMQMSSQEALNREEAPTMNPLNPLNPLSSLNPLNAHPSLYRRPRAIEGLALGLALEKFEEERISRGGSLKGDGGDRSSALDNQRTPLSLGQREPPWLARPCHGNCDPTQQEAGGGEAVVTFEDRARHRQSQRRSRHRRVRTEGKESSSASRSRSASQERSLDEAMPTEGEKDHELRGNHGAKEPTIQEERAQDLRRTNSLMVSRGSGLAGGLDEADTPLVLPHPELEVGKHVVLTEQEPEGSSEQALLGNVQLDMGRVISQSEPDLSCITANTDKATTESTSVTVAIPDVDPLVDSTVVHISNKTDGEASPLKEAEIREDEEEVEKKKQKKEKRETGKAMVPHSSMFIFSTTNPIRRACHYIVNLRYFEMCILLVIAASSIALAAEDPVLTNSERNKVLRYFDYVFTGVFTFEMVIKMIDQGLILQDGSYFRDLWNILDFVVVVGALVAFALANALGTNKGRDIKTIKSLRVLRVLRPLKTIKRLPKLKAVFDCVVTSLKNVFNILIVYKLFMFIFAVIAVQLFKGKFFYCTDSSKDTEKECIGNYVDHEKNKMEVKGREWKRHEFHYDNIIWALLTLFTVSTGEGWPQVLQHSVDVTEEDRGPSRSNRMEMSIFYVVYFVVFPFFFVNIFVALIIITFQEQGDKMMEECSLEKNERACIDFAISAKPLTRYMPQNRHTFQYRVWHFVVSPSFEYTIMAMIALNTVVLMMKYYSAPCTYELALKYLNIAFTMVFSLECVLKVIAFGFLNYFRDTWNIFDFITVIGSITEIILTDSKLVNTSGFNMSFLKLFRAARLIKLLRQGYTIRILLWTFVQSFKALPYVCLLIAMLFFIYAIIGMQVFGNIKLDEESHINRHNNFRSFFGSLMLLFRSATGEAWQEIMLSCLGEKGCEPDTTAPSGQNENERCGTDLAYVYFVSFIFFCSFLMLNLFVAVIMDNFEYLTRDSSILGPHHLDEFVRVWAEYDRAACGRIHYTEMYEMLTLMSPPLGLGKRCPSKVAYKRLVLMNMPVAEDMTVHFTSTLMALIRTALDIKIAKGGADRQQLDSELQKETLAIWPHLSQKMLDLLVPMPKASDLTVGKIYAAMMIMDYYKQSKVKKQRQQLEEQKNAPMFQRMEPSSLPQEIIANAKALPYLQQDPVSGLSGRSGYPSMSPLSPQDIFQLACMDPADDGQFQERQSLEPEVSELKSVQPSNHGIYLPSDTQEHAGSGRASSMPRLTVDPQVVTDPSSMRRSFSTIRDKRSNSSWLEEFSMERSSENTYKSRRRSYHSSLRLSAHRLNSDSGHKSDTHRSGGRERGRSKERKHLLSPDVSRCNSEERGTQADWESPERRQSRSPSEGRSQTPNRQGTGSLSESSIPSVSDTSTPRRSRRQLPPVPPKPRPLLSYSSLIRHAGSISPPADGSEEGSPLTSQALESNNACLTESSNSPHPQQSQHASPQRYISEPYLALHEDSHASDCGEEETLTFEAAVATSLGRSNTIGSAPPLRHSWQMPNGHYRRRRRGGPGPGMMCGAVNNLLSDTEEDDKC

SEQ ID NO: 11025 - protein, 28 aa, Artificial Sequence
  Synthetic polypeptide
NRNSKCSNIHAYCSVLQFGFSEWGYLNG

SEQ ID NO: 11026 - protein, 723 aa, Artificial Sequence [sequence omitted]

SEQ ID NO: 11027 - protein, 57 aa, Artificial Sequence
  Synthetic polypeptide
GGVSLILKPKFKVLQHPCLLQCFAVWIFRMGILEWLKGTSCLQDTQSVNMKPVRSGP

SEQ ID NO: 11028 - protein, 694 aa, Artificial Sequence
  Synthetic polypeptide
MVEGDQLPPGHTVSQYETCKIRTIKAGTLEKLVENLLTAFGDNDFTYISIFLSTYRGFASTKEVLELLLDRYGNLTSPNCEEDGSQSSSESKMVIRNAIASILRAWLDQCAEDFREPPHFPCLQKLLDYLTRMMPGSDPERRAQNLLEQFQKQEVETDNGLPNTISFSLEEEEELEGGESAEFTCFSEDLVAEQLTYMDAQLFKKVVPHHCLGCIWSRRDKKENKHLAPTIRATISQFNTLTKCVVSTILGGKELKTQQRAKIIEKWINIAHECRLLKNFSSLRAIVSALQSNSIYRLKKTWAAVPRDRMLMFEELSDIFSDHNNHLTSRELLMKEGTSKFANLDSSVKENQKRTQRRLQLQKDMGGLINFEKRRREFEVIAQIKLLQSACNSYCMTPDQKFIQWFQRQQLLTEEESYALSCEIEAAADASTTSPKPRKSMVKRLSLLFLGSDMITSPTPTKEQPKSTASGSSGESMDSVSVSSCESNHSEAEEGSITPMDTPDEPQKKLSESSSSCSSIHSMDTNSSGMSSLINPLSSPPSCNNNPKIHKRSVSVTSITSTVLPPVYNQQNEDTCIIRISVEDNNGNMYKSIMLTSQDKTPAVIQRAMLKHNLDSDPAEEYELVQVISEDKELVIPDSANVFYAMNSQVNFDFILRKKNSMEEQVKLRSRTSLTLPRTAKRGCWSNRHSKITL

SEQ ID NO: 11029 - protein, 35 aa, Artificial Sequence
  Synthetic polypeptide
LGKAQSGLQRNLLLKLGGQPLITMWIIQQKYSGSG

SEQ ID NO: 11030 - protein, 4 aa, Artificial Sequence
  Synthetic polypeptide
VGSH

SEQ ID NO: 11031 - protein, 469 aa, Artificial Sequence
  Synthetic polypeptide
ARWAATDHNVDNTTEIFREWLKNVQRLYHYVEWRPMDEPESYPDEIGPKHWPTSRFAHVMKLRQAALRTAREKWSDYILFIDVDNFLTNPQTLNLLIAENKTIVAPMLESRGLYSNFWCGITPKGFYKRTPDYVQIREWKRTGCFPVPMVHSTFLIDLRKEASDKLTFYPPHQDYTWTFDDIIVFAFSSRQAGIQMYLCNREHYGYLPIPLKPHQTLQEDIENLIHVQIEAMIDRPPMEPSQYVSVVPKYPDKMGFDEIFMINLKRRKDRRDRMLRTLYEQEIEVKIVEAVDGKALNTSQLKALNIEMLPGYRDPYSSRPLTRGEIGCFLSHYSVWKEVIDRELEKTLVIEDDVRFEHQFKKKLMKLMDNIDQAQLDWELIYIGRKRMQVKEPEKAVPNVANLVEADYSYWTLGYVISLEGAQKLVGANPFGKMLPVDEFLPVMYNKHPVLLSSPHCHLFQTLSDDCQR

SEQ ID NO: 11032 - protein, 541 aa, Artificial Sequence
  Synthetic polypeptide
ARWAATDHNVDNTTEIFREWLKNVQRLYHYVEWRPMDEPESYPDEIGPKHWPTSRFAHVMKLRQAALRTAREKWSDYILFIDVDNFLTNPQTLNLLIAENKTIVAPMLESRGLYSNFWCGITPKGFYKRTPDYVQIREWKRTGCFPVPMVHSTFLIDLRKEASDKLTFYPPHQDYTWTFDDIIVFAFSSRQAGIQMYLCNREHYGYLPIPLKPHQTLQEDIENLIHVQIEAMIDRPPMEPSQYVSVVPKYPDKMGFDEIFMINLKRRKDRRDRMLRTLYEQEIEVKIVEAVDGKALNTSQLKALNIEMLPGYRDPYSSRPLTRGEIGCFLSHYSVWKEVIDRELEKTLVIEDDVRFEHQFKKKLMKLMDNIDQAQLDWELIYIGRKRMQVKEPEKAVPNVANLVEADYSYWTLGYVISLEGAQKLVGANPFGKMLPVDEFLPVMYNKHPVAEYKEYYESRDLKAFSAEPLLIYPTHYTGQPGYLSDTETSTIWDNETVATDWDRTHAWKSRKQSRIYSNAKNTEALPPPTSLDTVPSRDEL

SEQ ID NO: 11033 - protein, 71 aa, Artificial Sequence
  Synthetic polypeptide
SQLLGRLRQENGMNPGDGAYSEQRLRHCTAAWATEPRNIQNWMTVTSIGLVQILRSSFLMTHCMLKVFVSP

SEQ ID NO: 11034 - protein, 29 aa, Artificial Sequence
  Synthetic polypeptide
TQEMELTVSRDYATALQPGQQNLGIYRTG

SEQ ID NO: 11035 - protein, 433 aa, Artificial Sequence
  Synthetic polypeptide
AEITPLHCSLGNRTSEYTELDDSNFDWTCPNTQILFPNDPLYAQSIREPLKNVVDKSCPRGIIRVEESFRSGAKPPLRARDFMATNPEHLEILKKMGVSLIHLKDGRVQLVQHAIQAASSIDAEDGLRFMQEMIELSSQQQKEQQLPPRAVQIVSHPFFGRVVLTAGPAQFGLDLSKHKETRGFVASSKPSNGCSELTNPEAVMGKIALIQRGQCMFAEKARNIQNAGAIGGIVIDDNEGSSSDTAPLFQMAGDGKDTDDIKIPMLFLFSKEGSIILDAIREYEEVEVLLSDKAKDRDPEMENEEQPSSENDSQNQSGEQISSSSQEVDLVDQESSEENSLNSHPESLSLADMDNAASISPSEQTSNPTENHETTNLNGECTDLDNQLQEQSETEEDSNPNVSWGKKVQPIDSILADWNEDIEAFEMMEKDEL

SEQ ID NO: 11036 - protein, 449 aa, Artificial Sequence
  Synthetic polypeptide
AEITPLHCSLGNRTSEYTELDDSNFDWTCPNTQILFPNDPLYAQSIREPLKNVVDKSCPRGIIRVEESFRSGAKPPLRARDFMATNPEHLEILKKMGVSLIHLKDGRVQLVQHAIQAASSIDAEDGLRFMQEMIELSSQQQKEQQLPPRAVQIVSHPFFGRVVLTAGPAQFGLDLSKHKETRGFVASSKPSNGCSELTNPEAVMGKIALIQRGQCMFAEKARNIQNAGAIGGIVIDDNEGSSSDTAPLFQMAGDGKDTDDIKIPMLFLFSKEGSIILDAIREYEEVEVLLSDKAKDRAAILKGKMIPSYIINSNPEMENEEQPSSENDSQNQSGEQISSSSQEVDLVDQESSEENSLNSHPESLSLADMDNAASISPSEQTSNPTENHETTNLNGECTDLDNQLQEQSETEEDSNPNVSWGKKVQPIDSILADWNEDIEAFEMMEKDEL

SEQ ID NO: 11037 - protein, 12 aa, Artificial Sequence
  Synthetic polypeptide
CIETAARQETTD

SEQ ID NO: 11038 - protein, 198 aa, Artificial Sequence
  Synthetic polypeptide
YIQIHSGHNNLSFDVLKLQRGKKQQIENGSGAEDNGDSSHCSNASTHSNQEAGPSNKRTKTSDDSGLELDNNNAAMAIDPVMDGASEIELVFRPHPTLMEKDDSAQTRYIKTSGNATVDHLSKYLAVRLALEELRSKGESNQMNLDTASEKQYTIYIATASGQFTVLNGSFSLELVSEKYWKVNKPMELYYAPTKEHK

SEQ ID NO: 11039 - protein, 108 aa, Artificial Sequence
  Synthetic polypeptide
YIQIHSGHNNLSFDVLKLQRGKKQQIENGSGAEDNGDSSHCSNASTHSNQEAGPSNKRTKTSDDSGLELDNNNAAMAIDPVMDGASEIELVFRPHPTLMEKDDSAQTR

SEQ ID NO: 11040 - protein, 28 aa, Artificial Sequence
  Synthetic polypeptide
AEIVPSYSSLGNKSKTPSQKKKKKKQHP

SEQ ID NO: 11041 - protein, 54 aa, Artificial Sequence
  Synthetic polypeptide
SQLLGRLRQENCLNPRGGGCSEPRLCHRTPAWATRAKLRLRKKKKKNNTLEREL

SEQ ID NO: 11042 - protein, 376 aa, Artificial Sequence
  Synthetic polypeptide
TQEVEVAVSRDCAIVLQPGQQEQNSVSEKKKKKTTPLKESYKEESTNSGLSILLESIVSDLEKSLGTGLSSILETEMKIAFGNLWMEILYLKPPWTLLHLLQCFKKHWLAVFGLVMEKNLLLTIESLYKNLRKANKAVDFTTVKFLLQDSRSLLHAFSTRSNYDGILPQTFAQVNNLLQTFAEVKTKLKPNSSENTVTKKQEGTSLKNSHNQEITVFSSSHLPQPSRHQEIWSILESVWITIYQNSTDVFQRLGSNSALTTSNIASFEEAFICLQKLMAAVRDILEGIQRILAPNSNYQDVETLYNFLIKYEVNKNVKFTAQEIYDCVSQTEYREKLTIGCRQLVEMEYTMQQCNASVYMEAKNRGWCEDMLNYRI

SEQ ID NO: 11043 - protein, 571 aa, Artificial Sequence
  Synthetic polypeptide
SFLLVTYQVPVVAILGSGGGFRAMVGFSGVMKALYESGILDCATYVAGLSGSTWYMSTLYSHPDFPEKGPEEINEELMKNVSHNPLLLLTPQKVKRYVESLWKKKSSGQPVTFTDIFGMLIGETLIHNRMNTTLSSLKEKVNTAQCPLPLFTCLHVKPDVSELMFADWVEFSPYEIGMAKYGTFMAPDLFGSKFFMGTVVKKYEENPLHFLMGVWGSAFSILFNRVLGVSGSQSRGSTMEEELENITTKHIVSNDSSDSDDESHEPKGTENEDAGSDYQSDNQASWIHRMIMALVSDSALFNTREGRAGKVHNFMLGLNLNTSYPLSPLSDFATQDSFDDDELDAAVADPDEFERIYEPLDVKSKKIHVVDSGLTFNLPYPLILRPQRGVDLIISFDFSARPSDSSPPFKELLLAEKWAKMNKLPFPKIDPYVFDREGLKECYVFKPKNPDMEKDCPTIIHFVLANINFRKYRAPGVPRETEEEKEIADFDIFDDPESPFSTFNFQYPNQAFKRLHDLMHFNTLNNIDVIKEAMVESIEYRRQNPSRCSVSLSNVEARRFFNKEFLSKPKA

SEQ ID NO: 11044 - protein, 6 aa, Artificial Sequence
  Synthetic polypeptide
RIRCLW

SEQ ID NO: 11045 - protein, 91 aa, Artificial Sequence
  Synthetic polypeptide
FLSLYICPSFYLKSTKINCHNDAHQMIMKFLVSDVSGACGSHIGFRWGFPSHGGILWCDEGIIRIRNSGLCYLRCWSFWLHLVYVNLVFSP

SEQ ID NO: 11046 - protein, 30 aa, Artificial Sequence
  Synthetic polypeptide
EGTNEVGGGARQAHEPSDHGGHAAGGSTGG

SEQ ID NO: 11047 - protein, 312 aa, Artificial Sequence
  Synthetic polypeptide
KRDHLVALPGIEKEQMRWEEELAKRMNLQTMVDTLQEAAQEADAIQEEMNEKIERLKAELVVFKGLMSDPMTDLDTKIQEKAMKVDMDICRRIDITAKLCDVAQQRNSEDVSKIFQVVPKKKERKVASDDDISEQDGEVNRFSDDEVGSMNITDEMKRMFNQLRETFDFDDDCDSLTWEENEDTLLLWEDFTNCNPTIDLQGEQEENLGNLIHETESFFKTRDKEYQETIGQIELELATAKSDMNRHLHEYMEMCSMKRGLDVQMETCRRLIKGSADRNSPSPSSVASSDSGSTDEIQDEFEREADVEPMVS

SEQ ID NO: 11048 - protein, 265 aa, Artificial Sequence
  Synthetic polypeptide
KRDHLVALPGIEKEQMRWEEELAKRMNLQTMVDTLQEAAQEADAIQEEMNEKIERLKAELVVFKGLMSDVVPKKKERKVASDDDISEQDGEVNRFSDDEVGSMNITDEMKRMFNQLRETFDFDDDCDSLTWEENEDTLLLWEDFTNCNPTIDLQGEQEENLGNLIHETESFFKTRDKEYQETIGQIELELATAKSDMNRHLHEYMEMCSMKRGLDVQMETCRRLIKGSADRNSPSPSSVASSDSGSTDEIQDEFEREADVEPMVS

SEQ ID NO: 11049 - protein, 24 aa, Artificial Sequence
  Synthetic polypeptide
YHAWHAKDIWLPRSPSRRNMEFRA

SEQ ID NO: 11050 - protein, 321 aa, Artificial Sequence
  Synthetic polypeptide
FLSLPGPSTMLGTQKIFGCRGAQVEEIWSLEPENFEKLKPVHGLIFLFKWQPGEEPAGSVVQDSRLDTIFFAKQVINNACATQAIVSVLLNCTHQDVHLGETLSEFKEFSQSFDAAMKGLALSNSDVIRQVHNSFARQQMFEFDTKTSAKEEDAFHFVSYVPVNGRLYELDGLREGPIDLGACNQDDWISAVRPVIEKRIQKYSEGEIRFNLMAIVSDRKMIYEQKIAELQRQLAEEEPMDTDQGNSMLSAIQSEVAKNQMLIEEEVQKLKRYKIENIRRKHNYLPFIMELLKTLAEHQQLIPLVEKAKEKQNAKKAQETK

SEQ ID NO: 11051 - protein, 26 aa, Artificial Sequence
  Synthetic polypeptide
FINFCLCQGLVPCLARKRYLVAEEPK

SEQ ID NO: 11052 - protein, 320 aa, Artificial Sequence
  Synthetic polypeptide
FLSLPGPSTMLGTQKIFGCRGAQVEEIWSLEPENFEKLKPVHGLIFLFKWQPGEEPAGSVVQDSRLDTIFFAKQVINNACATQAIVSVLLNCTHQDVHLGETLSEFKEFSQSFDAAMKGLALSNSDVIRQVHNSFARQQMFEFDTKTSAKEEDAFHFVSYVPVNGRLYELDGLREGPIDLGACNQDDWISAVRPVIEKRIQKYSEGEIRFNLMAIVSDRKMIYEQKIAELQRQLAEEPMDTDQGNSMLSAIQSEVAKNQMLIEEEVQKLKRYKIENIRRKHNYLPFIMELLKTLAEHQQLIPLVEKAKEKQNAKKAQETK

SEQ ID NO: 11053 - protein, 348 aa, Artificial Sequence
  Synthetic polypeptide
FLSLPGPSTMLGTQKIFGCRGAQVEEIWSLEPENFEKLKPVHGLIFLFKWQPGEEPAGSVVQDSRLDTIFFAKQVINNACATQAIVSVLLNCTHQDVHLGETLSEFKEFSQSFDAAMKGLALSNSDVIRQVHNSFARQQMFEFDTKTSAKEEDAFHFVSYVPVNGRLYELDGLREGPIDLGACNQDDWISAVRPVIEKRIQKDGFSPCCPGWSQTPELKPSACLDLPKWYSEGEIRFNLMAIVSDRKMIYEQKIAELQRQLAEEEPMDTDQGNSMLSAIQSEVAKNQMLIEEEVQKLKRYKIENIRRKHNYLPFIMELLKTLAEHQQLIPLVEKAKEKQNAKKAQETK

SEQ ID NO: 11054 - protein, 347 aa, Artificial Sequence
  Synthetic polypeptide
FLSLPGPSTMLGTQKIFGCRGAQVEEIWSLEPENFEKLKPVHGLIFLFKWQPGEEPAGSVVQDSRLDTIFFAKQVINNACATQAIVSVLLNCTHQDVHLGETLSEFKEFSQSFDAAMKGLALSNSDVIRQVHNSFARQQMFEFDTKTSAKEEDAFHFVSYVPVNGRLYELDGLREGPIDLGACNQDDWISAVRPVIEKRIQKDGFSPCCPGWSQTPELKPSACLDLPKWYSEGEIRFNLMAIVSDRKMIYEQKIAELQRQLAEEPMDTDQGNSMLSAIQSEVAKNQMLIEEEVQKLKRYKIENIRRKHNYLPFIMELLKTLAEHQQLIPLVEKAKEKQNAKKAQETK

SEQ ID NO: 11055 - protein, 318 aa, Artificial Sequence
  Synthetic polypeptide
FLSLPGPSTMLGTQKIFGCRGAQVEEIWSLEPENFEKLKPVHGLIFLFKWQPGEEPAGSVVQDSRLDTIFFAKQVINNACATQAIVSVLLNCTHQDVHLGETLSEFKEFSQSFDAAMKGLALSNSDVIRQVHNSFARQQMFEFDTKTSAKEEDAFHFVSYVPVNGRLYELDGLREGPIDLGACNQDDWISAVRPVIEKRIQKYSEGEIRFNLMAIVSDRKMIYEQKIAELQRQLAEEPMDTDQGNSMLSAIQSEVAKNQMLIEEEVQKLKRYKIENIRRKHNYLPFIMELLKTLAEHQQLIPLVEKFEKHFEKTLLGK

SEQ ID NO: 11056 - protein, 308 aa, Artificial Sequence
  Synthetic polypeptide
FLSLPGPSTMLGTQKIFGCRGAQVEEIWSLEPENFEKLKPVHGLIFLFKWQPGEEPAGSVVQDSRLDTIFFAKQVINNACATQAIVSVLLNCTHQDVHLGETLSEFKEFSQSFDAAMKGLALSNSDVIRQVHNSFARQQMFEFDTKTSAKEEDAFHFVSYVPVNGRLYELDGLREGPIDLGACNQDDWISAVRPVIEKRIQKYSEGEIRFNLMAIVSDRKMIYEQKIAELQRQLAEEPMDTDQGNSMLSAIQSEVAKNQMLIEEEVQKLKRYKIENIRRKHNYLPFIMELLKTLAEHQQLIPLVEKGK

SEQ ID NO: 11057 - protein, 259 aa, Artificial Sequence
  Synthetic polypeptide
FLSLPGPSTMLGTQKIFGCRGAQVEEIWSLEPENFEKLKPVHGLIFLFKWQPGEEPAGSVVQDSRLDTIFFAKQVINNACATQAIVSVLLNCTHQDVHLGETLSEFKEFSQSFDAAMKGLALSNSDVIRQVHNSFARQQMFEFDTKTSAKEEDAFHFVSYVPVNGRLYELDGLREGPIDLGACNQDDWISAVRPVIEKRIQKYSEGEIRFNLMAIVSDRKMIYEQKIAELQRQLAEEPMDTDQGNSMLSAIQSEVAKNQ

SEQ ID NO: 11058 - protein, 18 aa, Artificial Sequence
  Synthetic polypeptide
YHAWHAKDIWLPRSPSRR

SEQ ID NO: 11059 - protein, 26 aa, Artificial Sequence
  Synthetic polypeptide
FLSLPGPSTMLGTQKIFGCRGAQVEE

SEQ ID NO: 11060 - protein, 42 aa, Artificial Sequence
  Synthetic polypeptide
GQARWLTPVIPALWEAEDGEQYIIIFGEFSDGACEPDPRNNF

SEQ ID NO: 11061 - protein, 132 aa, Artificial Sequence
  Synthetic polypeptide
SQHFGRPRMESNTSSSLENLATAPVNQIQETISDNCVVIFSKTSCSYCTMAKKLFHDMNVNYKVVELDLLEYGNQFQDALYKMTGERTVPRIFVNGTFIGGATDTHRLHKEGKLLPLVHQCYLKKSKRKEFQ

SEQ ID NO: 11062 - protein, 28 aa, Artificial Sequence
  Synthetic polypeptide
PGAVAYTCNPSTLGGRGWRAIHHHLWRI

SEQ ID NO: 11063 - protein, 81 aa, Artificial Sequence
  Synthetic polypeptide
LHVQEKTCVCVHFPSVVRPGSAVKAFHLKYDEVRLDPNVQKWDVTVLELSYHKRHLDRPVFLRFWETLDRYMVKHKSHLRF

SEQ ID NO: 11064 - protein, 33 aa, Artificial Sequence
  Synthetic polypeptide
VAQSPSCTSRKKPVSAYIFLLSFGQDLQLKPSI

SEQ ID NO: 11065 - protein, 61 aa, Artificial Sequence
  Synthetic polypeptide
LKAFVIKSVIKRCWHVRAAAAVTLYGILLDVCEWPSPLAARPGKNLCLRTFSFCRSARICS

SEQ ID NO: 11066 - protein, 63 aa, Artificial Sequence
  Synthetic polypeptide
RKFFFKAFHLKYDEVRLDPNVQKWDVTVLELSYHKRHLDRPVFLRFWETLDRYMVKHKSHLRF

SEQ ID NO: 11067 - protein, 26 aa, Artificial Sequence
  Synthetic polypeptide
HKYSKAAEFERINSNFKGSSSLKPSI

SEQ ID NO: 11068 - protein, 48 aa, Artificial Sequence
  Synthetic polypeptide
DRIHSSEHFREDAINVVEMTTKDLEHDINIVKRQSLRGLTPILKEVLL

SEQ ID NO: 11069 - protein, 831 aa, Artificial Sequence
  Synthetic polypeptide
SLHFGSLSDSIHYQMVYSYGSGVVWALGVVPFSHVNIVKFNVEDGEIVQQVRVSTPWLQHLSGACGVVDEAVLVCPDPSSRSLQTLALETEWELRQIPLQSLDLEFGSGFQPRVLPTQPNPVDASRAQFFLHLSPSHYALLQYHYGTLSLLKNFPQTALVSFATTGEKTVAAVMACRNEVQKSSSSEDGSMGSFSEKSSSKDSLACFNQTYTINLYLVETGRRLLDTTITFSLEQSGTRPERLYIQVFLKKDDSVGYRALVQTEDHLLLFLQQLAGKVVLWSREESLAEVVCLEMVDLPLTGAQAELEGEFGKKADGLLGMFLKRLSSQLILLQAWTSHLWKMFYDARKPRSQIKNEINIDTLARDEFNLQKMMVMVTASGKLFGIESSSGTILWKQYLPNVKPDSSFKLMVQRTTAHFPHPPQCTLLVKDKESGMSSLYVFNPIFGKWSQVAPPVLKRPILQSLLLPVMDQDYAKVLLLIDDEYKVTAFPATRNVLRQLHELAPSIFFYLVDAEQGRLCGYRLRKDLTTELSWELTIPPEVQRIVKVKGKRSSEHVHSQGRVMGDRSVLYKSLNPNLLAVVTESTDAHHERTFIGIFLIDGVTGRIIHSSVQKKAKGPVHIVHSENWVVYQYWNTKARRNEFTVLELYEGTEQYNATAFSSLDRPQLPQVLQQSYIFPSSISAMEATITERGITSRHLLIGLPSGAILSLPKALLDPRRPEIPTEQSREENLIPYSPDVQIHAERFINYNQTVSRMRGIYTAPSGLESTCLVVAYGLDIYQTRVYPSKQFDVLKDDYDYVLISSVLFGLVFATMITKRLAQVKLLNRAWR

SEQ ID NO: 11070 - protein, 830 aa, Artificial Sequence
  Synthetic polypeptide
SLHFGSLSDSIHYQMVYSYGSGVVWALGVVPFSHVNIVKFNVEDGEIVQQVRVSTPWLQHLSGACGVVDEAVLVCPDPSSRSLQTLALETEWELRQIPLQSLDLEFGSGFQPRVLPTQPNPVDASRAQFFLHLSPSHYALLQYHYGTLSLLKNFPQTALVSFATTGEKTVAAVMACRNEVKSSSSEDGSMGSFSEKSSSKDSLACFNQTYTINLYLVETGRRLLDTTITFSLEQSGTRPERLYIQVFLKKDDSVGYRALVQTEDHLLLFLQQLAGKVVLWSREESLAEVVCLEMVDLPLTGAQAELEGEFGKKADGLLGMFLKRLSSQLILLQAWTSHLWKMFYDARKPRSQIKNEINIDTLARDEFNLQKMMVMVTASGKLFGIESSSGTILWKQYLPNVKPDSSFKLMVQRTTAHFPHPPQCTLLVKDKESGMSSLYVFNPIFGKWSQVAPPVLKRPILQSLLLPVMDQDYAKVLLLIDDEYKVTAFPATRNVLRQLHELAPSIFFYLVDAEQGRLCGYRLRKDLTTELSWELTIPPEVQRIVKVKGKRSSEHVHSQGRVMGDRSVLYKSLNPNLLAVVTESTDAHHERTFIGIFLIDGVTGRIIHSSVQKKAKGPVHIVHSENWVVYQYWNTKARRNEFTVLELYEGTEQYNATAFSSLDRPQLPQVLQQSYIFPSSISAMEATITERGITSRHLLIGLPSGAILSLPKALLDPRRPEIPTEQSREENLIPYSPDVQIHAERFINYNQTVSRMRGIYTAPSGLESTCLVVAYGLDIYQTRVYPSKQFDVLKDDYDYVLISSVLFGLVFATMITKRLAQVKLLNRAWR

SEQ ID NO: 11071 - protein, 19 aa, Artificial Sequence
  Synthetic polypeptide
GQAWWLTPMIPTLWETESP

SEQ ID NO: 11072 - protein, 80 aa, Artificial Sequence
  Synthetic polypeptide
FQHFGRLSLLNQNCQERLGIETKPDRRASEMCGHLQVPFHLLCGQHEEQQAEGHPERLEAQPDVLWQKQGDDGGLGSEPI

SEQ ID NO: 11073 - protein, 25 aa, Artificial Sequence
  Synthetic polypeptide
DEISIQFLVYRRSTAASELEPLLPS

SEQ ID NO: 11074 - protein, 77 aa, Artificial Sequence
  Synthetic polypeptide
GETHDLVRQTWVQILAPPLLPSCVTQGTQSTSLCCRVFTSVNSHCLVRMLCKMRSPSSSWCTGAAPPPRSLSPSSPA

SEQ ID NO: 11075 - protein, 30 aa, Artificial Sequence
  Synthetic polypeptide
SEHFGRLRQLMENSYLWKITVMSQGWLCLF

SEQ ID NO: 11076 - protein, 1079 aa, Artificial Sequence
  Synthetic polypeptide
PGVVAHAVIRALWETETTYGELISLEDNSDVTGLAMFILNRLLWNPDIAAEYRHPTVPHLYRDGHEEALSKFTLKKLLLLVCFLDYAKISRLIDHDPCLFCKDAEFKASKEILLAFSRDFLSGEGDLSRHLGLLGLPVNHVQTPFDEFDFAVTNLAVDLQCGVRLVRTMELLTQNWDLSKKLRIPAISRLQKMHNVDIVLQVLKSRGIELSDEHGNTILSKDIVDRHREKTLRLLWKIAFAFQVDISLNLDQLKEEIAFLKHTKSIKKTISLLSCHSDDLINKKKGKRDSGSFEQYSENIKLLMDWVNAVCAFYNKKVENFTVSFSDGRVLCYLIHHYHPCYVPFDAICQRTTQTVECTQTGSVVLNSSSESDDSSLDMSLKAFDHENTSELYKELLENEKKNFHLVRSAVRDLGGIPAMINHSDMSNTIPDEKVVITYLSFLCARLLDLRKEIRAARLIQTTWRKYKLKTDLKRHQEREKAARIIQLAVINFLAKQRLRKRVNAALVIQKYWRRVLAQRKLLMLKKEKLEKVQNKAASLIQAMWRRYRAKKYLCKVKAACKIQAWYRCWRAHKEYLAILKAVKIIQGCFYTKLERTRFLNVRASAIIIQRKWRAILPAKIAHEHFLMIKRHRAACLIQAHYRGYKGRQVFLRQKSAALIIQKYIRAREAGKHERIKYIEFKKSTVILQALVRGWLVRKRFLEQRAKIRLLHFTAAAYYHLNAVRIQRAYKLYLAVKNANKQVNSVICIQRWFRARLQEKRFIQKYHSIKKIEHEGQECLSQRNRAASVIQKAVRHFLLRKKQEKFTSGIIKIQALWRGYSWRKKNDCTKIKAIRLSLQVVNREIREENKLYKRTALALHYLLTYKHLSAILEALKHLEVVTRLSPLCCENMAQSGAISKIFVLIRSCNRSIPCMEVIRYAVQVLLNVSKYEKTTSAVYDVENCIDILLELLQIYREKPGNKVADKGGSIFTKTCCLLAILLKTTNRASDVRSRSKVVDRIYSLYKLTAHKHKMNTERILYKQKKNSSISIPFIPETPVRTRIVSRLKPDWVLRRDNMEEITNPLQAIQMVMDTLGIPY

SEQ ID NO: 11077 - protein, 2664 aa, Artificial Sequence
  Synthetic polypeptide
PGVVAHAVIRALWETETTYGELISLEDNSDVTGLAMFILNRLLWNPDIAAEYRHPTVPHLYRDGHEEALSKFTLKKLLLLVCFLDYAKISRLIDHDPCLFCKDAEFKASKEILLAFSRDFLSGEGDLSRHLGLLGLPVNHVQTPFDEFDFAVTNLAVDLQCGVRLVRTMELLTQNWDLSKKLRIPAISRLQKMHNVDIVLQVLKSRGIELSDEHGNTILSKDIVDRHREKTLRLLWKIAFAFQVDISLNLDQLKEEIAFLKHTKSIKKTISLLSCHSDDLINKKKGKRDSGSFEQYSENIKLLMDWVNAVCAFYNKKVENFTVSFSDGRVLCYLIHHYHPCYVPFDAICQRTTQTVECTQTGSVVLNSSSESDDSSLDMSLKAFDHENTSELYKELLENEKKNFHLVRSAVRDLGGIPAMINHSDMSNTIPDEKVVITYLSFLCARLLDLRKEIRAARLIQTTWRKYKLKTDLKRHQEREKAARIIQLAVINFLAKQRLRKRVNAALVIQKYWRRVLAQRKLLMLKKEKLEKVQNKAASLIQGYWRRYSTRQRFLKLKYYSIILQSRIRMIIAVTSYKRYLWATVTIQRHWRAYLRRKQDQQRYEMLKSSTLIIQSMFRKWKQRKMQSQVKATVILQRAFREWHLRKQAKEENSAIIIQSWYRMHKELRKYIYIRSCVVIIQKRFRCFQAQKLYKRRKESILTIQKYYKAYLKGKIERTNYLQKRAAAIQLQAAFRRLKAHNLCRQIRAACVIQSYWRMRQDRVRFLNLKKTIIKFQAHVRKHQQRQKYKKMKKAAVIIQTHFRAYIFAMKVLASYQKTRSAVIVLQSAYRGMQARKMYIHILTSVIKIQSYYRAYVSKKEFLSLKNATIKLQSTVKMKQTRKQYLHLRAAALFIQQCYRSKKIAAQKREEYMQMRESCIKLQAFVRGYLVRKQMRLQRKAVISLQSYFRMRKARQYYLKMYKAIIVIQNYYHAYKAQVNQRKNFLQVKKAATCLQAAYRGYKVRQLIKQQSIAALKIQSAFRGYNKRVKYQSVLQSIIKIQRWYRAYKTLHDTRTHFLKTKAAVISLQSAYRGWKVRKQIRREHQAALKIQSAFRMAKAQKQFRLFKTAALVIQQNFRAWTAGRKQCMEYIELRHAVLVLQSMWKGKTLRRQLQRQHKCAIIIQSYYRMHVQQKKWKIMKKAALLIQKYYRAYSIGREQNHLYLKTKAAVVTLQSAYRGMKVRKRIKDCNKAAVTIQSKYRAYKTKKKYATYRASAIIIQRWYRGIKITNHQHKEYLNLKKTAIKIQSVYRGIRVRRHIQHMHRAATFIKAMFKMHQSRISYHTMRKAAIVIQVRCRAYYQGKMQREKYLTILKAVKVLQASFRGVRVRRTLRKMQTAATLIQSNYRRYRQQTYFNKLKKITKTVQQRYWAMKERNIQFQRYNKLRHSVIYIQAIFRGKKARRHLKMMHIAATLIQRRFRTLMMRRRFLSLKKTAILIQRKYRAHLCTKHHLQFLQVQNAVIKIQSSYRRWMIRKRMREMHRAATFIQSTFRMHRLHMRYQALKQASVVIQQQYQANRAAKLQRQHYLRQRHSAVILQAAFRGMKTRRHLKSMHSSATLIQSRFRSLLVRRRFISLKKATIFVQRKYRATICAKHKLYQFLHLRKAAITIQSSYRRLMVKKKLQEMQRAAVLIQATFRMYRTYITFQTWKHASILIQQHYRTYRAAKLQRENYIRQWHSAVVIQAAYKGMKARQLLREKHKASIVIQSTYRMYRQYCFYQKLQWATKIIQEKYRANKKKQKVFQHNELKKETCVQAGFQDMNIKKQIQEQHQAAIIIQKHCKAFKIRKHYLHLRATVVSIQRRYRKLTAVRTQAVICIQSYYRGFKVRKDIQNMHRAATLIQSFYRMHRAKVDYETKKTAIVVIQNYYRLYVRVKTERKNFLAVQKSVRTIQAAFRGMKVRQKLKNVSEEKMAAIVNQSALCCYRSKTQYEAVQSEGVMIQEWYKASGLACSQEAEYHSQSRAAVTIQKAFCRMVTRKLETQKCAALRIQFFLQMAVYRRRFVQQKRAAITLQHYFRTWQTRKQFLLYRKAAVVLQNHYRAFLSAKHQRQVYLQIRSSVIIIQARSKGFIQKRKFQEIKNSTIKIQAMWRRYRAKKYLCKVKAACKIQAWYRCWRAHKEYLAILKAVKIIQGCFYTKLERTRFLNVRASAIIIQRKWRAILPAKIAHEHFLMIKRHRAACLIQAHYRGYKGRQVFLRQKSAALIIQKYIRAREAGKHERIKYIEFKKSTVILQALVRGWLVRKRFLEQRAKIRLLHFTAAAYYHLNAVRIQRAYKLYLAVKNANKQVNSVICIQRWFRARLQEKRFIQKYHSIKKIEHEGQECLSQRNRAASVIQKAVRHFLLRKKQEKFTSGIIKIQALWRGYSWRKKNDCTKIKAIRLSLQVVNREIREENKLYKRTALALHYLLTYKHLSAILEALKHLEVVTRLSPLCCENMAQSGAISKIFVLIRSCNRSIPCMEVIRYAVQVLLNVSKYEKTTSAVYDVENCIDILLELLQIYREKPGNKVADKGGSIFTKTCCLLAILLKTTNRASDVRSRSKVVDRIYSLYKLTAHKHKMNTERILYKQKKNSSISIPFIPETPVRTRIVSRLKPDWVLRRDNMEEITNPLQAIQMVMDTLGIPY

SEQ ID NO: 11078 - protein, 36 aa, Artificial Sequence
  Synthetic polypeptide
SQLLRRVKQETCLNPGGGRCNEPRLCHCTPAWATVL

SEQ ID NO: 11079 - protein, 22 aa, Artificial Sequence
  Synthetic polypeptide
TQEAAVAMSQDCATALQPGRQY

SEQ ID NO: 11080 - protein, 14 aa, Artificial Sequence
  Synthetic polypeptide
AKIVPLHSSLGDST

SEQ ID NO: 11081 - protein, 37 aa, Artificial Sequence
  Synthetic polypeptide
SQLLRRVKQETCLNPGGGRCNEPRLCHCTPAWATVGR

SEQ ID NO: 11082 - protein, 92 aa, Artificial Sequence
  Synthetic polypeptide
TQEAAVAMSQDCATALQPGRQLADDLISDIFTTIGSVTVALLLILLLAIVASVVTSNKRATQGTYSPSRQEKEGSRVEMWNLMPPPAMERLI

SEQ ID NO: 11083 - protein, 17 aa, Artificial Sequence
  Synthetic polypeptide
AKIVPLHSSLGDSWQMT

SEQ ID NO: 11084 - protein, 77 aa, Artificial Sequence
  Synthetic polypeptide
GWARWLMLVIPALWEAKAVRLLEPRSSRPPWAIWQNPMFPPSPPKKTTKLARCGGMHLWSQLLWRLRVISSWTVPWT

SEQ ID NO: 11085 - protein, 315 aa, Artificial Sequence
  Synthetic polypeptide
AQEFKTTLGNMAKPHVPPLPPKKNYKISQVWWHAPVVPATLEAESDQQLDCALDLMRRLPPQQIEKNLSDLIDLVPSLCEDLLSSVDQPLKIARDKVVGKDYLLCDYNRDGDSYRSPWSNKYDPPLEDGAMPSARLRKLEVEANNAFDQYRDLYFEGGVSSVYLWDLDHGFAGVILIKKAGDGSKKIKGCWDSIHVVEVQEKSSGRTAHYKLTSTVMLWLQTNKSGSGTMNLGGSLTRQMEKDETVSDCSPHIANIGRLVEDMENKIRSTLNEIYFGKTKDIVNGLRSVQTFADKSKQEALKNDLVEALKRKQQC

SEQ ID NO: 11086 - protein, 277 aa, Artificial Sequence
  Synthetic polypeptide
AQEFKTTLGNMAKPHVPPLPPKKNYKISQVWWHAPVVPATLEAESDQQLDCALDLMRRLPPQQIEKNLSDLIDLVPSLCEDLLSSVDQPLKIARDKVVGKDYLLCDYNRDGDSYRSPWSNKYDPPLEDGAMPSARLRKLEVEANNAFDQYRDLYFEGGVSSVYLWDLDHGFAGVILIKKAGDGSKKIKGCWDSIHVVEVQEKSSGRTAHYKLTSTVMLWLQTNKSGSGTMNLGGSLTRQMEKDETVSDCSPHIANIGRLVEVCADFCRQIKTRSSEE

SEQ ID NO: 11087 - protein, 320 aa, Artificial Sequence
  Synthetic polypeptide
AQEFKTTLGNMAKPHVPPLPPKKNYKISQVWWHAPVVPATLEAESDQQLDCALDLMRRLPPQQIEKNLSDLIDLVPSLCEDLLSSVDQPLKIARDKVVGKDYLLCDYNRDGDSYRSPWSNKYDPPLEDGAMPSARLRKLEVEANNAFDQYRDLYFEGGVSSVYLWDLDHGFAGVILIKKAGDGSKKIKGCWDSIHVVEVQEKSSGRTAHYKLTSTVMLWLQTNKSGSGTMNLGGSLTRQMEKDETVSDCSPHIANIGRLVEDMENKIRSTLNEIYFGKTKDIVNGLRSIDAIPDNQKFKQLQRELSQVLTQRQIYIQPDN

SEQ ID NO: 11088 - protein, 28 aa, Artificial Sequence
  Synthetic polypeptide
QNGRKKRKSNWKRGDSHSVHQLARPRGA

SEQ ID NO: 11089 - protein, 530 aa, Artificial Sequence
  Synthetic polypeptide
RKTGRKERRKRRPQNNHKRHNKMAGKKEKATGREVTHIQFTSWPDHGVPEDPHLLLKLRRRVNAFSNFFSGPIVVHCSAGVGRTGTYIGIDAMLEGLEAENKVDVYGYVVKLRRQRCLMVQVEAQYILIHQALVEYNQFGETEVNLSELHPYLHNMKKRDPPSEPSPLEAEFQRLPSYRSWRTQHIGNQEENKSKNRNSNVIPYDYNRVPLKHELEMSKESEHDSDESSDDDSDSEEPSKYINASFIMSYWKPEVMIAAQGPLKETIGDFWQMIFQRKVKVIVMLTELKHGDQEICAQYWGEGKQTYGDIEVDLKDTDKSSTYTLRVFELRHSKRKDSRTVYQYQYTNWSVEQLPAEPKELISMIQVVKQKLPQKNSSEGNKHHKSTPLLIHCRDGSQQTGIFCALLNLLESAETEEVVDIFQVVKALRKARPGMVSTFEQYQFLYDVIASTYPAQNGQVKKNNHQEDKIEFDNEVDKVKQDANCVNPLGAPEKLPEAKEQAEGSEPTSGTEGPEHSVNGPASPALNQGS

SEQ ID NO: 11090 - protein, 70 aa, Artificial Sequence
  Synthetic polypeptide
CIIRYDNPKSKSIQQIHKNKKQEIKTDHQRKSPSLKGRQEEKKEGRGGHKTTIKDITKWQEKKKKQLEER

SEQ ID NO: 11091 - protein, 42 aa, Artificial Sequence
  Synthetic polypeptide
GRTRWLTPVIPALWEAEAGGSQGQDIETILANMFITECPHPQ

SEQ ID NO: 11092 - protein, 1648 aa, Artificial Sequence
  Synthetic polypeptide
SQHFGRPRRADHKVKISRPSWPTCSSLNALTHSSRLKLHLKSDMSECENDDPLLRSAGKVRDINRTYVISASRKTADMPLTPNPVGRLALQRRTTRNKESSLLVSELEDTTEKTAETRLTLQRRAKTDSAEKWKTAEIDSVKMTLNVGGETENNGVSKESRTNVRIVNNAKNSFVASSVPLDEDPQVIEMMADKKYKETFSAPSRANENVALKYSSNRPPIASLSQTEVVRSGHLTTKPTQSKLDIKVLGTGNLYHRSIGKEIAKTSNKFGSLEKRTPTKCTTEHKLTTKCSLPQLKSPAPSILKNRMSNLQVKQRPKSSFLANKQERSAENTILPEEETVVQNTSAGKDPLKVENSQVTVAVRVRPFTKREKIEKASQVVFMSGKEITVEHPDTKQVYNFIYDVSFWSFDECHPHYASQTTVYEKLAAPLLERAFEGFNTCLFAYGQTGSGKSYTMMGFSEEPGIIPRFCEDLFSQVARKQTQEVSYHIEMSFFEVYNEKIHDLLVCKDENGQRKQPLRVREHPVYGPYVEALSMNIVSSYADIQSWLELGNKQRATAATGMNDKSSRSHSVFTLVMTQTKTEFVEGEEHDHRITSRINLIDLAGSERCSTAHTNGDRLKEGVSINKSLLTLGKVISALSEQANQRSVFIPYRESVLTWLLKESLGGNSKTAMIATISPAASNIEETLSTLRYANQARLIVNIAKVNEDMNAKLIRELKAEIAKLKAAQRNSRNIDPERYRLCRQEITSLRMKLHQQERDMAEMQRVWKEKFEQAEKRKLQETKELQKAGIMFQMDNHLPNLVNLNEDPQLSEMLLYMIKEGTTTVGKYKPNSSHDIQLSGVLIADDHCTIKNFGGTVSIIPVGEAKTYVNGKHILEITVLRHGDRVILGGDHYFRFNHPVEVQKGKRPSGRDTPISEGPKDFEFAKNELLMAQRSQLEAEIKEAQLKAKEEMMQGIQIAKEMAQQELSSQKAAYESKIKALEAELREESQRKKMQEINNQKANHKIEELEKAKQHLEQEIYVNKKRLEMETLATKQALEDHSIRHARILEALETEKQKIAKEVQILQQNRNNRDKTFTVQTTWSSMKLSMMIQEANAISSKLKTYYVFGRHDISDKSSSDTSIRVRNLKLGISTFWSLEKFESKLAAMKELYESNGSNRGEDAFCDPEDEWEPDITDAPVSSLSRRRSRSLMKNRRISGCLHDIQVHPIKNLHSSHSSGLMDKSSTIYSNSAESFLPGICKELIGSSLDFFGQSYDEERTIADSLINSFLKIYNGLFAISKAHEEQDEESQDNLFSSDRAIQSLTIQTACAFEQLVVLMKHWLSDLLPCTNIARLEDELRQEVKKLGGYLQLFLQGCCLDISSMIKEAQKNAIQIVQQAVKYVGQLAVLKGSKLHFLENGNNKAASVQEEFMDAVCDGVGLGMKILLDSGLEKAKELQHELFRQCTKNEVTKEMKTNAMGLIRSLENIFAESKIKSFRRQVQEENFEYQDFKRMVNRAPEFLKLKHCLEKAIEIIISALKGCHSDINLLQTCVESIRNLASDFYSDFSVPSTSVGSYESRVTHIVHQELESLAKSLLFCFESEESPDLLKPWETYNQNTKEEHQQSKSSGIDGSKNKGVPKRVYELHGSSPAVSSEECTPSRIQWV

SEQ ID NO: 11093 - protein, 35 aa, Artificial Sequence
  Synthetic polypeptide
PDAVAHACNPSTLGGRGGRITRSRYRDHPGQHVHH

SEQ ID NO: 11094 - protein, 6 aa, Artificial Sequence
  Synthetic polypeptide
HSVWLS

SEQ ID NO: 11095 - protein, 65 aa, Artificial Sequence
  Synthetic polypeptide
VLSGFICFFLCITSFMRAETMSGLFITEFWVLNTVSGYHSNPWATSGYNKAELCRTLWCKDCGSR

SEQ ID NO: 11096 - protein, 276 aa, Artificial Sequence
  Synthetic polypeptide
EQRLCLAYSSLNSGCLTQCLVIIATPGRLLDIIKQSSVELCGVKIVVVDEADTMLKMGFQQQVLDILENIPNDCQTILVSATIPTSIEQLASQLLHNPVRIITGEKNLPCANVRQIILWVEDPAKKKKLFEILNDKKLFKPPVLVFVDCKLGADLLSEAVQKITGLKSISIHSEKSQIERKNILKGLLEGDYEVVVSTGVLGRGLDLISVRLVVNFDMPSSMDEYVHQENTYKSTWRNPQHFQQDVRMTLGYVGKAQWEEDNQLKVKLGLKKNCSS

SEQ ID NO: 11097 - protein, 263 aa, Artificial Sequence
  Synthetic polypeptide
EQRLCLAYSSLNSGCLTQCLVIIATPGRLLDIIKQSSVELCGVKIVVVDEADTMLKMGFQQQVLDILENIPNDCQTILVSATIPTSIEQLASQLLHNPVRIITGEKNLPCANVRQIILWVEDPAKKKKLFEILNDKKLFKPPVLVFVDCKLGADLLSEAVQKITGLKSISIHSEKSQIERKNILKGLLEGDYEVVVSTGVLGRGLDLISVRLVVNFDMPSSMDEYVHQLNIIWVVPFSGININASLIALLYSLLTTINMKFTP

SEQ ID NO: 11098 - protein, 315 aa, Artificial Sequence
  Synthetic polypeptide
EQRLCLAYSSLNSGCLTQCLVIIATPGRLLDIIKQSSVELCGVKIVVVDEADTMLKMGFQQQVLDILENIPNDCQTILVSATIPTSIEQLASQLLHNPVRIITGEKNLPCANVRQIILWVEDPAKKKKLFEILNDKKLFKPPVLVFVDCKLGADLLSEAVQKITGLKSISIHSEKSQIERKNILKGLLEGDYEVVVSTGVLGRGLDLISVRLVVNFDMPSSMDEYVHQIGRVGRLGQNGTAITFINNNSKRLFWDIAKRVKPTGSILPPQLLNSPYLHDQKRKEQQKDKQTQNDLVTGANLMDIIRKHDKSNSQK

SEQ ID NO: 11099 - protein, 24 aa, Artificial Sequence
  Synthetic polypeptide
QAQWLMPVIPALWEAKAPTARSPQ

SEQ ID NO: 11100 - protein, 29 aa, Artificial Sequence
  Synthetic polypeptide
SQHFGRPRPRQPGLPNEGADPCSAQAAEG

SEQ ID NO: 11101 - protein, 37 aa, Artificial Sequence
  Synthetic polypeptide
GTVAHACNPSTLGGQGPDSPVSPMKELTHAVHKQQRA

SEQ ID NO: 11102 - protein, 81 aa, Artificial Sequence
  Synthetic polypeptide
SQHFGRPRPRQPGLPNEGADPCSAQAAEGPGSEAGGLPGGAEETLPSGSGADGHLASGVSPQTRGKGPQGSPQDRSGLQTG

SEQ ID NO: 11103 - protein, 120 aa, Artificial Sequence
  Synthetic polypeptide
GTVAHACNPSTLGGQGPDSPVSPMKELTHAVHKQQRALEARLEACLEELRRLCLREAELTGTLPAEYPLKPGEKAPKVRRRIGAAYKLDDWALHREDPLSSLERQLALQLQITEAARRLC

SEQ ID NO: 11104 - protein, 575 aa, Artificial Sequence
  Synthetic polypeptide
GTVAHACNPSTLGGQGPDSPVSPMKELTHAVHKQQRALEARLEACLEELRRLCLREAELTGTLPAEYPLKPGEKAPKVRRRIGAAYKLDDWALHREDPLSSLERQLALQLQITEAARRLCLEENLSRQARRQRKHSMLQEEKKLQELQRCLVERRRNSEPPPAAALPLGRELSASDDSSLSDGLLLEEEESQVPKPPPESPAPPSRPLPPQTLEGLQPTGPEAGSPERAPVQNSPWKETSLDHPYEKPRKSSEPWSESSSPATTPQDGPSASSLWLLEPASYHVVPIRGVPGQWQGRTSAPATPEIQGRRGQSQSLRVDSFRAGPEGRGRSAFPRRRPTHYTVTVPDSCFPATKPPLPHAACHSCSEDSGSDVSSISHPTSPGSSSPDISFLQPLSPPKTHRHRGAWVPAGSRELVAHHPKLLLPPGYFPAGRYVVVAESPLPPGEWELRRAAPGPAYEEEGTPLRYQRLVPSRSRIVRTPSLKDSPAGRGLSKAAVSEELKWWHERARLRSTRPHSLDRQGAFRVRSLPLGREGFGRALGPRAQVPTVCVLRRSPDGAPVQVFVPEKGEIISQV

SEQ ID NO: 11105 - protein, 21 aa, Artificial Sequence
  Synthetic polypeptide
LHHWIPPWGNKDPAPAVEGED

SEQ ID NO: 11106 - protein, 1632 aa, Artificial Sequence
  Synthetic polypeptide
VQEAEAALSHDCTTGFHPGATRIRPQLSKEKIEGCHICTSVTPGEPQVLLGKDKAFTYDFVFDLDTWQEQIYSTCVSKLIEGCFEGYNATVLAYGQTGAGKTYTMGTGFDMATSEEEQGIIPRAIAHLFGGIAERKRRAQEQGVAGPEFKVSAQFLELYNEEILDLFDSTRDPDTRHRRSNIKIHEDANGGIYTTGVTSRLIHSQEELIQCLKQGALSRTTASTQMNVQSSRSHAIFTIHLCQMRMCTQPDLVNEAVTGLPDGTPPSSEYETLTAKFHFVDLAGSERLKRTGATGERAKEGISINCGLLALGNVISALGDQSKKVVHVPYRDSKLTRLLQDSLGGNSQTIMIACVSPSDRDFMETLNTLKYANRARNIKNKVVVNQDKTSQQISALRAEIARLQMELMEYKAGKRVIGEDGAEGYSDLFRENAMLQKENGALRLRVKAMQEAIDAINNRVTQLMSQEANLLLAKAGDGNEAIGALIQNYIREIEELRTKLLESEAMNESLRRSLSRASARSPYSLGASPAAPAFGGSPASSMEDASEVIRRAKQDLERLKKKEVRQRRKSPEKEAFKKRAKLQQENSEETDENEAEEEEEERDESGCEEEEGREDEDEDSGSEESLVDSDSDPEEKEVNFQADLADLTCEIEIKQKLIDELENSQRRLQTLKHQYEEKLILLQNKIRDTQLERDRVLQNLSTMECYTEEKANKIKADYEKRLREMNRDLQKLQAAQKEHARLLKNQSRYERELKKLQAEVAEMKKAKVALMKQMREEQQRRRLVETKRNREIAQLKKEQRRQEFQIRALESQKRQQEMVLRRKTQEVSALRRLAKPMSERVAGRAGLKPPMLDSGAEVSASTTSSEAESGARSVSSIVRQWNRKINHFLGDHPAPTVNGTRPARKKFQKKGASQSFSKAARLKWQSLERRIIDIVMQRMTIVNLEADMERLIKKREELFLLQEALRRKRERLQAESPEEEKGLQELAEEIEVLAANIDYINDGITDCQATIVQLEETKEELDSTDTSVVISSCSLAEARLLLDNFLKASIDKGLQVAQKEAQIRLLEGRLRQTDMAGSSQNHLLLDALREKAEAHPELQALIYNVQQENGYASTDEEISEFSEGSFSQSFTMKGSTSHDDFKFKSEPKLSAQMKAVSAECLGPPLDISTKNITKSLASLVEIKEDGVGFSVRDPYYRDRVSRTVSLPTRGSTFPRQSRATETSPLTRRKSYDRGQPIRSTDVGFTPPSSPPTRPRNDRNVFSRLTSNQSQGSALDKGIISPVGGAKGARTAPLQCVSMAEGHTKPILCLDATDELLFTGSKDRSCKMWNLVTGQEIAALKGHPNNVVSIKYCSHSGLVFSVSTSYIKVWDIRDSAKCIRTLTSSGQVISGDACAATSTRAITSAQGEHQINQIALSPSGTMLYAASGNAVRIWELSRFQPVGKLTGHIGPVMCLTVTQTASQHDLVVTGSKDHYVKMFELGECVTGTIGPTHNFEPPHYDGIECLAIQGDILFSGSRDNGIKKWDLDQQELIQQIPNAHKDWVCALAFIPGRPMLLSACRAGVIKVWNVDNFTPIGEIKGHDSPINAICTNAKHIFTASSDCRVKLWNYVPGLTPCLPRRVLAIKGRATTLP

SEQ ID NO: 11107 - protein, 67 aa, Artificial Sequence
  Synthetic polypeptide
AMIAPLDSTLGQQGSGPSCRRRRLRAVTSVPLLPRESPRSCWGRTRPSPMTLSSTWTPGKNRSIPPV

SEQ ID NO: 11108 - protein, 1618 aa, Artificial Sequence
  Synthetic polypeptide
VQEAEAALSHDCTTGFHPGATRIRPQLSKEKIEGCHICTSVTPGEPQVLLGKDKAFTYDFVFDLDTWQEQIYSTCVSKLIEGCFEGYNATVLAYGQTGAGKTYTMGTGFDMATSEEEQGIIPRAIAHLFGGIAERKRRAQEQGVAGPEFKVSAQFLELYNEEILDLFDSTRDPDTRHRRSNIKIHEDANGGIYTTGVTSRLIHSQEELIQCLKQGALSRTTASTQMNVQSSRSHAIFTIHLCQMRMCTQPDLVNEAVTGLPDGTPPSSEYETLTAKFHFVDLAGSERLKRTGATGERAKEGISINCGLLALGNVISALGDQSKKVVHVPYRDSKLTRLLQDSLGGNSQTIMIACVSPSDRDFMETLNTLKYANRARNIKNKVVVNQDKTSQQISALRAEIARLQMELMEYKAGKRVIGEDGAEGYSDLFRENAMLQKENGALRLRVKAMQEAIDAINNRVTQLMSQEANLLLAKAGDGNEAIGALIQNYIREIEELRTKLLESEAMNESLRRSLSRASARSPYSLGASPAAPAFGGSPASSMEDASEVIRRAKQDLERLKKKEVRQRRKSPEKEAFKKRAKLQQENSEETDENEAEEEEEERDESGCEEEEGREDEDEDSGSEESLVDSDSDPEEKEVNFQADLADLTCEIEIKQKLIDELENSQRRLQTLKHQYEEKLILLQNKIRDTQLERDRVLQNLSTMECYTEEKANKIKADYEKRLREMNRDLQKLQAAQKEHARLLKNQSRYERELKKLQAEVAEMKKAKVALMKQMREEQQRRRLVETKRNREIAQLKKEQRRQEFQIRALESQKRQQEMVLRRKTQEVSALRRLAKPMSERVAGRAGLKPPMLDSGAEVSASTTSSEAESGARSVSSIVRQWNRKINHFLGDHPAPTVNGTRPARKKFQKKGASQSFSKAARLKWQSLERRIIDIVMQRMTIVNLEADMERLIKKREELFLLQEALRRKRERLQAESPEEEKGLQELAEEIEVLAANIDYINDGITDCQATIVQLEETKEELDSTDTSVVISSCSLAEARLLLDNFLKASIDKGLQVAQKEAQIRLLEGRLRQTDMAGSSQNHLLLDALREKAEAHPELQALIYNVQQENGYASTDEEISEFSEGSFSQSFTMKGSTSHDDFKFKSEPKLSAQMKAVSAECLGPPLDISTKNITKSLASLVEIKEDGVGFSVRDPYYRDRVSRTVSLPTRGSTFPRQSRATETSPLTRRKSYDRGQPIRSTDVGFTPPSSPPTRPRNDRNVFSRLTSNQSQGSALDKGIISPVGGAKGARTAPLQCVSMAEGHTKPILCLDATDELLFTGSKDRSCKMWNLVTGQEIAALKGHPNNVVSIKYCSHSGLVFSVSTSYIKVWDIRDSAKCIRTLTSSGQVISGDACAATSTRAITSAQGEHQINQIALSPSGTMLYAASGNAVRIWELSRFQPVGKLTGHIGPVMCLTVTQTASQHDLVVTGSKDHYVKMFELGECVTGTIGPTHNFEPPHYDGIECLAIQGDILFSGSRDNGIKKWDLDQQELIQQIPNAHKDWVCALAFIPGRPMLLSACRAGVIKVWNVDNFTPIGEIKGHDSPINAICTNAKHIFTASSDLTVKFWSVRRLPHSGPP

SEQ ID NO: 11109 - protein, 1631 aa, Artificial Sequence
  Synthetic polypeptide
VQEAEAALSHDCTTGFHPGATRIRPQLSKEKIEGCHICTSVTPGEPQVLLGKDKAFTYDFVFDLDTWQEQIYSTCVSKLIEGCFEGYNATVLAYGQTGAGKTYTMGTGFDMATSEEEQGIIPRAIAHLFGGIAERKRRAQEQGVAGPEFKVSAQFLELYNEEILDLFDSTRDPDTRHRRSNIKIHEDANGGIYTTGVTSRLIHSQEELIQCLKQGALSRTTASTQMNVQSSRSHAIFTIHLCQMRMCTQPDLVNEAVTGLPDGTPPSSEYETLTAKFHFVDLAGSERLKRTGATGERAKEGISINCGLLALGNVISALGDQSKKVVHVPYRDSKLTRLLQDSLGGNSQTIMIACVSPSDRDFMETLNTLKYANRARNIKNKVVVNQDKTSQQISALRAEIARLQMELMEYKAGKRVIGEDGAEGYSDLFRENAMLQKENGALRLRVKAMQEAIDAINNRVTQLMSQEANLLLAKAGDGNEAIGALIQNYIREIEELRTKLLESEAMNESLRRSLSRASARSPYSLGASPAAPAFGGSPASSMEDASEVIRRAKQDLERLKKKEVRQRRKSPEKEAFKKRAKLQQENSEETDENEAEEEEEERDESGCEEEEGREDEDEDSGSEESLVDSDSDPEEKEVNFQADLADLTCEIEIKQKLIDELENSQRRLQTLKHQYEEKLILLQNKIRDTQLERDRVLQNLSTMECYTEEKANKIKADYEKRLREMNRDLQKLQAAQKEHARLLKNQSRYERELKKLQAEVAEMKKAKVALMKQMREEQQRRRLVETKRNREIAQLKKEQRRQEFQIRALESQKRQQEMVLRRKTQEVSALRRLAKPMSERVAGRAGLKPPMLDSGAEVSASTTSSEAESGARSVSSIVRQWNRKINHFLGDHPAPTVNGTRPARKKFQKKGASQSFSKAARLKWQSLERRIIDIVMQRMTIVNLEADMERLIKKREELFLLQEALRRKRERLQAESPEEEKGLQELAEEIEVLAANIDYINDGITDCQATIVQLEETKEELDSTDTSVVISSCSLAEARLLLDNFLKASIDKGLQVAQKEAQIRLLEGRLRQTDMAGSSQNHLLLDALREKAEAHPELQALIYNVQQENGYASTDEEISEFSEGSFSQSFTMKGSTSHDDFKFKSEPKLSAQMKAVSAECLGPPLDISTKNITKSLASLVEIKEDGVGFSVRDPYYRDRVSRTVSLPTRGSTFPRQSRATETSPLTRRKSYDRGQPIRSTDVGFTPPSSPPTRPRNDRNVFSRLTSNQSQGSALDKSDDSDSSLSEVLRGIISPVGGAKGARTAPLQCVSMAEGHTKPILCLDATDELLFTGSKDRSCKMWNLVTGQEIAALKGHPNNVVSIKYCSHSGLVFSVSTSYIKVWDIRDSAKCIRTLTSSGQVISGDACAATSTRAITSAQGEHQINQIALSPSGTMLYAASGNAVRIWELSRFQPVGKLTGHIGPVMCLTVTQTASQHDLVVTGSKDHYVKMFELGECVTGTIGPTHNFEPPHYDGIECLAIQGDILFSGSRDNGIKKWDLDQQELIQQIPNAHKDWVCALAFIPGRPMLLSACRAGVIKVWNVDNFTPIGEIKGHDSPINAICTNAKHIFTASSDLTVKFWSVRRLPHSGPP

SEQ ID NO: 11110 - protein, 1645 aa, Artificial Sequence
  Synthetic polypeptide
VQEAEAALSHDCTTGFHPGATRIRPQLSKEKIEGCHICTSVTPGEPQVLLGKDKAFTYDFVFDLDTWQEQIYSTCVSKLIEGCFEGYNATVLAYGQTGAGKTYTMGTGFDMATSEEEQGIIPRAIAHLFGGIAERKRRAQEQGVAGPEFKVSAQFLELYNEEILDLFDSTRDPDTRHRRSNIKIHEDANGGIYTTGVTSRLIHSQEELIQCLKQGALSRTTASTQMNVQSSRSHAIFTIHLCQMRMCTQPDLVNEAVTGLPDGTPPSSEYETLTAKFHFVDLAGSERLKRTGATGERAKEGISINCGLLALGNVISALGDQSKKVVHVPYRDSKLTRLLQDSLGGNSQTIMIACVSPSDRDFMETLNTLKYANRARNIKNKVVVNQDKTSQQISALRAEIARLQMELMEYKAGKRVIGEDGAEGYSDLFRENAMLQKENGALRLRVKAMQEAIDAINNRVTQLMSQEANLLLAKAGDGNEAIGALIQNYIREIEELRTKLLESEAMNESLRRSLSRASARSPYSLGASPAAPAFGGSPASSMEDASEVIRRAKQDLERLKKKEVRQRRKSPEKEAFKKRAKLQQENSEETDENEAEEEEEERDESGCEEEEGREDEDEDSGSEESLVDSDSDPEEKEVNFQADLADLTCEIEIKQKLIDELENSQRRLQTLKHQYEEKLILLQNKIRDTQLERDRVLQNLSTMECYTEEKANKIKADYEKRLREMNRDLQKLQAAQKEHARLLKNQSRYERELKKLQAEVAEMKKAKVALMKQMREEQQRRRLVETKRNREIAQLKKEQRRQEFQIRALESQKRQQEMVLRRKTQEVSALRRLAKPMSERVAGRAGLKPPMLDSGAEVSASTTSSEAESGARSVSSIVRQWNRKINHFLGDHPAPTVNGTRPARKKFQKKGASQSFSKAARLKWQSLERRIIDIVMQRMTIVNLEADMERLIKKREELFLLQEALRRKRERLQAESPEEEKGLQELAEEIEVLAANIDYINDGITDCQATIVQLEETKEELDSTDTSVVISSCSLAEARLLLDNFLKASIDKGLQVAQKEAQIRLLEGRLRQTDMAGSSQNHLLLDALREKAEAHPELQALIYNVQQENGYASTDEEISEFSEGSFSQSFTMKGSTSHDDFKFKSEPKLSAQMKAVSAECLGPPLDISTKNITKSLASLVEIKEDGVGFSVRDPYYRDRVSRTVSLPTRGSTFPRQSRATETSPLTRRKSYDRGQPIRSTDVGFTPPSSPPTRPRNDRNVFSRLTSNQSQGSALDKSDDSDSSLSEVLRGIISPVGGAKGARTAPLQCVSMAEGHTKPILCLDATDELLFTGSKDRSCKMWNLVTGQEIAALKGHPNNVVSIKYCSHSGLVFSVSTSYIKVWDIRDSAKCIRTLTSSGQVISGDACAATSTRAITSAQGEHQINQIALSPSGTMLYAASGNAVRIWELSRFQPVGKLTGHIGPVMCLTVTQTASQHDLVVTGSKDHYVKMFELGECVTGTIGPTHNFEPPHYDGIECLAIQGDILFSGSRDNGIKKWDLDQQELIQQIPNAHKDWVCALAFIPGRPMLLSACRAGVIKVWNVDNFTPIGEIKGHDSPINAICTNAKHIFTASSDCRVKLWNYVPGLTPCLPRRVLAIKGRATTLP

SEQ ID NO: 11111 - protein, 15 aa, Artificial Sequence
  Synthetic polypeptide
WLRPWDPSTSTPSPA

SEQ ID NO: 11112 - protein, 26 aa, Artificial Sequence
  Synthetic polypeptide
GPGIPVHQHHLQLKTHQGHQGWECKV

SEQ ID NO: 11113 - protein, 366 aa, Artificial Sequence
  Synthetic polypeptide
AKALGSQYINTISSLRHIRVTKDGNAKFDLELDLKDSQSKIYLYKDGEMIPYGFNNQTKHCLRRLGKRYEFQIQDLRPEDSGIYQVKVEDAVVFSTELEASAIPPRVVVPLAETHCEEQGDAVFECTLSSPCPSAAWHFRHRLLHPSDKYEVYVSPDGLTHRLVVRGARFSDMGPYSLGTGLYTSSAWLVVEAGKDKDLQSTSADHKLQSRRSGKDGRLDIYGERRDATRSSTSRYKPGTGSFSKDAQGPMGHFSQGLADMEVQPGEAATLSCTLTSDLGPGTWFKDGVKLTTQDGVIFKQDGLVHSLFITHVQGTQAGRYTFVAGDQQSEATLTVQDSPTIAPDVTEKLREPLVVKAGKPIQTYH

SEQ ID NO: 11114 - protein, 3504 aa, Artificial Sequence
  Synthetic polypeptide
AKALGSQYINTISSLRHIRVTKDGNAKFDLELDLKDSQSKIYLYKDGEMIPYGFNNQTKHCLRRLGKRYEFQIQDLRPEDSGIYQVKVEDAVVFSTELEASAIPPRVVVPLAETHCEEQGDAVFECTLSSPCPSAAWHFRHRLLHPSDKYEVYVSPDGLTHRLVVRGARFSDMGPYSLGTGLYTSSAWLVVEAGKDKDLQSTSADHKLQRQGAQASGAEESGSIESQGEKSREQGPRGGSLEGAGPASGLQHIASPDRDGLGRHGYSLMGDKGTADSAWGPGQEGEGFPVAEGSRATLPRENQSHREGGWARSLAERPHLQGESSESGLGLPEKQQQDRGRDSNSDECWRKAGGWEAGSSRLQAGGLGSSREGKEHRGDSGRQLDRHAPEQLWDARLGPGRGKSDLQGCQSDPVGSWPRGKQIEISQDDSLAEMDRGDAPSRERGRGIVVWGGGTGLGEAGDSNGAGGPGTLELTGGRGSGSKVGMAPESWGSQGGRDADYGEARGYWGSGELLEQIPGGKDFQEPSISGGRKFLLGDGSPEIKAEDSLQEADGICRGESVVTGSAYKTGPGGPGDPRGCEGVLQELRGRDGQETAWASGEVEYDPRSFQSSQGWTAGHRAAGGIGRIESKGTSPWDDTPSSLRKTGAHHGPGVLGPSGGQEGMGGIWVAGLTESGQGVDARSHWLSRAPGLGAQGSGGTLGDKKGLRGPGSIGSEPDFWNGSGSSRVKGPRGETGYKDGLEGPGRMESRYEGGLGYSREISSKSGAGYSYGSGVPGEMGSGHGAGCRVSPRAPAGVESEEGGGYRHGSGAPGGVWSGNEDSGPAGGGSGRVASLKNGSGGPDGAPMNDTRNWASACQAGMDPRGGHHSDGGLGSPGVTGSAGRGGLKAPGVVETVGMGCVEAEPESSGRIRPWGQTGNYGGFRASEALGAFGEGGYEDGSGGPGAMGPGSLRAGSKVGEGDGTRCPGAKASGAGAGYRDDTRHPESLAPHNGAASGSQWAYGAGNVLGYEDGSELPGPQGTGVRTAYGERSRGLGPRSTGPGGEAGFRDGSGGLQGMGSADGPGCRKGIGSSGEMGSVDKEGYKKDLGAPENMGSGSKADYRDGVGGSGAMGSMDEAGYRKDLGAPEGISSGSKADYRGGLQDSREAGSGSKADYSGGLKGSREIGSMDETDNRKDLGVPEGMGAGYRAGLRGPGEMGSLDESGHRNGIGGYGEMGSGYREDLGAPEGMGTGSKAGYRDGLRGSGEMRSMDEAGYRKNLGAPERMDSGSKAGYRGGLRGSGEMGLIEAGYRKDLGVSEGGGSGSKAGYRGGLGSGEMGSVDKAGYRKDLGASEAIGSGSKAGFTDGLGGSEEMGSVNKAGYRKDLGAPKGMGSGSKASFRDGLGGSGEMGSVNEAGYRKDLGVPEGIGSGSKAGFRDGLGGSEEMGSVNKAGYRKDLGAPKGIGSGSKAGFRDGLGSSGEMGSMDEAGYRKNLGAPEGIGSGSKAGFRDGLGSSVEMGSVNEAGYRKDLGAPEGMGSGSKAGFRDGLGGSGEMGSVNEAGYRKDLGAPKGIGSGSKADFRDALGSSGEMGSMDEAGYRKDLWAPEGIGSGSKAGFRDGLGSSVEMGSVNEAGYRKDLGAPEGMGSGSKAGFRDGLGGSGEMGSVNEAGYRKDLGAPKGIGSGSKADFRDALGSSGEMGSMDEAGYRKDLWAPEGIGSGSKAGFRDGLGSSVEMGSVNEAGYRKDLGAPEGMGSGSKEGFRDGLGGSEEMGSVNKAGYRKDLGAPKGMGSGSKEGFRDGLGGSEEMGSMDEAGYRKDLGAPEGIGSGSKAGFRDGLGGSEEMRSMDEAGYRKDLGAPERIGSGSKAGFRDGLGSSVEMGSVNEAGYRKDLGAPKGMGSGSKTGFRDGLGGSEEMESMDEAGYRKDLGAPEGIGSGSKAGFRDGLGSSTEMGSVNEAGYRKDLGAPKGMGSESKAGFRDGLGSSGEMGSMDEAGYRKDLGAPEGMGSGSKAGFRDGLGGSEEMGSVNKAGYRKDLGAPKGMGSGSKAGFRDGLGSSGEMGSMDEADYRKDLGAPEEMGSGSYTDYRNGLGSSGKISSGDEAGYKNVLGGSGRNPLGSEAGSRGSLEDSGYILSWNEAGSRQGFGGTSGMGSGSEVSYRGGSGGSGETGPEGKMGYGDGSGRLGVPGSLAGIGHEAGPRGHKAMGHRSGYWVASEGDTNSKDGPERARETRLVDGAGPGVEPGMAGMPGTAGGMAHRDSLRGTGVLGSQGGRQTLSDERGSTKDLGGYGTSGIPEASEAAGAKGKPDVKEWQDSSGTPGSSRDRGAPRVKDRSPDQAGIMGASGFLDGKGAVEGETWAGMAALGSGYERDIWKAGPGMTDRGRVAGQGGLASQGGGDSLLGGRRVGSGSSVGTGQDLDSGSMPGGRGKSTSGPADRQGTSNAWAPDWENQGFSQGSIDAGKQPAGSRASGSLQEKDAAFGGTHEGPGGFKGGEGAPGQEAAGGCRSPWSLDSKGSSPGRGSSVDAEDSGILGKGNSTEWGNALTPKPGESGPQGAWNGLDGPFGRKASRDRSGGTQDLSSQRGKGQRGGKRSLGEQGSLEAENGEVQGPGALKEDEGQGVEEAGRSGRRPGSLRSRSQAQSGAEVGGGKRRGADEAGSMGWQPMGENWGCLEEMLNEDQSREPPGHLGSRRSGKDGRLDIYGERRDATRSSTSRYKPGTGSFSKDAQGPMGHFSQGLADMEVQPGEAATLSCTLTSDLGPGTWFKDGVKLTTQDGVIFKQDGLVHSLFITHVQGTQAGRYTFVAGDQQSEATLTVQDSPTIAPDVTEKLREPLVVKAGKPVIVKIPFQSHLPIQAAWRKDGAEVVGSSDREAQVDLGDGYTRLCLPSAGRKDCGQYSVTLRSEGGSVQAELTLQVIDKPDPPQGPMEVQDCHRAGVCLRWRPPRDNGGRTVECYVVERRQAGRSTWLKVGEAPADSTTFTDAHVEPGRKYTFRVRAVTSEGAGEALESEEILVAPEALPKAPSAPAILSASSQGITLTWTAPRGPGSAHILGYLIERRKKGSNTWTAVNDQPVPERRWTVADVRQGCQYEFRVTAVAPSGPGEPGPPSDAVFARDPMRPPGLVRNLQVTDRSNTSITLSWAGPDTQEGDEAQGYVVELCSSDSLQWLPCHVGTVPVTTYTAKGLRPGEGYFVRVTAVNEGGQSQPSALDTLVQAMPVTVCPKFLVDSSTKDLLTVKVGDTVRVPVSFEAMPMPEVTWLKDGLPLPKRSVTVTKDGLTQLLIPVAGLSDSGLYTVVLRTLQGKEVAHSFRIRVAACPQAPGPIHLQENVPGTVTAEWEPSPDEAQDVPLHYAVFTRSSAHGPWHEAADRIHTNRFTLLGILPGHEYHFRVVAKNELGASKPSDTSQPWCIPRQRDRFTVKAPCYREPDLSQKPRFLVGLRSHLLPQGCECCMSCAVQGSPRPHVTWFKNDRSLEGNPAVYSTDLLGVCSLTIPSVSPKDSGEYKAVAENTLGQAVSTATLIVIEPST

SEQ ID NO: 11115 - protein, 30 aa, Artificial Sequence
  Synthetic polypeptide
HWINVLRNRINDNQKVSKTRGKAKVTGRWK

SEQ ID NO: 11116 - protein, 41 aa, Artificial Sequence
  Synthetic polypeptide
ISTCAPHWLCDIGSMFSETGSTITRKSPRPAGRLKSPGAGN

SEQ ID NO: 11117 - protein, 35 aa, Artificial Sequence
  Synthetic polypeptide
QWHGLWSHNAWVEFLPVPLTGCVTLDQCSPKQDQR

SEQ ID NO: 11118 - protein, 19 aa, Artificial Sequence
  Synthetic polypeptide
HWINVLRNRINDNQKVSKT

SEQ ID NO: 11119 - protein, 30 aa, Artificial Sequence
  Synthetic polypeptide
ISTCAPHWLCDIGSMFSETGSTITRKSPRP

SEQ ID NO: 11120 - protein, 60 aa, Artificial Sequence
  Synthetic polypeptide
AGRRPRSCGRASITWRQRSSTCRRSSSSRNMRSMFSETGSTITRKSPRPAGRLKSPGAGN

SEQ ID NO: 11121 - protein, 13 aa, Artificial Sequence
  Synthetic polypeptide
EQGEGQGAVAEHL

SEQ ID NO: 11122 - protein, 60 aa, Artificial Sequence
  Synthetic polypeptide
SREKAKELWQSIYNLEAEKFDLQEKFKQQKYEINVLRNRINDNQKVSKTRGKAKVTGRWK

SEQ ID NO: 11123 - protein, 49 aa, Artificial Sequence
  Synthetic polypeptide
AGRRPRSCGRASITWRQRSSTCRRSSSSRNMRSMFSETGSTITRKSPRP

SEQ ID NO: 11124 - protein, 49 aa, Artificial Sequence
  Synthetic polypeptide
SREKAKELWQSIYNLEAEKFDLQEKFKQQKYEINVLRNRINDNQKVSKT

SEQ ID NO: 11125 - protein, 23 aa, Artificial Sequence
  Synthetic polypeptide
QEWPKKAGLLSGSHDFQPLCPGH

SEQ ID NO: 11126 - protein, 278 aa, Artificial Sequence
  Synthetic polypeptide
RNGPRKQVSSLGVTTFSLCALGIDRFHVATSTLPKVRPIERCQSILAKLAVIWVGSMTLAVPELLLWQLAQEPAPTMGTLDSCIMKPSASLPESLYSLVMTYQNARMWWYFGCYFCLPILFTVTCQLVTWRVRGPPGRKSECRASKHEQCESQLNSTVVGLTVVYAFCTLPENVCNIVVAYLSTELTRQTLDLLGLINQFSTFFKGAITPVLLLCICRPLGQAFLDCCCCCCCEECGGASEASAANGSDNKLKTEVSSSIYFHKPRESPPLLPLGTPC

SEQ ID NO: 11127 - protein, 35 aa, Artificial Sequence
  Synthetic polypeptide
GMAQESRSPLWESRLSASVPWALTASTWPPAPCPR

SEQ ID NO: 11128 - protein, 336 aa, Artificial Sequence
  Synthetic polypeptide
ARHGSSCPKSQHFGRLRRGSNVALMLDVRSLGAVEPICSVNTPREVTLHFLRTAGHPLTRWALQRQPPSPKQLEEEFLKIPSNFVSPEDLDIPGHASKDRYKTILPNPQSRVCLGRAQSQEDGDYINANYIRGYDGKEKVYIATQGPMPNTVSDFWEMVWQEEVSLIVMLTQLREGKEKCVHYWPTEEETYGPFQIRIQDMKECPEYTVRQLTIQYQEERRSVKHILFSAWPDHQTPESAGPLLRLVAEVEESPETAAHPGPIVVHCSAGIGRTGCFIATRIGCQQLKARGEVDILGIVCQLRLDRGGMIQTAEQYQFLHHTLALYAGQLPEEPSP

SEQ ID NO: 11129 - protein, 129 aa, Artificial Sequence
  Synthetic polypeptide
LMPKIPALWEAEAGLQCGSDAGRSVPGGRRTHLLCEHTPGGHPTLSAHCWTPPYPLGPSAPATQPQATGRRILEDPFKLCQPRRPGHPWPRLQGPIQDHLAKSPEPCLSRPGTEPGGRRLHQCQLHPRL

SEQ ID NO: 11130 - protein, 92 aa, Artificial Sequence
  Synthetic polypeptide
ARHGSSCPKSQHFGRLRRGSNVALMLDVRSLGAVEPICSVNTPREVTLHFLRTAGHPLTRWALQRQPPSPKQLEEEFLKRKPMDPSRSASRT

SEQ ID NO: 11131 - protein, 88 aa, Artificial Sequence
  Synthetic polypeptide
LMPKIPALWEAEAGLQCGSDAGRSVPGGRRTHLLCEHTPGGHPTLSAHCWTPPYPLGPSAPATQPQATGRRILEEETYGPFQIRIQDM

SEQ ID NO: 11132 - protein, 160 aa, Artificial Sequence
  Synthetic polypeptide
ARHGSSCPKSQHFGRLRRGSNVALMLDVRSLGAVEPICSVNTPREVTLHFLRTAGHPLTRWALQRQPPSPKQLEEEFLKIPSNFVSPEDLDIPGHASKDRYKTILPNPQSRVCLGRAQSQEDGDYINANYIRGYDGKEKVYIATQGPMPNTVSDFWEMVW

SEQ ID NO: 11133 - protein, 130 aa, Artificial Sequence
  Synthetic polypeptide
ARHGSSCPKSQHFGRLRRGSNVALMLDVRSLGAVEPICSVNTPREVTLHFLRTAGHPLTRWALQRQPPSPKQLEEEFLKIPSNFVSPEDLDIPGHASKDRYKTILPNPQSRVCLGRAQSQEDGDYINANY

SEQ ID NO: 11134 - protein, 126 aa, Artificial Sequence
  Synthetic polypeptide
LMPKIPALWEAEAGLQCGSDAGRSVPGGRRTHLLCEHTPGGHPTLSAHCWTPPYPLGPSAPATQPQATGRRILEDPFKLCQPRRPGHPWPRLQGPIQDHLAKSPEPCLSRPGTEPGGRRLHQCQLH

SEQ ID NO: 11135 - protein, 129 aa, Artificial Sequence
  Synthetic polypeptide
ARHGSSCPKSQHFGRLRRGSNVALMLDVRSLGAVEPICSVNTPREVTLHFLRTAGHPLTRWALQRQPPSPKQLEEEFLIPSNFVSPEDLDIPGHASKDRYKTILPNPQSRVCLGRAQSQEDGDYINANY

SEQ ID NO: 11136 - protein, 125 aa, Artificial Sequence
  Synthetic polypeptide
LMPKIPALWEAEAGLQCGSDAGRSVPGGRRTHLLCEHTPGGHPTLSAHCWTPPYPLGPSAPATQPQATGRRILDPFKLCQPRRPGHPWPRLQGPIQDHLAKSPEPCLSRPGTEPGGRRLHQCQLH

SEQ ID NO: 11137 - protein, 122 aa, Artificial Sequence
  Synthetic polypeptide
ARHGSSCPKSQHFGRLRRGSNVALMLDVRSLGAVEPICSVNTPREVTLHFLRTAGHPLTRWALQRQPPSPKQLEEEFLKIPSNFVSPEDLDIPGHASKDRYKTILPNPQSRVCLGRAQSQED

SEQ ID NO: 11138 - protein, 118 aa, Artificial Sequence
  Synthetic polypeptide
LMPKIPALWEAEAGLQCGSDAGRSVPGGRRTHLLCEHTPGGHPTLSAHCWTPPYPLGPSAPATQPQATGRRILEDPFKLCQPRRPGHPWPRLQGPIQDHLAKSPEPCLSRPGTEPGGR

SEQ ID NO: 11139 - protein, 116 aa, Artificial Sequence
  Synthetic polypeptide
ARHGSSCPKSQHFGRLRRGSNVALMLDVRSLGAVEPICSVNTPREVTLHFLRTAGHPLTRWALQRQPPSPKQLEEEFLKIPSNFVSPEDLDIPGHASKDRYKTILPNPQSRVCLGR

SEQ ID NO: 11140 - protein, 111 aa, Artificial Sequence
  Synthetic polypeptide
LMPKIPALWEAEAGLQCGSDAGRSVPGGRRTHLLCEHTPGGHPTLSAHCWTPPYPLGPSAPATQPQATGRRILEDPFKLCQPRRPGHPWPRLQGPIQDHLAKSPEPCLSRP

SEQ ID NO: 11141 - protein, 78 aa, Artificial Sequence
  Synthetic polypeptide
ARHGSSCPKSQHFGRLRRGSNVALMLDVRSLGAVEPICSVNTPREVTLHFLRTAGHPLTRWALQRQPPSPKQLEEEFL

SEQ ID NO: 11142 - protein, 73 aa, Artificial Sequence
  Synthetic polypeptide
LMPKIPALWEAEAGLQCGSDAGRSVPGGRRTHLLCEHTPGGHPTLSAHCWTPPYPLGPSAPATQPQATGRRIL

SEQ ID NO: 11143 - protein, 24 aa, Artificial Sequence
  Synthetic polypeptide
NAQPKAWNTAPRCQPHLPGPGEEL

SEQ ID NO: 11144 - protein, 833 aa, Artificial Sequence
  Synthetic polypeptide
MHSPRPGTQRLDANLISLVPERSFEGLSSLRHLWLDDNALTEIPVRALNNLPALQAMTLALNRISHIPDYAFQNLTSLVVLHLHNNRIQHLGTHSFEGLHNLETLDLNYNKLQEFPVAIRTLGRLQELGFHNNNIKAIPEKAFMGNPLLQTIHFYDNPIQFVGRSAFQYLPKLHTLSLNGAMDIQEFPDLKGTTSLEILTLTRAGIRLLPSGMCQQLPRLRVLELSHNQIEELPSLHRCQKLEEIGLQHNRIWEIGADTFSQLSSLQALDLSWNAIRSIHPEAFSTLHSLVKLDLTDNQLTTLPLAGLGGLMHLKLKGNLALSQAFSKDSFPKLRILEVPYAYQCCPYGMCASFFKASGQWEAEDLHLDDEESSKRPLGLLARQAENHYDQDLDELQLEMEDSKPHPSVQCSPTPGPFKPCEYLFESWGIRLAVWAIVLLSVLCNGLVLLTVFAGGPVPLPPVKFVVGAIAGANTLTGISCGLLASVDALTFGQFSEYGARWETGLGCRATGFLAVLGSEASVLLLTLAAVQCSVSVSCVRAYGKSPSLGSVRAGVLGCLALAGLAAALPLASVGEYGASPLCLPYAPPEGQPAALGFTVALVMMNSFCFLVVAGAYIKLYCDLPRGDFEAVWDCAMVRHVAWLIFADGLLYCPVAFLSFASMLGLFPVTPEAVKSVLLVVLPLPACLNPLLYLLFNPHFRDDLRRLRPRAGDSGPLAYAAAGELEKSSCDSTQALVAFSDVDLILEASEAGRPPGLETYGFPSVTLISCQQPGAPRLEGSHCVEPEGNHFGNPQPSMDGELLLRAEGSTPAGGGLSGGGGFQPSGLAFASHV

SEQ ID NO: 11145 - protein, 10 aa, Artificial Sequence
  Synthetic polypeptide
CTAQGLEHSA

SEQ ID NO: 11146 - protein, 266 aa, Artificial Sequence
  Synthetic polypeptide
MHSPRPGTQRLDANLISLVPERSFEGLSSLRHLWLDDNALTEIPVRALNNLPALQAMTLALNRISHIPDYAFQNLTSLVVLHLHNNRIQHLGTHSFEGLHNLETLDLNYNKLQEFPVAIRTLGRLQELGFHNNNIKAIPEKAFMGNPLLQTIHFYDNPIQFVGRSAFQYLPKLHTLSLNGAMDIQEFPDLKGTTSLEILTLTRAGIRLLPSGMCQQLPRLRVLELSHNQIEELPSLHRCQKLEEMRSGGLYFLPPSARGAWSGARV

SEQ ID NO: 11147 - protein, 172 aa, Artificial Sequence
  Synthetic polypeptide
MHSPRPGTQRLDANLISLVPERSFEGLSSLRHLWLDDNALTEIPVRALNNLPALQAMTLALNRISHIPDYAFQNLTSLVVLDLNYNKLQEFPVAIRTLGRLQELSLNGAMDIQEFPDLKGTTSLEILTLTRAGIRLLPSGMCQQLPRLRVLELSHNQIEELPSLHRCQKLEE

SEQ ID NO: 11148 - protein, 20 aa, Artificial Sequence
  Synthetic polypeptide
GGNPAELCRLLTYKTVGIGR

SEQ ID NO: 11149 - protein, 150 aa, Artificial Sequence
  Synthetic polypeptide
PTKLLESGGSNPTTSDSYGDRASARARREAREARLATLTSRVEEDSNRDYKKLYESALTENQKLKTKLQEAQLELADIKSKLEKVAQQKQEKTSDRSSVLEMEKRERRALERKMSEMEEEMKVLTELKSDNQRLKDENGALIRVISKLSK

SEQ ID NO: 11150 - protein, 53 aa, Artificial Sequence
  Synthetic polypeptide
FQTVENLRREPSRTVQTSDLQNCWNREVVILQPVILTVTGLQQEPVGRPGRPA

SEQ ID NO: 11151 - protein, 166 aa, Artificial Sequence
  Synthetic polypeptide
PTKLLESGGSNPTTSDSYGDRASARARREAREARLATLTSRVEEDSNRDYKKLYESALTENQKLKTKLQEAQLELADIKSKLEKVAQQKQEKTSDRSSVLEMEKRERRALERKMSEMEEEMKNLHQLKQIQTLKQMNEQLQAENRALTRVVARLSESIESSDTQEL

SEQ ID NO: 11152 - protein, 18 aa, Artificial Sequence
  Synthetic polypeptide
SQEFETSLADMACSWDLA

SEQ ID NO: 11153 - protein, 52 aa, Artificial Sequence
  Synthetic polypeptide
REQWLTPVIPALWGAEAGGSLEVRSLRPAWPTWRVPGTWLEWRRAHHALYYR

SEQ ID NO: 11154 - protein, 113 aa, Artificial Sequence
  Synthetic polypeptide
DQPGRHGVFLGLGLSGVVPTMHFTIAEGFVKATTVGQMGWFFLMAVMYITGAGLYAARIPERFFPGKFDIWFQSHQIFHVLVVAAAFVHFYGVSNLQEFRYGLEGGCTDDTLL

SEQ ID NO: 11155 - protein, 24 aa, Artificial Sequence
  Synthetic polypeptide
VWGWTLSLERFPRRISQCMASTKS

SEQ ID NO: 11156 - protein, 40 aa, Artificial Sequence
  Synthetic polypeptide
AAGRTEVRLWEGLSNVEAQAVECGAECGGGLFLWKDFQGE

SEQ ID NO: 11157 - protein, 47 aa, Artificial Sequence
  Synthetic polypeptide
QQEELKLDSGKDFLMWKHKLWNAELSVGVDSFFGKISKENKPMHGKH

SEQ ID NO: 11158 - protein, 436 aa, Artificial Sequence
  Synthetic polypeptide
VWWLTPVINRNTLGGQGRRSTRSQDFETSLDNIGIAGTDVAKEASDIILTDDNFTSIVKAVMWGRNVYDSISKFLQFQLTVNVVAVIVAFTGACITQDSPLKAVQMLWVNLIMDTFASLALATEPPTESLLKRRPYGRNKPLISRTMMKNILGHAFYQLIVIFILVFAGEKFFDIDSGRKAPLHSPPSQHYTIVFNTFVLMQLFNEINSRKIHGEKNVFSGIYRNIIFCSVVLGTFICQIFIVEFGGKPFSCTSLSLSQWLWCLFIGIGELLWGQFISAIPTRSLKFLKEAGHGTTKEEITKDAEGLDEIDHAEMELRRGQILWFRGLNRIQTQIKVVKAFHSSLHESIQKPYNQKSIHSFMTHPEFAIEEELPRTPLLDEEEEENPDKASKFGTRVLLLDGEVTPYANTNNNAVDCNQVQLPQSDSSLQSLETSV

SEQ ID NO: 11159 - protein, 29 aa, Artificial Sequence
  Synthetic polypeptide
KPGFRDQPGQYRHRRHRCSKGGFRHHPNR

SEQ ID NO: 11160 - protein, 401 aa, Artificial Sequence
  Synthetic polypeptide
VWWLTPVINRNTLGGQGRRSTRSQDFETSLDNIGIAGTDVAKEASDIILTDDNFTSIVKAVMWGRNVYDSISKFLQFQLTVNVVAVIVAFTGACITQDSPLKAVQMLWVNLIMDTFASLALATEPPTESLLKRRPYGRNKPLISRTMMKNILGHAFYQLIVIFILVFAGEKFFDIDSGRKAPLHSPPSQHYTIVFNTFVLMQLFNEINSRKIHGEKNVFSGIYRNIIFCSVVLGTFICQIFIVEFGGKPFSCTSLSLSQWLWCLFIGIGELLWGQFISAIPTRSLKFLKEAGHGTTKEEITKDAEGLDEIDHAEMELRRGQILWFRGLNRIQTQIDVINTFQTGASFKGVLRRQNMGQHLDVKLVPSSSYVAVAPVKSSPTTSVPAVSSPPMGNQSGQSVP

SEQ ID NO: 11161 - protein, 365 aa, Artificial Sequence
  Synthetic polypeptide
VWWLTPVINRNTLGGQGRRSTRSQDFETSLDNIGIAGTDVAKEASDIILTDDNFTSIVKAVMWGRNVYDSISKFLQFQLTVNVVAVIVAFTGACITQDSPLKAVQMLWVNLIMDTFASLALATEPPTESLLKRRPYGRNKPLISRTMMKNILGHAFYQLIVIFILVFAGEKFFDIDSGRKAPLHSPPSQHYTIVFNTFVLMQLFNEINSRKIHGEKNVFSGIYRNIIFCSVVLGTFICQFISAIPTRSLKFLKEAGHGTTKEEITKDAEGLDEIDHAEMELRRGQILWFRGLNRIQTQIDVINTFQTGASFKGVLRRQNMGQHLDVKLVPSSSYVAVAPVKSSPTTSVPAVSSPPMGNQSGQSVP

SEQ ID NO: 11162 - protein, 490 aa, Artificial Sequence
  Synthetic polypeptide
GRVRWLTPVIPALWEAEAGGSRGQEIKTILANMKKRSEIPCYWENQPTGCQKLNCAFHHNRGRYVDGLFLPPSKTVLPTVPESPEEEVKASQLSVQQNKLSVQSNPSPQLRSVMKVESSENVPSPTHPPVVINAADDDEDDDDQFSEEGDETKTPTLQPTPEVHNGLRVTSVRKPAVNIKQGECLNFGIKTLEEIKSKKMKEKSKKQGEGSSGVSSLLLHPEPVPGPEKENVRTVVRTVTLSTKQGEEPLVRLSLTERLGKRKFSAGGDSDPPLKRSLAQRLGKKVEAPETNIDKTPKKAQVSKSLKERLGMSADPDNEDATDKVNKVGEIHVKTLEEILLERASQKRGELQTKLKTEGPSKTDDSTSGARSSSTIRIKTFSEVLAEKKHRQQEAERQKSKKDTTCIKLKIDSEIKKTVVLPPIVASRGQSEEPAGKTKSMQEVHIKTLEEIKLEKALRVQQSSESSTSSPSQHEATPGARRLLRITKRT

SEQ ID NO: 11163 - protein, 5 aa, Artificial Sequence
  Synthetic polypeptide
HEKTQ

SEQ ID NO: 11164 - protein, 785 aa, Artificial Sequence
  Synthetic polypeptide
GRVRWLTPVIPALWEAEAGGSRGQEIKTILANMKKRSEIPCYWENQPTGCQKLNCAFHHNRGRYVDGLFLPPSKTVLPTVPESPEEEVKASQLSVQQNKLSVQSNPSPQLRSVMKVESSENVPSPTHPPVVINAADDDEDDDDQFSEEGDETKTPTLQPTPEVHNGLRVTSVRKPAVNIKQGECLNFGIKTLEEIKSKKMKEKSKKQGEGSSGVSSLLLHPEPVPGPEKENVRTVVRTVTLSTKQGEEPLVRLSLTERLGKRKFSAGGDSDPPLKRSLAQRLGKKVEAPETNIDKTPKKAQVSKSLKERLGMSADPDNEDATDKVNKVGEIHVKTLEEILLERASQKRGELQTKLKTEGPSKTDDSTSGARSSSTIRIKTFSEVLAEKKHRQQEAERQKSKKDTTCIKLKIDSEIKKTVVLPPIVASRGQSEEPAGKTKSMQEVHIKTLEEIKLEKALRVQQSSESSTSSPSQHEATPGARRLLRITKRTGMKEEKNLQEGNEVDSQSSIRTEAKEASGETTGVDITKIQVKRCETMREKHMQKQQEREKSVLTPLRGDVASCNTQVAEKPVLTAVPGITRHLTKRLPTKSSQKVEVETSGIGDSLLNVKCAAQTLEKRGKAKPKVNVKPSVVKVVSSPKLAPKRKAVEMHAAVIAAVKPLSSSSVLQEPPAKKAAVAVVPLVSEDKSVTVPEAENPRDSLVLPPTQSSSDSSPPEVSGPSSSQMSMKTRRLSSASTGKPPLSVEDDFEKLIWEISGGKLEAEIDLDPGKDEDDLLLELSEMIDS

SEQ ID NO: 11165 - protein, 627 aa, Artificial Sequence
  Synthetic polypeptide
GRVRWLTPVIPALWEAEAGGSRGQEIKTILANMKKRSEIPCYWENQPTGCQKLNCAFHHNRGRYVDGLFLPPSKTVLPTVPESPEEEVKASQLSVQQNKLSVQSNPSPQLRSVMKVESSENVPSPTHPPVVINAADDDEDDDDQFSEEGDETKTPTLQPTPEVHNGLRVTSVRKPAVNIKQGECLNFGIKTLEEIKSKKMKEKSKKQGEGSSGVSSLLLHPEPVPGPEKENVRTVVRTVTLSTKQGEEPLVRLSLTERLGKRKFSAGGDSDPPLKRSLAQRLGKKVEAPETNIDKTPKKAQVSKSLKERLGMSADPDNEDATDKVNKVGEIHVKTLEEILLERASQKRGELQTKLKTEGPSKTDDSTSGARSSSTIRIKTFSEVLAEKKHRQQEAERQKSKKDTTCIKLKIDSEIKKTVVLPPIVASRGQSEEPAGKTKSMQEVHIKTLEEIKLEKALRVQQSSESSTSSPSQHEATPGARRLLRITKRTGMKEEKNLQEGNEVDSQSSIRTEAKEASGETTGVDITKIQVKRCETMREKHMQKQQEREKSVLTPLRGDVASCNTQVAEKPVLTAVPGITRHLTKRLPTKSSQKVEVETSGIGDSLLNVKCAAQTLEKRGKDIFCPL

SEQ ID NO: 11166 - protein, 61 aa, Artificial Sequence
  Synthetic polypeptide
GLPSHVELCDSNPGRDPEPEQDGQASDWENAHPLLLALRLSLRTRWQRPTQRCHGLVLPDP

SEQ ID NO: 11167 - protein, 179 aa, Artificial Sequence
  Synthetic polypeptide
VLRDLMALKKREFACTSSFFACCHPRKMRLAPPCLPPYCEASPAMWNCVIPIQGGILNLNKMVKQVTGKMPILSYWPYGCHCGLGGRGQPKDATDWCCQTHDCCYDHLKTQGCSIYKDYYRYNFSQGNIHCSDKGSWCEQQLCACDKEVAFCLKRNLDTYQKRLRFYWRPHCRGQTPGC

SEQ ID NO: 11168 - protein, 20 aa, Artificial Sequence
  Synthetic polypeptide
DLLLLAFRHTVRPPQPCGTV

SEQ ID NO: 11169 - protein, 63 aa, Artificial Sequence
  Synthetic polypeptide
TWERIVKMKKKIIKMCANNGRRHLKQLLNRERCSWKMWAVRKNKKRRMRHHSRRKIPAAMKIS

SEQ ID NO: 11170 - protein, 31 aa, Artificial Sequence
  Synthetic polypeptide
KYKISQEWWCAPVIPATREGEAGESLEPGRG

SEQ ID NO: 11171 - protein, 183 aa, Artificial Sequence
  Synthetic polypeptide
SQLLGRVRQENRLNLGEDSEDEKEDHKNVRQQRQAASKAASKQREMLMEDVGSEEEQEEEDEAPFQEKDSGSDEDFLMEDDDDSDYGSSKKKNKKMVKKSKPERKEKKMPKPRLKATVTPSPVKGKGKVGRPTASKASKEKTPSPKEEDEEPESPPEKKTSTSPPPEKSGDEGSEDEAPSGED

SEQ ID NO: 11172 - protein, 191 aa, Artificial Sequence
  Synthetic polypeptide
FQHFGRPRRVDHLRSGVRDQPDQHEDSEDEKEDHKNVRQQRQAASKAASKQREMLMEDVGSEEEQEEEDEAPFQEKDSGSDEDFLMEDDDDSDYGSSKKKNKKMVKKSKPERKEKKMPKPRLKATVTPSPVKGKGKVGRPTASKASKEKTPSPKEEDEEPESPPEKKTSTSPPPEKSGDEGSEDEAPSGED

SEQ ID NO: 11173 - protein, 71 aa, Artificial Sequence
  Synthetic polypeptide
GREFETSLTNMRIVKMKKKIIKMCANNGRRHLKQLLNRERCSWKMWAVRKNKKRRMRHHSRRKIPAAMKIS

SEQ ID NO: 11174 - protein, 911 aa, Artificial Sequence
  Synthetic polypeptide
PWVMKTYHMYNADSISAQSKLKEAEKQEEKQIGKSVKQEDRQTPRSPDSTANVRIEEKHVRRSSVKKIEKMKEKRQAKYTENKLKAIKARNEYLLALEATNASVFKYYIHDLSDLIDQCCDLGYHASLNRALRTFLSAELNLEQSKHEGLDAIENAVENLDATSDKQRLMEMYNNVFCPPMKFEFQPHMGDMASQLCAQQPVQSELVQRCQQLQSRLSTLKIENEEVKKTMEATLQTIQDIVTVEDFDVSDCFQYSNSMESVKSTVSETFMSKPSIAKRRANQQETEQFYFTKMKEYLEGRNLITKLQAKHDLLQKTLGESQRTDCSLARRSSTVRKQDSSQAIPLVVESCIRFISRHGLQHEGIFRVSGSQVEVNDIKNAFERGEDPLAGDQNDHDMDSIAGVLKLYFRGLEHPLFPKDIFHDLMACVTMDNLQERALHIRKVLLVLPKTTLIIMRYLFAFLNHLSQFSEENMMDPYNLAICFGPSLMSVPEGHDQVSCQAHVNELIKTIIIQHENIFPSPRELEGPVYSRGGSMEDYCDSPHGETTSVEDSTQDVTAEHHTSDDECEPIEAIAKFDYVGRTARELSFKKGASLLLYQRASDDWWEGRHNGIDGLIPHQYIVVQDTEDGVVERSSPKSEIEVISEPPEEKVTARAGASCPSGGHVADIYLANINKQRKRPESGSIRKTFRSDSHGLSSSLTDSSSPGVGASCRPSSQPIMSQSLPKEGPDKCSISGHGSLNSISRHSSLKNRLDSPQIRKTATAGRSKSFNNHRPMDPEVIAQDIEATMNSALNELRELERQSSVKHTPDVVLDTLEPLKTSPVVAPTSEPSSPLHTQLLKDPEPAFQRSASTAGDIACAFRPVKSVKMAAPVKPPATRPKPTVFPKTNATSPGVNSSTSPQSTDKSCTV

SEQ ID NO: 11175 - protein, 25 aa, Artificial Sequence
  Synthetic polypeptide
ECGLWSLTDLGLNPDSTIYSLYDLG

SEQ ID NO: 11176 - protein, 43 aa, Artificial Sequence
  Synthetic polypeptide
ILIPPFTHCMTLGDEDISHVQCRQHQCSEQTKGGGEAGGEANW

SEQ ID NO: 11177 - protein, 68 aa, Artificial Sequence
  Synthetic polypeptide
GIPRPGLSSKPCKHLGHRFLPCENKSKAVEQVKNAFNKLQEKGIYKAMSEFDIFINYIEAYMTMKIRN

SEQ ID NO: 11178 - protein, 31 aa, Artificial Sequence
  Synthetic polypeptide
ESQDLGCHPSLANILDIDFFPVKTRARPWSR

SEQ ID NO: 11179 - protein, 21 aa, Artificial Sequence
  Synthetic polypeptide
NPKTWVVIQALQTSWTSISSL

SEQ ID NO: 11180 - protein, 194 aa, Artificial Sequence
  Synthetic polypeptide
TCRPFCPPLLATASQMQMVVLPCLGFTLLLWSQVSGAQGQEFHFGPCQVKGVVPQKLWEAFWAVKDTMQAQDNITSARLLQQEVLQNVSDAESCYLVHTLLEFYLKTVFKNYHNRTVEVRTLKSFSTLANNFVLIVSQLQPSQENEMFSIRDSAHRRFLLFRRAFKQLDVEAALTKALGEVDILLTWMQKFYKL

SEQ ID NO: 11181 - protein, 52 aa, Artificial Sequence
  Synthetic polypeptide
ASLEPADPSALLCWRQPLKCRWLCSLAWVLPCFSGARYQGPRAKNSTLGPAK

SEQ ID NO: 11182 - protein, 91 aa, Artificial Sequence
  Synthetic polypeptide
YFQIQKSQLLGRLRHEHHLNLQTLLPSFAGDSLSNADGCAPLPGFYPASLEPGIRGPGPRIPLWALPSEGGCSPETVGSLLGCERHYASSG

SEQ ID NO: 11183 - protein, 141 aa, Artificial Sequence
  Synthetic polypeptide
TCRPFCPPLLATASQMQMVVLPCLGFTLLLWSQVSGAQGQEFHFGPCQVKGVVPQKLWEAFWAVKDTMQAQDNITSARLLQQEVLQNVSQENEMFSIRDSAHRRFLLFRRAFKQLDVEAALTKALGEVDILLTWMQKFYKL

SEQ ID NO: 11184 - protein, 51 aa, Artificial Sequence
  Synthetic polypeptide
ASLEPDPSALLCWRQPLKCRWLCSLAWVLPCFSGARYQGPRAKNSTLGPAK

SEQ ID NO: 11185 - protein, 90 aa, Artificial Sequence
  Synthetic polypeptide
YFQIQKSQLLGRLRHEHHLNLTLLPSFAGDSLSNADGCAPLPGFYPASLEPGIRGPGPRIPLWALPSEGGCSPETVGSLLGCERHYASSG

SEQ ID NO: 11186 - protein, 88 aa, Artificial Sequence
  Synthetic polypeptide
REKVRKGGSERGKKEERKQTLLPSFAGDSLSNADGCAPLPGFYPASLEPGIRGPGPRIPLWALPSEGGCSPETVGSLLGCERHYASSG

SEQ ID NO: 11187 - protein, 206 aa, Artificial Sequence
  Synthetic polypeptide
EREGAREERRKKESRPFCPPLLATASQMQMVVLPCLGFTLLLWSQVSGAQGQEFHFGPCQVKGVVPQKLWEAFWAVKDTMQAQDNITSARLLQQEVLQNVSDAESCYLVHTLLEFYLKTVFKNYHNRTVEVRTLKSFSTLANNFVLIVSQLQPSQENEMFSIRDSAHRRFLLFRRAFKQLDVEAALTKALGEVDILLTWMQKFYKL

SEQ ID NO: 11188 - protein, 64 aa, Artificial Sequence
  Synthetic polypeptide
GESKKGRERERKEGRKKADPSALLCWRQPLKCRWLCSLAWVLPCFSGARYQGPRAKNSTLGPAK

SEQ ID NO: 11189 - protein, 153 aa, Artificial Sequence
  Synthetic polypeptide
EREGAREERRKKESRPFCPPLLATASQMQMVVLPCLGFTLLLWSQVSGAQGQEFHFGPCQVKGVVPQKLWEAFWAVKDTMQAQDNITSARLLQQEVLQNVSQENEMFSIRDSAHRRFLLFRRAFKQLDVEAALTKALGEVDILLTWMQKFYKL

SEQ ID NO: 11190 - protein, 44 aa, Artificial Sequence
  Synthetic polypeptide
KCRIPGPIPDLRSQNPHFTRTTRQQRPHWLCADAPPQRPSCCLA

SEQ ID NO: 11191 - protein, 48 aa, Artificial Sequence
  Synthetic polypeptide
KLIRNAESQAPSQTSGVRILILLGRPGSRDHTGCAQTPLRSVPHVALL

SEQ ID NO: 11192 - protein, 24 aa, Artificial Sequence
  Synthetic polypeptide
DDQAAETTLAVRRRPSAASLMLPC

SEQ ID NO: 11193 - protein, 23 aa, Artificial Sequence
  Synthetic polypeptide
GKTLHQQKDYKLLKAPTHWSLIC

SEQ ID NO: 11194 - protein, 109 aa, Artificial Sequence
  Synthetic polypeptide
KEESINTAILLLSQLKKLPQPPQPSATTTLISQQPSTLRQDPPPTKRLQIIEGTDSLVTHLLNVSSRAMLPIGARSRQFVNEFLVGYPPPSPMEISLAPTERIFTMDQW

SEQ ID NO: 11195 - protein, 23 aa, Artificial Sequence
  Synthetic polypeptide
GKTLHQQKDYKLLKAPTHWSLIC

SEQ ID NO: 11196 - protein, 109 aa, Artificial Sequence; identical to SEQ ID NO: 11194
  Synthetic polypeptide

SEQ ID NO: 11197 - protein, 23 aa, Artificial Sequence
  Synthetic polypeptide
GKTLHQQKDYKLLKAPTHWSLIC

SEQ ID NO: 11198 - protein, 109 aa, Artificial Sequence
  Synthetic polypeptide
KEESINTAILLLSQLKKLPQPPQPSATTTLISQQPSTLRQDPPPTKRLQIIEGTDSLVTHLLNVSSQAILPIGARSRQFVNEFLVGYPQPSPMEISLAPTERIFTMDQW

SEQ ID NO: 11199 - protein, 23 aa, Artificial Sequence
  Synthetic polypeptide
GKTLHQQKDYKLLKAPTHWSLIC

SEQ ID NO: 11200 - protein, 109 aa, Artificial Sequence; identical to SEQ ID NO: 11194
  Synthetic polypeptide

SEQ ID NO: 11201 - protein, 23 aa, Artificial Sequence
  Synthetic polypeptide
GKTLHQQKDYKLLKAPTHWSLIC

SEQ ID NO: 11202 - protein, 109 aa, Artificial Sequence; identical to SEQ ID NO: 11198
  Synthetic polypeptide

SEQ ID NO: 11203 - protein, 23 aa, Artificial Sequence
  Synthetic polypeptide
GKTLHQQKDYKLLKAPTHWSLIC

SEQ ID NO: 11204 - protein, 109 aa, Artificial Sequence
  Synthetic polypeptide
KEESINTAILLLSQLKKLPQPPRPSATTTLISQQPSTLRQDPPPTKRLQIIEGTDSLVTHLLNVSSQAILPIGARSRQFVNEFLVGYPQPSPMEISLAPTERIFTMDQW

SEQ ID NO: 11205 - protein, 419 aa, Artificial Sequence
  Synthetic polypeptide
ICQRGIICGLPPTIANGDFTSISREYFHYGSVVTYHCNLGSRGKKVFELVGEPSIYCTSKDDQVGIWSGPAPQCIIPNKCTPPNVENGILVSDNRSLFSLNEVVEFRCQPGFGMKGPSHVKCQALNKWEPELPSCSRVCQPPPDVLHAERTQRDKDNFSPGQEVFYSCEPGYDLRGSTYLHCTPQGDWSPAAPRCEVKSCDDFLGQLPNGHVLFPLNLQLGAKVDFVCDEGFQLKGSSASYCVLAGMESLWNSSVPVCERKSCETPPVPVNGMVHVITDIHVGSRINYSCTTGHRLIGHSSAECILSGNTAHWSMKPPICQQIFCPNPPAILNGRHTGTPLGDIPYGKEVSYTCDPHPDRGMTFNLIGESTIRRTSEPHGNGVWSSPAPRCELPVGAGSHDALIVGKFYEVFAEEFCHL

SEQ ID NO: 11206 - protein, 65 aa, Artificial Sequence
  Synthetic polypeptide
DHESRAVTNGISVLIKEAQKSSFAPPAMGRNAESAREELFVGYPPPSPMEISLASAESIFTMDQW

SEQ ID NO: 11207 - protein, 37 aa, Artificial Sequence
  Synthetic polypeptide
KRPRRAPLPLLPWEEMLNLPERNYLWATPHHRQWRFH

SEQ ID NO: 11208 - protein, 294 aa, Artificial Sequence
  Synthetic polypeptide
ICQRGIICGLPPTIANGDFTSISREYFHYGSVVTYHCNLGSRGKKVFELVGEPSIYCTSKDDQVGIWSGPAPQCIIPNKCTPPNVENGILVSDNRSLFSLNEVVEFRCQPGFGMKGPSHVKCQALNKWEPELPSCSRVCQPPPDVLHAERTQRDKDNFSPGQEVFYSCEPGYDLRGSTYLHCTPQGDWSPAAPRCEVKSCDDFLGQLPNGHVLFPLNLQLGAKVDFVCDEGFQLKGSSASYCVLAGMESLWNSSVPVCERKSCETPPVPVNGMVHVITDIHVGSRINYSCTTGF

SEQ ID NO: 11209 - protein, 377 aa, Artificial Sequence
  Synthetic polypeptide
FWAIILQILPDACEEPPTFEAMELIGKPKPYYEIGERVDYKCKKGYFYIPPLATHTICDRNHTWLPVSDDACYRETCPYIRDPLNGQAVPANGTYEFGYQMHFICNEGYYLIGEEILYCELKGSVAIWSGKPPICEKVLCTPPPKIKNGKHTFSEVEVFEYLDAVTYSCDPAPGPDPFSLIGESTIYCGDNSVWSRAAPECKVVKCRFPVVENGKQISGFGKKFYYKATVMFECDKGFYLDGSDTIVCDSNSTWDPPVPKCLKVLPPSSTKPPALSHSVSTSSTTKSPASSASGPRPTYKPPVSNYPGYPKPEEGILDSLDVWVIAVIVIAIVVGVAVICVVPYRYLQRRKKKGKADGGAEYATYQTKSTTPAEQRG

SEQ ID NO: 11210 - protein, 46 aa, Artificial Sequence
  Synthetic polypeptide
CKNLDQYASSGQLSCKFCQMPVRSHQHLKLWSSLVNQNPTMRLVNE

SEQ ID NO: 11211 - protein, 34 aa, Artificial Sequence
  Synthetic polypeptide
SPAAWKKQKRMRNVKIWINMLVLGNYPANSARCL

SEQ ID NO: 11212 - protein, 327 aa, Artificial Sequence
  Synthetic polypeptide
FWAIILQILPDACEEPPTFEAMELIGKPKPYYEIGERVDYKCKKGYFYIPPLATHTICDRNHTWLPVSDDACYRETCPYIRDPLNGQAVPANGTYEFGYQMHFICNEGYYLIGEEILYCELKGSVAIWSGKPPICEKVLCTPPPKIKNGKHTFSEVEVFEYLDAVTYSCDPAPGPDPFSLIGESTIYCGDNSVWSRAAPECKVVKCRFPVVENGKQISGFGKKFYYKATVMFECDKGFYLDGSDTIVCDSNSTWDPPVPKCLKGPRPTYKPPVSNYPGYPKPEEGILDSLDVWVIAVIVIAIGKQMVELNMPLTRLNQPLQQSREAE

SEQ ID NO: 11213 - protein, 362 aa, Artificial Sequence
  Synthetic polypeptide
FWAIILQILPDACEEPPTFEAMELIGKPKPYYEIGERVDYKCKKGYFYIPPLATHTICDRNHTWLPVSDDACYRETCPYIRDPLNGQAVPANGTYEFGYQMHFICNEGYYLIGEEILYCELKGSVAIWSGKPPICEKVLCTPPPKIKNGKHTFSEVEVFEYLDAVTYSCDPAPGPDPFSLIGESTIYCGDNSVWSRAAPECKVVKCRFPVVENGKQISGFGKKFYYKATVMFECDKGFYLDGSDTIVCDSNSTWDPPVPKCLKVSTSSTTKSPASSASGPRPTYKPPVSNYPGYPKPEEGILDSLDVWVIAVIVIAIVVGVAVICVVPYRYLQRRKKKGKADGGAEYATYQTKSTTPAEQRG

SEQ ID NO: 11214 - protein, 347 aa, Artificial Sequence
  Synthetic polypeptide
FWAIILQILPDACEEPPTFEAMELIGKPKPYYEIGERVDYKCKKGYFYIPPLATHTICDRNHTWLPVSDDACYRETCPYIRDPLNGQAVPANGTYEFGYQMHFICNEGYYLIGEEILYCELKGSVAIWSGKPPICEKVLCTPPPKIKNGKHTFSEVEVFEYLDAVTYSCDPAPGPDPFSLIGESTIYCGDNSVWSRAAPECKVVKCRFPVVENGKQISGFGKKFYYKATVMFECDKGFYLDGSDTIVCDSNSTWDPPVPKCLKGPRPTYKPPVSNYPGYPKPEEGILDSLDVWVIAVIVIAIVVGVAVICVVPYRYLQRRKKKGKADGGAEYATYQTKSTTPAEQRG

SEQ ID NO: 11215 - protein, 370 aa, Artificial Sequence
  Synthetic polypeptide
FWAIILQILPDACEEPPTFEAMELIGKPKPYYEIGERVDYKCKKGYFYIPPLATHTICDRNHTWLPVSDDACYRETCPYIRDPLNGQAVPANGTYEFGYQMHFICNEGYYLIGEEILYCELKGSVAIWSGKPPICEKVLCTPPPKIKNGKHTFSEVEVFEYLDAVTYSCDPAPGPDPFSLIGESTIYCGDNSVWSRAAPECKVVKCRFPVVENGKQISGFGKKFYYKATVMFECDKGFYLDGSDTIVCDSNSTWDPPVPKCLKVLPPSSTKPPALSHSVSTSSTTKSPASSASGPRPTYKPPVSNYPGYPKPEEGILDSLDVWVIAVIVIAIVVGVAVICVVPYRYLQRRKKKGTYLTDETHREVKFTSL

SEQ ID NO: 11216 - protein, 363 aa, Artificial Sequence
  Synthetic polypeptide
FWAIILQILPDACEEPPTFEAMELIGKPKPYYEIGERVDYKCKKGYFYIPPLATHTICDRNHTWLPVSDDACYRETCPYIRDPLNGQAVPANGTYEFGYQMHFICNEGYYLIGEEILYCELKGSVAIWSGKPPICEKVLCTPPPKIKNGKHTFSEVEVFEYLDAVTYSCDPAPGPDPFSLIGESTIYCGDNSVWSRAAPECKVVKCRFPVVENGKQISGFGKKFYYKATVMFECDKGFYLDGSDTIVCDSNSTWDPPVPKCLKVLPPSSTKPPALSHSVSTSSTTKSPASSASGYPKPEEGILDSLDVWVIAVIVIAIVVGVAVICVVPYRYLQRRKKKGKADGGAEYATYQTKSTTPAEQRG

SEQ ID NO: 11217 - protein, 340 aa, Artificial Sequence
  Synthetic polypeptide
FWAIILQILPDACEEPPTFEAMELIGKPKPYYEIGERVDYKCKKGYFYIPPLATHTICDRNHTWLPVSDDACYRETCPYIRDPLNGQAVPANGTYEFGYQMHFICNEGYYLIGEEILYCELKGSVAIWSGKPPICEKVLCTPPPKIKNGKHTFSEVEVFEYLDAVTYSCDPAPGPDPFSLIGESTIYCGDNSVWSRAAPECKVVKCRFPVVENGKQISGFGKKFYYKATVMFECDKGFYLDGSDTIVCDSNSTWDPPVPKCLKGPRPTYKPPVSNYPGYPKPEEGILDSLDVWVIAVIVIAIVVGVAVICVVPYRYLQRRKKKGTYLTDETHREVKFTSL

SEQ ID NO: 11218 - protein, 355 aa, Artificial Sequence
  Synthetic polypeptide
FWAIILQILPDACEEPPTFEAMELIGKPKPYYEIGERVDYKCKKGYFYIPPLATHTICDRNHTWLPVSDDACYRETCPYIRDPLNGQAVPANGTYEFGYQMHFICNEGYYLIGEEILYCELKGSVAIWSGKPPICEKVLCTPPPKIKNGKHTFSEVEVFEYLDAVTYSCDPAPGPDPFSLIGESTIYCGDNSVWSRAAPECKVVKCRFPVVENGKQISGFGKKFYYKATVMFECDKGFYLDGSDTIVCDSNSTWDPPVPKCLKVSTSSTTKSPASSASGPRPTYKPPVSNYPGYPKPEEGILDSLDVWVIAVIVIAIVVGVAVICVVPYRYLQRRKKKGTYLTDETHREVKFTSL

SEQ ID NO: 11219 - protein, 342 aa, Artificial Sequence
  Synthetic polypeptide
FWAIILQILPDACEEPPTFEAMELIGKPKPYYEIGERVDYKCKKGYFYIPPLATHTICDRNHTWLPVSDDACYRETCPYIRDPLNGQAVPANGTYEFGYQMHFICNEGYYLIGEEILYCELKGSVAIWSGKPPICEKVLCTPPPKIKNGKHTFSEVEVFEYLDAVTYSCDPAPGPDPFSLIGESTIYCGDNSVWSRAAPECKVVKCRFPVVENGKQISGFGKKFYYKATVMFECDKGFYLDGSDTIVCDSNSTWDPPVPKCLKVSTSSTTKSPASSASGPRPTYKPPVSNYPGYPKPEEGILDSLDVWVIAVIVIAIGKQMVELNMPLTRLNQPLQQSREAE

SEQ ID NO: 11220 - protein, 333 aa, Artificial Sequence
  Synthetic polypeptide
FWAIILQILPDACEEPPTFEAMELIGKPKPYYEIGERVDYKCKKGYFYIPPLATHTICDRNHTWLPVSDDACYRETCPYIRDPLNGQAVPANGTYEFGYQMHFICNEGYYLIGEEILYCELKGSVAIWSGKPPICEKVLCTPPPKIKNGKHTFSEVEVFEYLDAVTYSCDPAPGPDPFSLIGESTIYCGDNSVWSRAAPECKVVKCRFPVVENGKQISGFGKKFYYKATVMFECDKGFYLDGSDTIVCDSNSTWDPPVPKCLKGYPKPEEGILDSLDVWVIAVIVIAIVVGVAVICVVPYRYLQRRKKKGKADGGAEYATYQTKSTTPAEQRG

SEQ ID NO: 11221 - protein, 348 aa, Artificial Sequence
  Synthetic polypeptide
FWAIILQILPDACEEPPTFEAMELIGKPKPYYEIGERVDYKCKKGYFYIPPLATHTICDRNHTWLPVSDDACYRETCPYIRDPLNGQAVPANGTYEFGYQMHFICNEGYYLIGEEILYCELKGSVAIWSGKPPICEKVLCTPPPKIKNGKHTFSEVEVFEYLDAVTYSCDPAPGPDPFSLIGESTIYCGDNSVWSRAAPECKVVKCRFPVVENGKQISGFGKKFYYKATVMFECDKGFYLDGSDTIVCDSNSTWDPPVPKCLKVSTSSTTKSPASSASGYPKPEEGILDSLDVWVIAVIVIAIVVGVAVICVVPYRYLQRRKKKGKADGGAEYATYQTKSTTPAEQRG

SEQ ID NO: 11222 - protein, 6 aa, Artificial Sequence
  Synthetic polypeptide
EAKGAT

SEQ ID NO: 11223 - protein, 22 aa, Artificial Sequence
  Synthetic polypeptide
SQHLERPRVQHRKCLLPAGHLC

SEQ ID NO: 11224 - protein, 111 aa, Artificial Sequence
  Synthetic polypeptide
MGTVAHTYNPSTLRGQGCNIENACYPLGICAERTAIQKAVSEGYKDFRAIAIASDMQDDFISPCGACRQVMREFGTNWPVYMTKPDGTYIVMTVQELLPSSFGPEDLQKTQ

SEQ ID NO: 11225 - protein, 47 aa, Artificial Sequence
  Synthetic polypeptide
FSITYPNPIKLPHPDLPLLTLFADSACLHPVTCKMILSLHVGPAGKS

SEQ ID NO: 11226 - protein, 73 aa, Artificial Sequence
  Synthetic polypeptide
SPFADSLCRLSLPAPSDMQDDFISPCGACRQVMREFGTNWPVYMTKPDGTYIVMTVQELLPSSFGPEDLQKTQ

SEQ ID NO: 11227 - protein, 78 aa, Artificial Sequence
  Synthetic polypeptide
ISLMRSDGFINGGSLTQVLSCLLPGKTSLCSSFLFRHGCEASPAMWNFWHQLARVHDQAGWYVYCHDGPGAAALLLWA

SEQ ID NO: 11228 - protein, 75 aa, Artificial Sequence
  Synthetic polypeptide
MGVPSHKSSLACCQVRHPFALPSSSAMVVRLPQPCGTFGTNWPVYMTKPDGTYIVMTVQELLPSSFGPEDLQKTQ

SEQ ID NO: 11229 - protein, 16 aa, Artificial Sequence
  Synthetic polypeptide
GFPSHVELLAPTGPCT

SEQ ID NO: 11230 - protein, 92 aa, Artificial Sequence
  Synthetic polypeptide
QFPVQWLAQSSCSAVTATSWGPGGTCRVTRRVGAAFVCPTWWVPNVTSVLPTTGSWPVARAVNRVPATRTTPSAHSATSSQGSAPVGKALVA

SEQ ID NO: 11231 - protein, 22 aa, Artificial Sequence
  Synthetic polypeptide
RLHEATYDSSQFSGWHRVVAQL

SEQ ID NO: 11232 - protein, 745 aa, Artificial Sequence
  Synthetic polypeptide
LLSCDCNILGSRRDMPCDEESGRCLCLPNVVGPKCDQCAPYHWKLASGQGCEPCACDPHNSLSPQCNQFTGQCPCREGFGGLMCSAAAIRQCPDRTYGDVATGCRACDCDFRGTEGPGCDKASGRCLCRPGLTGPRCDQCQRGYCNRYPVCVACHPCFQTYDADLREQALRFGRLRNATASLWSGPGLEDRGLASRILDAKSKIEQIRAVLSSPAVTEQEVAQVASAILSLRRTLQGLQLDLPLEEETLSLPRDLESLDRSFNGLLTMYQRKREQFEKISSADPSGAFRMLSTAYEQSAQAAQQVSDSSRLLDQLRDSRREAERLVRQAGGGGGTGSPKLVALRLEMSSLPDLTPTFNKLCGNSRQMACTPISCPGELCPQDNGTACGSRCRGVLPRAGGAFLMAGQVAEQLRGFNAQLQRTRQMIRAAEESASQIQSSAQRLETQVSASRSQMEEDVRRTRLLIQQVRDFLTDPDTDAATIQEVSEAVLALWLPTDSATVLQKMNEIQAIAARLPNVDLVLSQTKQDIARARRLQAEAEEARSRAHAVEGQVEDVVGNLRQGTVALQEAQDTMQGTSRSLRLIQDRVAEVQQVLRPAEKLVTSMTKQLGDFWTRMEELRHQARQQGAEAVQAQQLAEGASEQALSAQEGFERIKQKYAELKDRLGQSSMLGEQGARIQSVKTEAEELFGETMEMMDRMKDMELELLRGSQAIMLRSADLTGLEKRVEQIRDHINGRVLYYATCK

SEQ ID NO: 11233 - protein, 74 aa, Artificial Sequence
  Synthetic polypeptide
KNVKVIKKTKINGKTSHVHMNWQTHIGESFGQQRWRSKICSPSFSWRRSITWPPSAGRSVTPCSCSSSWSRCSP

SEQ ID NO: 11234 - protein, 39 aa, Artificial Sequence
  Synthetic polypeptide
IGRLILVRASGSRGGDQRSAVRVSAGEDRLLGHHPPAGA

SEQ ID NO: 11235 - protein, 209 aa, Artificial Sequence
  Synthetic polypeptide
ELRAAEVEIKDLQSEFQLEKIDYLATIRRQERDSMLLQQLLEQVQPLIRRDCNYSNLEKILRESCWDEDNGFWKIPHPVITKTSLPVAVSTGPQNKPARKTSAADNGEPNMEDDRYRLMLSRSNSENIASNYFRSKRASQILSTDARKSLTHHNSPPGLSCPLSNNSAIPPTQAPEMPQPRPFRLESLDIPFTKAKRKKSKSNFGSEPL

SEQ ID NO: 11236 - protein, 208 aa, Artificial Sequence
  Synthetic polypeptide
ELRAAEVEIKDLQSEFQLEKIDYLATIRRQERDSMLLQQLLEQVQPLIRRDCNYSNLEKILRESCWDEDNGFWKIPHPVITKTSLPVVSTGPQNKPARKTSAADNGEPNMEDDRYRLMLSRSNSENIASNYFRSKRASQILSTDARKSLTHHNSPPGLSCPLSNNSAIPPTQAPEMPQPRPFRLESLDIPFTKAKRKKSKSNFGSEPL

SEQ ID NO: 11237 - protein, 235 aa, Artificial Sequence
  Synthetic polypeptide
FSFCLPPCKMCLSPSTMIVRPPQPCGTLRAAEVEIKDLQSEFQLEKIDYLATIRRQERDSMLLQQLLEQVQPLIRRDCNYSNLEKILRESCWDEDNGFWKIPHPVITKTSLPVAVSTGPQNKPARKTSAADNGEPNMEDDRYRLMLSRSNSENIASNYFRSKRASQILSTDARKSLTHHNSPPGLSCPLSNNSAIPPTQAPEMPQPRPFRLESLDIPFTKAKRKKSKSNFGSEPL

SEQ ID NO: 11238 - protein, 53 aa, Artificial Sequence
  Synthetic polypeptide
GRPSHVELFGQQRWRSKICSPSFSWRRSITWPPSAGRSVTPCSCSSSWSRCSP

SEQ ID NO: 11239 - protein, 49 aa, Artificial Sequence
  Synthetic polypeptide
DVPFTFHHDCEAAPAMWNSSGSRGGDQRSAVRVSAGEDRLLGHHPPAGA

SEQ ID NO: 11240 - protein, 234 aa, Artificial Sequence
  Synthetic polypeptide
FSFCLPPCKMCLSPSTMIVRPPQPCGTLRAAEVEIKDLQSEFQLEKIDYLATIRRQERDSMLLQQLLEQVQPLIRRDCNYSNLEKILRESCWDEDNGFWKIPHPVITKTSLPVVSTGPQNKPARKTSAADNGEPNMEDDRYRLMLSRSNSENIASNYFRSKRASQILSTDARKSLTHHNSPPGLSCPLSNNSAIPPTQAPEMPQPRPFRLESLDIPFTKAKRKKSKSNFGSEPL

SEQ ID NO: 11241 - protein, 51 aa, Artificial Sequence
  Synthetic polypeptide
SGLQDSCGISRSLRSYLIVEREPVEYMNLSVLEKYLQRQLDFCQLLGCLLS

SEQ ID NO: 11242 - protein, 38 aa, Artificial Sequence
  Synthetic polypeptide
MRAYKGQPPCLNLGSRIPVGSAEASGATSLWRENLWST

SEQ ID NO: 11243 - protein, 482 aa, Artificial Sequence
  Synthetic polypeptide
GHIKANPLALIWAPGFLWDQQKPQELPHCGERTCGVHELICIRKVSPEAVGFLSAVGVFIILMLLLFLYINKKFCFENVGGFPDLGSEYSTRKNSQDKIYNSYMDKDEHGSSSESEDEALGKYHEALSRTHNSRLPLADSRQRNYAWETRQKYSPLSAEYDGYSSEASIDEGNCIQRMRRTPPLDELQPPPYQDDSGSPHLSCTPSEIGDSKCEFSHCSNSPRCSYNKCPSEGSTGHEIESFHNKGYEEDVPSDSTAVLSPEDMSAQGSSSQLPKPFDPEPEAKYGTLDVTFDYDSQEQKLLVTVTAVTDIPTYNRTGGNSWQVHLVLLPIKKQRAKTSIQRGPCPVFTETFKFNHVESEMIGNYAVRFRLYGVHRMKKEKIVGEKIFYLTKLNLQGKMSLPVILEPSYNHSGCDSQMSVSEMSCSESTSSCQSLEHGSVPEILIGLLYNATTGRLSAEVIKGSHFKNLAANRPPKMDCSVV

SEQ ID NO: 11244 - protein, 628 aa, Artificial Sequence
  Synthetic polypeptide
SGLQDSCGISRSLRSYLIVEREPVEYMNLSVLEKIGYFSVARLEYSGTILAHCNFRLLGSNDSSASASQVTGTTVSPEAVGFLSAVGVFIILMLLLFLYINKKFCFENVGGFPDLGSEYSTRKNSQDKIYNSYMDKDEHGSSSESEDEALGKYHEALSRTHNSRLPLADSRQRNYAWETRQKYSPLSAEYDGYSSEASIDEGNCIQRMRRTPPLDELQPPPYQDDSGSPHLSCTPSEIGDSKCEFSHCSNSPRCSYNKCPSEGSTGHEIESFHNKGYEEDVPSDSTAVLSPEDMSAQGSSSQLPKPFDPEPEAKYGTLDVTFDYDSQEQKLLVTVTAVTDIPTYNRTGGNSWQVHLVLLPIKKQRAKTSIQRGPCPVFTETFKFNHVESEMIGNYAVRFRLYGVHRMKKEKIVGEKIFYLTKLNLQGKMSLPVILEPSYNHSGCDSQMSVSEMSCSESTSSCQSLEHGSVPEILIGLLYNATTGRLSAEVIKGSHFKNLAANRPPNGLFCCLKHLIGGQVYIIRDTYVKLTLLNSMGQEMSKCKTSIRRGQPNPVYKETFVFQVALFQLSDVTLILSVYNKRSMKRKEMIGWISLGLNSSGEEELNHWTEMKESKGQQVCRWHALLES

SEQ ID NO: 11245 - protein, 110 aa, Artificial Sequence
  Synthetic polypeptide
GHIKANPLALIWAPGFLWDQQKPQELPHCGERTCGVHELICIRKDRVFLCGQAGVQWHHLGSLQLPPPGFKRFFCLSIPSNWDYSISRGSWIFVSCWGVYYLDAAPFSLY

SEQ ID NO: 11246 - protein, 605 aa, Artificial Sequence
  Synthetic polypeptide
GHIKANPLALIWAPGFLWDQQKPQELPHCGERTCGVHELICIRKVSPEAVGFLSAVGVFIILMLLLFLYINKKFCFENVGGFPDLGSEYSTRKNSQDKIYNSYMDKDEHGSSSESEDEALGKYHEALSRTHNSRLPLADSRQRNYAWETRQKYSPLSAEYDGYSSEASIDEGNCIQRMRRTPPLDELQPPPYQDDSGSPHLSCTPSEIGDSKCEFSHCSNSPRCSYNKCPSEGSTGHEIESFHNKGYEEDVPSDSTAVLSPEDMSAQGSSSQLPKPFDPEPEAKYGTLDVTFDYDSQEQKLLVTVTAVTDIPTYNRTGGNSWQVHLVLLPIKKQRAKTSIQRGPCPVFTETFKFNHVESEMIGNYAVRFRLYGVHRMKKEKIVGEKIFYLTKLNLQGKMSLPVILEPSYNHSGCDSQMSVSEMSCSESTSSCQSLEHGSVPEILIGLLYNATTGRLSAEVIKGSHFKNLAANRPPTFHPLLSDGLFCCLKHLIGGQVYIIRDTYVKLTLLNSMGQEMSKCKTSIRRGQPNPVYKETFVFQVALFQLSDVTLILSVYNKRSMKRKEMIGWISLGLNSSGEEELNHWTEMKESKGQQVCRWHALLES

SEQ ID NO: 11247 - protein, 598 aa, Artificial Sequence
  Synthetic polypeptide
GHIKANPLALIWAPGFLWDQQKPQELPHCGERTCGVHELICIRKVSPEAVGFLSAVGVFIILMLLLFLYINKKFCFENVGGFPDLGSEYSTRKNSQDKIYNSYMDKDEHGSSSESEDEALGKYHEALSRTHNSRLPLADSRQRNYAWETRQKYSPLSAEYDGYSSEASIDEGNCIQRMRRTPPLDELQPPPYQDDSGSPHLSCTPSEIGDSKCEFSHCSNSPRCSYNKCPSEGSTGHEIESFHNKGYEEDVPSDSTAVLSPEDMSAQGSSSQLPKPFDPEPEAKYGTLDVTFDYDSQEQKLLVTVTAVTDIPTYNRTGGNSWQVHLVLLPIKKQRAKTSIQRGPCPVFTETFKFNHVESEMIGNYAVRFRLYGVHRMKKEKIVGEKIFYLTKLNLQGKMSLPVILEPSYNHSGCDSQMSVSEMSCSESTSSCQSLEHGSVPEILIGLLYNATTGRLSAEVIKGSHFKNLAANRPPNGLFCCLKHLIGGQVYIIRDTYVKLTLLNSMGQEMSKCKTSIRRGQPNPVYKETFVFQVALFQLSDVTLILSVYNKRSMKRKEMIGWISLGLNSSGEEELNHWTEMKESKGQQVCRWHALLES

SEQ ID NO: 11248 - protein, 579 aa, Artificial Sequence
  Synthetic polypeptide
GHIKANPLALIWAPGFLWDQQKPQELPHCGERTCGVHELICIRKVSPEAVGFLSAVGVFIILMLLLFLYINKKFCFENVGGFPDLGSEYSTRKNSQDKIYNSYMDKDEHGSSSESEDEALGKYHEALSRTHNSRLPLADSRQRNYAWETRQKYSPLSAEYDGYSSEASIDEGNCIQRMRRTPPLDELQPPPYQDDSGSPHLSCTPSEIGDSKCEFSHCSNSPRCSYNKCPSEGSTGHEIESFHNKGYEEDVPSDSTAVLSPEDMSAQGSSSQLPKPFDPEPEAKYGTLDVTFDYDSQEQKLLVTVTAVTDIPTYNRTGGNSWQVHLVLLPIKKQRAKTSIQRGPCPVFTETFKFNHVESEMIGNYAVRFRLYGVHRMKKEKIVGEKIFYLTKLNLQGKMSLPVILEPSYNHSGCDSQMSVSEMSCSESTSSCQSLEHGSVPEILIGLLYNATTGRLSAEVIKGSHFKNLAANRPPNTYVKLTLLNSMGQEMSKCKTSIRRGQPNPVYKETFVFQVALFQLSDVTLILSVYNKRSMKRKEMIGWISLGLNSSGEEELNHWTEMKESKGQQVCRWHALLES

SEQ ID NO: 11249 - protein, 46 aa, Artificial Sequence
  Synthetic polypeptide
QYYLVFKIMDSGVRMSGFKSSISRGSWIFVSCWGVYYLDAAPFSLY

SEQ ID NO: 11250 - protein, 458 aa, Artificial Sequence
  Synthetic polypeptide
SITWCLRSWILESECLDSNPVSPEAVGFLSAVGVFIILMLLLFLYINKKFCFENVGGFPDLGSEYSTRKNSQDKIYNSYMDKDEHGSSSESEDEALGKYHEALSRTHNSRLPLADSRQRNYAWETRQKYSPLSAEYDGYSSEASIDEGNCIQRMRRTPPLDELQPPPYQDDSGSPHLSCTPSEIGDSKCEFSHCSNSPRCSYNKCPSEGSTGHEIESFHNKGYEEDVPSDSTAVLSPEDMSAQGSSSQLPKPFDPEPEAKYGTLDVTFDYDSQEQKLLVTVTAVTDIPTYNRTGGNSWQVHLVLLPIKKQRAKTSIQRGPCPVFTETFKFNHVESEMIGNYAVRFRLYGVHRMKKEKIVGEKIFYLTKLNLQGKMSLPVILEPSYNHSGCDSQMSVSEMSCSESTSSCQSLEHGSVPEILIGLLYNATTGRLSAEVIKGSHFKNLAANRPPKMDCSVV

SEQ ID NO: 11251 - protein, 31 aa, Artificial Sequence
  Synthetic polypeptide
DHGFWSQNVWIQIQYLQRQLDFCQLLGCLLS

SEQ ID NO: 11252 - protein, 574 aa, Artificial Sequence
  Synthetic polypeptide
SITWCLRSWILESECLDSNPVSPEAVGFLSAVGVFIILMLLLFLYINKKFCFENVGGFPDLGSEYSTRKNSQDKIYNSYMDKDEHGSSSESEDEALGKYHEALSRTHNSRLPLADSRQRNYAWETRQKYSPLSAEYDGYSSEASIDEGNCIQRMRRTPPLDELQPPPYQDDSGSPHLSCTPSEIGDSKCEFSHCSNSPRCSYNKCPSEGSTGHEIESFHNKGYEEDVPSDSTAVLSPEDMSAQGSSSQLPKPFDPEPEAKYGTLDVTFDYDSQEQKLLVTVTAVTDIPTYNRTGGNSWQVHLVLLPIKKQRAKTSIQRGPCPVFTETFKFNHVESEMIGNYAVRFRLYGVHRMKKEKIVGEKIFYLTKLNLQGKMSLPVILEPSYNHSGCDSQMSVSEMSCSESTSSCQSLEHGSVPEILIGLLYNATTGRLSAEVIKGSHFKNLAANRPPNGLFCCLKHLIGGQVYIIRDTYVKLTLLNSMGQEMSKCKTSIRRGQPNPVYKETFVFQVALFQLSDVTLILSVYNKRSMKRKEMIGWISLGLNSSGEEELNHWTEMKESKGQQVCRWHALLES

SEQ ID NO: 11253 - protein, 581 aa, Artificial Sequence
  Synthetic polypeptide
SITWCLRSWILESECLDSNPVSPEAVGFLSAVGVFIILMLLLFLYINKKFCFENVGGFPDLGSEYSTRKNSQDKIYNSYMDKDEHGSSSESEDEALGKYHEALSRTHNSRLPLADSRQRNYAWETRQKYSPLSAEYDGYSSEASIDEGNCIQRMRRTPPLDELQPPPYQDDSGSPHLSCTPSEIGDSKCEFSHCSNSPRCSYNKCPSEGSTGHEIESFHNKGYEEDVPSDSTAVLSPEDMSAQGSSSQLPKPFDPEPEAKYGTLDVTFDYDSQEQKLLVTVTAVTDIPTYNRTGGNSWQVHLVLLPIKKQRAKTSIQRGPCPVFTETFKFNHVESEMIGNYAVRFRLYGVHRMKKEKIVGEKIFYLTKLNLQGKMSLPVILEPSYNHSGCDSQMSVSEMSCSESTSSCQSLEHGSVPEILIGLLYNATTGRLSAEVIKGSHFKNLAANRPPTFHPLLSDGLFCCLKHLIGGQVYIIRDTYVKLTLLNSMGQEMSKCKTSIRRGQPNPVYKETFVFQVALFQLSDVTLILSVYNKRSMKRKEMIGWISLGLNSSGEEELNHWTEMKESKGQQVCRWHALLES

SEQ ID NO: 11254 - protein, 555 aa, Artificial Sequence
  Synthetic polypeptide
SITWCLRSWILESECLDSNPVSPEAVGFLSAVGVFIILMLLLFLYINKKFCFENVGGFPDLGSEYSTRKNSQDKIYNSYMDKDEHGSSSESEDEALGKYHEALSRTHNSRLPLADSRQRNYAWETRQKYSPLSAEYDGYSSEASIDEGNCIQRMRRTPPLDELQPPPYQDDSGSPHLSCTPSEIGDSKCEFSHCSNSPRCSYNKCPSEGSTGHEIESFHNKGYEEDVPSDSTAVLSPEDMSAQGSSSQLPKPFDPEPEAKYGTLDVTFDYDSQEQKLLVTVTAVTDIPTYNRTGGNSWQVHLVLLPIKKQRAKTSIQRGPCPVFTETFKFNHVESEMIGNYAVRFRLYGVHRMKKEKIVGEKIFYLTKLNLQGKMSLPVILEPSYNHSGCDSQMSVSEMSCSESTSSCQSLEHGSVPEILIGLLYNATTGRLSAEVIKGSHFKNLAANRPPNTYVKLTLLNSMGQEMSKCKTSIRRGQPNPVYKETFVFQVALFQLSDVTLILSVYNKRSMKRKEMIGWISLGLNSSGEEELNHWTEMKESKGQQVCRWHALLES

SEQ ID NO: 11255 - protein, 74 aa, Artificial Sequence
  Synthetic polypeptide
YLPKGCDSQMSVSEMSCSESTSSCQSLEHGSVPEILIGLLYNATTGRLSAEVIKGSHFKNLAANRPPKMDCSVV

SEQ ID NO: 11256 - protein, 9 aa, Artificial Sequence
  Synthetic polypeptide
TSLRAVTPK

SEQ ID NO: 11257 - protein, 190 aa, Artificial Sequence
  Synthetic polypeptide
YLPKGCDSQMSVSEMSCSESTSSCQSLEHGSVPEILIGLLYNATTGRLSAEVIKGSHFKNLAANRPPNGLFCCLKHLIGGQVYIIRDTYVKLTLLNSMGQEMSKCKTSIRRGQPNPVYKETFVFQVALFQLSDVTLILSVYNKRSMKRKEMIGWISLGLNSSGEEELNHWTEMKESKGQQVCRWHALLES

SEQ ID NO: 11258 - protein, 197 aa, Artificial Sequence
  Synthetic polypeptide
YLPKGCDSQMSVSEMSCSESTSSCQSLEHGSVPEILIGLLYNATTGRLSAEVIKGSHFKNLAANRPPTFHPLLSDGLFCCLKHLIGGQVYIIRDTYVKLTLLNSMGQEMSKCKTSIRRGQPNPVYKETFVFQVALFQLSDVTLILSVYNKRSMKRKEMIGWISLGLNSSGEEELNHWTEMKESKGQQVCRWHALLES

SEQ ID NO: 11259 - protein, 171 aa, Artificial Sequence
  Synthetic polypeptide
YLPKGCDSQMSVSEMSCSESTSSCQSLEHGSVPEILIGLLYNATTGRLSAEVIKGSHFKNLAANRPPNTYVKLTLLNSMGQEMSKCKTSIRRGQPNPVYKETFVFQVALFQLSDVTLILSVYNKRSMKRKEMIGWISLGLNSSGEEELNHWTEMKESKGQQVCRWHALLES

SEQ ID NO: 11260 - protein, 17 aa, Artificial Sequence
  Synthetic polypeptide
WLRGIKQDNIWFRMLSK

SEQ ID NO: 11261 - protein, 12 aa, Artificial Sequence
  Synthetic polypeptide
EELNKIIYGSEC

SEQ ID NO: 11262 - protein, 125 aa, Artificial Sequence
  Synthetic polypeptide
YMVQNAKQVNSALKQKMEGGIEEFKPPESNQKINARWTTEEQLLAVQGTDPTGSSDTGSITSCPIIHSNTNSPYCHSEPASTTSSSNTACCPGSSPAASSTPAAGSVHPAPANFKSASTTSYSPC

SEQ ID NO: 11263 - protein, 138 aa, Artificial Sequence
  Synthetic polypeptide
YMVQNAKQVNSALKQKMEGGIEEFKPPESNQKINARWTTEEQLLAVQGVRKYGKDFQAIADVIGNKTVGQVKNFFVNYRRRFNLEEVLQEWEAEQGTQASNGDASTLGEETKSASNVPSGKSTDEEEEVCLCMEFELI

SEQ ID NO: 11264 - protein, 15 aa, Artificial Sequence
  Synthetic polypeptide
WLRGIKQDNIWFRML

SEQ ID NO: 11265 - protein, 6 aa, Artificial Sequence
  Synthetic polypeptide
YMVQNA

SEQ ID NO: 11266 - protein, 242 aa, Artificial Sequence
  Synthetic polypeptide
YMVQNAKQVNSALKQKMEGGIEEFKPPESNQKINARWTTEEQLLAVQGVRKYGKDFQAIADVIGNKTVGQVKNFFVNYRRRFNLEEVLQEWEAEQGTQASNGDASTLGEETKSASNVPSGKSTDEEEEAQTPQAPRTLGPSPPAPSSTPTPTAPIATLNQPPPLLRPTLPAAPALHRQPPPLQQQARFIQPRPTLNQPPPPLIRPANSMPPRLNPRPVLSTVGGQQPPSLIGIQTDSQSSLH

SEQ ID NO: 11267 - protein, 45 aa, Artificial Sequence
  Synthetic polypeptide
YMVQNAKQVNSALKQKMEGGIEEFKPPEAQTPQAPRTLGPSPPAP

SEQ ID NO: 11268 - protein, 169 aa, Artificial Sequence
  Synthetic polypeptide
YMVQNAKQVNSALKQKMEGGIEEFKPPESNQKINARWTTEEQLLAVQGVRKYGKDFQAIADVIGNKTVGQVKNFFVNYRRRFNLEEAQTPQAPRTLGPSPPAPSSTPTPTAPIATLNQPPPLLRPTLPAAPALHRQPPPLQQQARFIQPRPTLNQPPPPLIRPANSMPP

SEQ ID NO: 11269 - protein, 54 aa, Artificial Sequence
  Synthetic polypeptide
YMVQNAKQVNSALKQKMEGGIEEFKPPESNQKINARWTTEEQLLAVQGDWLLGK

SEQ ID NO: 11270 - protein, 87 aa, Artificial Sequence
  Synthetic polypeptide
KRIFPIKDVPLETDDLTTWLYQRFVEKEDLLSHFYETGAFPPSKGHKEAVSREMTLSNLWIFLIQSFAFLSGYMWYNIIQYFYHCLF

SEQ ID NO: 11271 - protein, 56 aa, Artificial Sequence
  Synthetic polypeptide
SAKRGSFQLKMYPWRLMTLPLGSISGLLKKKTSYHIFMKQELFHLPRAIRKLFPGR

SEQ ID NO: 11272 - protein, 60 aa, Artificial Sequence
  Synthetic polypeptide
LKLLYNCIGKMGRMCICYGNRKRKELHPHLPYWEVSREGLKQKKHGDKYQDNQLKEDLSN

SEQ ID NO: 11273 - protein, 29 aa, Artificial Sequence
  Synthetic polypeptide
QSNFIKLVRVLDTSKKKFPGIWIYWNSPC

SEQ ID NO: 11274 - protein, 243 aa, Artificial Sequence
  Synthetic polypeptide
EFWTLQKRSFQEYGSTGTAHADSEYERRMMSVYNHVLEEVESLNRKYTPVSYMHTACLCNAIIALLKVPLSFQRYFFQKLQSTSIKLALSPSPRNPAEPIAVQNNQQLALKVEGVVQHGSKPGLFRKIQSVCLNVSSTLQSKSGQDYKIPIDNMTNEMEQRVEPHNDYFSTQFLLNFAILGTHNITVESSVKDANGIVWKTGPRTTIFVKSLEDPYSQQIRLQQQQAQQPLQQQQQRNAYTRF

SEQ ID NO: 11275 - protein, 37 aa, Artificial Sequence
  Synthetic polypeptide
TIQFYKTGKSFGHFKKEVSRNMDLLEQPMLIVNMKEE

SEQ ID NO: 11276 - protein, 229 aa, Artificial Sequence
  Synthetic polypeptide
EFWTLQKRSFQEYGSTGTAHADSEYERRMMSVYNHVLEEHTACLCNAIIALLKVPLSFQRYFFQKLQSTSIKLALSPSPRNPAEPIAVQNNQQLALKVEGVVQHGSKPGLFRKIQSVCLNVSSTLQSKSGQDYKIPIDNMTNEMEQRVEPHNDYFSTQFLLNFAILGTHNITVESSVKDANGIVWKTGPRTTIFVKSLEDPYSQQIRLQQQQAQQPLQQQQQRNAYTRF

SEQ ID NO: 11277 - protein, 223 aa, Artificial Sequence
  Synthetic polypeptide
EFWTLQKRSFQEYGSTGTAHADSEYERRMMSVYNHVLEEVESLNRKYTPVSYMRYFFQKLQSTSIKLALSPSPRNPAEPIAVQNNQQLALKVEGVVQHGSKPGLFRKIQSVCLNVSSTLQSKSGQDYKIPIDNMTNEMEQRVEPHNDYFSTQFLLNFAILGTHNITVESSVKDANGIVWKTGPRTTIFVKSLEDPYSQQIRLQQQQAQQPLQQQQQRNAYTRF

SEQ ID NO: 11278 - protein, 26 aa, Artificial Sequence
  Synthetic polypeptide
ATKQDPSLQKKITKLARKCEFFSQIF

SEQ ID NO: 11279 - protein, 631 aa, Artificial Sequence
  Synthetic polypeptide
PGNVSSSPRSSDLVKLAQECCYHNNRGIAAHGVRVLTNITVSCQEKDLLALEQDAVFGLESLLVLCSQDDSPGAQATLKIALNCMVKLAKGRPHLSQSVVETLLTQLHSAQDAARILMCHCLAAIAMQLPVLGDGMLGDLMELYKVIGRSATDKQQELLVSLATVIFVASQKALSVESKAVIKQQLESVSNGWTVYRIARQASRMGNHDMAKELYQSLLTQVASEHFYFWLNSLKEFSHAEQCLTGLQEENYSSALSCIAESLKFYHKGIASLTAASTPLNPLSFQCEFVKLRIDLLQAFSQLICTCNSLKTSPPPAIATTIAMTLGNDLQRCGRISNQMKQSMEEFRSLASRYGDLYQASFDADSATLRNVELQQQSCLLISHAIEALILDPESASFQEYGSTGTAHADSEYERRMMSVYNHVLEEVESLNRKYTPVSYMHTACLCNAIIALLKVPLSFQRYFFQKLQSTSIKLALSPSPRNPAEPIAVQNNQQLALKVEGVVQHGSKPGLFRKIQSVCLNVSSTLQSKSGQDYKIPIDNMTNEMEQRVEPHNDYFSTQFLLNFAILGTHNITVESSVKDANGIVWKTGPRTTIFVKSLEDPYSQQIRLQQQQAQQPLQQQQQRNAYTRF

SEQ ID NO: 11280 - protein, 27 aa, Artificial Sequence
  Synthetic polypeptide
SQEFETSLSNKARPISTKKNNKISQEM

SEQ ID NO: 11281 - protein, 617 aa, Artificial Sequence
  Synthetic polypeptide
PGNVSSSPRSSDLVKLAQECCYHNNRGIAAHGVRVLTNITVSCQEKDLLALEQDAVFGLESLLVLCSQDDSPGAQATLKIALNCMVKLAKGRPHLSQSVVETLLTQLHSAQDAARILMCHCLAAIAMQLPVLGDGMLGDLMELYKVIGRSATDKQQELLVSLATVIFVASQKALSVESKAVIKQQLESVSNGWTVYRIARQASRMGNHDMAKELYQSLLTQVASEHFYFWLNSLKEFSHAEQCLTGLQEENYSSALSCIAESLKFYHKGIASLTAASTPLNPLSFQCEFVKLRIDLLQAFSQLICTCNSLKTSPPPAIATTIAMTLGNDLQRCGRISNQMKQSMEEFRSLASRYGDLYQASFDADSATLRNVELQQQSCLLISHAIEALILDPESASFQEYGSTGTAHADSEYERRMMSVYNHVLEEHTACLCNAIIALLKVPLSFQRYFFQKLQSTSIKLALSPSPRNPAEPIAVQNNQQLALKVEGVVQHGSKPGLFRKIQSVCLNVSSTLQSKSGQDYKIPIDNMTNEMEQRVEPHNDYFSTQFLLNFAILGTHNITVESSVKDANGIVWKTGPRTTIFVKSLEDPYSQQIRLQQQQAQQPLQQQQQRNAYTRF

SEQ ID NO: 11282 - protein, 611 aa, Artificial Sequence
  Synthetic polypeptide
PGNVSSSPRSSDLVKLAQECCYHNNRGIAAHGVRVLTNITVSCQEKDLLALEQDAVFGLESLLVLCSQDDSPGAQATLKIALNCMVKLAKGRPHLSQSVVETLLTQLHSAQDAARILMCHCLAAIAMQLPVLGDGMLGDLMELYKVIGRSATDKQQELLVSLATVIFVASQKALSVESKAVIKQQLESVSNGWTVYRIARQASRMGNHDMAKELYQSLLTQVASEHFYFWLNSLKEFSHAEQCLTGLQEENYSSALSCIAESLKFYHKGIASLTAASTPLNPLSFQCEFVKLRIDLLQAFSQLICTCNSLKTSPPPAIATTIAMTLGNDLQRCGRISNQMKQSMEEFRSLASRYGDLYQASFDADSATLRNVELQQQSCLLISHAIEALILDPESASFQEYGSTGTAHADSEYERRMMSVYNHVLEEVESLNRKYTPVSYMRYFFQKLQSTSIKLALSPSPRNPAEPIAVQNNQQLALKVEGVVQHGSKPGLFRKIQSVCLNVSSTLQSKSGQDYKIPIDNMTNEMEQRVEPHNDYFSTQFLLNFAILGTHNITVESSVKDANGIVWKTGPRTTIFVKSLEDPYSQQIRLQQQQAQQPLQQQQQRNAYTRF

SEQ ID NO: 11283 - protein, 40 aa, Artificial Sequence
  Synthetic polypeptide
TFRERRHTNGQQLYSVRVEEMATLWSGIPGATKKMGFIGK

SEQ ID NO: 11284 - protein, 43 aa, Artificial Sequence
  Synthetic polypeptide
AKTMNRHFAKEDIQMANSCILYGWKRWQHYGLGYQVQQKRWVL

SEQ ID NO: 11285 - protein, 590 aa, Artificial Sequence
  Synthetic polypeptide
IDISRKKTYKWPTAVFCTGGRDGNIMVWDTRCNKKDGFYRQVNQISGAHNTSDKQTPSKPKKKQNSKGLAPSVDFQQSVTVVLFQDENTLVSAGAVDGIIKVWDLRKNYTAYRQEPIASKSFLYPGSSTRKLGYSSLILDSTGSTLFANCTDDNIYMFNMTGLKTSPVAIFNGHQNSTFYVKSSLSPDDQFLVSGSSDEAAYIWKVSTPWQPPTVLLGHSQEVTSVCWCPSDFTKIATCSDDNTLKIWRLNRGLEEKPGGDKLSTVGWASQKKKESRPGLVTVTSSQSTPAKAPRAKCNPSNSSPSSAACAPSCAGDLPLPSNTPTFSIKTSPAKARSPINRRGSVSSVSPKPPSSFKMSIRNWVTRTPSSSPPITPPASETKIMSPRKALIPVSQKSSQAEACSESRNRVKRRLDSSCLESVKQKCVKSCNCVTELDGQVENLHLDLCCLAGNQEDLSKDSLGPTKSSKIEGAGTSISEPPSPISPYASESCGTLPLPLRPCGEGSEMVGKENSSPENKNWLLAMAAKRKAENPSPRSPSSQTPNSRRQSGKKLPSPVTITPSSMRKICTYFHRKSQEDFCGPEHSTEL

SEQ ID NO: 11286 - protein, 82 aa, Artificial Sequence
  Synthetic polypeptide
EAEAGTSTPAPTCVPLAPKLPPYVWVASEMWGRRHSRKKGIRGASTSSEHFIPQDATRSLSWRSRSVHRVLFPWKMCTLETA

SEQ ID NO: 11287 - protein, 87 aa, Artificial Sequence
  Synthetic polypeptide
SQPFERLRQVLQLPPPPVSRWLLSCPPTCGLRLRCGAGATHGKKASEELPHHRNILFLRTLHAHFPGGAGQCIEFCFRGKCAPWKPH

SEQ ID NO: 11288 - protein, 15 aa, Artificial Sequence
  Synthetic polypeptide
GRYFNSRPHLCPAGS

SEQ ID NO: 11289 - protein, 18 aa, Artificial Sequence
  Synthetic polypeptide
EAEAGTSTPAPTCVPLAP

SEQ ID NO: 11290 - protein, 23 aa, Artificial Sequence
  Synthetic polypeptide
SQPFERLRQVLQLPPPPVSRWLL

SEQ ID NO: 11291 - protein, 20 aa, Artificial Sequence
  Synthetic polypeptide
KKEPTLPTPQFQTSSLQNSE

SEQ ID NO: 11292 - protein, 404 aa, Artificial Sequence
  Synthetic polypeptide
RHRESTPCKDGSGEWRLDASTSQRTPRIAGCHQKPGERHGTDFLTTRRRRSQPCQHLNFRLLASRTLSEELVQVVENSELADEQDKETVRVQGPGILPGLDSESASSSIRFSKACLKNVFSVLLIFIYLLLMAVAVFLVYRTITDFREKLKHPVMSVSYKEVDRYDAPGIALYPGQAQLLSCKHHYEVIPPLTSPGQPGDMNCTTQRINYTDPFSNQTVKSALIVQGPREVKKRELVFLQFRLNKSSEDFSAIDYLLFSSFQEFLQSPNRVGFMQACESAYSSWKFSGGFRTWVKMSLVKTKEEDGREAVEFRQETSVVNYIDQRPAAKKSAQLFFVVFEWKDPFIQKVQDIVTANPWNTIALLCGAFLALFKAAEFAKLSIKWMIKIRKRYLKRRGQATSHIS

SEQ ID NO: 11293 - protein, 4 aa, Artificial Sequence
  Synthetic polypeptide
PPEL

SEQ ID NO: 11294 - protein, 8 aa, Artificial Sequence
  Synthetic polypeptide
MHCPTGFG

SEQ ID NO: 11295 - protein, 264 aa, Artificial Sequence
  Synthetic polypeptide
CIVQQDLDDVLEKAKKANVVALVAVAEHSGEFEKIMQLSERYNGFVLPCLGVHPVQGLPPEDQRSVTLKDLDVALPIIENYKDRLLAIGEVGLDFSPRFAGTGEQKEEQRQVLIRQIQLAKRLNLPVNVHSRSAGRPTINLLQEQGAEKVLLHAFDGRPSVAMEGVRAGYFFSIPPSIIRSGQLLSLFSKKQKLVKQLPLTSICLETDSPALGPEKQVRNEPWNISISAEYIAQVKGISVEEVIEVTTQNALKLFPKLRHLLQK

SEQ ID NO: 11296 - protein, 67 aa, Artificial Sequence
  Synthetic polypeptide
ALSNRIWMMCWRKPRRPMLWPLWQLPNIQENLKRLCNFQKGIMGLSCHAWVFIQFKDFHQKTKEVSH

SEQ ID NO: 11297 - protein, 257 aa, Artificial Sequence
  Synthetic polypeptide
CIVQQDLDDVLEKAKKANVVALVAVAEHSGEFEKIMQLSERYNGFVLPCLGVHPVQGLPPEDQRSVTLKDLDVALPIIENYKDRLLAIGEVGLDFSPRFAGTGEQKEEQRQVLIRQIQLAKRLNLPVNVHSRSAGRPTINLLQEQGAEKVLLHAFDGRPSVAMEGVRAGYFFSIPPSIIRSGQKQKLVKQLPLTSICLETDSPALGPEKQVRNEPWNISISAEYIAQVKGISVEEVIEVTTQNALKLFPKLRHLLQK

SEQ ID NO: 11298 - protein, 44 aa, Artificial Sequence
  Synthetic polypeptide
CIVQQDLDDVLEKAKKANVVALVAVAEHSGEFEKIMQLSERIWM

SEQ ID NO: 11299 - protein, 44 aa, Artificial Sequence
  Synthetic polypeptide
ALSNRIWMMCWRKPRRPMLWPLWQLPNIQENLKRLCNFQKGFGC

SEQ ID NO: 11300 - protein, 236 aa, Artificial Sequence
  Synthetic polypeptide
CIVQQDLDDVLEKAKKANVVALVAVAEHSGEFEKIMQLSERYNGFVLPCLGVHPVQGLPPEDQRSVTLKVGLDFSPRFAGTGEQKEEQRQVLIRQIQLAKRLNLPVNVHSRSAGRPTINLLQEQGAEKVLLHAFDGRPSVAMEGVRAGYFFSIPPSIIRSGQKQKLVKQLPLTSICLETDSPALGPEKQVRNEPWNISISAEYIAQVKGISVEEVIEVTTQNALKLFPKLRHLLQK

SEQ ID NO: 11301 - protein, 223 aa, Artificial Sequence
  Synthetic polypeptide
CIVQQDLDDVLEKAKKANVVALVAVAEHSGEFEKIMQLSERYNGFVLPCLGVHPVQGLPPEDQRSVTLKDLDVALPIIENYKDRLLAIGEVGLDFSPRFAGTGEQKEEQRQVLIRQIQLAKRLNLPVNVHSRSAGRPTINLLQEQGAEKVLLHAFDGRPSVAMEGVRAGYFFSIPPSIIRSGQLLSLFSKKQKLVKQLPLTSICLETDSPALGPEKQQNILPR

SEQ ID NO: 11302 - protein, 256 aa, Artificial Sequence
  Synthetic polypeptide
CIVQQDLDDVLEKAKKANVVALVAVAEHSGEFEKIMQLSERYNGFVLPCLGVHPVQGLPPEDQRSVTLKDLDVALPIIENYKDRLLAIGEVGLDFSPRFAGTGEQKEEQRQVLIRQIQLAKRLNLPVNVHSRSAGRPTINLLQEQGAEKVLLHAFDGRPSVAMEGVRAGYFFSIPPSIIRSGQQKLVKQLPLTSICLETDSPALGPEKQVRNEPWNISISAEYIAQVKGISVEEVIEVTTQNALKLFPKLRHLLQK

SEQ ID NO: 11303 - protein, 174 aa, Artificial Sequence
  Synthetic polypeptide
CIVQQDLDDVLEKAKKANVVALVAVAEHSGEFEKIMQLSERYNGFVLPCLGVHPVQGLPPEDQRSVTLKDLDVALPIIENYKDRLLAIGEVGLDFSPRFAGTGEQKEEQRQVLIRQIQLAKRLNLPVNVHSRSAGRPTINLLQEQAETCETIAFNFYMLRNRFTCTRTRKTGTE

SEQ ID NO: 11304 - protein, 84 aa, Artificial Sequence
  Synthetic polypeptide
CIVQQDLDDVLEKAKKANVVALVAVAEHSGEFEKIMQLSERYNGFVLPCLGVHPVQGLPPEDQRSVTLKVLRRYCCMHLMVGHL

SEQ ID NO: 11305 - protein, 127 aa, Artificial Sequence
  Synthetic polypeptide
CIVQQDLDDVLEKAKKANVVALVAVAEHSGEFEKIMQLSERYNGFVLPCLGVHPVQGLPPEDQRSVTLKDLDVALPIIENYKDRLLAIGEVGLDFSPRFAGTGEQKEEQRQVLIRQIQLAKRLNLPV

SEQ ID NO: 11306 - protein, 145 aa, Artificial Sequence
  Synthetic polypeptide
CIVQQDLDDVLEKAKKANVVALVAVAEHSGEFEKIMQLSERYNGFVLPCLGVHPVQGLPPEDQRSVTLKDLDVALPIIENYKDRLLAIGEVGLDFSPRFAGTGEQKEEQRQVLIRQIQLAKRLNLPVNVHSRSAGRPTINLLQEQ

SEQ ID NO: 11307 - protein, 5 aa, Artificial Sequence
  Synthetic polypeptide
DYGTE

SEQ ID NO: 11308 - protein, 49 aa, Artificial Sequence
  Synthetic polypeptide
IMVRNEPWNISISAEYIAQVKGISVEEVIEVTTQNALKLFPKLRHLLQK

SEQ ID NO: 11309 - protein, 19 aa, Artificial Sequence
  Synthetic polypeptide
LWYGMSPGTFLFQQNILPR

SEQ ID NO: 11310 - protein, 5 aa, Artificial Sequence
  Synthetic polypeptide
IMVRN

SEQ ID NO: 11311 - protein, 5 aa, Artificial Sequence
  Synthetic polypeptide
LWYGM

SEQ ID NO: 11312 - protein, 48 aa, Artificial Sequence
  Synthetic polypeptide
RALIKSDLRRHNINIGITNVDVKAIPADSPTDQEPKTVMLSKQSESAI

SEQ ID NO: 11313 - protein, 159 aa, Artificial Sequence
  Synthetic polypeptide
SLLLRKTFLSKYYCSLTNSPVYPRALMKMYEEINVAFMSGNTASLLQPVDQGVISTFKSYSLRNTLQKAVAARNNYSSLGSEQSKLRTFWKGCTILDAIKNILDSWEEVKLSTLTGVWRKLIPILMDDFEVFKTSVEEIAADVVGITRELELEVEYEEH

SEQ ID NO: 11314 - protein, 10 aa, Artificial Sequence
  Synthetic polypeptide
KWNMKSINQV

SEQ ID NO: 11315 - protein, 5 aa, Artificial Sequence
  Synthetic polypeptide
IKTVI

SEQ ID NO: 11316 - protein, 7 aa, Artificial Sequence
  Synthetic polypeptide
SIFKLRQ

SEQ ID NO: 11317 - protein, 168 aa, Artificial Sequence
  Synthetic polypeptide
IKVSGQEQSSRGQRILSIPIWPPNLGISQNCVYEVQQVPKVEKTDSDLTQTQLKQTEVLVTAEKLSSNLQHHFSLSSVYSHYFPDTGIPEVTTCHSRSAITVDYIFYSAEKEDVAGHPGAEVALVGGLKLLARLSLLTEQDLWTVNGLPNENNSSDHLPLLAKFRLEL

SEQ ID NO: 11318 - protein, 28 aa, Artificial Sequence
  Synthetic polypeptide
SIFKLRYLARNSLHGDKEFYLFQFGPQT

SEQ ID NO: 11319 - protein, 7 aa, Artificial Sequence
  Synthetic polypeptide
LSSYKVE

SEQ ID NO: 11320 - protein, 939 aa, Artificial Sequence
  Synthetic polypeptide
SAHIRWNDMGNITHNKSTILVELINKEETALFHTDDIENAKYISRLFATRHKFYKQNKICTEQSNSPPPIRRQPTWSRSSLPRQQPYILPPVHVQCGEHYSETHTSQDSIFHGNEEALYCNSHNSLDLNYLNGTVTNGSVCSVHSVNSLNCSQSFIQASPVSSNLSIPGSDIMRADYIPSHRHSAIIVPSYRPTPDYETVMRQMKRGILHTDSQSQSLRNLNIINTHAYNQPEDLVYSQPEMRERHPYTVPYGPQGVYSNKLVSPSDQRNPKNNVVPSKPGASAISHTVSTPELANMQLQGSHNYSTAHMLKNYLFRPPPPYPRPRPATSTPDLASHRHKYVSGSSPDLVTRKVQLSVKTFQEDSSPVVHQSLQEVSEPLTATKHHGTVNKRHSLEVMNSMVRGMEAMTLKSLHLPMARRNTLREQGPPEEGSGSHEVPQLPQYHHKKTFSDATMLIHSSESEEEEEEAPESVPQIPMLREKMEYSAQLQAALARIPNKPPPEYPGPRKSVSNGALRQDQASLPPAMARARVLRHGPAKAISMSRTDPPAVNGASLGPSISEPDLTSVKERVKKEPVKERPVSEMFSLEDSIIEREMMIRNLEKQKMAGLEAQKRPLMLAALNGLSVARVSGREENRVDATRVPMDERFRTLKKKLEEGMVFTEYEQIPKKKANGIFSTAALPENAERSRIREVVPYEENRVELIPTKENNTGYINASHIKVVVGGAEWHYIATQGPLPHTCHDFWQMVWEQGVNVIAMVTAEEEGGRTKSHRYWPKLGSKHSSATYGKFKVTTKFRTDSVCYATTGLKVKHLLSGQERTVWHLQYTDWPDHGCPEDVQGFLSYLEEIQSVRRHTNSMLEGTKNRHPPIVVHCSAGVGRTGVLILSELMIYCLEHNEKVEVPMMLRLLREQRMFMIQTIAQYKFVYQVLIQFLQNSRLI

SEQ ID NO: 11321 - protein, 16 aa, Artificial Sequence
  Synthetic polypeptide
ACRVPAIAGTHSWPSG

SEQ ID NO: 11322 - protein, 195 aa, Artificial Sequence
  Synthetic polypeptide
CQAEAGLYCCHLGSLQPPCLILLPKPAECLQLQVPIPGPVGNKRMVHFSPDSHHHDHWFSPGARTEHDQHQLLRDNRAERGHKKNCSVRTASRQTSMHLGSLCTGDIKRRRKAAPLPGPTTAGFVGENAQPILENNIGNRMLQNMGWTPGSGLGRDGKGISEPIQAMQRPKGLGLGFPLPKSTSATTTPNAGKSA

SEQ ID NO: 11323 - protein, 52 aa, Artificial Sequence
  Synthetic polypeptide
FSCLSLPSACNCRYPFLAQWVTREWFIFPRILITMTIGLALGLGQSMTSISF

SEQ ID NO: 11324 - protein, 212 aa, Artificial Sequence
  Synthetic polypeptide
ERAVLLAALREQEEKKKSKSWQPKIPGIYNSPFRKEPDPWELQLQKAKPLTHRRPKVKQKDSTSLTDWLACTSARSFPRSEILPPINRKQCQGPFRDITEVLEQRYRPLEPTLRVAEPIDELKLAREELRREEWLQNVNDNMFLPFSSYHKNEKYIPSMHLSSKYGPISYKEQFRSENPKKWICDKDFQTVLPSFELFSKYGKLYSKAGQIV

SEQ ID NO: 11325 - protein, 52 aa, Artificial Sequence
  Synthetic polypeptide
LTEKELCFWLHCGSRRKKKNPSHGNQRFQEYTIHPSEKSLIHGSCNYRRQSL

SEQ ID NO: 11326 - protein, 38 aa, Artificial Sequence
  Synthetic polypeptide
LRKSCAFGCIAGAGGKKKIQVMATKDSRNIQFTLQKRA

SEQ ID NO: 11327 - protein, 14 aa, Artificial Sequence
  Synthetic polypeptide
GLPSHMELFSSPKI

SEQ ID NO: 11328 - protein, 52 aa, Artificial Sequence
  Synthetic polypeptide
DVPFTFCHDCEASLATWNYSQVQRFNISNPALHRQQSCENKSRRRMALLRCN

SEQ ID NO: 11329 - protein, 248 aa, Artificial Sequence
  Synthetic polypeptide
PHGTILKSKDLTSPTQRYIDSKVVKTRAEGEWLSFDVTDAVHEWLHHKDRNLGFKISLHCPCCTFVPSNNYIIPNKSEELEARFAGIDGTSTYTSGDQKTIKSTRKKNSGKTPHLLLMLLPSYRLESQQTNRRKKRALDAAYCFRNVQDNCCLRPLYIDFKRDLGWKWIHEPKGYNANFCAGACPYLWSSDTQHSRVLSLYNTINPEASASPCCVSQDLEPLTILYYIGKTPKIEQLSNMIVKSCKCS

SEQ ID NO: 11330 - protein, 265 aa, Artificial Sequence
  Synthetic polypeptide
DVTFSSLPSIMIVRPPQPSGTILKSKDLTSPTQRYIDSKVVKTRAEGEWLSFDVTDAVHEWLHHKDRNLGFKISLHCPCCTFVPSNNYIIPNKSEELEARFAGIDGTSTYTSGDQKTIKSTRKKNSGKTPHLLLMLLPSYRLESQQTNRRKKRALDAAYCFRNVQDNCCLRPLYIDFKRDLGWKWIHEPKGYNANFCAGACPYLWSSDTQHSRVLSLYNTINPEASASPCCVSQDLEPLTILYYIGKTPKIEQLSNMIVKSCKCS

SEQ ID NO: 11331 - protein, 14 aa, Artificial Sequence
  Synthetic polypeptide
GLLSQVELFSSPKI

SEQ ID NO: 11332 - protein, 73 aa, Artificial Sequence
  Synthetic polypeptide
KEAFCYTSSLSLSAAMHLRCDFLLLAFHHDCEASSAKWNYSQVQRFNISNPALHRQQSCENKSRRRMALLRCN

SEQ ID NO: 11333 - protein, 31 aa, Artificial Sequence
  Synthetic polypeptide
CPRPSHSLTDSPRATSSSASCSHGVISERYV

SEQ ID NO: 11334 - protein, 141 aa, Artificial Sequence
  Synthetic polypeptide
PKCTVLMKPTVVYSNVLGLHIHSLTHPEQPPVLQAAVMGSYQKDMFDEINYRIKKYILKNANTTIYKTMLECNGAILAHCNLRLLGSNDSPASASQVAGTTDRNQLLFLPIERNPGCTCSFISCVENIYRLEALSLHFQGF

SEQ ID NO: 11335 - protein, 72 aa, Artificial Sequence
  Synthetic polypeptide
LTQSNLQFCKLQSWGHIRKICLMKLTTESRSIYSKMQILQYIRQCWSAMVQSWLTATSASWVQMILLPQPPK

SEQ ID NO: 11336 - protein, 26 aa, Artificial Sequence
  Synthetic polypeptide
TNLQEKENPIKRRILYGRMHGNTFSI

SEQ ID NO: 11337 - protein, 177 aa, Artificial Sequence
  Synthetic polypeptide
QMVSNKLKHFCTAKEAVIRVNRQPTEWEKIFAIYPSDQGLISRIYKELKQIYKKKKTPLKGGFSMGGCMAIHLAYRNHQDVAGVFALSSFLNKASAVYQALQKSNGVLPELFQCHGTADELVLHSWAEETNSMLKSLGVTTKFHSFPNVYHELSKTELDILKLWILTKLPGEMEKQK

SEQ ID NO: 11338 - protein, 13 aa, Artificial Sequence
  Synthetic polypeptide
KEDSLWEDAWQYI

SEQ ID NO: 11339 - protein, 1212 aa, Artificial Sequence
  Synthetic polypeptide
WSMDCREQEWKQEAKLNVRQYELNEELSILYPAAIVTIDGFSLFQSLRACRNQVAKAAASGNENIQPPPLAYKKWGLQDIDTIIDHASVGIMTLSPFDQMKTASNIGGFNAAIKNSPPAMSQYITVGSNPFTGFFYALEGSTQPLLSHVALAVASKLTSALFNAASGWLGWKSKHEEEAVQKQKPKVEPATPLAVRFGLPDSRRHGESICLSPCNTLAAVTDDFGRVILLDVARGIAIRMWKGYRDAQIGWIQTVEDLHERVPEKADFSPFGNSQGPSRVAQFLVIYAPRRGILEVWSTQQGPRVGAFNVGKHCRLLYPGYKIMGLNNVTSQSWQPQTYQICLVDPVSGSVKTVNVPFHLALSDKKSERAKDMHLVKKLAALLKTKSPNLDLVETEIKELILDIKYPATKKQALESILASERLPFSCLRNITQTLMDTLKSQELESVDEGLLQFCANKLKLLQLYESVSQLNSLDFHLDTPFSDNDLALLLRLDEKELLKLQALLEKYKQENTRTNVRFSDDKDGVLPVKTFLEYLEYEKDVLNIKKISEEEYVALGSFFFWKCLHGESSTEDMCHTLESAGLSPQLLLSLLLSVWLSKEKDILDKPQSICCLHTMLSLLSKMKVAIDETWDSQSVSPWWQQMRTACIQSENNGAALLSAHVGHSVAAQISNNMTEKKFSQTVLGADSEALTDSWEALSLDTEYWKLLLKQLEDCLILQTLLHSKGNTQTSKVSSLQAEPLPRLSVKKLLEGGKGGIADSVAKWIFKQDFSPEVLKLANEERDAENPDEPKEGVNRSFLEVSEMEMDLGAIPDLLHLAYEQFPCSLELDVLHAHCCWEYVVQWNKDPEEARFFVRSIEHLKQIFNAHVQNGIALMMWNTFLVKRFSAATYLMDKVGKSPKDRLCRRDVGMSDTAMTSFLGSCLDLLQILMEADVSRDEIQVPVLDTEDAWLSVEGPISIVELALEQKHIHYPLVEHHSILCSILYAVMRFSLKTVKPLSLFDSKGKNAFFKDLTSIQLLPSGEMDPNFISVRQQFLLKVVSAAVQAQHSATKVKDPTEEATPTPFGKDQDWPALAVDLAHHLQVSEDVVRRHYVGELYNYGVDHLGEEAILQVHDKEVLASQLLVLTGQRLAHALLHTQTKEGMELLARLPPTLCTWLKAMDPQDLQNTEVPIATTAKLVNKVIELLPEKHGQYGLALHLIEAVEAISLPSL

SEQ ID NO: 11340 - protein, 2 aa, Artificial Sequence
  Synthetic polypeptide
TE

SEQ ID NO: 11341 - protein, 89 aa, Artificial Sequence
  Synthetic polypeptide
WSMDCREQEWKQEAKLNVRQYELNEELSILYPAAIVTIDGFSLFQSLRACRNQVAKAAASGNENIQPPPLAYKKWGLQDIDTIIDHASV

SEQ ID NO: 11342 - protein, 166 aa, Artificial Sequence
  Synthetic polypeptide
GGLQPAGATRILRVLPGRHLPRWDTSPEQCVARPCGGSTQWLNTGKELALGVWISETWIFGLDIKGRDCGNEAAKWFTNFLKTEAYRLVQFETNMKGRTSRKLLPTLDQNFQVAYPDYCPLLIMTDASLVDLNTRMEKKMKMENFRPNIVVTGCDAFEEASATRRD

SEQ ID NO: 11343 - protein, 38 aa, Artificial Sequence
  Synthetic polypeptide
TPGRNWRLESGYLKLGYLALTLKAETVAMRQLSGSPTS

SEQ ID NO: 11344 - protein, 6 aa, Artificial Sequence
  Synthetic polypeptide
NLDIWP

SEQ ID NO: 11345 - protein, 244 aa, Artificial Sequence
  Synthetic polypeptide
GGLQPAGATRILRVLPGRHLPRWDTSPEQCVARPCGGSTQWLNTGKELALGVWISETWIFGLDIKGRDCGNEAAKWFTNFLKTEAYRLVQFETNMKGRTSRKLLPTLDQNFQVAYPDYCPLLIMTDASLVDLNTRMEKKMKMENFRPNIVVTGCDAFEEDTWDELLIGSVEVKKVMACPRCILTTVDPDTGVIDRKQPLDTLKSYRLCDPSERELYKLSPLFGIYYSVEKIGSLRVGDPVYRMV

SEQ ID NO: 11346 - protein, 180 aa, Artificial Sequence
  Synthetic polypeptide
GGLQPAGATRILRVLPGRHLPRWDTSPEQCVARPCGGSTQWLNTGKELALGVWISETWIFGLDIKGRDCGNEAAKWFTNFLKTEAYRLVQFETNMKGRTSRKLLPTLDQNFQVAYPDYCPLLIMTDASLVDLNTRMEKKMKMENFRPNIVVTGCDAFEEDTWDELLIGSVEVKKVMACPR

SEQ ID NO: 11347 - protein, 16 aa, Artificial Sequence
  Synthetic polypeptide
GFPSHVELSPLSLRPP

SEQ ID NO: 11348 - protein, 21 aa, Artificial Sequence
  Synthetic polypeptide
KVPFTTRHDSEASPAMWNCLL

SEQ ID NO: 11349 - protein, 450 aa, Artificial Sequence
  Synthetic polypeptide
VSCDLIGLLGVSAFASSSFFLLPLPCKKCLSPPAMILRLPQPCGTVSSEPPASIRPKTDDTSSQSPAPSEKDKPSSWLRTLAGSSNKSLGCVHPRQRLSAFRPWSPAVSASEKELSPHLPALIRDSFYSYKSFETAVAPNVALAPPAQQKVVSSPPCAAAVSRAPEPLATCTQPRKRKLTVDTPGAPETLAPVAAPEEDKDSEAEVEVESREEFTSSLSSLSSPSFTSSSSAKDLGSPGARALPSAVPDAAAPADAPSGLEAELEHLRQALEGGLDTKEAKEKFLHEVVKMRVKQEEKLSAALQAKRSLHQELEFLRVAKKEKLREATEAKRNLRKEIERLRAENEKKMKEANESRLRLKRELEQARQARVCDKGCEAGRLRAKYSAQIEDLQVKLQHAEADREQLRADLLREREAREHLEKVVKELQEQLWPRARPEAAGSEGAAELEP

SEQ ID NO: 11350 - protein, 31 aa, Artificial Sequence
  Synthetic polypeptide
GPAQWLTPLIPAFWEAETKLQRKSELLGWYW

SEQ ID NO: 11351 - protein, 946 aa, Artificial Sequence
  Synthetic polypeptide
SQHFGRLRRNCKGNPNCLVGIGEHIWLGEIDENSFHNIDDPNCERRKKNSFVGLTNLGATCYVNTFLQVWFLNLELRQALYLCPSTCSDYMLGDGIQEEKDYEPQTICEHLQYLFALLQNSNRRYIDPSGFVKALGLDTGQQQDAQEFSKLFMSLLEDTLSKQKNPDVRNIVQQQFCGEYAYVTVCNQCGRESKLLSKFYELELNIQGHKQLTDCISEFLKEEKLEGDNRYFCENCQSKQNATRKIRLLSLPCTLNLQLMRFVFDRQTGHKKKLNTYIGFSEILDMEPYVEHKGGSYVYELSAVLIHRGVSAYSGHYIAHVKDPQSGEWYKFNDEDIEKMEGKKLQLGIEEDLAEPSKSQTRKPKCGKGTHCSRNAYMLVYRLQTQEKPNTTVQVPAFLQELVDRDNSKFEEWCIEMAEMRKQSVDKGKAKHEEVKELYQRLPAGAEPYEFVSLEWLQKWLDESTPTKPIDNHACLCSHDKLHPDKISIMKRISEYAADIFYSRYGGGPRLTVKALCKECVVERCRILRLKNQLNEDYKTVNNLLKAAVKGSDGFWVGKSSLRSWRQLALEQLDEQDGDAEQSNGKMNGSTLNKDESKEERKEEEELNFNEDILCPHGELCISENERRLVSKEAWSKLQQYFPKAPEFPSYKECCSQCKILEREGEENEALHKMIANEQKTSLPNLFQDKNRPCLSNWPEDTDVLYIVSQFFVEEWRKFVRKPTRCSPVSSVGNSALLCPHGGLMFTFASMTKEDSKLIALIWPSEWQMIQKLFVVDHVIKITRIEVGDVNPSETQYISEPKLCPECREGLLCQQQRDLREYTQATIYVHKVVDNKKVMKDSAPELNVSSSETEEDKEEAKPDGEKDPDFNQIMHAFSVAPFDQNLSIDGKILSDDCATLGTLGVIPESVILLKADEPIADYAAMDDVMQVCMPEEGFKGTGLLGH

SEQ ID NO: 11352 - protein, 998 aa, Artificial Sequence
  Synthetic polypeptide
SQHFGRLRRNCKGNPNCLVGIGEHIWLGEIDENSFHNIDDPNCERRKKNSFVGLTNLGATCYVNTFLQVWFLNLELRQALYLCPSTCSDYMLGDGIQEEKDYEPQTICEHLQYLFALLQNSNRRYIDPSGFVKALGLDTGQQQDAQEFSKLFMSLLEDTLSKQKNPDVRNIVQQQFCGEYAYVTVCNQCGRESKLLSKFYELELNIQGHKQLTDCISEFLKEEKLEGDNRYFCENCQSKQNATRKIRLLSLPCTLNLQLMRFVFDRQTGHKKKLNTYIGFSEILDMEPYVEHKGGSYVYELSAVLIHRGVSAYSGHYIAHVKDPQSGEWYKFNDEDIEKMEGKKLQLGIEEDLAEPSKSQTRKPKCGKGTHCSRNAYMLVYRLQTQEKPNTTVQVPAFLQELVDRDNSKFEEWCIEMAEMRKQSVDKGKAKHEEVKELYQRLPAGAEPYEFVSLEWLQKWLDESTPTKPIDNHACLCSHDKLHPDKISIMKRISEYAADIFYSRYGGGPRLTVKALCKECVVERCRILRLKNQLNEDYKTVNNLLKAAVKGSDGFWVGKSSLRSWRQLALEQLDEQDGDAEQSNGKMNGSTLNKDESKEERKEEEELNFNEDILCPHGELCISENERRLVSKEAWSKLQQYFPKAPEFPSYKECCSQCKILEREGEENEALHKMIANEQKTSLPNLFQDKNRPCLSNWPEDTDVLYIVSQFFVEEWRKFVRKPTRCSPVSSVGNSALLCPHGGLMFTFASMTKEDSKLIALIWPSEWQMIQKLFVVDHVIKITRIEVGDVNPSETQYISEPKLCPECREGLLCQQQRDLREYTQATIYVHKVVDNKKVMKDSAPELNVSSSETEEDKEEAKPDGEKDPDFNQSNGGTKRQKISHQNYIAYQKQVIRRSMRHRKVRGEKALLVSANQTLKELKIQIMHAFSVAPFDQNLSIDGKILSDDCATLGTLGVIPESVILLKADEPIADYAAMDDVMQVCMPEEGFKGTGLLGH

SEQ ID NO: 11353 - protein, 1010 aa, Artificial Sequence
  Synthetic polypeptide
SQHFGRLRRNCKGNPNCLVGIGEHIWLGEIDENSFHNIDDPNCERRKKNSFVGLTNLGATCYVNTFLQVWFLNLELRQALYLCPSTCSDYMLGDGIQEEKDYEPQTICEHLQYLFALLQNSNRRYIDPSGFVKALGLDTGQQQDAQEFSKLFMSLLEDTLSKQKNPDVRNIVQQQFCGEYAYVTVCNQCGRESKLLSKFYELELNIQGHKQLTDCISEFLKEEKLEGDNRYFCENCQSKQNATRKIRLLSLPCTLNLQLMRFVFDRQTGHKKKLNTYIGFSEILDMEPYVEHKGGSYVYELSAVLIHRGVSAYSGHYIAHVKDPQSGEWYKFNDEDIEKMEGKKLQLGIEEDLEPSKSQTRKPKCGKGTHCSRNAYMLVYRLQTQEKPNTTVQVPAFLQELVDRDNSKFEEWCIEMAEMRKQSVDKGKAKHEEVKELYQRLPAGAEPYEFVSLEWLQKWLDESTPTKPIDNHACLCSHDKLHPDKISIMKRISEYAADIFYSRYGGGPRLTVKALCKECVVERCRILRLKNQLNEDYKTVNNLLKAAVKGSDGFWVGKSSLRSWRQLALEQLDEQDGDAEQSNGKMNGSTLNKDESKEERKEEEELNFNEDILCPHAVFFFSKYIFLNSGELCISENERRLVSKEAWSKLQQYFPKAPEFPSYKECCSQCKILEREGEENEALHKMIANEQKTSLPNLFQDKNRPCLSNWPEDTDVLYIVSQFFVEEWRKFVRKPTRCSPVSSVGNSALLCPHGGLMFTFASMTKEDSKLIALIWPSEWQMIQKLFVVDHVIKITRIEVGDVNPSETQYISEPKLCPECREGLLCQQQRDLREYTQATIYVHKVVDNKKVMKDSAPELNVSSSETEEDKEEAKPDGEKDPDFNQSNGGTKRQKISHQNYIAYQKQVIRRSMRHRKVRGEKALLVSANQTLKELKIQIMHAFSVAPFDQNLSIDGKILSDDCATLGTLGVIPESVILLKADEPIADYAAMDDVMQVCMPEEGFKGTGLLGH

SEQ ID NO: 11354 - protein, 448 aa, Artificial Sequence
  Synthetic polypeptide
SQHFGRLRRNCKGNPNCLVGIGEHIWLGEIDENSFHNIDDPNCERRKKNSFVGLTNLGATCYVNTFLQVWFLNLELRQALYLCPSTCSDYMLGDGIQEEKDYEPQTICEHLQYLFALLQNSNRRYIDPSGFVKALGLDTGQQQDAQEFSKLFMSLLEDTLSKQKNPDVRNIVQQQFCGEYAYVTVCNQCGRESKLLSKFYELELNIQGHKQLTDCISEFLKEEKLEGDNRYFCENCQSKQNATRKIRLLSLPCTLNLQLMRFVFDRQTGHKKKLNTYIGFSEILDMEPYVEHKGGSYVYELSAVLIHRGVSAYSGHYIAHVKDPQSGEWYKFNDEDIEKMEGKKLQLGIEEDLAEPSKSQTRKPKCGKGTHCSRNAYMLVYRLQTQEKPNTTVQVPAFLQELVDRDNSKFEEWCIEMAEMRKQSVDKGKAKHEEVKELYQRLPAGAGL

SEQ ID NO: 11355 - protein, 36 aa, Artificial Sequence
  Synthetic polypeptide
DRAQWLTPVIPALWEAKAGRSRGAWLEATPAPGDPS

SEQ ID NO: 11356 - protein, 1922 aa, Artificial Sequence
  Synthetic polypeptide
SRHFGRPRQEDHEVHGSRLRLLQVTPADSGEYVCRVVGSSGTQEASVLVTIQQRLSGSHSQGVAYPVRIESSSASLANGHTLDLNCLVASQAPHTITWYKRGGSLPSRHQIVGSRLRIPQVTPADSGEYVCHVSNGAGSRETSLIVTIQGSGSSHVPSVSPPIRIESSSPTVVEGQTLDLNCVVARQPQAIITWYKRGGSLPSRHQTHGSHLRLHQMSVADSGEYVCRANNNIDALEASIVISVSPSAGSPSAPGSSMPIRIESSSSHVAEGETLDLNCVVPGQAHAQVTWHKRGGSLPSHHQTRGSRLRLHHVSPADSGEYVCRVMGSSGPLEASVLVTIEASGSSAVHVPAPGGAPPIRIEPSSSRVAEGQTLDLKCVVPGQAHAQVTWHKRGGNLPARHQVHGPLLRLNQVSPADSGEYSCQVTGSSGTLEASVLVTIEPSSPGPIPAPGLAQPIYIEASSSHVTEGQTLDLNCVVPGQAHAQVTWYKRGGSLPARHQTHGSQLRLHLVSPADSGEYVCRAASGPGPEQEASFTVTVPPSEGSSYRLRSPVISIDPPSSTVQQGQDASFKCLIHDGAAPISLEWKTRNQELEDNVHISPNGSIITIVGTRPSNHGTYRCVASNAYGVAQSVVNLSVHGPPTVSVLPEGPVWVKVGKAVTLECVSAGEPRSSARWTRISSTPAKLEQRTYGLMDSHAVLQISSAKPSDAGTYVCLAQNALGTAQKQVEVIVDTGAMAPGAPQVQAEEAELTVEAGHTATLRCSATGSPAPTIHWSKLRSPLPWQHRLEGDTLIIPRVAQQDSGQYICNATSPAGHAEATIILHVESPPYATTVPEHASVQAGETVQLQCLAHGTPPLTFQWSRVGSSLPGRATARNELLHFERAAPEDSGRYRCRVTNKVGSAEAFAQLLVQGPPGSLPATSIPAGSTPTVQVTPQLETKSIGASVEFHCAVPSDRGTQLRWFKEGGQLPPGHSVQDGVLRIQNLDQSCQGTYICQAHGPWGKAQASAQLVIQALPSVLINIRTSVQTVVVGHAVEFECLALGDPKPQVTWSKVGGHLRPGIVQSGGVVRIAHVELADAGQYRCTATNAAGTTQSHVLLLVQALPQISMPQEVRVPAGSAAVFPCIASGYPTPDISWSKLDGSLPPDSRLENNMLMLPSVRPQDAGTYVCTATNRQGKVKAFAHLQVPERVVPYFTQTPYSFLPLPTIKDAYRKFEIKITFRPDSADGMLLYNGQKRVPGSPTNLANRQPDFISFGLVGGRPEFRFDAGSGMATIRHPTPLALGHFHTVTLLRSLTQGSLIVGDLAPVNGTSQGKFQGLDLNEELYLGGYPDYGAIPKAGLSSGFIGCVRELRIQGEEIVFHDLNLTAHGISHCPTCRDRPCQNGGQCHDSESSSYVCVCPAGFTGSRCEHSQALHCHPEACGPDATCVNRPDGRGYTCRCHLGRSGLRCEEGVTVTTPSLSGAGSYLALPALTNTHHELRLDVEFKPLAPDGVLLFSGGKSGPVEDFVSLAMVGGHLEFRYELGSGLAVLRSAEPLALGRWHRVSAERLNKDGSLRVNGGRPVLRSSPGKSQGLNLHTLLYLGGVEPSVPLSPATNMSAHFRGCVGEVSVNGKRLDLTYSFLGSQGIGQCYDSSPCERQPCQHGATCMPAGEYEFQCLCRDGFKGDLCEHEENPCQLREPCLHGGTCQGTRCLCLPGFSGPRCQQGSGHGIAESDWHLEGSGGNDAPGQYGAYFHDDGFLAFPGHVFSRSLPEVPETIELEVRTSTASGLLLWQGVEVGEAGQGKDFISLGLQDGHLVFRYQLGSGEARLVSEDPINDGEWHRVTALREGRRGSIQVDGEELVSGRSPGPNVAVNAKGSVYIGGAPDVATLTGGRFSSGITGCVKNLVLHSARPGAPPPQPLDLQHRAQAGANTRPCPS

SEQ ID NO: 11357 - protein, 32 aa, Artificial Sequence
  Synthetic polypeptide
PGAVAHACNPGTLGGQGRKITRCMARGYACSR

SEQ ID NO: 11358 - protein, 62 aa, Artificial Sequence
  Synthetic polypeptide
SQHFGRPRWANRLRSGVRDQPGQYDPRLPAETLPSVPRRLGRVRVPSVGQLRASRGLCPGHH

SEQ ID NO: 11359 - protein, 2016 aa, Artificial Sequence
  Synthetic polypeptide
GREFETSLASMTHGSLLRLYQASPADSGEYVCRVLGSSVPLEASVLVTIEPAGSVPALGVTPTVRIESSSSQVAEGQTLDLNCLVAGQAHAQVTWHKRGGSLPARHQVHGSRLRLLQVTPADSGEYVCRVVGSSGTQEASVLVTIQQRLSGSHSQGVAYPVRIESSSASLANGHTLDLNCLVASQAPHTITWYKRGGSLPSRHQIVGSRLRIPQVTPADSGEYVCHVSNGAGSRETSLIVTIQGSGSSHVPSVSPPIRIESSSPTVVEGQTLDLNCVVARQPQAIITWYKRGGSLPSRHQTHGSHLRLHQMSVADSGEYVCRANNNIDALEASIVISVSPSAGSPSAPGSSMPIRIESSSSHVAEGETLDLNCVVPGQAHAQVTWHKRGGSLPSHHQTRGSRLRLHHVSPADSGEYVCRVMGSSGPLEASVLVTIEASGSSAVHVPAPGGAPPIRIEPSSSRVAEGQTLDLKCVVPGQAHAQVTWHKRGGNLPARHQVHGPLLRLNQVSPADSGEYSCQVTGSSGTLEASVLVTIEPSSPGPIPAPGLAQPIYIEASSSHVTEGQTLDLNCVVPGQAHAQVTWYKRGGSLPARHQTHGSQLRLHLVSPADSGEYVCRAASGPGPEQEASFTVTVPPSEGSSYRLRSPVISIDPPSSTVQQGQDASFKCLIHDGAAPISLEWKTRNQELEDNVHISPNGSIITIVGTRPSNHGTYRCVASNAYGVAQSVVNLSVHGPPTVSVLPEGPVWVKVGKAVTLECVSAGEPRSSARWTRISSTPAKLEQRTYGLMDSHAVLQISSAKPSDAGTYVCLAQNALGTAQKQVEVIVDTGAMAPGAPQVQAEEAELTVEAGHTATLRCSATGSPAPTIHWSKLRSPLPWQHRLEGDTLIIPRVAQQDSGQYICNATSPAGHAEATIILHVESPPYATTVPEHASVQAGETVQLQCLAHGTPPLTFQWSRVGSSLPGRATARNELLHFERAAPEDSGRYRCRVTNKVGSAEAFAQLLVQGPPGSLPATSIPAGSTPTVQVTPQLETKSIGASVEFHCAVPSDRGTQLRWFKEGGQLPPGHSVQDGVLRIQNLDQSCQGTYICQAHGPWGKAQASAQLVIQALPSVLINIRTSVQTVVVGHAVEFECLALGDPKPQVTWSKVGGHLRPGIVQSGGVVRIAHVELADAGQYRCTATNAAGTTQSHVLLLVQALPQISMPQEVRVPAGSAAVFPCIASGYPTPDISWSKLDGSLPPDSRLENNMLMLPSVRPQDAGTYVCTATNRQGKVKAFAHLQVPERVVPYFTQTPYSFLPLPTIKDAYRKFEIKITFRPDSADGMLLYNGQKRVPGSPTNLANRQPDFISFGLVGGRPEFRFDAGSGMATIRHPTPLALGHFHTVTLLRSLTQGSLIVGDLAPVNGTSQGKFQGLDLNEELYLGGYPDYGAIPKAGLSSGFIGCVRELRIQGEEIVFHDLNLTAHGISHCPTCRDRPCQNGGQCHDSESSSYVCVCPAGFTGSRCEHSQALHCHPEACGPDATCVNRPDGRGYTCRCHLGRSGLRCEEGVTVTTPSLSGAGSYLALPALTNTHHELRLDVEFKPLAPDGVLLFSGGKSGPVEDFVSLAMVGGHLEFRYELGSGLAVLRSAEPLALGRWHRVSAERLNKDGSLRVNGGRPVLRSSPGKSQGLNLHTLLYLGGVEPSVPLSPATNMSAHFRGCVGEVSVNGKRLDLTYSFLGSQGIGQCYDSSPCERQPCQHGATCMPAGEYEFQCLCRDGFKGDLCEHEENPCQLREPCLHGGTCQGTRCLCLPGFSGPRCQQGSGHGIAESDWHLEGSGGNDAPGQYGAYFHDDGFLAFPGHVFSRSLPEVPETIELEVRTSTASGLLLWQGVEVGEAGQGKDFISLGLQDGHLVFRYQLGSGEARLVSEDPINDGEWHRVTALREGRRGSIQVDGEELVSGRSPGPNVAVNAKGSVYIGGAPDVATLTGGRFSSGITGCVKNLVLHSARPGAPPPQPLDLQHRAQAGANTRPCPS

SEQ ID NO: 11360 - protein, 28 aa, Artificial Sequence
  Synthetic polypeptide
SQHFGRPRWANRLRSGVRDQPGQPTAPC

SEQ ID NO: 11361 - protein, 47 aa, Artificial Sequence
  Synthetic polypeptide
GREFETSLANPRLPAETLPSVPRRLGRVRVPSVGQLRASRGLCPGHH

SEQ ID NO: 11362 - protein, 2036 aa, Artificial Sequence
  Synthetic polypeptide
RARWLTPVIPALWEAEVGESPEVGSSRPAWPTHGSLLRLYQASPADSGEYVCRVLGSSVPLEASVLVTIEPAGSVPALGVTPTVRIESSSSQVAEGQTLDLNCLVAGQAHAQVTWHKRGGSLPARHQVHGSRLRLLQVTPADSGEYVCRVVGSSGTQEASVLVTIQQRLSGSHSQGVAYPVRIESSSASLANGHTLDLNCLVASQAPHTITWYKRGGSLPSRHQIVGSRLRIPQVTPADSGEYVCHVSNGAGSRETSLIVTIQGSGSSHVPSVSPPIRIESSSPTVVEGQTLDLNCVVARQPQAIITWYKRGGSLPSRHQTHGSHLRLHQMSVADSGEYVCRANNNIDALEASIVISVSPSAGSPSAPGSSMPIRIESSSSHVAEGETLDLNCVVPGQAHAQVTWHKRGGSLPSHHQTRGSRLRLHHVSPADSGEYVCRVMGSSGPLEASVLVTIEASGSSAVHVPAPGGAPPIRIEPSSSRVAEGQTLDLKCVVPGQAHAQVTWHKRGGNLPARHQVHGPLLRLNQVSPADSGEYSCQVTGSSGTLEASVLVTIEPSSPGPIPAPGLAQPIYIEASSSHVTEGQTLDLNCVVPGQAHAQVTWYKRGGSLPARHQTHGSQLRLHLVSPADSGEYVCRAASGPGPEQEASFTVTVPPSEGSSYRLRSPVISIDPPSSTVQQGQDASFKCLIHDGAAPISLEWKTRNQELEDNVHISPNGSIITIVGTRPSNHGTYRCVASNAYGVAQSVVNLSVHGPPTVSVLPEGPVWVKVGKAVTLECVSAGEPRSSARWTRISSTPAKLEQRTYGLMDSHAVLQISSAKPSDAGTYVCLAQNALGTAQKQVEVIVDTGAMAPGAPQVQAEEAELTVEAGHTATLRCSATGSPAPTIHWSKLRSPLPWQHRLEGDTLIIPRVAQQDSGQYICNATSPAGHAEATIILHVESPPYATTVPEHASVQAGETVQLQCLAHGTPPLTFQWSRVGSSLPGRATARNELLHFERAAPEDSGRYRCRVTNKVGSAEAFAQLLVQGPPGSLPATSIPAGSTPTVQVTPQLETKSIGASVEFHCAVPSDRGTQLRWFKEGGQLPPGHSVQDGVLRIQNLDQSCQGTYICQAHGPWGKAQASAQLVIQALPSVLINIRTSVQTVVVGHAVEFECLALGDPKPQVTWSKVGGHLRPGIVQSGGVVRIAHVELADAGQYRCTATNAAGTTQSHVLLLVQALPQISMPQEVRVPAGSAAVFPCIASGYPTPDISWSKLDGSLPPDSRLENNMLMLPSVRPQDAGTYVCTATNRQGKVKAFAHLQVPERVVPYFTQTPYSFLPLPTIKDAYRKFEIKITFRPDSADGMLLYNGQKRVPGSPTNLANRQPDFISFGLVGGRPEFRFDAGSGMATIRHPTPLALGHFHTVTLLRSLTQGSLIVGDLAPVNGTSQGKFQGLDLNEELYLGGYPDYGAIPKAGLSSGFIGCVRELRIQGEEIVFHDLNLTAHGISHCPTCRDRPCQNGGQCHDSESSSYVCVCPAGFTGSRCEHSQALHCHPEACGPDATCVNRPDGRGYTCRCHLGRSGLRCEEGVTVTTPSLSGAGSYLALPALTNTHHELRLDVEFKPLAPDGVLLFSGGKSGPVEDFVSLAMVGGHLEFRYELGSGLAVLRSAEPLALGRWHRVSAERLNKDGSLRVNGGRPVLRSSPGKSQGLNLHTLLYLGGVEPSVPLSPATNMSAHFRGCVGEVSVNGKRLDLTYSFLGSQGIGQCYDSSPCERQPCQHGATCMPAGEYEFQCLCRDGFKGDLCEHEENPCQLREPCLHGGTCQGTRCLCLPGFSGPRCQQGSGHGIAESDWHLEGSGGNDAPGQYGAYFHDDGFLAFPGHVFSRSLPEVPETIELEVRTSTASGLLLWQGVEVGEAGQGKDFISLGLQDGHLVFRYQLGSGEARLVSEDPINDGEWHRVTALREGRRGSIQVDGEELVSGRSPGPNVAVNAKGSVYIGGAPDVATLTGGRFSSGITGCVKNLVLHSARPGAPPPQPLDLQHRAQAGANTRPCPS

SEQ ID NO: 11363 - protein, 176 aa, Artificial Sequence
  Synthetic polypeptide
LSPITPRWDHPVAGKQGLSLILLMILYQIVPSHKLMLEFHTLLRKSEKEEHRKLGLEVLFGVLDFAGCTKNITAWKYLAKYLKNILMGNHLAWVQEEWNSRKNWWPGFHFSYFWAKSDWKEDTALACEKAFVAGLLLGKGCRYFRYILKQDHQILGKKIKRMKRSVKKYSIVNPRL

SEQ ID NO: 11364 - protein, 35 aa, Artificial Sequence
  Synthetic polypeptide
SVTVSHHPQMGSSSCRKTRALTDSTYDFVSDCTIS

SEQ ID NO: 11365 - protein, 50 aa, Artificial Sequence
  Synthetic polypeptide
LSPITPRWDHPVAGKQGLSLILLMILYQIVPSHKLMLEFHTLLRKSEKEE

SEQ ID NO: 11366 - protein, 19 aa, Artificial Sequence
  Synthetic polypeptide
AMPLEGKGGRILLRQQVLV

SEQ ID NO: 11367 - protein, 77 aa, Artificial Sequence
  Synthetic polypeptide
WPGVVAHAHNPSTLGGQKEGSLEPRRSRLCHWREKEEGFCSDNKCLFKFYPRSSAEAPMAASCRIHVQLFSDLGRFR

SEQ ID NO: 11368 - protein, 439 aa, Artificial Sequence
  Synthetic polypeptide
GQVWWLMLIIPALWEAKRKDHLNPGGLGYAIGGKRRKDFAQTTSACLSFIQEALLKHQWQQAAEYMYSYFQTLEDSDSYKRQAAPEIIWKLGSEILFYHPKSNMESFNTFANRMKNIGVMNYLKISLQHALYLLHHGMLKDAKRNLSEAETWRHGENTSSREILINLIQAYKGLLQYYTWSEKKMELSKLDKDDYAYNAVAQDVFNHSWKTSANISALIKIPGVWDPFVKSYVEMLEFYGDRDGAQEVLTNYAYDEKFPSNPNAHIYLYNFLKRQKAPRSKLISVLKILYQIVPSHKLMLEFHTLLRKSEKEEHRKLGLEVLFGVLDFAGCTKNITAWKYLAKYLKNILMGNHLAWVQEEWNSRKNWWPGFHFSYFWAKSDWKEDTALACEKAFVAGLLLGKGCRYFRYILKQDHQILGKKIKRMKRSVKKYSIVNPRL

SEQ ID NO: 11369 - protein, 275 aa, Artificial Sequence
  Synthetic polypeptide
GQVWWLMLIIPALWEAKRKDHLNPGGLGYAIGGKRRKDFAQTTSACLSFIQEALLKHQWQQAAEYMYSYFQTLEDSDSYKRQAAPEISLQHALYLLHHGMLKDAKRNLSEAETWRHGENTSSREILINLIQAYKGLLQYYTWSEKKMELSKLDKDDYAYNAVAQDVFNHSWKTSANISALIKIPGVWDPFVKSYVEMLEFYGDRDGAQEVLTNYAYDEKFPSNPNAHIYLYNFLKRQKAPRSKLISVLKILYQIVPSHKLMLEFHTLLRKSEKEE

SEQ ID NO: 11370 - protein, 300 aa, Artificial Sequence
  Synthetic polypeptide
GQVWWLMLIIPALWEAKRKDHLNPGGLGYAIGGKRRKDFAQTTSACLSFIQEALLKHQWQQAAEYMYSYFQTLEDSDSYKRQAAPEIIWKLGSEILFYHPKSNMESFNTFANRMKNIGVMNYLKISLQHALYLLHHGMLKDAKRNLSEAETWRHGENTSSREILINLIQAYKGLLQYYTWSEKKMELSKLDKDDYAYNAVAQDVFNHSWKTSANISALIKIPGVWDPFVKSYVEMLEFYGDRDGAQEVLTNYAYDEKFPSNPNAHIYLYNFLKRQKAPRSKLISVLKHLQKISIMYSTLR

SEQ ID NO: 11371 - protein, 14 aa, Artificial Sequence
  Synthetic polypeptide
IVQLDALLDIFQKI

SEQ ID NO: 11372 - protein, 26 aa, Artificial Sequence
  Synthetic polypeptide
AVHLSSKLYSWTHFWIFSKRFNPGSS

SEQ ID NO: 11373 - protein, 1832 aa, Artificial Sequence
  Synthetic polypeptide
SFPREQFISPVNCTVGRTFGYFPKDLIQVVHEYTKEELQVPTDETDFVCFDGGRDDFHNYNVEELLGFLELYNSAATDSEKAVEKTLQDMEKNPELSKEREPEPEPVEANSEESDSVFSENTEDLQEQFTTQKHHSHANSQANHAQGEQASFESFEEMLQDKLKVPESENNKTSNSSQVSNEQDKIDAYKLLKKEMTLDLKTKFGSTADALVSDDETTRLVTSLEDDFDEELDTEYYAVGKEDEENQEDFDELPLLTFTDGEDMKTPAKSGVEKYPTDKEQNSNEEDKVQLTVPPGIKNDDKNILTTWGDTIFSIVTGGEETRDTMDLESSSSEEEKEDDDDALVPDSKQGKPQSATDYSDPDNVDDGLFIVDIPKTNNDKEVNAEHHIKGKGRGVQESKRGLVQDKTELEDENQEGMTVHSSVHSNNLNSMPAAEKGKDTLKSAYDDTENDLKGAAIHISKGMLHEEKPGEQILEGGSESESAQKAAGNQMNDRKIQQESLGSAPLMGDDHPNASRDSVEGDALVNGAKLHTLSVEHQREELKEELVLKTQNQPRFSSPDEIDLPRELEDEVPILGRNLPWQQERDVAATASKQMSEKIRLSEGEAKEDSLDEEFFHHKAMQGTEVGQTDQTDSTGGPAFLSKVEEDDYPSEELLEDENAINAKRSKEKNPGNQGRQFDVNLQVPDRAVLGTIHPDPEIEESKQETSMILDSEKTSETAAKGVNTGGREPNTMVEKERPLADKKAQRPFERSDFSDSIKIQTPELGEVFQNKDSDYLKNDNPEEHLKTSGLAGEPEGELSKEDHENTEKYMGTESQGSAAAEPEDDSFHWTPHTSVEPGHSDKREDLLIISSFFKEQQSLQRFQKYFNVHELEALLQEMSSKLKSAQQESLPYNMEKVLDKVFRASESQILSIAEKMLDTRVAENRDLGMNENNIFEEAAVLDDIQDLIYFVRYKHSTAEETATLVMAPPLEEGLGGAMEEMQPLHEDNFSREKTAELNVQVPEEPTHLDQRVIGDTHASEVSQKPNTEKDLDPGPVTTEDTPMDAIDANKQPETAAEEPASVTPLENAILLIYSFMFYLTKSLVATLPDDVQPGPDFYGLPWKPVFITAFLGIASFAIFLWRTVLVVKDRVYQVTEQQISEKLKTIMKENTELVQKLSNYEQKIKESKKHVQETRKQNMILSDEAIKYKDKIKTLEKNQEILDDTAKNLRVMLESEREQNVKNQDLISENKKSIEKLKDVISMNASEFSEVQIALNEAKLSEEKVKSECHRVQEENARLKKKKEQLQQEIEDWSKLHAELSEQIKSFEKSQKDLEVALTHKDDNINALTNCITQLNLLECESESEGQNKGGNDSDELANGEVGGDRNEKMKNQIKQMMDVSRTQTAISVVEEDLKLLQLKLRASVSTKCNLEDQVKKLEDDRNSLQAAKAGLEDECKTLRQKVEILNELYQQKEMALQKKLSQEEYERQEREHRLSAADEKAVSAAEEVKTYKRRIEEMEDELQKTERSFKNQIATHEKKAHENWLKARAAERAIAEEKREAANLRHKLLELTQKMAMLQEEPVIVKPMPGKPNTQNPPRRGPLSQNGSFGPSPVSGGECSPPLTVEPPVRPLSATLNRRDMPRSEFGSVDGPLPHPRWSAEASGKPSPSDPGSGTATMMNSSSRGSSPTRVLDEGKVNMAPKGPPPFPGVPLMSTPMGGPVPPPIRYGPPPQLCGPFGPRPLPPPFGPGMRPPLGLREFAPGVPPGRRDLPLHPRGFLPGHAPFRPLGSLGPREYFIPGTRLPPPTHGPQEYPPPPAVRDLLPSGSRDEPPPASQSTSQDCSQALKQSP

SEQ ID NO: 11374 - protein, 1832 aa, Artificial Sequence
  Synthetic polypeptide
SFPREQFISPVNCTVGRTFGYFPKDLIQVVHEYTKEELQVPTDETDFVCFDGGRDDFHNYNVEELLGFLELYNSAATDSEKAVEKTLQDMEKNPELSKEREPEPEPVEANSEESDSVFSENTEDLQEQFTTQKHHSHANSQANHAQGEQASFESFEEMLQDKLKVPESENNKTSNSSQVSNEQDKIDAYKLLKKEMTLDLKTKFGSTADALVSDDETTRLVTSLEDDFDEELDTEYYAVGKEDEENQEDFDELPLLTFTDGEDMKTPAKSGVEKYPTDKEQNSNEEDKVQLTVPPGIKNDDKNILTTWGDTIFSIVTGGEETRDTMDLESSSSEEEKEDDDDALVPDSKQGKPQSATDYSDPDNVDDGLFIVDIPKTNNDKEVNAEHHIKGKGRGVQESKRGLVQDKTELEDENQEGMTVHSSVHSNNLNSMPAAEKGKDTLKSAYDDTENDLKGAAIHISKGMLHEEKPGEQILEGGSESESAQKAAGNQMNDRKIQQESLGSAPLMGDDHPNASRDSVEGDALVNGAKLHTLSVEHQREELKEELVLKTQNQPRFSSPDEIDLPRELEDEVPILGRNLPWQQERDVAATASKQMSEKIRLSEGEAKEDSLDEEFFHHKAMQGTEVGQTDQTDSTGGPAFLSKVEEDDYPSEELLEDENAINAKRSKEKNPGNQGRQFDVNLQVPDRAVLGTIHPDPEIEESKQETSMILDSEKTSETAAKGVNTGGREPNTMVEKERPLADKKAQRPFERSDFSDSIKIQTPELGEVFQNKDSDYLKNDNPEEHLKTSGLAGEPEGELSKEDHENTEKYMGTESQGSAAAEPEDDSFHWTPHTSVEPGHSDKREDLLIISSFFKEQQSLQRFQKYFNVHELEALLQEMSSKLKSAQQESLPYNMEKVLDKVFRASESQILSIAEKMLDTRVAENRDLGMNENNIFEEAAVLDDIQDLIYFVRYKHSTAEETATLVMAPPLEEGLGGAMEEMQPLHEDNFSREKTAELNVQVPEEPTHLDQRVIGDTHASEVSQKPNTEKDLDPGPVTTEDTPMDAIDANKQPETAAEEPASVTPLENAILLIYSFMFYLTKSLVATLPDDVQPGPDFYGLPWKPVFITAFLGIASFAIFLWRTVLVVSNTVYYVTEQQISEKLKTIMKENTELVQKLSNYEQKIKESKKHVQETRKQNMILSDEAIKYKDKIKTLEKNQEILDDTAKNLRVMLESEREQNVKNQDLISENKKSIEKLKDVISMNASEFSEVQIALNEAKLSEEKVKSECHRVQEENARLKKKKEQLQQEIEDWSKLHAELSEQIKSFEKSQKDLEVALTHKDDNINALTNCITQLNLLECESESEGQNKGGNDSDELANGEVGGDRNEKMKNQIKQMMDVSRTQTAISVVEEDLKLLQLKLRASVSTKCNLEDQVKKLEDDRNSLQAAKAGLEDECKTLRQKVEILNELYQQKEMALQKKLSQEEYERQEREHRLSAADEKAVSAAEEVKTYKRRIEEMEDELQKTERSFKNQIATHEKKAHENWLKARAAERAIAEEKREAANLRHKLLELTQKMAMLQEEPVIVKPMPGKPNTQNPPRRGPLSQNGSFGPSPVSGGECSPPLTVEPPVRPLSATLNRRDMPRSEFGSVDGPLPHPRWSAEASGKPSPSDPGSGTATMMNSSSRGSSPTRVLDEGKVNMAPKGPPPFPGVPLMSTPMGGPVPPPIRYGPPPQLCGPFGPRPLPPPFGPGMRPPLGLREFAPGVPPGRRDLPLHPRGFLPGHAPFRPLGSLGPREYFIPGTRLPPPTHGPQEYPPPPAVRDLLPSGSRDEPPPASQSTSQDCSQALKQSP

SEQ ID NO: 11375 - protein, 425 aa, Artificial Sequence
  Synthetic polypeptide
SFPREQFISPVNCTVGRTFGYFPKDLIQVVHEYTKEELQVPTDETDFVCFDGGRDDFHNYNVEELLGFLELYNSAATDSEKAVEKTLQDMEKNPELSKEREPEPEPVEANSEESDSVFSENTEDLQEQFTTQKHHSHANSQANHAQGEQASFESFEEMLQDKLKVPESENNKTSNSSQVSNEQDKIDAYKLLKKEMTLDLKTKFGSTADALVSDDETTRLVTSLEDDFDEELDTEYYAVGKEDEENQEDFDELPLLTFTDGEDMKTPAKSGVEKYPTDKEQNSNEEDKVQLTVPPGIKNDDKNILTTWGDTIFSIVTGGEETRDTMDLESSSSEEEKEDDDDALVPDSKQGKPQSATDYSDPDNVDDGLFIVDIPKTNNDKEVNAEHHIKGKGRGVQESKRGLVQDKTELEDENQEGFKTEPIKL

SEQ ID NO: 11376 - protein, 388 aa, Artificial Sequence
  Synthetic polypeptide
SLHWTKPPTPSDLRSSRARLLELFTDLSCNPEMMKNAADSYFSLLQGFINSLDESTQESKLRYIQNFKWTDTLQGQVPSAQQDAVFELISMGFNVALWYTKYASRLAGKENITEDEAKEVHRSLKIAAGIFKHLKESHLPKLITPAEKGRDLESRLIEAYVIQCQAEAQEVTIARAIELKHAPGLIAALAYETANFYQKADHTLSSLEPAYSAKWRKYLHLKMCFYTAYAYCYHGETLLASDKCGEAIRSLQEAEKLYAKAEALCKEYGETKGPGPTVKPSGHLFFRKLGNLVKNTLEKCQRENGFIYFQKIPTEAPQLELKANYGLVEPIPFEFPPTSVQWTPETLAAFDLTKRPKDDSTKPKPEEEVKPVKEPDIKPQKDTGCYIS

SEQ ID NO: 11377 - protein, 14 aa, Artificial Sequence
  Synthetic polypeptide
IRACIGQNHPPPVT

SEQ ID NO: 11378 - protein, 192 aa, Artificial Sequence
  Synthetic polypeptide
SLHWTKPPTPSDLRSSRARLLELFTDLSCNPEMMKNAADSYFSLLQGFINSLDESTQESKLRYIQNFKWTDTLQGQVPSAQQDAVFELISMGFNVALWYTKYASRLAGKENITEDEAKEVHRSLKIAAGIFKHLKESHLPKLITPAEKGRDLESRLIEAYVIQCQAEAQEVTIARAIELKHAPGLIAALAYE

SEQ ID NO: 11379 - protein, 315 aa, Artificial Sequence
  Synthetic polypeptide
SLHWTKPPTPSDLRSSRARLLELFTDLSCNPEMMKNAADSYFSLLQGFINSLDESTQESKLRYIQNFKWTDTLQGQVPSAQQDAVFELISMGFNVALWYTKYASRLAGKENITEDEAKEVHRSLKIAAGIFKHLKESHLPKLITPAEKGRDLESRLIEAYVIQCQAEAQEVTIARAIELKHAPGLIAALAYETANFYQKADHTLSSLEPAYSAKWRKYLHLKMCFYTAYAYCYHGETLLASDKCGEAIRSLQEAEKLYAKAEALCKEYGETKGPGPTVKPSGHLFFRKLGNLVKNTLEKCQRENGFILNPNQKKK

SEQ ID NO: 11380 - protein, 356 aa, Artificial Sequence
  Synthetic polypeptide
SLHWTKPPTPSDLRSSRARLLELFTDLSCNPEMMKNAADSYFSLLQGFINSLDESTQESKLRYIQNFKWTDTLQGQVPSITEDEAKEVHRSLKIAAGIFKHLKESHLPKLITPAEKGRDLESRLIEAYVIQCQAEAQEVTIARAIELKHAPGLIAALAYETANFYQKADHTLSSLEPAYSAKWRKYLHLKMCFYTAYAYCYHGETLLASDKCGEAIRSLQEAEKLYAKAEALCKEYGETKGPGPTVKPSGHLFFRKLGNLVKNTLEKCQRENGFIYFQKIPTEAPQLELKANYGLVEPIPFEFPPTSVQWTPETLAAFDLTKRPKDDSTKPKPEEEVKPVKEPDIKPQKDTGCYIS

SEQ ID NO: 11381 - protein, 71 aa, Artificial Sequence
  Synthetic polypeptide
TSSLEWPCTPSLYAYLDSPGQLSAAGQEAAVSYSHTLLLPAFDKCAYQTHACQLACFDHPDLSSCQKVMQP

SEQ ID NO: 11382 - protein, 79 aa, Artificial Sequence
  Synthetic polypeptide
ALQVRRLLSPTATHFCSQHLTSVLTKPTHASWLVLTIQTFQVAKKLCSPDSRLAGGGLGHVHHVHRSLCLGWSISARAP

SEQ ID NO: 11383 - protein, 444 aa, Artificial Sequence
  Synthetic polypeptide
GQVWWLTPVIPALWEAEVGRLLEARSSRPFLGNIVNFQGHPEKLIRLRNPWGEVEWSGAWSDDASPVISPSAEGCRVKHTTMRSMSQMSLSDFVRQFSRLEICNLSPDSLSSEEVHKWNLVLFNGHWTRGSTAGGCQNYPATYWTNPQFKIRLDEVDEDQEESIGEPCCTVLLGLMQKNRRWRKRIGQGMLSIGYAVYQVLLCWYTLDVLGLNILASHCSTSFLLLEEASLLLYIPLPVALLRFRDSFLWLNTRRLRRICPQACHDALPFWQRPSSVPHPWMVSLEVFYRGGSFPHLQMIRFPLPFSRTDIKFDGFNINTCREMISLLDSNGTGTLGAVEFKTLWLKIQKYLEIYWETDYNHSGTIDAHEMRTALRKAGFTLNSQVQQTIALRYACSKLGINFDSFVACMIRLETLFKLFSLLDEDKDGMVQLSLAEWLCCVLV

SEQ ID NO: 11384 - protein, 29 aa, Artificial Sequence
  Synthetic polypeptide
GQEFKTIPGQHSEFPGPSREADQTQESMG

SEQ ID NO: 11385 - protein, 200 aa, Artificial Sequence
  Synthetic polypeptide
GQVWWLTPVIPALWEAEVGRLLEARSSRPFLGNIVNFQGHPEKLIRLRNPWGEVEWSGAWSDDAPEWNHIDPRRKEELDKKVEDGEFWMSLSDFVRQFSRLEICNLSPDSLSSEEVHKWNLVLFNGHWTRGSTAGGCQNYPATYWTNPQFKIRLDEVDEDQEESIGEPCCTVLLGLMQKNRRWRKRIGQGMLSIGYAVYQ

SEQ ID NO: 11386 - protein, 144 aa, Artificial Sequence
  Synthetic polypeptide
GQVWWLTPVIPALWEAEVGRLLEARSSRPFLGNIVNFQGHPEKLIRLRNPWGEVEWSGAWSDDAPEWNHIDPRRKEELDKKVEDGEFWMSLSDFVRQFSRLEICNLSPDSLSSEEVHKWNLVLFNGHWTRGSTAGGCQNYPGSS

SEQ ID NO: 11387 - protein, 63 aa, Artificial Sequence
  Synthetic polypeptide
GQVWWLTPVIPALWEAEVGRLLEARSSRPFLGNIVNFQGHPEKLIRLRNPWGEVEWSGAWSDE

SEQ ID NO: 11388 - protein, 624 aa, Artificial Sequence
  Synthetic polypeptide
QVLWLMPVIPALWEAKADGSLEELCPSPQFIVGGATRTDICQGGLGDCWLLAAIASLTLNEELLYRVVPRDQDFQENYAGIFHFQFWQYGEWVEVVIDDRLPTKNGQLLFLHSEQGNEFWSALLEKAYAKLNGCYEALAGGSTVEGFEDFTGGISEFYDLKKPPANLYQIIRKALCAGSLLGCSIDVSSAAEAEAITSQKLVKSHAYSVTGVEEVNFQGHPEKLIRLRNPWGEVEWSGAWSDDASPVISPSAEGCRVKHTTMRSMSQMSLSDFVRQFSRLEICNLSPDSLSSEEVHKWNLVLFNGHWTRGSTAGGCQNYPATYWTNPQFKIRLDEVDEDQEESIGEPCCTVLLGLMQKNRRWRKRIGQGMLSIGYAVYQVLLCWYTLDVLGLNILASHCSTSFLLLEEASLLLYIPLPVALLRFRDSFLWLNTRRLRRICPQACHDALPFWQRPSSVPHPWMVSLEVFYRGGSFPHLQMIRFPLPFSRTDIKFDGFNINTCREMISLLDSNGTGTLGAVEFKTLWLKIQKYLEIYWETDYNHSGTIDAHEMRTALRKAGFTLNSQVQQTIALRYACSKLGINFDSFVACMIRLETLFKLFSLLDEDKDGMVQLSLAEWLCCVLV

SEQ ID NO: 11389 - protein, 36 aa, Artificial Sequence
  Synthetic polypeptide
SQHFGRPRQMDHLRSCVPALSLSLVEPRAQTFVRVV

SEQ ID NO: 11390 - protein, 380 aa, Artificial Sequence
  Synthetic polypeptide
QVLWLMPVIPALWEAKADGSLEELCPSPQFIVGGATRTDICQGGLGDCWLLAAIASLTLNEELLYRVVPRDQDFQENYAGIFHFQFWQYGEWVEVVIDDRLPTKNGQLLFLHSEQGNEFWSALLEKAYAKLNGCYEALAGGSTVEGFEDFTGGISEFYDLKKPPANLYQIIRKALCAGSLLGCSIDVSSAAEAEAITSQKLVKSHAYSVTGVEEVNFQGHPEKLIRLRNPWGEVEWSGAWSDDAPEWNHIDPRRKEELDKKVEDGEFWMSLSDFVRQFSRLEICNLSPDSLSSEEVHKWNLVLFNGHWTRGSTAGGCQNYPATYWTNPQFKIRLDEVDEDQEESIGEPCCTVLLGLMQKNRRWRKRIGQGMLSIGYAVYQ

SEQ ID NO: 11391 - protein, 324 aa, Artificial Sequence
  Synthetic polypeptide
QVLWLMPVIPALWEAKADGSLEELCPSPQFIVGGATRTDICQGGLGDCWLLAAIASLTLNEELLYRVVPRDQDFQENYAGIFHFQFWQYGEWVEVVIDDRLPTKNGQLLFLHSEQGNEFWSALLEKAYAKLNGCYEALAGGSTVEGFEDFTGGISEFYDLKKPPANLYQIIRKALCAGSLLGCSIDVSSAAEAEAITSQKLVKSHAYSVTGVEEVNFQGHPEKLIRLRNPWGEVEWSGAWSDDAPEWNHIDPRRKEELDKKVEDGEFWMSLSDFVRQFSRLEICNLSPDSLSSEEVHKWNLVLFNGHWTRGSTAGGCQNYPGSS

SEQ ID NO: 11392 - protein, 60 aa, Artificial Sequence
  Synthetic polypeptide
QVLWLMPVIPALWEAKADGSLEELCPSPQFIVGGATRTDICQGGLETRWMRIGLVGFRSN

SEQ ID NO: 11393 - protein, 34 aa, Artificial Sequence
  Synthetic polypeptide
AQWLTSVIPALWEAEAGRSPEVTAGCWQPLPPSP

SEQ ID NO: 11394 - protein, 14 aa, Artificial Sequence
  Synthetic polypeptide
SQHFGRPRQADHLR

SEQ ID NO: 11395 - protein, 41 aa, Artificial Sequence
  Synthetic polypeptide
AEITPFALQPGRQSETPSPKKNEWTKISGSKFKKKWCKSSW

SEQ ID NO: 11396 - protein, 1081 aa, Artificial Sequence
  Synthetic polypeptide
SQLLGRLKWKNRLNPGGGCCSEPRSHHLHSSLGDRARLRLQKKMSGPRSQDPSLKRNGVKVPGEYRRKENGVNSPRMDLTLAELQEMASRQQQQIEAQQQLLATKEQRLKFLKQQDQRQQQQVAEQEKLKRLKEIAENQEAKLKKVRALKGHVEQKRLSNGKLVEEIEQMNNLFQQKQRELVLAVSKVEELTRQLEMLKNGRIDSHHDNQSAVAELDRLYKELQLRNKLNQEQNAKLQQQRECLNKRNSEVAVMDKRVNELRDRLWKKKAALQQKENLPVSSDGNLPQQAASAPSRVAAVGPYIQSSTMPRMPSRPELLVKPALPDGSLVIQASEGPMKIQTLPNMRSGAASQTKGSKIHPVGPDWSPSNADLFPSQGSASVPQSTGNALDQVDDGEVPLREKEKKVRPFSMFDAVDQSNAPPSFGTLRKNQSSEDILRDAQVANKNVAKVPPPVPTKPKQINLPYFGQTNQPPSDIKPDGSSQQLSTVVPSMGTKPKPAGQQPRVLLSPSIPSVGQDQTLSPGSKQESPPAAAVRPFTPQPSKDTLLPPFRKPQTVAASSIYSMYTQQQAPGKNFQQAVQSALTKTHTRGPHFSSVYGKPVIAAAQNQQQHPENIYSNSQGKPGSPEPETEPVSSVQENHENERIPRPLSPTKLLPFLSNPYRNQSDADLEALRKKLSNAPRPLKKRSSITEPEGPNGPNIQKLLYQRTTIAAMETISVPSYPSKSASVTASSESPVEIQNPYLHVEPEKEVVSLVPESLSPEDVGNASTENSDMPAPSPGLDYEPEGVPDNSPNLQNNPEEPNPEAPHVLDVYLEEYPPYPPPPYPSGEPEGPGEDSVSMRPPEITGQVSLPPGKRTNLRKTGSERIAHGMRVKFNPLALLLDSSLEGEFDLVQRIIYEVDDPSLPNDEGITALHNAVCAGHTEIVKFLVQFGVNVNAADSDGWTPLHCAASCNNVQVCKFLVESGAAVFAMTYSDMQTAADKCEEMEEGYTQCSQFLYGVQEKMGIMNKGVIYALWDYEPQNDDELPMKEGDCMTIIHREDEDEIEWWWARLNDKEGYVPRNLLGLYPRIKPRQRSLA

SEQ ID NO: 11397 - protein, 247 aa, Artificial Sequence
  Synthetic polypeptide
SQLLGRLKWKNRLNPGGGCCSEPRSHHLHSSLGDRARLRLQKKMSGPRSQDPSLKRNGVKVPGEYRRKENGVNSPRMDLTLAELQEMASRQQQQIEAQQQLLATKEQRLKFLKQQDQRQQQQVAEQEKLKRLKEIAENQEAKLKKVRALKGHVVSLVPESLSPEDVGNASTENSDMPAPSPGLDYEPEGVPDNSPNLQNNPEEPNPEAPHVLDVYLEEYPPYPPPPYPSGEPEGPGEDSVSMRPPEI

SEQ ID NO: 11398 - protein, 22 aa, Artificial Sequence
  Synthetic polypeptide
AEITPFALQPGRQSETPSPKKN

SEQ ID NO: 11399 - protein, 44 aa, Artificial Sequence
  Synthetic polypeptide
SQLLGRLKWKNRLNPGGGCCSEPRSHHLHSSLGDRARLRLQKKM

SEQ ID NO: 11400 - protein, 1164 aa, Artificial Sequence
  Synthetic polypeptide
CAECLFFASLHSLFTFLHPALCLRRLTSLNCINRFPCHLMFLTVYLSNNEQHFTEVPVTPETICRDVVDLCKEPGESDCHLAEVWCGSERPVADNERMFDVLQRFGSQRNEVRFFLRHERPPGRDIVSGPRSQDPSLKRNGVKVPGEYRRKENGVNSPRMDLTLAELQEMASRQQQQIEAQQQLLATKEQRLKFLKQQDQRQQQQVAEQEKLKRLKEIAENQEAKLKKVRALKGHVEQKRLSNGKLVEEIEQMNNLFQQKQRELVLAVSKVEELTRQLEMLKNGRIDSHHDNQSAVAELDRLYKELQLRNKLNQEQNAKLQQQRECLNKRNSEVAVMDKRVNELRDRLWKKKAALQQKENLPVSSDGNLPQQAASAPSRVAAVGPYIQSSTMPRMPSRPELLVKPALPDGSLVIQASEGPMKIQTLPNMRSGAASQTKGSKIHPVGPDWSPSNADLFPSQGSASVPQSTGNALDQVDDGEVPLREKEKKVRPFSMFDAVDQSNAPPSFGTLRKNQSSEDILRDAQVANKNVAKVPPPVPTKPKQINLPYFGQTNQPPSDIKPDGSSQQLSTVVPSMGTKPKPAGQQPRVLLSPSIPSVGQDQTLSPGSKQESPPAAAVRPFTPQPSKDTLLPPFRKPQTVAASSIYSMYTQQQAPGKNFQQAVQSALTKTHTRGPHFSSVYGKPVIAAAQNQQQHPENIYSNSQGKPGSPEPETEPVSSVQENHENERIPRPLSPTKLLPFLSNPYRNQSDADLEALRKKLSNAPRPLKKRSSITEPEGPNGPNIQKLLYQRTTIAAMETISVPSYPSKSASVTASSESPVEIQNPYLHVEPEKEVVSLVPESLSPEDVGNASTENSDMPAPSPGLDYEPEGVPDNSPNLQNNPEEPNPEAPHVLDVYLEEYPPYPPPPYPSGEPEGPGEDSVSMRPPEITGQVSLPPGKRTNLRKTGSERIAHGMRVKFNPLALLLDSSLEGEFDLVQRIIYEVDDPSLPNDEGITALHNAVCAGHTEIVKFLVQFGVNVNAADSDGWTPLHCAASCNNVQVCKFLVESGAAVFAMTYSDMQTAADKCEEMEEGYTQCSQFLYGVQEKMGIMNKGVIYALWDYEPQNDDELPMKEGDCMTIIHREDEDEIEWWWARLNDKEGYVPRNLLGLYPRIKPRQRSLA

SEQ ID NO: 11401 - protein, 23 aa, Artificial Sequence
  Synthetic polypeptide
EVDFSKLHQPLPLPSDVSYRVSQ

SEQ ID NO: 11402 - protein, 95 aa, Artificial Sequence
  Synthetic polypeptide
GLPSCAELCFLPCISVTMSSTSQKFQLLQKQYAETWWICAKNPARVIAIWLKCGVALNVQLRIMSECLMFFNDLEVRGTKFASSFVMNAPLAGTL

SEQ ID NO: 11403 - protein, 48 aa, Artificial Sequence
  Synthetic polypeptide
GILSPLLCTSSCCLAKKLACFLFVFRHDCRFPEASQAVLNYVSYRVSQ

SEQ ID NO: 11404 - protein, 1126 aa, Artificial Sequence
  Synthetic polypeptide
TMFLTVYLSNNEQHFTEVPVTPETICRDVVDLCKEPGESDCHLAEVWCGSERPVADNERMFDVLQRFGSQRNEVRFFLRHERPPGRDIVSGPRSQDPSLKRNGVKVPGEYRRKENGVNSPRMDLTLAELQEMASRQQQQIEAQQQLLATKEQRLKFLKQQDQRQQQQVAEQEKLKRLKEIAENQEAKLKKVRALKGHVEQKRLSNGKLVEEIEQMNNLFQQKQRELVLAVSKVEELTRQLEMLKNGRIDSHHDNQSAVAELDRLYKELQLRNKLNQEQNAKLQQQRECLNKRNSEVAVMDKRVNELRDRLWKKKAALQQKENLPVSSDGNLPQQAASAPSRVAAVGPYIQSSTMPRMPSRPELLVKPALPDGSLVIQASEGPMKIQTLPNMRSGAASQTKGSKIHPVGPDWSPSNADLFPSQGSASVPQSTGNALDQVDDGEVPLREKEKKVRPFSMFDAVDQSNAPPSFGTLRKNQSSEDILRDAQVANKNVAKVPPPVPTKPKQINLPYFGQTNQPPSDIKPDGSSQQLSTVVPSMGTKPKPAGQQPRVLLSPSIPSVGQDQTLSPGSKQESPPAAAVRPFTPQPSKDTLLPPFRKPQTVAASSIYSMYTQQQAPGKNFQQAVQSALTKTHTRGPHFSSVYGKPVIAAAQNQQQHPENIYSNSQGKPGSPEPETEPVSSVQENHENERIPRPLSPTKLLPFLSNPYRNQSDADLEALRKKLSNAPRPLKKRSSITEPEGPNGPNIQKLLYQRTTIAAMETISVPSYPSKSASVTASSESPVEIQNPYLHVEPEKEVVSLVPESLSPEDVGNASTENSDMPAPSPGLDYEPEGVPDNSPNLQNNPEEPNPEAPHVLDVYLEEYPPYPPPPYPSGEPEGPGEDSVSMRPPEITGQVSLPPGKRTNLRKTGSERIAHGMRVKFNPLALLLDSSLEGEFDLVQRIIYEVDDPSLPNDEGITALHNAVCAGHTEIVKFLVQFGVNVNAADSDGWTPLHCAASCNNVQVCKFLVESGAAVFAMTYSDMQTAADKCEEMEEGYTQCSQFLYGVQEKMGIMNKGVIYALWDYEPQNDDELPMKEGDCMTIIHREDEDEIEWWWARLNDKEGYVPRNLLGLYPRIKPRQRSLA

SEQ ID NO: 11405 - protein, 16 aa, Artificial Sequence
  Synthetic polypeptide
GQEIETILANTQSIQR

SEQ ID NO: 11406 - protein, 35 aa, Artificial Sequence
  Synthetic polypeptide
SQHFRRLRWADHEVRRSRPSWLTRKVSRDKVLDET

SEQ ID NO: 11407 - protein, 256 aa, Artificial Sequence
  Synthetic polypeptide
HAKYPEIKSLMKPDPNLIWIIIMMVLTQLGAFYIVKDLDWKWVIFGAYAFGSCINHSMTLAIHEIAHNAAFGNCKAMWNRWFGMFANLPIGIPYSISFKRYHMDHHRYLGADGVDVDIPTDFEGWFFCTAFRKFIWVILQPLFYAFRPLFINPKPITYLEVINTVAQVTFDILIYYFLGIKSLVYMLAASLLGLGLHPISGHFIAEHYMFLKGHETYSYYGPLNLLTFNVGYHNEHHDFPNIPGKSLPLVRKIAAE

SEQ ID NO: 11408 - protein, 297 aa, Artificial Sequence
  Synthetic polypeptide
HAKYPEIKSLMKPDPNLIWIIIMMVLTQLGAFYIVKDLDWKWVIFGAYAFGSCINHSMTLAIHEIAHNAAFGNCKAMWNRWFGMFANLPIGIPYSISFKRYHMDHHRYLGADGVDVDIPTDFEGWFFCTAFRKFIWVILQPLFYAFRPLFINPKPITYLEVINTVAQVTFDILIYYFLGIKSLVYMLAASLLGLGLHPISGHFIAEHYMFLKGHETYSYYGPLNLLTFNVGYHNEHHDFPNIPGKSLPLVRKIAAEYYDNLPHYNSWIKVLYDFVMDDTISPYSRMKRHQKGEMVLE

SEQ ID NO: 11409 - protein, 204 aa, Artificial Sequence
  Synthetic polypeptide
LKYVGESERAVRQVFQRAKNSAPCVIFFDEVDALCPRRSDRETGASVRVVNQLLTEMDGLEARQQVFIMAATNRPDIIDPAILRPGRLDKTLFVGLPPPADRLAILKTITKNGTKPPLDADVNLEAIAGDLRCDCYTGADLSALVREASICALRQEMARQKSGNEKGELKVSHKHFEEAFKKVRSSISKKDQIMYERLQESLSR

SEQ ID NO: 11410 - protein, 17 aa, Artificial Sequence
  Synthetic polypeptide
MKQDWSLIELIIIEVCW

SEQ ID NO: 11411 - protein, 43 aa, Artificial Sequence
  Synthetic polypeptide
LKYVGESERAVRQVFQRAKNSAPCVIFFDEVDALCPRRSDREI

SEQ ID NO: 11412 - protein, 668 aa, Artificial Sequence
  Synthetic polypeptide
GRAGRLTPVIPALWEAEDSKDSSLLESDMKRKGKLKNKGSKRKKEDLQEVDGEIEAVLQKKAKARGLEFQISNVKFEDVGGNDMTLKEVCKMLIHMRHPEVYHHLGVVPPRGVLLHGPPGCGKTLLAHAIAGELDLPILKVAAPEIVSGVSGESEQKLRELFEQAVSNAPCIIFIDEIDAITPKREVASKDMERRIVAQLLTCMDDLNNVAATARVLVIGATNRPDSLDPALRRAGRFDREICLGIPDEASRERILQTLCRKLRLPQAFDFCHLAHLTPGFVGADLMALCREAAMCAVNRVLMKLQEQQKKNPEMEDLPSKGVQEERLGTEPTSETQDELQRLLGLLRDQDPLSEEQMQGLCIELNDFIVALSSVQPSAKREGFVTVPNVTWADIGALEDIREELTMAILAPVRNPDQFKALGLVTPAGVLLAGPPGCGKTLLAKAVANESGLNFISVKGPELLNMYVGESERAVRQVFQRAKNSAPCVIFFDEVDALCPRRSDRETGASVRVVNQLLTEMDGLEARQQVFIMAATNRPDIIDPAILRPGRLDKTLFVGLPPPADRLAILKTITKNGTKPPLDADVNLEAIAGDLRCDCYTGADLSALVREASICALRQEMARQKSGNEKGELKVSHKHFEEAFKKVRSSISKKDQIMYERLQESLSR

SEQ ID NO: 11413 - protein, 19 aa, Artificial Sequence
  Synthetic polypeptide
SQHFGRLRIQKILLFWRVI

SEQ ID NO: 11414 - protein, 507 aa, Artificial Sequence
  Synthetic polypeptide
GRAGRLTPVIPALWEAEDSKDSSLLESDMKRKGKLKNKGSKRKKEDLQEVDGEIEAVLQKKAKARGLEFQISNVKFEDVGGNDMTLKEVCKMLIHMRHPEVYHHLGVVPPRGVLLHGPPGCGKTLLAHAIAGELDLPILKVAAPEIVSGVSGESEQKLRELFEQAVSNAPCIIFIDEIDAITPKREVASKDMERRIVAQLLTCMDDLNNVAATARVLVIGATNRPDSLDPALRRAGRFDREICLGIPDEASRERILQTLCRKLRLPQAFDFCHLAHLTPGFVGADLMALCREAAMCAVNRVLMKLQEQQKKNPEMEDLPSKGVQEERLGTEPTSETQDELQRLLGLLRDQDPLSEEQMQGLCIELNDFIVALSSVQPSAKREGFVTVPNVTWADIGALEDIREELTMAILAPVRNPDQFKALGLVTPAGVLLAGPPGCGKTLLAKAVANESGLNFISVKGPELLNMYVGESERAVRQVFQRAKNSAPCVIFFDEVDALCPRRSDREI

SEQ ID NO: 11415 - protein, 108 aa, Artificial Sequence
  Synthetic polypeptide
GRAGRLTPVIPALWEAEDSKDSSLLESDMKRKGKLKNKGSKRKKEDLQEVDGEIEAVLQKKGGLQDAHTHASPGGVPPPGRRAPSWSSPSWTTRLWEDITCTCNCWGT

SEQ ID NO: 11416 - protein, 87 aa, Artificial Sequence
  Synthetic polypeptide
GRAGRLTPVIPALWEAEDSKDSSLLESDMKRKGKLKNKGSKRKKEDLQEVDGEIEAVLQKKAKARGLEFQISNVKFEDVGGNDMTLK

SEQ ID NO: 11417 - protein, 94 aa, Artificial Sequence [sequence omitted]

SEQ ID NO: 11418 - protein, 23 aa, Artificial Sequence
  Synthetic polypeptide
TLSLQKITRFTSGTNVVNCQLRS

SEQ ID NO: 11419 - protein, 28 aa, Artificial Sequence
  Synthetic polypeptide
GHEFQTNLGNMARHCLYKKSQGLHLAQT

SEQ ID NO: 11420 - protein, 32 aa, Artificial Sequence
  Synthetic polypeptide
GWVWWLTPVIPALWEAEEAVPMLYAADTYGAL

SEQ ID NO: 11421 - protein, 329 aa, Artificial Sequence
  Synthetic polypeptide
SQHYGRLRRQFPCYTQQILTEHCNEVWFCKFSNDGTKLATGSKDTTVIIWQVDPDTHLLKLLKTLEGHAYGVSYIAWSPDDNYLVACGPDDCSELWLWNVQTGELRTKMSQSHEDSLTSVAWNPDGKRFVTGGQRGQFYQCDLDGNLLDSWEGVRVQCLWCLSDGKTVLASDTHQRIRGYNFEDLTDRNIVQEDHPIMSFTISKNGRLALLNVATQGVHLWDLQDRVLVRKYQGVTQGFYTIHSCFGGHNEDFIASGSEDHKVYIWHKRSELPIAELTGHTRTVNCVSWNPQIPSMMASASDDGTVRIWGPAPFIDHQNIEEECSSMDS

SEQ ID NO: 11422 - protein, 178 aa, Artificial Sequence
  Synthetic polypeptide
PRKLEPEHVWFPVETKDNILTYVPELFFRNLDPYQMENGKCHHWQIIAFDELRTDFKSPIDQCNPVHARERLRNIERICFLLRKLVLPEYSIHSLFCIMFLCAQEWLTLGLNVPLLFYHFWRYFHCPADSSELAYDPPVVMNADTLSYCQKEAWCKLAFYLLSFFYYLYCMIYTLVSS

SEQ ID NO: 11423 - protein, 25 aa, Artificial Sequence
  Synthetic polypeptide
HMSLSCFSETWTPTRWKMENAITGR

SEQ ID NO: 11424 - protein, 24 aa, Artificial Sequence
  Synthetic polypeptide
VVFQKPGPLPDGKWKMPSLADNCL

SEQ ID NO: 11425 - protein, 20 aa, Artificial Sequence
  Synthetic polypeptide
ETAWPNGGSTRKRDGEDNCL

SEQ ID NO: 11426 - protein, 149 aa, Artificial Sequence
  Synthetic polypeptide
RLHGPMEEAQEREMGKIIAFDELRTDFKSPIDQCNPVHARERLRNIERICFLLRKLVLPEYSIHSLFCIMFLCAQEWLTLGLNVPLLFYHFWRYFHCPADSSELAYDPPVVMNADTLSYCQKEAWCKLAFYLLSFFYYLYCMIYTLVSS

SEQ ID NO: 11427 - protein, 16 aa, Artificial Sequence
  Synthetic polypeptide
DCMAQWRKHKKERWGR

SEQ ID NO: 11428 - protein, 20 aa, Artificial Sequence
  Synthetic polypeptide
PVKDSETWVQCGLSLIHHAR

SEQ ID NO: 11429 - protein, 35 aa, Artificial Sequence
  Synthetic polypeptide
RGAAQRAGWSTNQSKTQRPGSSVGCPSFIMQDNCL

SEQ ID NO: 11430 - protein, 164 aa, Artificial Sequence
  Synthetic polypeptide
EGQHSVLDGALTSQRLRDLGPVWVVPHSSCKIIAFDELRTDFKSPIDQCNPVHARERLRNIERICFLLRKLVLPEYSIHSLFCIMFLCAQEWLTLGLNVPLLFYHFWRYFHCPADSSELAYDPPVVMNADTLSYCQKEAWCKLAFYLLSFFYYLYCMIYTLVSS

SEQ ID NO: 11431 - protein, 31 aa, Artificial Sequence
  Synthetic polypeptide
SLCYTWSFTLSLPSWMALHSPPTGAARILHP

SEQ ID NO: 11432 - protein, 106 aa, Artificial Sequence
  Synthetic polypeptide
VSPAGWLCIHHLLVLPEYSIHSLFCIMFLCAQEWLTLGLNVPLLFYHFWRYFHCPADSSELAYDPPVVMNADTLSYCQKEAWCKLAFYLLSFFYYLYCMIYTLVSS

SEQ ID NO: 11433 - protein, 101 aa, Artificial Sequence
  Synthetic polypeptide
SSFKSPLERPSPPRGPPSFPHSEQWFLLSFPPASSAPVLPRFVLWLPCLLFIEPVLHLVIYIESPQLDGFAFTTYWCCQNTPSIASSALCSCVRKSGSRWG

SEQ ID NO: 11434 - protein, 21 aa, Artificial Sequence
  Synthetic polypeptide
AVSRLLTHRNCEIVNNQKMMM

SEQ ID NO: 11435 - protein, 3330 aa, Artificial Sequence
  Synthetic polypeptide
YPVHNKDLVNEWDQNLTLFSYTLEEWMNCQRNWLYLEPVFHSSEIRRQLPAETELFSQVISMWKKIMSKIQNKQNALQITTSAGVLEILQNCNIHLEHIKKSLEDYLEVKRLIFPRFYFLSNAELLDILADSRNPESVQPHLVKCFENIKQLLIWKQDIGPPAVKMLISAEGEGLVLPKKIRVRSAVEQWLVNVEKSMFDVLKKERYIYNIILLFQSQIMFYNDCVKSFVSSYSREKLEKVHAGLMCHLEEVADLVVLDTSNSRTKAILGALLILYVHCRDIVINLLLKNIFNAEDFEWTRHLQYKWNEKQKLCYVSQGNASFTYGYEYLGCTSRLVITPLTDRCWLTLMEALHLNLGGCPAGPAGTGKTETVKDLAKSLGKHCVVFNCFEDLDYKIVRKFFFGLVQSGAWSCFDEFNLIDLEVLSVIASQILTIKAAKDNYSARFVLEGKEIRINMSCAVFITMNPRYGGGVELPDNLKSLFRPVAMMVPHYQMIAEIILFSFGFKSANSLSGKLTNLYELARKQLSQQDHYNFGLRSLKIVLIMAGTKKREFKCLSEADETLIVIEAIREASLPKCPPEDVPLFENIIGDIFPEVTVLKVNQLALEKVIYTATQQLGLQNWSSQKEKIIQFYNQLQVCVGVMLVGPTGGGKTTVRRILEKALTLLPIADFLSVAERKSASKISERKGKVDICVLNPKCVTLSELYGQLDPNTMEWTDGLLSATIRSYVYFNTPKNTKKDIDLRLKSRISDLSNVFKLDSSDTTETDDNIFEEIEKVVKIPENHNFDWQWIILDGPVDTFWVENLNSVLDDTRTLCLANSERIALTNKIRVIFEVDNLSQASPATVSRCAMVYMDPVDLGWEPYVKSWLLKTSKIISQSGVDCLEFMIKNSVTDGLQFIRNRQKFQPYPMEDITVVITLCRILDAFFDFMGKNGGFEQSDDLNDTSSKEANSQRESVTFKDIEKRDENTWYPEKNPDKLTKIIQKLFVFAFTWAFGGALNREDEHRENIPFCPSLEPDSLAKVTYDFDKLVHELFGNSSQVGWKHWGQSQGRRRKGNCINLPTGECSIFGYFVDIEQCEFIPWSDLVPNDQTLIQRGTSLLTNLQRSGGNFLKITECGECINYTATRDTTCLSFLMSLLLKNSCPVLLTGESGVGKTAAINQMLEKLEGPGAFDIKHGSILGDTLLYSEIKKSSSLKQNITILIPETHKTATGSSDNPTKKPEVRTNKKLLKNNDHKGVVVSTINFSTNVTAAKTKEMILKKLIRRTKDTLGAPKNNRILIFIDDMNMPVSDMYGAQPPLELIRQLLDLGGVYDTEKNTWKNIQDLSIVAACVPVVNDISPRLLKHFSMLVLPHPSQDILCTIFQAHLGIYFSINNFTPEVQKSKDQIISCSLAIYHQVRQNMLPTPTKCHYMFNLRDMFKLLLGLLQADRTVVNSKEMAALLFVHEATRVFHDRLIDFTDKSLFYRLLSRELENCFQIGIDGCGKKTCATLACYLTDNKLYRVPISHKCAYIEFKEVFKKVFIHAGLKGKPTVLMVPNLNIEQDSFLEDLNYIISSGRIPDLFENVELDSIAMKIRYLTEQSGHMDNRQSLLSFFQKRIYKNLHIFVIMSPEGPSFRQNCRVYPSMISSCTIDWYERWPEEALLIVANSFLKEKVNFENRENLKEKLAPTCVQIHKSMKDLNRKYFEETGRFYYTTPNSYLQFMETFAHILRAREEEMQTKRDRFHMGLSTILEATTLVTEMQEELLILGPQVEQKTKETETLMEKLRKDSQVVEKVQMLVKQDEEIVAEEVRIVEDYAQKTANELKSVLPAFDKAIVALNALDKADVAELRVYTRPPFLVLTVMNAVCILLQKKPNWATAKLLLSETGFLKKLINLDKDSIPDKVFVKLKKIVTLPDFNPHKISLVSVACCSLCQWVIALNNYHEVQKVVGPKQIQVAEAQNVLKIARQRLAEKQRGLQLVEEHLLFLQAAYKDTVAEKQLLANRKTMASRRFQCASVLLTVLEDEKTRWQETINQIDNKLEGILGDILLSAACIVYSGILTPEFRQLIVNKWETFCIENGISLSSKFSLIKVMAQKYEISRWHNQGLPHGQYSVENAILIKNGQQWPLLIDPHRQAHKWIRQMEGSRLQKLSIEDSNYTKKIENAMKTGGSVLLQNLLETLAPGLKAILKKDIYQKKGHYFIRVGDAEFEYNSNFRLYLSTEIDNPHFLPSVYNFVTMINFTVTFQGLQDQLLSTVVTHEVPHLEDQRSKLLESISLDAITLEELEEKTLNLLQKALGSILDDDKIVDTLRKSKMTSNEISKRIEATKKAESEIQAIRKNYLPIATRGALLYFLVADLTQINYMYQFSLDWFHQVFVSSVVSKSKEQEHSFKREKVSPKEVHEFISISKEPNLENEKNLLDKHIKSAIDMLTKSIFKVVSSALFNEDKLCFSFRLCTVIMQNNANGNLIQDDIGFLPEEEWNIFLYSGILINIKSALSQSRLTSTFEIGESQHLQWLSDSRWRQCQYVSTHLEPFSLLCKSLLSNVSQWDTFKNSKAVYSLISTPFSSENASLEENTKPPEETELLNENKETCNPINFPWEKLTSFQRLILVKVLRPESLNNSVRKFITEKMGNKYLQRTGVNLKDAYKGSNARTPLILIQTHGIDLTNILLRFAQELKGTTHHVTIISLGRDQAAKAEDLILKALTKTQQWVFLQNCHLATSFMPRLCTIVESFNSPNVTIDPEFRLWLSSKSYSSFPIPVLKKGLKIAVESPQGLKSNLLQTFGCTGSGEVTEEIFENPDCGQWWKKLLFSLCFFNAVINERKNYGILGWNIAYKFNSSDLGVAIKVLENSLRGQPSISWQALRYLIGEVIYGGRVIDNWDKRCLKTLLYKFCNPEVLKDDFSFSRSASIKDYIHIIQSLPDDDLPEVLGIHPEAIRSCWETQGEKFIENLIAMQPKTTTANLMIRPEQSKDELVMEILSDLLKRLPLTVEKEEIAVGTPSTLKSMMSSSIWESLSKNLKDHDPLIHCVLLTFLKQEIKRFDKLLFVIHKSLKDLQLAIKGEIILTQELEEIFNSFLNMRVPTLWQKHAYRSCKPLSSWIDDLIQRLNFFNTWAKVAYTAIQRRYMRFVTVWKQSIPSTSQKCKHPEDSENNFFEGFPSRYWLPAFFFPQAFLAAVLQDYGRSRGIAVDALTFTHHVISNTTDKDEKFSVFMPKKLNIVRRAFKGSASSHTGVYIFGLFIEGARWNREQKILEDSLPLEMCCDFPDIYFLPTKISTKTPNASNQTDSELYAFECPVYQTPERSRILATTGLPTNFLTSVYLSTKKPPSHWITMRVALLCEKNEK

SEQ ID NO: 11436 - protein, 12 aa, Artificial Sequence
  Synthetic polypeptide
EYNNIQYTIRIL

SEQ ID NO: 11437 - protein, 745 aa, Artificial Sequence
  Synthetic polypeptide
YPVHNKDLVNEWDQNLTLFSYTLEEWMNCQRNWLYLEPVFHSSEIRRQLPAETELFSQVISMWKKIMSKIQNKQNALQITTSAGVLEILQNCNIHLEHIKKSLEDYLEVKRLIFPRFYFLSNAELLDILADSRNPESVQPHLVKCFENIKQLLIWKQDIGPPAVKMLISAEGEGLVLPKKIRVRSAVEQWLVNVEKSMFDVLKKFLSQGIEDWNCQMFSQWVLSHPGQVVLTVSQIMFYNDCVKSFVSSYSREKLEKVHAGLMCHLEEVADLVVLDTSNSRTKAILGALLILYVHCRDIVINLLLKNIFNAEDFEWTRHLQYKWNEKQKLCYVSQGNASFTYGYEYLGCTSRLVITPLTDRCWLTLMEALHLNLGGCPAGPAGTGKTETVKDLAKSLGKHCVVFNCFEDLDYKIVRKFFFGLVQSGAWSCFDEFNLIDLEVLSVIASQILTIKAAKDNYSARYLFVLEGKEIRINMSCAVFITMNPRYGGGVELPDNLKSLFRPVAMMVPHYQMIAEIILFSFGFKSANSLSGKLTNLYELARKQLSQQDHYNFGLRSLKIVLIMAGTKKRDLSEADETLIVIEAIREASLPKCPPEDVPLFENIIGDIFPEVTVLKVNQLALEKVIYTATQQLGLQNWSSQKEKIIQFYNQLQVCVGVMLVGPTGGGKTTVRRILEKALTLLPIADFLSVAERKSASKISERKGKVDICVLNPKCVTLSELYGQLDPNTMEWTDGLLSATIRSY

SEQ ID NO: 11438 - protein, 2142 aa, Artificial Sequence
  Synthetic polypeptide
GQAWWLTPVIPALWEAKPNGSLEKVIYTATQQLGLQNWSSQKEKIIQFYNQLQVCVGVMLVGPTGGGKTTVRRILEKALTLLPIADFLSVAERKSASKISERKGKVDICVLNPKCVTLSELYGQLDPNTMEWTDGLLSATIRSYVYFNTPKNTKKDIDLRLKSRISDLSNVFKLDSSDTTETDDNIFEEIEKVVKIPENHNFDWQWIILDGPVDTFWVENLNSVLDDTRTLCLANSERIALTNKIRVIFEVDNLSQASPATVSRCAMVYMDPVDLGWEPYVKSWLLKTSKIISQSGVDCLEFMIKNSVTDGLQFIRNRQKFQPYPMEDITVVITLCRILDAFFDFMGKNGGFEQSDDLNDTSSKEANSQRESVTFKDIEKRDENTWYPEKNPDKLTKIIQKLFVFAFTWAFGGALNREDEHRENIPFCPSLEPDSLAKVTYDFDKLVHELFGNSSQVGINLPTGECSIFGYFVDIEQCEFIPWSDLVPNDQTLIQRDNPTKKPEVRTNKKLLKNNDHKGVVVSTINFSTNVTAAKTKEMILKKLIRRTKDTLGAPKNNRILIFIDDMNMPVSDMYGAQPPLELIRQLLDLGGVYDTEKNTWKNIQDLSIVAACVPVVNDISPRLLKHFSMLVLPHPSQDILCTIFQIGIDGCGKKTCATLACYLTDNKLYRVPISHKCAYIEFKEVFKKVFIHAGLKGKPTVLMVPNLNIEQDSFLEDLNYIISSGRIPDLFENVELDSIAMKIRYLTEQSGHMDNRQSLLSFFQKRIYKNLHIFVIMSPEGPSFRQNCRVYPSMISSCTIDWYERWPEEALLIVANSFLKEKVNFENRENLKEKLAPTCVQIHKSMKDLNRKYFEETGRFYYTTPNSYLQFMETFAHILRAREEEMQTKRDRFHMGLSTILEATTLVTEMQEELLILGPQVEQKTKETETLMEKLRKDSQVVEKVQMLVKQDEEIVAEEVRIVEDYAQKTANELKSVLPAFDKAIVALNALDKADVAELRVYTRPPFLVLTVMNAVCILLQKKPNWATAKLLLSETGFLKKLINLDKDSIPDKVFVKLKKIVTLPDFNPHKISLVSVACCSLCQWVIALNNYHEVQKVVGPKQIQVAEAQNVLKIARQRLAEKQRGLQLISRWHNQGLPHGQYSVENAILIKNGQQWPLLIDPHRQAHKWIRQMEGSRLQKLSIEDSNYTKKIENAMKTGGSVLLQSCQASTWRKKLYLSTEIDNPHFLPSVYNFVTMINFTVTFQGLQDQLLSTVVTHEVPHLEDQRSKLLESISLDAITLEELEEKTLNLLQKALGSILDDDKIVDTLRKSKMTSNEISKRIEATKKAESEIQAIRKNYLPIATRGALLYFLVADLTQINYMYQFSLDWFHQVFVSSVVSKSKEQEHSFKREKVSPKEVHEFISISKEPNLENEKNLLDKHIKSAIDMLTKSIFKVVSSALFNEDKLCFSFRLCTVIMQNNANGNLIQDDIGFLPEEEWNIFLYSGILINIKSALSQSRLTSTFEIGESQHLQWLSDSRWRQCQYVSTHLEPFSLLCKSLLSNVSQWDTFKNSKAVYSLISTPFSSENASLEENTKPPEEKHTFCLLLRAINHTGTDLGPVGRGQWLTSTACDRHTDVCSFSFALNDGVPDVEHVQDIFYGHCVDKYHVKVLRPESLNNSVRKFITEKMGNKYLQRTGVNLKDAYKGSNARTPLILIQTHGSASIKDYIHIIQSLPDDDLPEVLGIHPEAIRSCWETQGEKFIENLIAMQPKTTTANLMIRPEQSKDELVMEILSDLLKRLPLTVEKEEIAVGTPSTLKSMMSSSIWESLSKNLKDHDPLIHCVLLTFLKQEIKRFDKLLFVIHKSLKDLQLAIKGEIILTQELEEIFNSFLNMRVPTLWQKHAYRSCKPLSSWIDDLIQRLNFFNTWAKVAYTAIQRRYMRFVTVWKQSIPSTSQKCKHPEDSENNFFEGFPSRYWLPAFFFPQAFLAAVLQDYGRSRGIAVDALTFTHHVISNTTDKDEKFSVFMPKKLNIVRRAFKGSASSHTGVYIFGLFIEGARWNREQKILEDSLPLEMCCDFPDIYFLPTKISTKTPNASNQTDSELYAFECPVYQTPERSRILATTGLPTNFLTSVYLSTKKPPSHWITMRVALLCEKNEK

SEQ ID NO: 11439 - protein, 15 aa, Artificial Sequence
  Synthetic polypeptide
SQHFGRPSQMDHLRK

SEQ ID NO: 11440 - protein, 2745 aa, Artificial Sequence
  Synthetic polypeptide
GQAWWLTPVIPALWEAKPNGSLEKVIYTATQQLGLQNWSSQKEKIIQFYNQLQVCVGVMLVGPTGGGKTTVRRILEKALTLLPIADFLSVAERKSASKISERKGKVDICVLNPKCVTLSELYGQLDPNTMEWTDGLLSATIRSYVYFNTPKNTKKDIDLRLKSRISDLSNVFKLDSSDTTETDDNIFEEIEKVVKIPENHNFDWQWIILDGPVDTFWVENLNSVLDDTRTLCLANSERIALTNKIRVIFEVDNLSQASPATVSRCAMVYMDPVDLGWEPYVKSWLLKTSKIISQSGVDCLEFMIKNSVTDGLQFIRNRQKFQPYPMEDITVVITLCRILDAFFDFMGKNGGFEQSDDLNDTSSKEANSQRESVTFKDIEKRDENTWYPEKNPDKLTKIIQKLFVFAFTWAFGGALNREDEHRENIPFCPSLEPDSLAKVTYDFDKLVHELFGNSSQVGWKHWGQSQGRRRKGNCINLPTGECSIFGYFVDIEQCEFIPWSDLVPNDQTLIQRGTSLLTNLQRSGGNFLKITECGECINYTATRDTTCLSFLMSLLLKNSCPVLLTGESGVGKTAAINQMLEKLEGPGAFDIKHGSILGDTLLYSEIKKSSSLKQNITILIPETHKTATGSSDNPTKKPEVRTNKKLLKNNDHKGVVVSTINFSTNVTAAKTKEMILKKLIRRTKDTLGAPKNNRILIFIDDMNMPVSDMYGAQPPLELIRQLLDLGGVYDTEKNTWKNIQDLSIVAACVPVVNDISPRLLKHFSMLVLPHPSQDILCTIFQAHLGIYFSINNFTPEVQKSKDQIISCSLAIYHQVRQNMLPTPTKCHYMFNLRDMFKLLLGLLQADRTVVNSKEMAALLFVHEATRVFHDRLIDFTDKSLFYRLLSRELENCFQIGIDGCGKKTCATLACYLTDNKLYRVPISHKCAYIEFKEVFKKVFIHAGLKGKPTVLMVPNLNIEQDSFLEDLNYIISSGRIPDLFENVELDSIAMKIRYLTEQSGHMDNRQSLLSFFQKRIYKNLHIFVIMSPEGPSFRQNCRVYPSMISSCTIDWYERWPEEALLIVANSFLKEKVNFENRENLKEKLAPTCVQIHKSMKDLNRKYFEETGRFYYTTPNSYLQFMETFAHILRAREEEMQTKRDRFHMGLSTILEATTLVTEMQEELLILGPQVEQKTKETETLMEKLRKDSQVVEKVQMLVKQDEEIVAEEVRIVEDYAQKTANELKSVLPAFDKAIVALNALDKADVAELRVYTRPPFLVLTVMNAVCILLQKKPNWATAKLLLSETGFLKKLINLDKDSIPDKVFVKLKKIVTLPDFNPHKISLVSVACCSLCQWVIALNNYHEVQKVVGPKQIQVAEAQNVLKIARQRLAEKQRGLQLVEEHLLFLQAAYKDTVAEKQLLANRKTMASRRFQCASVLLTVLEDEKTRWQETINQIDNKLEGILGDILLSAACIVYSGILTPEFRQLIVNKWETFCIENGISLSSKFSLIKVMAQKYEISRWHNQGLPHGQYSVENAILIKNGQQWPLLIDPHRQAHKWIRQMEGSRLQKLSIEDSNYTKKIENAMKTGGSVLLQNLLETLAPGLKAILKKDIYQKKGHYFIRVGDAEFEYNSNFRLYLSTEIDNPHFLPSVYNFVTMINFTVTFQGLQDQLLSTVVTHEVPHLEDQRSKLLESISLDAITLEELEEKTLNLLQKALGSILDDDKIVDTLRKSKMTSNEISKRIEATKKAESEIQAIRKNYLPIATRGALLYFLVADLTQINYMYQFSLDWFHQVFVSSVVSKSKEQEHSFKREKVSPKEVHEFISISKEPNLENEKNLLDKHIKSAIDMLTKSIFKVVSSALFNEDKLCFSFRLCTVIMQNNANGNLIQDDIGFLPEEEWNIFLYSGILINIKSALSQSRLTSTFEIGESQHLQWLSDSRWRQCQYVSTHLEPFSLLCKSLLSNVSQWDTFKNSKAVYSLISTPFSSENASLEENTKPPEETELLNENKETCNPINFPWEKLTSFQRLILVKVLRPESLNNSVRKFITEKMGNKYLQRTGVNLKDAYKGSNARTPLILIQTHGIDLTNILLRFAQELKGTTHHVTIISLGRDQAAKAEDLILKALTKTQQWVFLQNCHLATSFMPRLCTIVESFNSPNVTIDPEFRLWLSSKSYSSFPIPVLKKGLKIAVESPQGLKSNLLQTFGCTGSGEVTEEIFENPDCGQWWKKLLFSLCFFNAVINERKNYGILGWNIAYKFNSSDLGVAIKVLENSLRGQPSISWQALRYLIGEVIYGGRVIDNWDKRCLKTLLYKFCNPEVLKDDFSFSRSASIKDYIHIIQSLPDDDLPEVLGIHPEAIRSCWETQGEKFIENLIAMQPKTTTANLMIRPEQSKDELVMEILSDLLKRLPLTVEKEEIAVGTPSTLKSMMSSSIWESLSKNLKDHDPLIHCVLLTFLKQEIKRFDKLLFVIHKSLKDLQLAIKGEIILTQELEEIFNSFLNMRVPTLWQKHAYRSCKPLSSWIDDLIQRLNFFNTWAKVAYTAIQRRYMRFVTVWKQSIPSTSQKCKHPEDSENNFFEGFPSRYWLPAFFFPQAFLAAVLQDYGRSRGIAVDALTFTHHVISNTTDKDEKFSVFMPKKLNIVRRAFKGSASSHTGVYIFGLFIEGARWNREQKILEDSLPLEMCCDFPDIYFLPTKISTKTPNASNQTDSELYAFECPVYQTPERSRILATTGLPTNFLTSVYLSTKKPPSHWITMRVALLCEKNEK

SEQ ID NO: 11441 - protein, 144 aa, Artificial Sequence
  Synthetic polypeptide
GQAWWLTPVIPALWEAKPNGSLEKVIYTATQQLGLQNWSSQKEKIIQFYNQLQVCVGVMLVGPTGGGKTTVRRILEKALTLLPIADFLSVAERKSASKISERKGKVDICVLNPKCVTLSELYGQLDPNTMEWTDGLLSATIRSY

SEQ ID NO: 11442 - protein, 2112 aa, Artificial Sequence
  Synthetic polypeptide
GQAWWLTPVIPALWEAKPNGSLEVCVGVMLVGPTGGGKTTVRRILEKALTLLPIADFLSVAERKSASKISERKGKVDICVLNPKCVTLSELYGQLDPNTMEWTDGLLSATIRSYVYFNTPKNTKKDIDLRLKSRISDLSNVFKLDSSDTTETDDNIFEEIEKVVKIPENHNFDWQWIILDGPVDTFWVENLNSVLDDTRTLCLANSERIALTNKIRVIFEVDNLSQASPATVSRCAMVYMDPVDLGWEPYVKSWLLKTSKIISQSGVDCLEFMIKNSVTDGLQFIRNRQKFQPYPMEDITVVITLCRILDAFFDFMGKNGGFEQSDDLNDTSSKEANSQRESVTFKDIEKRDENTWYPEKNPDKLTKIIQKLFVFAFTWAFGGALNREDEHRENIPFCPSLEPDSLAKVTYDFDKLVHELFGNSSQVGINLPTGECSIFGYFVDIEQCEFIPWSDLVPNDQTLIQRDNPTKKPEVRTNKKLLKNNDHKGVVVSTINFSTNVTAAKTKEMILKKLIRRTKDTLGAPKNNRILIFIDDMNMPVSDMYGAQPPLELIRQLLDLGGVYDTEKNTWKNIQDLSIVAACVPVVNDISPRLLKHFSMLVLPHPSQDILCTIFQIGIDGCGKKTCATLACYLTDNKLYRVPISHKCAYIEFKEVFKKVFIHAGLKGKPTVLMVPNLNIEQDSFLEDLNYIISSGRIPDLFENVELDSIAMKIRYLTEQSGHMDNRQSLLSFFQKRIYKNLHIFVIMSPEGPSFRQNCRVYPSMISSCTIDWYERWPEEALLIVANSFLKEKVNFENRENLKEKLAPTCVQIHKSMKDLNRKYFEETGRFYYTTPNSYLQFMETFAHILRAREEEMQTKRDRFHMGLSTILEATTLVTEMQEELLILGPQVEQKTKETETLMEKLRKDSQVVEKVQMLVKQDEEIVAEEVRIVEDYAQKTANELKSVLPAFDKAIVALNALDKADVAELRVYTRPPFLVLTVMNAVCILLQKKPNWATAKLLLSETGFLKKLINLDKDSIPDKVFVKLKKIVTLPDFNPHKISLVSVACCSLCQWVIALNNYHEVQKVVGPKQIQVAEAQNVLKIARQRLAEKQRGLQLISRWHNQGLPHGQYSVENAILIKNGQQWPLLIDPHRQAHKWIRQMEGSRLQKLSIEDSNYTKKIENAMKTGGSVLLQSCQASTWRKKLYLSTEIDNPHFLPSVYNFVTMINFTVTFQGLQDQLLSTVVTHEVPHLEDQRSKLLESISLDAITLEELEEKTLNLLQKALGSILDDDKIVDTLRKSKMTSNEISKRIEATKKAESEIQAIRKNYLPIATRGALLYFLVADLTQINYMYQFSLDWFHQVFVSSVVSKSKEQEHSFKREKVSPKEVHEFISISKEPNLENEKNLLDKHIKSAIDMLTKSIFKVVSSALFNEDKLCFSFRLCTVIMQNNANGNLIQDDIGFLPEEEWNIFLYSGILINIKSALSQSRLTSTFEIGESQHLQWLSDSRWRQCQYVSTHLEPFSLLCKSLLSNVSQWDTFKNSKAVYSLISTPFSSENASLEENTKPPEEKHTFCLLLRAINHTGTDLGPVGRGQWLTSTACDRHTDVCSFSFALNDGVPDVEHVQDIFYGHCVDKYHVKVLRPESLNNSVRKFITEKMGNKYLQRTGVNLKDAYKGSNARTPLILIQTHGSASIKDYIHIIQSLPDDDLPEVLGIHPEAIRSCWETQGEKFIENLIAMQPKTTTANLMIRPEQSKDELVMEILSDLLKRLPLTVEKEEIAVGTPSTLKSMMSSSIWESLSKNLKDHDPLIHCVLLTFLKQEIKRFDKLLFVIHKSLKDLQLAIKGEIILTQELEEIFNSFLNMRVPTLWQKHAYRSCKPLSSWIDDLIQRLNFFNTWAKVAYTAIQRRYMRFVTVWKQSIPSTSQKCKHPEDSENNFFEGFPSRYWLPAFFFPQAFLAAVLQDYGRSRGIAVDALTFTHHVISNTTDKDEKFSVFMPKKLNIVRRAFKGSASSHTGVYIFGLFIEGARWNREQKILEDSLPLEMCCDFPDIYFLPTKISTKTPNASNQTDSELYAFECPVYQTPERSRILATTGLPTNFLTSVYLSTKKPPSHWITMRVALLCEKNEK

SEQ ID NO: 11443 - protein, 18 aa, Artificial Sequence
  Synthetic polypeptide
SQHFGRPSQMDHLRFVLV

SEQ ID NO: 11444 - protein, 2715 aa, Artificial Sequence
  Synthetic polypeptide
GQAWWLTPVIPALWEAKPNGSLEVCVGVMLVGPTGGGKTTVRRILEKALTLLPIADFLSVAERKSASKISERKGKVDICVLNPKCVTLSELYGQLDPNTMEWTDGLLSATIRSYVYFNTPKNTKKDIDLRLKSRISDLSNVFKLDSSDTTETDDNIFEEIEKVVKIPENHNFDWQWIILDGPVDTFWVENLNSVLDDTRTLCLANSERIALTNKIRVIFEVDNLSQASPATVSRCAMVYMDPVDLGWEPYVKSWLLKTSKIISQSGVDCLEFMIKNSVTDGLQFIRNRQKFQPYPMEDITVVITLCRILDAFFDFMGKNGGFEQSDDLNDTSSKEANSQRESVTFKDIEKRDENTWYPEKNPDKLTKIIQKLFVFAFTWAFGGALNREDEHRENIPFCPSLEPDSLAKVTYDFDKLVHELFGNSSQVGWKHWGQSQGRRRKGNCINLPTGECSIFGYFVDIEQCEFIPWSDLVPNDQTLIQRGTSLLTNLQRSGGNFLKITECGECINYTATRDTTCLSFLMSLLLKNSCPVLLTGESGVGKTAAINQMLEKLEGPGAFDIKHGSILGDTLLYSEIKKSSSLKQNITILIPETHKTATGSSDNPTKKPEVRTNKKLLKNNDHKGVVVSTINFSTNVTAAKTKEMILKKLIRRTKDTLGAPKNNRILIFIDDMNMPVSDMYGAQPPLELIRQLLDLGGVYDTEKNTWKNIQDLSIVAACVPVVNDISPRLLKHFSMLVLPHPSQDILCTIFQAHLGIYFSINNFTPEVQKSKDQIISCSLAIYHQVRQNMLPTPTKCHYMFNLRDMFKLLLGLLQADRTVVNSKEMAALLFVHEATRVFHDRLIDFTDKSLFYRLLSRELENCFQIGIDGCGKKTCATLACYLTDNKLYRVPISHKCAYIEFKEVFKKVFIHAGLKGKPTVLMVPNLNIEQDSFLEDLNYIISSGRIPDLFENVELDSIAMKIRYLTEQSGHMDNRQSLLSFFQKRIYKNLHIFVIMSPEGPSFRQNCRVYPSMISSCTIDWYERWPEEALLIVANSFLKEKVNFENRENLKEKLAPTCVQIHKSMKDLNRKYFEETGRFYYTTPNSYLQFMETFAHILRAREEEMQTKRDRFHMGLSTILEATTLVTEMQEELLILGPQVEQKTKETETLMEKLRKDSQVVEKVQMLVKQDEEIVAEEVRIVEDYAQKTANELKSVLPAFDKAIVALNALDKADVAELRVYTRPPFLVLTVMNAVCILLQKKPNWATAKLLLSETGFLKKLINLDKDSIPDKVFVKLKKIVTLPDFNPHKISLVSVACCSLCQWVIALNNYHEVQKVVGPKQIQVAEAQNVLKIARQRLAEKQRGLQLVEEHLLFLQAAYKDTVAEKQLLANRKTMASRRFQCASVLLTVLEDEKTRWQETINQIDNKLEGILGDILLSAACIVYSGILTPEFRQLIVNKWETFCIENGISLSSKFSLIKVMAQKYEISRWHNQGLPHGQYSVENAILIKNGQQWPLLIDPHRQAHKWIRQMEGSRLQKLSIEDSNYTKKIENAMKTGGSVLLQNLLETLAPGLKAILKKDIYQKKGHYFIRVGDAEFEYNSNFRLYLSTEIDNPHFLPSVYNFVTMINFTVTFQGLQDQLLSTVVTHEVPHLEDQRSKLLESISLDAITLEELEEKTLNLLQKALGSILDDDKIVDTLRKSKMTSNEISKRIEATKKAESEIQAIRKNYLPIATRGALLYFLVADLTQINYMYQFSLDWFHQVFVSSVVSKSKEQEHSFKREKVSPKEVHEFISISKEPNLENEKNLLDKHIKSAIDMLTKSIFKVVSSALFNEDKLCFSFRLCTVIMQNNANGNLIQDDIGFLPEEEWNIFLYSGILINIKSALSQSRLTSTFEIGESQHLQWLSDSRWRQCQYVSTHLEPFSLLCKSLLSNVSQWDTFKNSKAVYSLISTPFSSENASLEENTKPPEETELLNENKETCNPINFPWEKLTSFQRLILVKVLRPESLNNSVRKFITEKMGNKYLQRTGVNLKDAYKGSNARTPLILIQTHGIDLTNILLRFAQELKGTTHHVTIISLGRDQAAKAEDLILKALTKTQQWVFLQNCHLATSFMPRLCTIVESFNSPNVTIDPEFRLWLSSKSYSSFPIPVLKKGLKIAVESPQGLKSNLLQTFGCTGSGEVTEEIFENPDCGQWWKKLLFSLCFFNAVINERKNYGILGWNIAYKFNSSDLGVAIKVLENSLRGQPSISWQALRYLIGEVIYGGRVIDNWDKRCLKTLLYKFCNPEVLKDDFSFSRSASIKDYIHIIQSLPDDDLPEVLGIHPEAIRSCWETQGEKFIENLIAMQPKTTTANLMIRPEQSKDELVMEILSDLLKRLPLTVEKEEIAVGTPSTLKSMMSSSIWESLSKNLKDHDPLIHCVLLTFLKQEIKRFDKLLFVIHKSLKDLQLAIKGEIILTQELEEIFNSFLNMRVPTLWQKHAYRSCKPLSSWIDDLIQRLNFFNTWAKVAYTAIQRRYMRFVTVWKQSIPSTSQKCKHPEDSENNFFEGFPSRYWLPAFFFPQAFLAAVLQDYGRSRGIAVDALTFTHHVISNTTDKDEKFSVFMPKKLNIVRRAFKGSASSHTGVYIFGLFIEGARWNREQKILEDSLPLEMCCDFPDIYFLPTKISTKTPNASNQTDSELYAFECPVYQTPERSRILATTGLPTNFLTSVYLSTKKPPSHWITMRVALLCEKNEK

SEQ ID NO: 11445 - protein, 114 aa, Artificial Sequence
  Synthetic polypeptide
GQAWWLTPVIPALWEAKPNGSLEVCVGVMLVGPTGGGKTTVRRILEKALTLLPIADFLSVAERKSASKISERKGKVDICVLNPKCVTLSELYGQLDPNTMEWTDGLLSATIRSY

SEQ ID NO: 11446 - protein, 50 aa, Artificial Sequence
  Synthetic polypeptide
SQHFGRPSQMDHLRSGVRDKPGQHESNIYCNSAIGFTKLVISEREDYTVL

SEQ ID NO: 11447 - protein, 2130 aa, Artificial Sequence
  Synthetic polypeptide
GQEFETSLVNMKVIYTATQQLGLQNWSSQKEKIIQFYNQLQVCVGVMLVGPTGGGKTTVRRILEKALTLLPIADFLSVAERKSASKISERKGKVDICVLNPKCVTLSELYGQLDPNTMEWTDGLLSATIRSYVYFNTPKNTKKDIDLRLKSRISDLSNVFKLDSSDTTETDDNIFEEIEKVVKIPENHNFDWQWIILDGPVDTFWVENLNSVLDDTRTLCLANSERIALTNKIRVIFEVDNLSQASPATVSRCAMVYMDPVDLGWEPYVKSWLLKTSKIISQSGVDCLEFMIKNSVTDGLQFIRNRQKFQPYPMEDITVVITLCRILDAFFDFMGKNGGFEQSDDLNDTSSKEANSQRESVTFKDIEKRDENTWYPEKNPDKLTKIIQKLFVFAFTWAFGGALNREDEHRENIPFCPSLEPDSLAKVTYDFDKLVHELFGNSSQVGINLPTGECSIFGYFVDIEQCEFIPWSDLVPNDQTLIQRDNPTKKPEVRTNKKLLKNNDHKGVVVSTINFSTNVTAAKTKEMILKKLIRRTKDTLGAPKNNRILIFIDDMNMPVSDMYGAQPPLELIRQLLDLGGVYDTEKNTWKNIQDLSIVAACVPVVNDISPRLLKHFSMLVLPHPSQDILCTIFQIGIDGCGKKTCATLACYLTDNKLYRVPISHKCAYIEFKEVFKKVFIHAGLKGKPTVLMVPNLNIEQDSFLEDLNYIISSGRIPDLFENVELDSIAMKIRYLTEQSGHMDNRQSLLSFFQKRIYKNLHIFVIMSPEGPSFRQNCRVYPSMISSCTIDWYERWPEEALLIVANSFLKEKVNFENRENLKEKLAPTCVQIHKSMKDLNRKYFEETGRFYYTTPNSYLQFMETFAHILRAREEEMQTKRDRFHMGLSTILEATTLVTEMQEELLILGPQVEQKTKETETLMEKLRKDSQVVEKVQMLVKQDEEIVAEEVRIVEDYAQKTANELKSVLPAFDKAIVALNALDKADVAELRVYTRPPFLVLTVMNAVCILLQKKPNWATAKLLLSETGFLKKLINLDKDSIPDKVFVKLKKIVTLPDFNPHKISLVSVACCSLCQWVIALNNYHEVQKVVGPKQIQVAEAQNVLKIARQRLAEKQRGLQLISRWHNQGLPHGQYSVENAILIKNGQQWPLLIDPHRQAHKWIRQMEGSRLQKLSIEDSNYTKKIENAMKTGGSVLLQSCQASTWRKKLYLSTEIDNPHFLPSVYNFVTMINFTVTFQGLQDQLLSTVVTHEVPHLEDQRSKLLESISLDAITLEELEEKTLNLLQKALGSILDDDKIVDTLRKSKMTSNEISKRIEATKKAESEIQAIRKNYLPIATRGALLYFLVADLTQINYMYQFSLDWFHQVFVSSVVSKSKEQEHSFKREKVSPKEVHEFISISKEPNLENEKNLLDKHIKSAIDMLTKSIFKVVSSALFNEDKLCFSFRLCTVIMQNNANGNLIQDDIGFLPEEEWNIFLYSGILINIKSALSQSRLTSTFEIGESQHLQWLSDSRWRQCQYVSTHLEPFSLLCKSLLSNVSQWDTFKNSKAVYSLISTPFSSENASLEENTKPPEEKHTFCLLLRAINHTGTDLGPVGRGQWLTSTACDRHTDVCSFSFALNDGVPDVEHVQDIFYGHCVDKYHVKVLRPESLNNSVRKFITEKMGNKYLQRTGVNLKDAYKGSNARTPLILIQTHGSASIKDYIHIIQSLPDDDLPEVLGIHPEAIRSCWETQGEKFIENLIAMQPKTTTANLMIRPEQSKDELVMEILSDLLKRLPLTVEKEEIAVGTPSTLKSMMSSSIWESLSKNLKDHDPLIHCVLLTFLKQEIKRFDKLLFVIHKSLKDLQLAIKGEIILTQELEEIFNSFLNMRVPTLWQKHAYRSCKPLSSWIDDLIQRLNFFNTWAKVAYTAIQRRYMRFVTVWKQSIPSTSQKCKHPEDSENNFFEGFPSRYWLPAFFFPQAFLAAVLQDYGRSRGIAVDALTFTHHVISNTTDKDEKFSVFMPKKLNIVRRAFKGSASSHTGVYIFGLFIEGARWNREQKILEDSLPLEMCCDFPDIYFLPTKISTKTPNASNQTDSELYAFECPVYQTPERSRILATTGLPTNFLTSVYLSTKKPPSHWITMRVALLCEKNEK

SEQ ID NO: 11448 - protein, 2733 aa, Artificial Sequence
  Synthetic polypeptide
GQEFETSLVNMKVIYTATQQLGLQNWSSQKEKIIQFYNQLQVCVGVMLVGPTGGGKTTVRRILEKALTLLPIADFLSVAERKSASKISERKGKVDICVLNPKCVTLSELYGQLDPNTMEWTDGLLSATIRSYVYFNTPKNTKKDIDLRLKSRISDLSNVFKLDSSDTTETDDNIFEEIEKVVKIPENHNFDWQWIILDGPVDTFWVENLNSVLDDTRTLCLANSERIALTNKIRVIFEVDNLSQASPATVSRCAMVYMDPVDLGWEPYVKSWLLKTSKIISQSGVDCLEFMIKNSVTDGLQFIRNRQKFQPYPMEDITVVITLCRILDAFFDFMGKNGGFEQSDDLNDTSSKEANSQRESVTFKDIEKRDENTWYPEKNPDKLTKIIQKLFVFAFTWAFGGALNREDEHRENIPFCPSLEPDSLAKVTYDFDKLVHELFGNSSQVGWKHWGQSQGRRRKGNCINLPTGECSIFGYFVDIEQCEFIPWSDLVPNDQTLIQRGTSLLTNLQRSGGNFLKITECGECINYTATRDTTCLSFLMSLLLKNSCPVLLTGESGVGKTAAINQMLEKLEGPGAFDIKHGSILGDTLLYSEIKKSSSLKQNITILIPETHKTATGSSDNPTKKPEVRTNKKLLKNNDHKGVVVSTINFSTNVTAAKTKEMILKKLIRRTKDTLGAPKNNRILIFIDDMNMPVSDMYGAQPPLELIRQLLDLGGVYDTEKNTWKNIQDLSIVAACVPVVNDISPRLLKHFSMLVLPHPSQDILCTIFQAHLGIYFSINNFTPEVQKSKDQIISCSLAIYHQVRQNMLPTPTKCHYMFNLRDMFKLLLGLLQADRTVVNSKEMAALLFVHEATRVFHDRLIDFTDKSLFYRLLSRELENCFQIGIDGCGKKTCATLACYLTDNKLYRVPISHKCAYIEFKEVFKKVFIHAGLKGKPTVLMVPNLNIEQDSFLEDLNYIISSGRIPDLFENVELDSIAMKIRYLTEQSGHMDNRQSLLSFFQKRIYKNLHIFVIMSPEGPSFRQNCRVYPSMISSCTIDWYERWPEEALLIVANSFLKEKVNFENRENLKEKLAPTCVQIHKSMKDLNRKYFEETGRFYYTTPNSYLQFMETFAHILRAREEEMQTKRDRFHMGLSTILEATTLVTEMQEELLILGPQVEQKTKETETLMEKLRKDSQVVEKVQMLVKQDEEIVAEEVRIVEDYAQKTANELKSVLPAFDKAIVALNALDKADVAELRVYTRPPFLVLTVMNAVCILLQKKPNWATAKLLLSETGFLKKLINLDKDSIPDKVFVKLKKIVTLPDFNPHKISLVSVACCSLCQWVIALNNYHEVQKVVGPKQIQVAEAQNVLKIARQRLAEKQRGLQLVEEHLLFLQAAYKDTVAEKQLLANRKTMASRRFQCASVLLTVLEDEKTRWQETINQIDNKLEGILGDILLSAACIVYSGILTPEFRQLIVNKWETFCIENGISLSSKFSLIKVMAQKYEISRWHNQGLPHGQYSVENAILIKNGQQWPLLIDPHRQAHKWIRQMEGSRLQKLSIEDSNYTKKIENAMKTGGSVLLQNLLETLAPGLKAILKKDIYQKKGHYFIRVGDAEFEYNSNFRLYLSTEIDNPHFLPSVYNFVTMINFTVTFQGLQDQLLSTVVTHEVPHLEDQRSKLLESISLDAITLEELEEKTLNLLQKALGSILDDDKIVDTLRKSKMTSNEISKRIEATKKAESEIQAIRKNYLPIATRGALLYFLVADLTQINYMYQFSLDWFHQVFVSSVVSKSKEQEHSFKREKVSPKEVHEFISISKEPNLENEKNLLDKHIKSAIDMLTKSIFKVVSSALFNEDKLCFSFRLCTVIMQNNANGNLIQDDIGFLPEEEWNIFLYSGILINIKSALSQSRLTSTFEIGESQHLQWLSDSRWRQCQYVSTHLEPFSLLCKSLLSNVSQWDTFKNSKAVYSLISTPFSSENASLEENTKPPEETELLNENKETCNPINFPWEKLTSFQRLILVKVLRPESLNNSVRKFITEKMGNKYLQRTGVNLKDAYKGSNARTPLILIQTHGIDLTNILLRFAQELKGTTHHVTIISLGRDQAAKAEDLILKALTKTQQWVFLQNCHLATSFMPRLCTIVESFNSPNVTIDPEFRLWLSSKSYSSFPIPVLKKGLKIAVESPQGLKSNLLQTFGCTGSGEVTEEIFENPDCGQWWKKLLFSLCFFNAVINERKNYGILGWNIAYKFNSSDLGVAIKVLENSLRGQPSISWQALRYLIGEVIYGGRVIDNWDKRCLKTLLYKFCNPEVLKDDFSFSRSASIKDYIHIIQSLPDDDLPEVLGIHPEAIRSCWETQGEKFIENLIAMQPKTTTANLMIRPEQSKDELVMEILSDLLKRLPLTVEKEEIAVGTPSTLKSMMSSSIWESLSKNLKDHDPLIHCVLLTFLKQEIKRFDKLLFVIHKSLKDLQLAIKGEIILTQELEEIFNSFLNMRVPTLWQKHAYRSCKPLSSWIDDLIQRLNFFNTWAKVAYTAIQRRYMRFVTVWKQSIPSTSQKCKHPEDSENNFFEGFPSRYWLPAFFFPQAFLAAVLQDYGRSRGIAVDALTFTHHVISNTTDKDEKFSVFMPKKLNIVRRAFKGSASSHTGVYIFGLFIEGARWNREQKILEDSLPLEMCCDFPDIYFLPTKISTKTPNASNQTDSELYAFECPVYQTPERSRILATTGLPTNFLTSVYLSTKKPPSHWITMRVALLCEKNEK

SEQ ID NO: 11449 - protein, 132 aa, Artificial Sequence
  Synthetic polypeptide
GQEFETSLVNMKVIYTATQQLGLQNWSSQKEKIIQFYNQLQVCVGVMLVGPTGGGKTTVRRILEKALTLLPIADFLSVAERKSASKISERKGKVDICVLNPKCVTLSELYGQLDPNTMEWTDGLLSATIRSY

SEQ ID NO: 11450 - protein, 2118 aa, Artificial Sequence
  Synthetic polypeptide
QDGQIGTAPVYSSQRERRRRRMISAFPTEVCVGVMLVGPTGGGKTTVRRILEKALTLLPIADFLSVAERKSASKISERKGKVDICVLNPKCVTLSELYGQLDPNTMEWTDGLLSATIRSYVYFNTPKNTKKDIDLRLKSRISDLSNVFKLDSSDTTETDDNIFEEIEKVVKIPENHNFDWQWIILDGPVDTFWVENLNSVLDDTRTLCLANSERIALTNKIRVIFEVDNLSQASPATVSRCAMVYMDPVDLGWEPYVKSWLLKTSKIISQSGVDCLEFMIKNSVTDGLQFIRNRQKFQPYPMEDITVVITLCRILDAFFDFMGKNGGFEQSDDLNDTSSKEANSQRESVTFKDIEKRDENTWYPEKNPDKLTKIIQKLFVFAFTWAFGGALNREDEHRENIPFCPSLEPDSLAKVTYDFDKLVHELFGNSSQVGINLPTGECSIFGYFVDIEQCEFIPWSDLVPNDQTLIQRDNPTKKPEVRTNKKLLKNNDHKGVVVSTINFSTNVTAAKTKEMILKKLIRRTKDTLGAPKNNRILIFIDDMNMPVSDMYGAQPPLELIRQLLDLGGVYDTEKNTWKNIQDLSIVAACVPVVNDISPRLLKHFSMLVLPHPSQDILCTIFQIGIDGCGKKTCATLACYLTDNKLYRVPISHKCAYIEFKEVFKKVFIHAGLKGKPTVLMVPNLNIEQDSFLEDLNYIISSGRIPDLFENVELDSIAMKIRYLTEQSGHMDNRQSLLSFFQKRIYKNLHIFVIMSPEGPSFRQNCRVYPSMISSCTIDWYERWPEEALLIVANSFLKEKVNFENRENLKEKLAPTCVQIHKSMKDLNRKYFEETGRFYYTTPNSYLQFMETFAHILRAREEEMQTKRDRFHMGLSTILEATTLVTEMQEELLILGPQVEQKTKETETLMEKLRKDSQVVEKVQMLVKQDEEIVAEEVRIVEDYAQKTANELKSVLPAFDKAIVALNALDKADVAELRVYTRPPFLVLTVMNAVCILLQKKPNWATAKLLLSETGFLKKLINLDKDSIPDKVFVKLKKIVTLPDFNPHKISLVSVACCSLCQWVIALNNYHEVQKVVGPKQIQVAEAQNVLKIARQRLAEKQRGLQLISRWHNQGLPHGQYSVENAILIKNGQQWPLLIDPHRQAHKWIRQMEGSRLQKLSIEDSNYTKKIENAMKTGGSVLLQSCQASTWRKKLYLSTEIDNPHFLPSVYNFVTMINFTVTFQGLQDQLLSTVVTHEVPHLEDQRSKLLESISLDAITLEELEEKTLNLLQKALGSILDDDKIVDTLRKSKMTSNEISKRIEATKKAESEIQAIRKNYLPIATRGALLYFLVADLTQINYMYQFSLDWFHQVFVSSVVSKSKEQEHSFKREKVSPKEVHEFISISKEPNLENEKNLLDKHIKSAIDMLTKSIFKVVSSALFNEDKLCFSFRLCTVIMQNNANGNLIQDDIGFLPEEEWNIFLYSGILINIKSALSQSRLTSTFEIGESQHLQWLSDSRWRQCQYVSTHLEPFSLLCKSLLSNVSQWDTFKNSKAVYSLISTPFSSENASLEENTKPPEEKHTFCLLLRAINHTGTDLGPVGRGQWLTSTACDRHTDVCSFSFALNDGVPDVEHVQDIFYGHCVDKYHVKVLRPESLNNSVRKFITEKMGNKYLQRTGVNLKDAYKGSNARTPLILIQTHGSASIKDYIHIIQSLPDDDLPEVLGIHPEAIRSCWETQGEKFIENLIAMQPKTTTANLMIRPEQSKDELVMEILSDLLKRLPLTVEKEEIAVGTPSTLKSMMSSSIWESLSKNLKDHDPLIHCVLLTFLKQEIKRFDKLLFVIHKSLKDLQLAIKGEIILTQELEEIFNSFLNMRVPTLWQKHAYRSCKPLSSWIDDLIQRLNFFNTWAKVAYTAIQRRYMRFVTVWKQSIPSTSQKCKHPEDSENNFFEGFPSRYWLPAFFFPQAFLAAVLQDYGRSRGIAVDALTFTHHVISNTTDKDEKFSVFMPKKLNIVRRAFKGSASSHTGVYIFGLFIEGARWNREQKILEDSLPLEMCCDFPDIYFLPTKISTKTPNASNQTDSELYAFECPVYQTPERSRILATTGLPTNFLTSVYLSTKKPPSHWITMRVALLCEKNEK

SEQ ID NO: 11451 - protein, 11 aa, Artificial Sequence
  Synthetic polypeptide
FLHFQLRFVLV

SEQ ID NO: 11452 - protein, 2721 aa, Artificial Sequence
  Synthetic polypeptide
QDGQIGTAPVYSSQRERRRRRMISAFPTEVCVGVMLVGPTGGGKTTVRRILEKALTLLPIADFLSVAERKSASKISERKGKVDICVLNPKCVTLSELYGQLDPNTMEWTDGLLSATIRSYVYFNTPKNTKKDIDLRLKSRISDLSNVFKLDSSDTTETDDNIFEEIEKVVKIPENHNFDWQWIILDGPVDTFWVENLNSVLDDTRTLCLANSERIALTNKIRVIFEVDNLSQASPATVSRCAMVYMDPVDLGWEPYVKSWLLKTSKIISQSGVDCLEFMIKNSVTDGLQFIRNRQKFQPYPMEDITVVITLCRILDAFFDFMGKNGGFEQSDDLNDTSSKEANSQRESVTFKDIEKRDENTWYPEKNPDKLTKIIQKLFVFAFTWAFGGALNREDEHRENIPFCPSLEPDSLAKVTYDFDKLVHELFGNSSQVGWKHWGQSQGRRRKGNCINLPTGECSIFGYFVDIEQCEFIPWSDLVPNDQTLIQRGTSLLTNLQRSGGNFLKITECGECINYTATRDTTCLSFLMSLLLKNSCPVLLTGESGVGKTAAINQMLEKLEGPGAFDIKHGSILGDTLLYSEIKKSSSLKQNITILIPETHKTATGSSDNPTKKPEVRTNKKLLKNNDHKGVVVSTINFSTNVTAAKTKEMILKKLIRRTKDTLGAPKNNRILIFIDDMNMPVSDMYGAQPPLELIRQLLDLGGVYDTEKNTWKNIQDLSIVAACVPVVNDISPRLLKHFSMLVLPHPSQDILCTIFQAHLGIYFSINNFTPEVQKSKDQIISCSLAIYHQVRQNMLPTPTKCHYMFNLRDMFKLLLGLLQADRTVVNSKEMAALLFVHEATRVFHDRLIDFTDKSLFYRLLSRELENCFQIGIDGCGKKTCATLACYLTDNKLYRVPISHKCAYIEFKEVFKKVFIHAGLKGKPTVLMVPNLNIEQDSFLEDLNYIISSGRIPDLFENVELDSIAMKIRYLTEQSGHMDNRQSLLSFFQKRIYKNLHIFVIMSPEGPSFRQNCRVYPSMISSCTIDWYERWPEEALLIVANSFLKEKVNFENRENLKEKLAPTCVQIHKSMKDLNRKYFEETGRFYYTTPNSYLQFMETFAHILRAREEEMQTKRDRFHMGLSTILEATTLVTEMQEELLILGPQVEQKTKETETLMEKLRKDSQVVEKVQMLVKQDEEIVAEEVRIVEDYAQKTANELKSVLPAFDKAIVALNALDKADVAELRVYTRPPFLVLTVMNAVCILLQKKPNWATAKLLLSETGFLKKLINLDKDSIPDKVFVKLKKIVTLPDFNPHKISLVSVACCSLCQWVIALNNYHEVQKVVGPKQIQVAEAQNVLKIARQRLAEKQRGLQLVEEHLLFLQAAYKDTVAEKQLLANRKTMASRRFQCASVLLTVLEDEKTRWQETINQIDNKLEGILGDILLSAACIVYSGILTPEFRQLIVNKWETFCIENGISLSSKFSLIKVMAQKYEISRWHNQGLPHGQYSVENAILIKNGQQWPLLIDPHRQAHKWIRQMEGSRLQKLSIEDSNYTKKIENAMKTGGSVLLQNLLETLAPGLKAILKKDIYQKKGHYFIRVGDAEFEYNSNFRLYLSTEIDNPHFLPSVYNFVTMINFTVTFQGLQDQLLSTVVTHEVPHLEDQRSKLLESISLDAITLEELEEKTLNLLQKALGSILDDDKIVDTLRKSKMTSNEISKRIEATKKAESEIQAIRKNYLPIATRGALLYFLVADLTQINYMYQFSLDWFHQVFVSSVVSKSKEQEHSFKREKVSPKEVHEFISISKEPNLENEKNLLDKHIKSAIDMLTKSIFKVVSSALFNEDKLCFSFRLCTVIMQNNANGNLIQDDIGFLPEEEWNIFLYSGILINIKSALSQSRLTSTFEIGESQHLQWLSDSRWRQCQYVSTHLEPFSLLCKSLLSNVSQWDTFKNSKAVYSLISTPFSSENASLEENTKPPEETELLNENKETCNPINFPWEKLTSFQRLILVKVLRPESLNNSVRKFITEKMGNKYLQRTGVNLKDAYKGSNARTPLILIQTHGIDLTNILLRFAQELKGTTHHVTIISLGRDQAAKAEDLILKALTKTQQWVFLQNCHLATSFMPRLCTIVESFNSPNVTIDPEFRLWLSSKSYSSFPIPVLKKGLKIAVESPQGLKSNLLQTFGCTGSGEVTEEIFENPDCGQWWKKLLFSLCFFNAVINERKNYGILGWNIAYKFNSSDLGVAIKVLENSLRGQPSISWQALRYLIGEVIYGGRVIDNWDKRCLKTLLYKFCNPEVLKDDFSFSRSASIKDYIHIIQSLPDDDLPEVLGIHPEAIRSCWETQGEKFIENLIAMQPKTTTANLMIRPEQSKDELVMEILSDLLKRLPLTVEKEEIAVGTPSTLKSMMSSSIWESLSKNLKDHDPLIHCVLLTFLKQEIKRFDKLLFVIHKSLKDLQLAIKGEIILTQELEEIFNSFLNMRVPTLWQKHAYRSCKPLSSWIDDLIQRLNFFNTWAKVAYTAIQRRYMRFVTVWKQSIPSTSQKCKHPEDSENNFFEGFPSRYWLPAFFFPQAFLAAVLQDYGRSRGIAVDALTFTHHVISNTTDKDEKFSVFMPKKLNIVRRAFKGSASSHTGVYIFGLFIEGARWNREQKILEDSLPLEMCCDFPDIYFLPTKISTKTPNASNQTDSELYAFECPVYQTPERSRILATTGLPTNFLTSVYLSTKKPPSHWITMRVALLCEKNEK

SEQ ID NO: 11453 - protein, 120 aa, Artificial Sequence
  Synthetic polypeptide
QDGQIGTAPVYSSQRERRRRRMISAFPTEVCVGVMLVGPTGGGKTTVRRILEKALTLLPIADFLSVAERKSASKISERKGKVDICVLNPKCVTLSELYGQLDPNTMEWTDGLLSATIRSY

SEQ ID NO: 11454 - protein, 4 aa, Artificial Sequence
  Synthetic polypeptide
PICS

SEQ ID NO: 11455 - protein, 69 aa, Artificial Sequence
  Synthetic polypeptide
SQHFGRLRQVDHLRSGVRDQPDQYVLNLGVFYYKKKILGLWPHCPGVRSRQRVQISEIVIDFLLRSTRL

SEQ ID NO: 11456 - protein, 756 aa, Artificial Sequence
  Synthetic polypeptide
GQEFETSLTNMFLILVFSIIRRRFWDYGRIALVSEADSESRFQRLSSTSSSGQQDFENELGCCPWLTAIFRLHDDQILEWCGEDAIHYLSFQRHIIFLLVVVSFLSLCVILPVNLSGDLLDKDPYSFGRTTIANLQTDNDLLWLHTIFAVIYLFLTVGFMRHHTQSIKYKEENLVRRTLFITGLPRDARKETVESHFRDAYPTCEVVDVQLCYNVAKLIYLCKEKKKTEKSLTYYTNLQVKTGQRTLINPKPCGQFCCCEVLGCEWEDAISYYTRMKDRLLERITEEERHVQDQPLGMAFVTFQEKSMATYILKDFNACKCQSLQCKGEPQPSSHSRELYTSKWTVTFAADPEDICWKNLSIQGLRWWLQWLGINFTLFLGLFFLTTPSIILSTMDKFNVTKPIHALNNPIISQFFPTLLLWSFSALLPSIVYYSTLLESHWTKSGENQIMMTKVYIFLIFMVLILPSLGLTSLDFFFRWLFDKTSSEASIRLECVFLPDQGAFFVNYVIASAFIGNGMELLRLPGLILYTFRMIMAKTAADRRNVKQNQAFQYEFGAMYAWMLCVFTVIVAYSITCPIIAPFGLIYILLKHMVDRHNLYFVYLPAKLEKGIHFAAVNQALAAPILCLFWLYFFSFLRLGMKAPATLFTFLVLLLTILVCLAHTCFGCFKHLSPLNYKTEEPASDKGSEAEAHMPPPFTPYVPRILNGLASERTALSPQQQQQQTYGAIHNISGTIPGQCLAQSATGSVAAAPQEA

SEQ ID NO: 11457 - protein, 67 aa, Artificial Sequence
  Synthetic polypeptide
GQEFETSLTNMFLILVFSIIRRRFWDYGRIALVSEADSESRFQRLSSTSSSGQQDFENELGCCPWLT

SEQ ID NO: 11458 - protein, 322 aa, Artificial Sequence
  Synthetic polypeptide
LCDESTWHIKMGVNLTRSNKETVKHSDVLFLAVKPHIIPFILDEIGADVQARHIVVSCAAGVTISSVEKAFMALDALADGGVKMGLPRRLAIQLGAQALLGAAKMLLDSEQHPCQLKDNVCSPGGATIHALHFLESGGFRSLLINAVEASCIRTRGGRQVPGVGGQHTPAGVRHGAAAAAQQRAGAGRAAALPGAGPQGRAAQARAAVPAQRPGPGDRRVAARPRRRLQPHLPHRLQAGVRPRERLEGLRRDRGRELLAAAEPAPAAAAATGVGAEGASGPAGVRRPQAGPLCLAGGASRAWGAPAGAAHPGPWGLWSSGRL

SEQ ID NO: 11459 - protein, 39 aa, Artificial Sequence
  Synthetic polypeptide
KHLAHKDGCEPDTQQQGDGEAQRRPVSGCEATYHPLHPG

SEQ ID NO: 11460 - protein, 283 aa, Artificial Sequence
  Synthetic polypeptide
LCDESTWHIKMGVNLTRSNKETVKHSDVLFLAVKPHIIPFILDEIGADVQARHIVVSCAAGVTISSVEKKLMAFQPAPKVIRCMTNTPVVVQEGATVYATGTHALVEDGQLLEQLMSSVGFCTEVEEDLIDAVTGLSGSGPAYAFMALDALADGGVKMGLPRRLAIQLGAQALLGAAKMLLDSEQHPCQLKDNVCSPGGATIHALHFLESGGFRSLLINAVEASCIRTRELQSMADQEKISPAALKKTLLDRVKLESPTVSTLTPSSPGKLLTRSLALGGKKD

SEQ ID NO: 11461 - protein, 31 aa, Artificial Sequence
  Synthetic polypeptide
AQKFETSLGSPVSAKRQKKMAKHFIQLMKKN

SEQ ID NO: 11462 - protein, 49 aa, Artificial Sequence
  Synthetic polypeptide
AGHAGSNPSSFEKEAKTRGLLEPKSSRPAWAALSLPKDRKRWQSISSNL

SEQ ID NO: 11463 - protein, 471 aa, Artificial Sequence
  Synthetic polypeptide
MGMLAQIPAVLKRRPRREACLSPKVRDQPGQPCLCQKTEKDGKAFHPTYEEKLKLVALHKQVLMGPYNPDTCPEVGFFDVLGNDRRREWAALGNMSKEDAMVEFVKLLNRCCHLFSTYVASHKIEKEEQEKKRKEEEERRRREEEERERLQKEEEKRRREEEERLRREEEERRRIEEERLRLEQQKQQIMAALNSQTAVQFQQYAAQQYPGNYEQQQILIRQLQEQHYQQYMQQLYQVQLAQQQAALQKQQEVVVAGSSLPTSSKVNATVPSNMMSVNGQAKTHTDSSEKELEPEAAEEALENGPKESLPVIAAPSMWTRPQIKDFKEKIQQDADSVITVGRGEVVTVRVPTHEEGSYLFWEFATDNYDIGFGVYFEWTDSPNTAVSVHVSESSDDDEEEEENIGCEEKAKKNANKPLLDEIVPVYRRDCHEEVYAGSHQYPGRGVYLLKFDNSYSLWRSKSVYYRVYYTR

SEQ ID NO: 11464 - protein, 87 aa, Artificial Sequence
  Synthetic polypeptide
ISITSENAFKDKVTRTVVDKFMDFLTRIPTLKEILKFLFKQKKKLEVCKRNMKIQGMKKQQKGNHIPCPSALNFSGDMQQLFWSLNS

SEQ ID NO: 11465 - protein, 14 aa, Artificial Sequence
  Synthetic polypeptide
RNNKKEIIFHAHQH

SEQ ID NO: 11466 - protein, 183 aa, Artificial Sequence
  Synthetic polypeptide
KKHEDSGNEETTKRKSYSMPISIEFQRRYATIVLELEQLNKDLNKVLHKVQQYCYELAPDQGLQPADQPTDMRRRCEEEAQEIVRHANSSTGQPCVENENLTDLISRLTAILLQIKCLAEGGDLNSFEFKSLTDSLNDIKSTIDASNISCFQNNVEIHVAHIQSGLSQMGNLHAFAANNTNRD

SEQ ID NO: 11467 - protein, 149 aa, Artificial Sequence
  Synthetic polypeptide
KKHEDSGNEETTKRKSYSMPISIEFQRRYATIVLELEQLNKDLNKVLHKVQQYCYELAPDQGLQPADQPTDMRRRCEEEAQEIVRHANSSTGQPCVENENLTDLISRLTAILLQIKCLAEGGDLNSFEFKSLTDSLNDIKSTIDASNIR

SEQ ID NO: 11468 - protein, 12 aa, Artificial Sequence
  Synthetic polypeptide
SAFEIIFHAHQH

SEQ ID NO: 11469 - protein, 172 aa, Artificial Sequence
  Synthetic polypeptide
MLLKSYSMPISIEFQRRYATIVLELEQLNKDLNKVLHKVQQYCYELAPDQGLQPADQPTDMRRRCEEEAQEIVRHANSSTGQPCVENENLTDLISRLTAILLQIKCLAEGGDLNSFEFKSLTDSLNDIKSTIDASNISCFQNNVEIHVAHIQSGLSQMGNLHAFAANNTNRD

SEQ ID NO: 11470 - protein, 138 aa, Artificial Sequence
  Synthetic polypeptide
MLLKSYSMPISIEFQRRYATIVLELEQLNKDLNKVLHKVQQYCYELAPDQGLQPADQPTDMRRRCEEEAQEIVRHANSSTGQPCVENENLTDLISRLTAILLQIKCLAEGGDLNSFEFKSLTDSLNDIKSTIDASNIR

SEQ ID NO: 11471 - protein, 213 aa, Artificial Sequence
  Synthetic polypeptide
GWVPWLMPVIPALWEAKTRLSKILMIKKEHIKKLREMNTEAEKLKSYSMPISIEFQRRYATIVLELEQLNKDLNKVLHKVQQYCYELAPDQGLQPADQPTDMRRRCEEEAQEIVRHANSSTGQPCVENENLTDLISRLTAILLQIKCLAEGGDLNSFEFKSLTDSLNDIKSTIDASNISCFQNNVEIHVAHIQSGLSQMGNLHAFAANNTNRD

SEQ ID NO: 11472 - protein, 15 aa, Artificial Sequence
  Synthetic polypeptide
SQHFGRPRPDYQKFS

SEQ ID NO: 11473 - protein, 25 aa, Artificial Sequence
  Synthetic polypeptide
MGALAHACNPSTLGGQDQIIKNSHD

SEQ ID NO: 11474 - protein, 179 aa, Artificial Sequence
  Synthetic polypeptide
GWVPWLMPVIPALWEAKTRLSKILMIKKEHIKKLREMNTEAEKLKSYSMPISIEFQRRYATIVLELEQLNKDLNKVLHKVQQYCYELAPDQGLQPADQPTDMRRRCEEEAQEIVRHANSSTGQPCVENENLTDLISRLTAILLQIKCLAEGGDLNSFEFKSLTDSLNDIKSTIDASNIR

SEQ ID NO: 11475 - protein, 26 aa, Artificial Sequence
  Synthetic polypeptide
FEYRPSEDALGEAEQKADPGRILHPQ

SEQ ID NO: 11476 - protein, 333 aa, Artificial Sequence
  Synthetic polypeptide
SERDSIDLNIDLQKMPLGKLSKRQIQAAYSILSEVQQAVSQGSSDSQILDLSNRFYTLIPHDFGMKKPPLLNNADSVQAKVEMLDNLLDIEVAYSLLRGGSDDSSKDPIDVNYEKLKTDIKVVDRDSEEAEIIRKYVKNTHATTHNAYDLEVIDIFKIEREGECQRYKPFKQLHNRRLLWHGSRTTNFAGILSQGLRIAPPEAPVTGYMFGKGIYFADMVSKSANYCHTSQGDPIGLILLGEVALGNMYELKHASHISKLPKGKHSVKGLGKTTPDPSANISLDGVDVPLGTGISSGVNDTSLLYNEYIVYDIAQVNLKYLLKLKFNFKTSLW

SEQ ID NO: 11477 - protein, 66 aa, Artificial Sequence
  Synthetic polypeptide
SRQKNAKRLDWPSLPAYIFLPCWILPALEHQTLKFFSFGTWTSSPCFSACRQPIVGPVIIANHGGR

SEQ ID NO: 11478 - protein, 333 aa, Artificial Sequence
  Synthetic polypeptide
TSDSEVLQFWDLDQLSLLLSLQTAYCGTCDHSKSWRKIKNMVHWSPFVMSFKKKYPWIQLAGHAGSFKAAANGRILKKHCESEQRCLDRLMVDVLRPFVPAYHGDVVKDGERYNQMDDLLADFDSPCVMDCKMGIRTYLEEELTKARKKPSLRKDMYQKMIEVDPEAPTEEEKAQRAVTKPRYMQWRETISSTATLGFRIEGIKKEDGTVNRDFKKTKTREQVTEAFREFTKGNHNILIAYRDRLKAIRTTLEVSPFFKCHEVIGSSLLFIHDKKEQAKVWMIDFGKTTPLPEGQTLQHDVPWQEGNREDGYLSGLNNLVDILTEMSQDAPLA

SEQ ID NO: 11479 - protein, 23 aa, Artificial Sequence
  Synthetic polypeptide
GQVWCLMPVIPALWETEHLHAIH

SEQ ID NO: 11480 - protein, 337 aa, Artificial Sequence
  Synthetic polypeptide
SQHFGRLSIYTPFTEDTPSVGQRLLNSVLNTLIMISVIVVMTIFLVVLYKYRCYKFIHGWLIMSSLMLLFLFTYIYLGEVLKTYNVAMDYPTLLLTVWNFGAVGMVCIHWKGPLVLQQAYLIMISALMALVFIKYLPEWSAWVILGAISVYDLVAVLCPKGPLRMLVETAQERNEPIFPALIYSSAMVWTVGMAKLDPSSQGALQLPYDPEMEEDSYDSFGEPSYPEVFEPPLTGYPGEELEEEEERGVKLGLGDFIFYSVLVGKAAATGSGDWNTTLACFVAILIGLCLTLLLLAVFKKALPALPISITFGLIFYFSTDNLVRPFMDTLASHQLYI

SEQ ID NO: 11481 - protein, 304 aa, Artificial Sequence
  Synthetic polypeptide
SQHFGRLSIYTPFTEDTPSVGQRLLNSVLNTLIMISVIVVMTIFLVVLYKYRCYKFIHGWLIMSSLMLLFLFTYIYLGEVLKTYNVAMDYPTLLLTVWNFGAVGMVCIHWKGPLVLQQAYLIMISALMALVFIKYLPEWSAWVILGAISVYAAMVWTVGMAKLDPSSQGALQLPYDPEMEEDSYDSFGEPSYPEVFEPPLTGYPGEELEEEEERGVKLGLGDFIFYSVLVGKAAATGSGDWNTTLACFVAILIGLCLTLLLLAVFKKALPALPISITFGLIFYFSTDNLVRPFMDTLASHQLYI

SEQ ID NO: 11482 - protein, 18 aa, Artificial Sequence
  Synthetic polypeptide
SQHFGRLSIYTPFTEDTP

SEQ ID NO: 11483 - protein, 336 aa, Artificial Sequence
  Synthetic polypeptide
SQHFGRLSIYTPFTEDTPSVGQRLLNSVLNTLIMISVIVVMTIFLVVLYKYRCYKFIHGWLIMSSLMLLFLFTYIYLGEVLKTYNVAMDYPTLLLTVWNFGAVGMVCIHWKGPLVLQQAYLIMISALMALVFIKYLPEWSAWVILGAISVYDLVAVLCPKGPLRMLVETAQERNEPIFPALIYSSAMVWTVGMAKLDPSSQGALQLPYDPEMEDSYDSFGEPSYPEVFEPPLTGYPGEELEEEEERGVKLGLGDFIFYSVLVGKAAATGSGDWNTTLACFVAILIGLCLTLLLLAVFKKALPALPISITFGLIFYFSTDNLVRPFMDTLASHQLYI

SEQ ID NO: 11484 - protein, 249 aa, Artificial Sequence
  Synthetic polypeptide
SQHFGRLSIYTPFTEDTPSVGQRLLNSVLNTLIMISVIVVMTIFLVVLYKYRCYKFIHGWLIMSSLMLLFLFTYIYLGEVLKTYNVAMDYPTLLLTVWNFGAVGMVCIHWKGPLVLQQAYLIMISALMALVFIKYLPEWSAWVILGAISVYDLVAVLCPKGPLRMLVETAQERNEPIFPALIYSSAMVWTVGMAKLDPSSQGALQLPYDPEMEDSYDSFGEPSYPEVFEPPLTGYPGEELEEEEESKGA

SEQ ID NO: 11485 - protein, 27 aa, Artificial Sequence
  Synthetic polypeptide
PGVVVACLLSQLPKRLRLQCTISLGVQ

SEQ ID NO: 11486 - protein, 37 aa, Artificial Sequence
  Synthetic polypeptide
LARCSGCMPVVPTTQEAEVTMHHISRCTVKMQLISLM

SEQ ID NO: 11487 - protein, 5 aa, Artificial Sequence
  Synthetic polypeptide
IQMSK

SEQ ID NO: 11488 - protein, 1002 aa, Artificial Sequence
  Synthetic polypeptide
LLNATHVSQLDPGLHKKRRHGRDNLNCVCEFRCQSEREEFESEFKQQYEREKVLLTEENKKLTSELDKLTTLYENLSIHNQQLEEEVKDLADKKESVAHWEAQITEIIQWVSDEKDARGYLQALASKMTEELEALRNSSLGTRATDMPWKMRRFAKLDMSARLELQSALDAEIRAKQAIQEELNKVKASNIITECKLKDSEKKNLELLSEIEQLIKDTEELRSEKGIEHQDSQHSFLAFLNTPTDALDQFETVDSTPLSVHTPTLRKKGCPGSTGFPPKRKTHQFFVKSFTTPTKCHQCTSLMVGLIRQGCSCEVCGFSCHITCVNKAPTTCPVPPEQTKGPLGIDPQKGIGTAYEGHVRIPKPAGVKKGWQRALAIVCDFKLFLYDIAEGKASQPSVVISQVIDMRDEEFSVSSVLASDVIHASRKDIPCIFRVTASQLSASNNKCSILMLADTENEKNKWVGVLSELHKILKKNKFRDRSVYVPKEAYDSTLPLIKTTQAAAIIDHERIALGNEEGLFVVHVTKDEIIRVGDNKKIHQIELIPNDQLVAVISGRNRHVRLFPMSALDGRETDFYKLSETKGCQTVTSGKVRHGALTCLCVAMKRQVLCYELFQSKTRHRKFKEIQVPYNVQWMAIFSEQLCVGFQSGFLRYPLNGEGNPYSMLHSNDHTLSFIAHQPMDAICAVEISSKEYLLCFNSIGIYTDCQGRRSRQQELMWPANPSSCCYNAPYLSVYSENAVDIFDVNSMEWIQTLPLKKVRPLNNEGSLNLLGLETIRLIYFKNKMAEGDELVVPETSDNSRKQMVRNINNKRRYSFRVPEEERMQQRREMLRDPEMRNKLISNPTNFNHIAHMGPGDGIQILKDLPMNPRPQESRTVFSGSVSIPSITKSRPEPGRSMSASSGLSARSSAQNGSALKREFSGGSYSAKRQPMPSPSEGSLSSGGMDQGSDAPARDFDGEDSDSPRHSTASNSSNLSSPPSPASPRKTKSLSLESTDRGSWDP

SEQ ID NO: 11489 - protein, 29 aa, Artificial Sequence
  Synthetic polypeptide
IVSVNSDVKVKGRNLKVSSNNNMNEKKCC

SEQ ID NO: 11490 - protein, 1064 aa, Artificial Sequence
  Synthetic polypeptide
LLNATHVSQLDPGLHKKRRHGRDNLNCVCEFRCQSEREEFESEFKQQYEREKVLLTEENKKLTSELDKLTTLYENLSIHNQQLEEEVKDLADKKESVAHWEAQITEIIQWVSDEKDARGYLQALASKMTEELEALRNSSLGTRATDMPWKMRRFAKLDMSARLELQSALDAEIRAKQAIQEELNKVKASNIITECKLKDSEKKNLELLSEIEQLIKDTEELRSEKGIEHQDSQHSFLAFLNTPTDALDQFETVDSTPLSVHTPTLRKKGCPGSTGFPPKRKTHQFFVKSFTTPTKCHQCTSLMVGLIRQGCSCEVCGFSCHITCVNKAPTTCPVPPEQTKGPLGIDPQKGIGTAYEGHVRIPKPAGVKKGWQRALAIVCDFKLFLYDIAEGKASQPSVVISQVIDMRDEEFSVSSVLASDVIHASRKDIPCIFRVTASQLSASNNKCSILMLADTENEKNKWVGVLSELHKILKKNKFRDRSVYVPKEAYDSTLPLIKTTQAAAIIDHERIALGNEEGLFVVHVTKDEIIRVGDNKKIHQIELIPNDQLVAVISGRNRHVRLFPMSALDGRETDFYKLSETKGCQTVTSGKVRHGALTCLCVAMKRQVLCYELFQSKTRHRKFKEIQVPYNVQWMAIFSEQLCVGFQSGFLRYPLNGEGNPYSMLHSNDHTLSFIAHQPMDAICAVEISSKEYLLCFNSIGIYTDCQGRRSRQQELMWPANPSSCCYNAPYLSVYSENAVDIFDVNSMEWIQTLPLKKVRPLNNEGSLNLLGLETIRLIYFKNKMAEGDELVVPETSDNSRKQMVRNINNKRRYSFRVPEEERMQQRREMLRDPEMRNKLISNPTNFNHIAHMGPGDGIQILKDLPMPGFPYPSPHHHSGLISSPINFEHIYHMTVNSAEKFLSPDSINPEYSPSLRSVPGTPSFMTLRNPRPQESRTVFSGSVSIPSITKSRPEPGRSMSASSGLSARSSAQNGSALKREFSGGSYSAKRQPMPSPSEGSLSSGGMDQGSDAPARDFDGEDSDSPRHSTASNSSNLSSPPSPASPRKTKSLSLESTDRGSWDP

SEQ ID NO: 11491 - protein, 974 aa, Artificial Sequence
  Synthetic polypeptide
LLNATHVSQLDPGLHKKRRHGRDNLNCVCEFRCQSEREEFESEFKQQYEREKVLLTEENKKLTSELDKLTTLYENLSIHNQQLEEEVKDLADKKESVAHWEAQITEIIQWVSDEKDARGYLQALASKMTEELEALRNSSLGTRATDMPWKMRRFAKLDMSARLELQSALDAEIRAKQAIQEELNKVKASNIITECKLKDSEKKNLELLSEIEQLIKDTEELRSEKGIEHQDSQHSFLAFLNTPTDALDQFERKTHQFFVKSFTTPTKCHQCTSLMVGLIRQGCSCEVCGFSCHITCVNKAPTTCPVPPEQTKGPLGIDPQKGIGTAYEGHVRIPKPAGVKKGWQRALAIVCDFKLFLYDIAEGKASQPSVVISQVIDMRDEEFSVSSVLASDVIHASRKDIPCIFRVTASQLSASNNKCSILMLADTENEKNKWVGVLSELHKILKKNKFRDRSVYVPKEAYDSTLPLIKTTQAAAIIDHERIALGNEEGLFVVHVTKDEIIRVGDNKKIHQIELIPNDQLVAVISGRNRHVRLFPMSALDGRETDFYKLSETKGCQTVTSGKVRHGALTCLCVAMKRQVLCYELFQSKTRHRKFKEIQVPYNVQWMAIFSEQLCVGFQSGFLRYPLNGEGNPYSMLHSNDHTLSFIAHQPMDAICAVEISSKEYLLCFNSIGIYTDCQGRRSRQQELMWPANPSSCCYNAPYLSVYSENAVDIFDVNSMEWIQTLPLKKVRPLNNEGSLNLLGLETIRLIYFKNKMAEGDELVVPETSDNSRKQMVRNINNKRRYSFRVPEEERMQQRREMLRDPEMRNKLISNPTNFNHIAHMGPGDGIQILKDLPMNPRPQESRTVFSGSVSIPSITKSRPEPGRSMSASSGLSARSSAQNGSALKREFSGGSYSAKRQPMPSPSEGSLSSGGMDQGSDAPARDFDGEDSDSPRHSTASNSSNLSSPPSPASPRKTKSLSLESTDRGSWDP

SEQ ID NO: 11492 - protein, 1037 aa, Artificial Sequence
  Synthetic polypeptide
LLNATHVSQLDPGLHKKRRHGRDNLNCVCEFRCQSEREEFESEFKQQYEREKVLLTEENKKLTSELDKLTTLYENLSIHNQQLEEEVKDLADKKESVAHWEAQITEIIQWVSDEKDARGYLQALASKMTEELEALRNSSLGTRATDMPWKMRRFAKLDMSARLELQSALDAEIRAKQAIQEELNKVKASNIITECKLKDSEKKNLELLSEIEQLIKDTEELRSEKGIEHQDSQHSFLAFLNTPTDALDQFETDPVENTYVWNPSVKFHIQSRSTSPSTSSEAEPVKTVDSTPLSVHTPTLRKKGCPGSTGFPPKRKTHQFFVKSFTTPTKCHQCTSLMVGLIRQGCSCEVCGFSCHITCVNKAPTTCPVPPEQTKGPLGIDPQKGIGTAYEGHVRIPKPAGVKKGWQRALAIVCDFKLFLYDIAEGKASQPSVVISQVIDMRDEEFSVSSVLASDVIHASRKDIPCIFRVTASQLSASNNKCSILMLADTENEKNKWVGVLSELHKILKKNKFRDRSVYVPKEAYDSTLPLIKTTQAAAIIDHERIALGNEEGLFVVHVTKDEIIRVGDNKKIHQIELIPNDQLVAVISGRNRHVRLFPMSALDGRETDFYKLSETKGCQTVTSGKVRHGALTCLCVAMKRQVLCYELFQSKTRHRKFKEIQVPYNVQWMAIFSEQLCVGFQSGFLRYPLNGEGNPYSMLHSNDHTLSFIAHQPMDAICAVEISSKEYLLCFNSIGIYTDCQGRRSRQQELMWPANPSSCCYNAPYLSVYSENAVDIFDVNSMEWIQTLPLKKVRPLNNEGSLNLLGLETIRLIYFKNKMAEGDELVVPETSDNSRKQMVRNINNKRRYSFRVPEEERMQQRREMLRDPEMRNKLISNPTNFNHIAHMGPGDGIQILKDLPMNPRPQESRTVFSGSVSIPSITKSRPEPGRSMSASSGLSARSSAQNGSALKREFSGGSYSAKRQPMPSPSEGSLSSGGMDQGSDAPARDFDGEDSDSPRHSTASNSSNLSSPPSPASPRKTKSLSLESTDRGSWDP

SEQ ID NO: 11493 - protein, 982 aa, Artificial Sequence
  Synthetic polypeptide
LLNATHVSQLDPGLHKKRRHGRDNLNCVCEFRCQSEREEFESEFKQQYEREKVLLTEENKKLTSELDKLTTLYENLSIHNQQLEEEVKDLADKKESVAHWEAQITEIIQWVSDEKDARGYLQALASKMTEELEALRNSSLGTRATDMPWKMRRFAKLDMSARLELQSALDAEIRAKQAIQEELNKVKASNIITECKLKDSEKKNLELLSEIEQLIKDTEELRSEKASKGRRTVDSTPLSVHTPTLRKKGCPGSTGFPPKRKTHQFFVKSFTTPTKCHQCTSLMVGLIRQGCSCEVCGFSCHITCVNKAPTTCPVPPEQTKGPLGIDPQKGIGTAYEGHVRIPKPAGVKKGWQRALAIVCDFKLFLYDIAEGKASQPSVVISQVIDMRDEEFSVSSVLASDVIHASRKDIPCIFRVTASQLSASNNKCSILMLADTENEKNKWVGVLSELHKILKKNKFRDRSVYVPKEAYDSTLPLIKTTQAAAIIDHERIALGNEEGLFVVHVTKDEIIRVGDNKKIHQIELIPNDQLVAVISGRNRHVRLFPMSALDGRETDFYKLSETKGCQTVTSGKVRHGALTCLCVAMKRQVLCYELFQSKTRHRKFKEIQVPYNVQWMAIFSEQLCVGFQSGFLRYPLNGEGNPYSMLHSNDHTLSFIAHQPMDAICAVEISSKEYLLCFNSIGIYTDCQGRRSRQQELMWPANPSSCCYNAPYLSVYSENAVDIFDVNSMEWIQTLPLKKVRPLNNEGSLNLLGLETIRLIYFKNKMAEGDELVVPETSDNSRKQMVRNINNKRRYSFRVPEEERMQQRREMLRDPEMRNKLISNPTNFNHIAHMGPGDGIQILKDLPMNPRPQESRTVFSGSVSIPSITKSRPEPGRSMSASSGLSARSSAQNGSALKREFSGGSYSAKRQPMPSPSEGSLSSGGMDQGSDAPARDFDGEDSDSPRHSTASNSSNLSSPPSPASPRKTKSLSLESTDRGSWDP

SEQ ID NO: 11494 - protein, 1015 aa, Artificial Sequence
  Synthetic polypeptide
LLNATHVSQLDPGLHKKRRHGRDNLNCVCEFRCQSEREEFESEFKQQYEREKVLLTEENKKLTSELDKLTTLYENLSIHNQQLEEEVKDLADKKESVAHWEAQITEIIQWVSDEKDARGYLQALASKMTEELEALRNSSLGTRATDMPWKMRRFAKLDMSARLELQSALDAEIRAKQAIQEELNKVKASNIITECKLKDSEKKNLELLSEIEQLIKDTEELRSEKGIEHQDSQHSFLAFLNTPTDALDQFERSPSCTPASKGRRTVDSTPLSVHTPTLRKKGCPGSTGFPPKRKTHQFFVKSFTTPTKCHQCTSLMVGLIRQGCSCEVCGFSCHITCVNKAPTTCPVPPEQTKGPLGIDPQKGIGTAYEGHVRIPKPAGVKKGWQRALAIVCDFKLFLYDIAEGKASQPSVVISQVIDMRDEEFSVSSVLASDVIHASRKDIPCIFRVTASQLSASNNKCSILMLADTENEKNKWVGVLSELHKILKKNKFRDRSVYVPKEAYDSTLPLIKTTQAAAIIDHERIALGNEEGLFVVHVTKDEIIRVGDNKKIHQIELIPNDQLVAVISGRNRHVRLFPMSALDGRETDFYKLSETKGCQTVTSGKVRHGALTCLCVAMKRQVLCYELFQSKTRHRKFKEIQVPYNVQWMAIFSEQLCVGFQSGFLRYPLNGEGNPYSMLHSNDHTLSFIAHQPMDAICAVEISSKEYLLCFNSIGIYTDCQGRRSRQQELMWPANPSSCCYNAPYLSVYSENAVDIFDVNSMEWIQTLPLKKVRPLNNEGSLNLLGLETIRLIYFKNKMAEGDELVVPETSDNSRKQMVRNINNKRRYSFRVPEEERMQQRREMLRDPEMRNKLISNPTNFNHIAHMGPGDGIQILKDLPMNPRPQESRTVFSGSVSIPSITKSRPEPGRSMSASSGLSARSSAQNGSALKREFSGGSYSAKRQPMPSPSEGSLSSGGMDQGSDAPARDFDGEDSDSPRHSTASNSSNLSSPPSPASPRKTKSLSLESTDRGSWDP

SEQ ID NO: 11495 - protein, 16 aa, Artificial Sequence
  Synthetic polypeptide
KGSVLSGCRNSRLYLS

SEQ ID NO: 11496 - protein, 1423 aa, Artificial Sequence
  Synthetic polypeptide
TFLQRRYLNGQLALEKVQSSVAVGTPDYISPEILQAMEDGKGRYGPECDWWSLGVCMYEMLYGETPFYAESLVETYGKIMNHKERFQFPAQVTDVSENAKDLIRRLICSREHRLGQNGIEDFKKHPFFSGIDWDNIRNCEAPYIPEVSSPTDTSNFDVDDDCLKNSETMPPPTHTAFSGHHLPFVGFTYTSSCVLSDRSCLRVTAGPTSLDLDVNVQRTLDNNLATEAYERRIKRLEQEKLELSRKLQESTQTVQALQYSTVDGPLTASKDLEIKNLKEEIEKLRKQVTESSHLEQQLEEANAVRQELDDAFRQIKAYEKQIKTLQQEREDLNKLEVHTEALAAEASKDRKLREQSEHYSKQLENELEGLKQKQISYSPGVCSIEHQQEITKLKTDLEKKSIFYEEELSKREGIHANEIKNLKKELHDSEGQQLALNKEIMILKDKLEKTRRESQSEREEFESEFKQQYEREKVLLTEENKKLTSELDKLTTLYENLSIHNQQLEEEVKDLADKKESVAHWEAQITEIIQWVSDEKDARGYLQALASKMTEELEALRNSSLGTRATDMPWKMRRFAKLDMSARLELQSALDAEIRAKQAIQEELNKVKASNIITECKLKDSEKKNLELLSEIEQLIKDTEELRSEKGIEHQDSQHSFLAFLNTPTDALDQFETVDSTPLSVHTPTLRKKGCPGSTGFPPKRKTHQFFVKSFTTPTKCHQCTSLMVGLIRQGCSCEVCGFSCHITCVNKAPTTCPVPPEQTKGPLGIDPQKGIGTAYEGHVRIPKPAGVKKGWQRALAIVCDFKLFLYDIAEGKASQPSVVISQVIDMRDEEFSVSSVLASDVIHASRKDIPCIFRVTASQLSASNNKCSILMLADTENEKNKWVGVLSELHKILKKNKFRDRSVYVPKEAYDSTLPLIKTTQAAAIIDHERIALGNEEGLFVVHVTKDEIIRVGDNKKIHQIELIPNDQLVAVISGRNRHVRLFPMSALDGRETDFYKLSETKGCQTVTSGKVRHGALTCLCVAMKRQVLCYELFQSKTRHRKFKEIQVPYNVQWMAIFSEQLCVGFQSGFLRYPLNGEGNPYSMLHSNDHTLSFIAHQPMDAICAVEISSKEYLLCFNSIGIYTDCQGRRSRQQELMWPANPSSCCYNAPYLSVYSENAVDIFDVNSMEWIQTLPLKKVRPLNNEGSLNLLGLETIRLIYFKNKMAEGDELVVPETSDNSRKQMVRNINNKRRYSFRVPEEERMQQRREMLRDPEMRNKLISNPTNFNHIAHMGPGDGIQILKDLPMNPRPQESRTVFSGSVSIPSITKSRPEPGRSMSASSGLSARSSAQNGSALKREFSGGSYSAKRQPMPSPSEGSLSSGGMDQGSDAPARDFDGEDSDSPRHSTASNSSNLSSPPSPASPRKTKSLSLESTDRGSWDP

SEQ ID NO: 11497 - protein, 10 aa, Artificial Sequence
  Synthetic polypeptide
HLKRFSPQWL

SEQ ID NO: 11498 - protein, 1504 aa, Artificial Sequence
  Synthetic polypeptide
TFLQRRYLNGQLALEKVQSSVAVGTPDYISPEILQAMEDGKGRYGPECDWWSLGVCMYEMLYGETPFYAESLVETYGKIMNHKERFQFPAQVTDVSENAKDLIRRLICSREHRLGQNGIEDFKKHPFFSGIDWDNIRNCEAPYIPEVSSPTDTSNFDVDDDCLKNSETMPPPTHTAFSGHHLPFVGFTYTSSCVLSDRSCLRVTAGPTSLDLDVNVQRTLDNNLATEAYERRIKRLEQEKLELSRKLQESTQTVQALQYSTVDGPLTASKDLEIKNLKEEIEKLRKQVTESSHLEQQLEEANAVRQELDDAFRQIKAYEKQIKTLQQEREDLNKELVQASERLKNQSKELKDAHCQRKLAMQEFMEINERLTELHTQKQKLARHVRDKEEEVDLVMQKVESLRQELRRTERAKKELEVHTEALAAEASKDRKLREQSEHYSKQLENELEGLKQKQISYSPGVCSIEHQQEITKLKTDLEKKSIFYEEELSKREGIHANEIKNLKKELHDSEGQQLALNKEIMILKDKLEKTRRESQSEREEFESEFKQQYEREKVLLTEENKKLTSELDKLTTLYENLSIHNQQLEEEVKDLADKKESVAHWEAQITEIIQWVSDEKDARGYLQALASKMTEELEALRNSSLGTRATDMPWKMRRFAKLDMSARLELQSALDAEIRAKQAIQEELNKVKASNIITECKLKDSEKKNLELLSEIEQLIKDTEELRSEKGIEHQDSQHSFLAFLNTPTDALDQFETVDSTPLSVHTPTLRKKGCPGSTGFPPKRKTHQFFVKSFTTPTKCHQCTSLMVGLIRQGCSCEVCGFSCHITCVNKAPTTCPVPPEQTKGPLGIDPQKGIGTAYEGHVRIPKPAGVKKGWQRALAIVCDFKLFLYDIAEGKASQPSVVISQVIDMRDEEFSVSSVLASDVIHASRKDIPCIFRVTASQLSASNNKCSILMLADTENEKNKWVGVLSELHKILKKNKFRDRSVYVPKEAYDSTLPLIKTTQAAAIIDHERIALGNEEGLFVVHVTKDEIIRVGDNKKIHQIELIPNDQLVAVISGRNRHVRLFPMSALDGRETDFYKLSETKGCQTVTSGKVRHGALTCLCVAMKRQVLCYELFQSKTRHRKFKEIQVPYNVQWMAIFSEQLCVGFQSGFLRYPLNGEGNPYSMLHSNDHTLSFIAHQPMDAICAVEISSKEYLLCFNSIGIYTDCQGRRSRQQELMWPANPSSCCYNAPYLSVYSENAVDIFDVNSMEWIQTLPLKKVRPLNNEGSLNLLGLETIRLIYFKNKMAEGDELVVPETSDNSRKQMVRNINNKRRYSFRVPEEERMQQRREMLRDPEMRNKLISNPTNFNHIAHMGPGDGIQILKDLPMNPRPQESRTVFSGSVSIPSITKSRPEPGRSMSASSGLSARSSAQNGSALKREFSGGSYSAKRQPMPSPSEGSLSSGGMDQGSDAPARDFDGEDSDSPRHSTASNSSNLSSPPSPASPRKTKSLSLESTDRGSWDP

SEQ ID NO: 11499 - protein, 1566 aa, Artificial Sequence
  Synthetic polypeptide
TFLQRRYLNGQLALEKVQSSVAVGTPDYISPEILQAMEDGKGRYGPECDWWSLGVCMYEMLYGETPFYAESLVETYGKIMNHKERFQFPAQVTDVSENAKDLIRRLICSREHRLGQNGIEDFKKHPFFSGIDWDNIRNCEAPYIPEVSSPTDTSNFDVDDDCLKNSETMPPPTHTAFSGHHLPFVGFTYTSSCVLSDRSCLRVTAGPTSLDLDVNVQRTLDNNLATEAYERRIKRLEQEKLELSRKLQESTQTVQALQYSTVDGPLTASKDLEIKNLKEEIEKLRKQVTESSHLEQQLEEANAVRQELDDAFRQIKAYEKQIKTLQQEREDLNKELVQASERLKNQSKELKDAHCQRKLAMQEFMEINERLTELHTQKQKLARHVRDKEEEVDLVMQKVESLRQELRRTERAKKELEVHTEALAAEASKDRKLREQSEHYSKQLENELEGLKQKQISYSPGVCSIEHQQEITKLKTDLEKKSIFYEEELSKREGIHANEIKNLKKELHDSEGQQLALNKEIMILKDKLEKTRRESQSEREEFESEFKQQYEREKVLLTEENKKLTSELDKLTTLYENLSIHNQQLEEEVKDLADKKESVAHWEAQITEIIQWVSDEKDARGYLQALASKMTEELEALRNSSLGTRATDMPWKMRRFAKLDMSARLELQSALDAEIRAKQAIQEELNKVKASNIITECKLKDSEKKNLELLSEIEQLIKDTEELRSEKGIEHQDSQHSFLAFLNTPTDALDQFETVDSTPLSVHTPTLRKKGCPGSTGFPPKRKTHQFFVKSFTTPTKCHQCTSLMVGLIRQGCSCEVCGFSCHITCVNKAPTTCPVPPEQTKGPLGIDPQKGIGTAYEGHVRIPKPAGVKKGWQRALAIVCDFKLFLYDIAEGKASQPSVVISQVIDMRDEEFSVSSVLASDVIHASRKDIPCIFRVTASQLSASNNKCSILMLADTENEKNKWVGVLSELHKILKKNKFRDRSVYVPKEAYDSTLPLIKTTQAAAIIDHERIALGNEEGLFVVHVTKDEIIRVGDNKKIHQIELIPNDQLVAVISGRNRHVRLFPMSALDGRETDFYKLSETKGCQTVTSGKVRHGALTCLCVAMKRQVLCYELFQSKTRHRKFKEIQVPYNVQWMAIFSEQLCVGFQSGFLRYPLNGEGNPYSMLHSNDHTLSFIAHQPMDAICAVEISSKEYLLCFNSIGIYTDCQGRRSRQQELMWPANPSSCCYNAPYLSVYSENAVDIFDVNSMEWIQTLPLKKVRPLNNEGSLNLLGLETIRLIYFKNKMAEGDELVVPETSDNSRKQMVRNINNKRRYSFRVPEEERMQQRREMLRDPEMRNKLISNPTNFNHIAHMGPGDGIQILKDLPMPGFPYPSPHHHSGLISSPINFEHIYHMTVNSAEKFLSPDSINPEYSPSLRSVPGTPSFMTLRNPRPQESRTVFSGSVSIPSITKSRPEPGRSMSASSGLSARSSAQNGSALKREFSGGSYSAKRQPMPSPSEGSLSSGGMDQGSDAPARDFDGEDSDSPRHSTASNSSNLSSPPSPASPRKTKSLSLESTDRGSWDP

SEQ ID NO: 11500 - protein, 1476 aa, Artificial Sequence
  Synthetic polypeptide
TFLQRRYLNGQLALEKVQSSVAVGTPDYISPEILQAMEDGKGRYGPECDWWSLGVCMYEMLYGETPFYAESLVETYGKIMNHKERFQFPAQVTDVSENAKDLIRRLICSREHRLGQNGIEDFKKHPFFSGIDWDNIRNCEAPYIPEVSSPTDTSNFDVDDDCLKNSETMPPPTHTAFSGHHLPFVGFTYTSSCVLSDRSCLRVTAGPTSLDLDVNVQRTLDNNLATEAYERRIKRLEQEKLELSRKLQESTQTVQALQYSTVDGPLTASKDLEIKNLKEEIEKLRKQVTESSHLEQQLEEANAVRQELDDAFRQIKAYEKQIKTLQQEREDLNKELVQASERLKNQSKELKDAHCQRKLAMQEFMEINERLTELHTQKQKLARHVRDKEEEVDLVMQKVESLRQELRRTERAKKELEVHTEALAAEASKDRKLREQSEHYSKQLENELEGLKQKQISYSPGVCSIEHQQEITKLKTDLEKKSIFYEEELSKREGIHANEIKNLKKELHDSEGQQLALNKEIMILKDKLEKTRRESQSEREEFESEFKQQYEREKVLLTEENKKLTSELDKLTTLYENLSIHNQQLEEEVKDLADKKESVAHWEAQITEIIQWVSDEKDARGYLQALASKMTEELEALRNSSLGTRATDMPWKMRRFAKLDMSARLELQSALDAEIRAKQAIQEELNKVKASNIITECKLKDSEKKNLELLSEIEQLIKDTEELRSEKGIEHQDSQHSFLAFLNTPTDALDQFERKTHQFFVKSFTTPTKCHQCTSLMVGLIRQGCSCEVCGFSCHITCVNKAPTTCPVPPEQTKGPLGIDPQKGIGTAYEGHVRIPKPAGVKKGWQRALAIVCDFKLFLYDIAEGKASQPSVVISQVIDMRDEEFSVSSVLASDVIHASRKDIPCIFRVTASQLSASNNKCSILMLADTENEKNKWVGVLSELHKILKKNKFRDRSVYVPKEAYDSTLPLIKTTQAAAIIDHERIALGNEEGLFVVHVTKDEIIRVGDNKKIHQIELIPNDQLVAVISGRNRHVRLFPMSALDGRETDFYKLSETKGCQTVTSGKVRHGALTCLCVAMKRQVLCYELFQSKTRHRKFKEIQVPYNVQWMAIFSEQLCVGFQSGFLRYPLNGEGNPYSMLHSNDHTLSFIAHQPMDAICAVEISSKEYLLCFNSIGIYTDCQGRRSRQQELMWPANPSSCCYNAPYLSVYSENAVDIFDVNSMEWIQTLPLKKVRPLNNEGSLNLLGLETIRLIYFKNKMAEGDELVVPETSDNSRKQMVRNINNKRRYSFRVPEEERMQQRREMLRDPEMRNKLISNPTNFNHIAHMGPGDGIQILKDLPMNPRPQESRTVFSGSVSIPSITKSRPEPGRSMSASSGLSARSSAQNGSALKREFSGGSYSAKRQPMPSPSEGSLSSGGMDQGSDAPARDFDGEDSDSPRHSTASNSSNLSSPPSPASPRKTKSLSLESTDRGSWDP

SEQ ID NO: 11501 - protein, 1539 aa, Artificial Sequence
  Synthetic polypeptide
TFLQRRYLNGQLALEKVQSSVAVGTPDYISPEILQAMEDGKGRYGPECDWWSLGVCMYEMLYGETPFYAESLVETYGKIMNHKERFQFPAQVTDVSENAKDLIRRLICSREHRLGQNGIEDFKKHPFFSGIDWDNIRNCEAPYIPEVSSPTDTSNFDVDDDCLKNSETMPPPTHTAFSGHHLPFVGFTYTSSCVLSDRSCLRVTAGPTSLDLDVNVQRTLDNNLATEAYERRIKRLEQEKLELSRKLQESTQTVQALQYSTVDGPLTASKDLEIKNLKEEIEKLRKQVTESSHLEQQLEEANAVRQELDDAFRQIKAYEKQIKTLQQEREDLNKELVQASERLKNQSKELKDAHCQRKLAMQEFMEINERLTELHTQKQKLARHVRDKEEEVDLVMQKVESLRQELRRTERAKKELEVHTEALAAEASKDRKLREQSEHYSKQLENELEGLKQKQISYSPGVCSIEHQQEITKLKTDLEKKSIFYEEELSKREGIHANEIKNLKKELHDSEGQQLALNKEIMILKDKLEKTRRESQSEREEFESEFKQQYEREKVLLTEENKKLTSELDKLTTLYENLSIHNQQLEEEVKDLADKKESVAHWEAQITEIIQWVSDEKDARGYLQALASKMTEELEALRNSSLGTRATDMPWKMRRFAKLDMSARLELQSALDAEIRAKQAIQEELNKVKASNIITECKLKDSEKKNLELLSEIEQLIKDTEELRSEKGIEHQDSQHSFLAFLNTPTDALDQFETDPVENTYVWNPSVKFHIQSRSTSPSTSSEAEPVKTVDSTPLSVHTPTLRKKGCPGSTGFPPKRKTHQFFVKSFTTPTKCHQCTSLMVGLIRQGCSCEVCGFSCHITCVNKAPTTCPVPPEQTKGPLGIDPQKGIGTAYEGHVRIPKPAGVKKGWQRALAIVCDFKLFLYDIAEGKASQPSVVISQVIDMRDEEFSVSSVLASDVIHASRKDIPCIFRVTASQLSASNNKCSILMLADTENEKNKWVGVLSELHKILKKNKFRDRSVYVPKEAYDSTLPLIKTTQAAAIIDHERIALGNEEGLFVVHVTKDEIIRVGDNKKIHQIELIPNDQLVAVISGRNRHVRLFPMSALDGRETDFYKLSETKGCQTVTSGKVRHGALTCLCVAMKRQVLCYELFQSKTRHRKFKEIQVPYNVQWMAIFSEQLCVGFQSGFLRYPLNGEGNPYSMLHSNDHTLSFIAHQPMDAICAVEISSKEYLLCFNSIGIYTDCQGRRSRQQELMWPANPSSCCYNAPYLSVYSENAVDIFDVNSMEWIQTLPLKKVRPLNNEGSLNLLGLETIRLIYFKNKMAEGDELVVPETSDNSRKQMVRNINNKRRYSFRVPEEERMQQRREMLRDPEMRNKLISNPTNFNHIAHMGPGDGIQILKDLPMNPRPQESRTVFSGSVSIPSITKSRPEPGRSMSASSGLSARSSAQNGSALKREFSGGSYSAKRQPMPSPSEGSLSSGGMDQGSDAPARDFDGEDSDSPRHSTASNSSNLSSPPSPASPRKTKSLSLESTDRGSWDP

SEQ ID NO: 11502 - protein, 1484 aa, Artificial Sequence
  Synthetic polypeptide
TFLQRRYLNGQLALEKVQSSVAVGTPDYISPEILQAMEDGKGRYGPECDWWSLGVCMYEMLYGETPFYAESLVETYGKIMNHKERFQFPAQVTDVSENAKDLIRRLICSREHRLGQNGIEDFKKHPFFSGIDWDNIRNCEAPYIPEVSSPTDTSNFDVDDDCLKNSETMPPPTHTAFSGHHLPFVGFTYTSSCVLSDRSCLRVTAGPTSLDLDVNVQRTLDNNLATEAYERRIKRLEQEKLELSRKLQESTQTVQALQYSTVDGPLTASKDLEIKNLKEEIEKLRKQVTESSHLEQQLEEANAVRQELDDAFRQIKAYEKQIKTLQQEREDLNKELVQASERLKNQSKELKDAHCQRKLAMQEFMEINERLTELHTQKQKLARHVRDKEEEVDLVMQKVESLRQELRRTERAKKELEVHTEALAAEASKDRKLREQSEHYSKQLENELEGLKQKQISYSPGVCSIEHQQEITKLKTDLEKKSIFYEEELSKREGIHANEIKNLKKELHDSEGQQLALNKEIMILKDKLEKTRRESQSEREEFESEFKQQYEREKVLLTEENKKLTSELDKLTTLYENLSIHNQQLEEEVKDLADKKESVAHWEAQITEIIQWVSDEKDARGYLQALASKMTEELEALRNSSLGTRATDMPWKMRRFAKLDMSARLELQSALDAEIRAKQAIQEELNKVKASNIITECKLKDSEKKNLELLSEIEQLIKDTEELRSEKASKGRRTVDSTPLSVHTPTLRKKGCPGSTGFPPKRKTHQFFVKSFTTPTKCHQCTSLMVGLIRQGCSCEVCGFSCHITCVNKAPTTCPVPPEQTKGPLGIDPQKGIGTAYEGHVRIPKPAGVKKGWQRALAIVCDFKLFLYDIAEGKASQPSVVISQVIDMRDEEFSVSSVLASDVIHASRKDIPCIFRVTASQLSASNNKCSILMLADTENEKNKWVGVLSELHKILKKNKFRDRSVYVPKEAYDSTLPLIKTTQAAAIIDHERIALGNEEGLFVVHVTKDEIIRVGDNKKIHQIELIPNDQLVAVISGRNRHVRLFPMSALDGRETDFYKLSETKGCQTVTSGKVRHGALTCLCVAMKRQVLCYELFQSKTRHRKFKEIQVPYNVQWMAIFSEQLCVGFQSGFLRYPLNGEGNPYSMLHSNDHTLSFIAHQPMDAICAVEISSKEYLLCFNSIGIYTDCQGRRSRQQELMWPANPSSCCYNAPYLSVYSENAVDIFDVNSMEWIQTLPLKKVRPLNNEGSLNLLGLETIRLIYFKNKMAEGDELVVPETSDNSRKQMVRNINNKRRYSFRVPEEERMQQRREMLRDPEMRNKLISNPTNFNHIAHMGPGDGIQILKDLPMNPRPQESRTVFSGSVSIPSITKSRPEPGRSMSASSGLSARSSAQNGSALKREFSGGSYSAKRQPMPSPSEGSLSSGGMDQGSDAPARDFDGEDSDSPRHSTASNSSNLSSPPSPASPRKTKSLSLESTDRGSWDP

SEQ ID NO: 11503 - protein, 1517 aa, Artificial Sequence
  Synthetic polypeptide
TFLQRRYLNGQLALEKVQSSVAVGTPDYISPEILQAMEDGKGRYGPECDWWSLGVCMYEMLYGETPFYAESLVETYGKIMNHKERFQFPAQVTDVSENAKDLIRRLICSREHRLGQNGIEDFKKHPFFSGIDWDNIRNCEAPYIPEVSSPTDTSNFDVDDDCLKNSETMPPPTHTAFSGHHLPFVGFTYTSSCVLSDRSCLRVTAGPTSLDLDVNVQRTLDNNLATEAYERRIKRLEQEKLELSRKLQESTQTVQALQYSTVDGPLTASKDLEIKNLKEEIEKLRKQVTESSHLEQQLEEANAVRQELDDAFRQIKAYEKQIKTLQQEREDLNKELVQASERLKNQSKELKDAHCQRKLAMQEFMEINERLTELHTQKQKLARHVRDKEEEVDLVMQKVESLRQELRRTERAKKELEVHTEALAAEASKDRKLREQSEHYSKQLENELEGLKQKQISYSPGVCSIEHQQEITKLKTDLEKKSIFYEEELSKREGIHANEIKNLKKELHDSEGQQLALNKEIMILKDKLEKTRRESQSEREEFESEFKQQYEREKVLLTEENKKLTSELDKLTTLYENLSIHNQQLEEEVKDLADKKESVAHWEAQITEIIQWVSDEKDARGYLQALASKMTEELEALRNSSLGTRATDMPWKMRRFAKLDMSARLELQSALDAEIRAKQAIQEELNKVKASNIITECKLKDSEKKNLELLSEIEQLIKDTEELRSEKGIEHQDSQHSFLAFLNTPTDALDQFERSPSCTPASKGRRTVDSTPLSVHTPTLRKKGCPGSTGFPPKRKTHQFFVKSFTTPTKCHQCTSLMVGLIRQGCSCEVCGFSCHITCVNKAPTTCPVPPEQTKGPLGIDPQKGIGTAYEGHVRIPKPAGVKKGWQRALAIVCDFKLFLYDIAEGKASQPSVVISQVIDMRDEEFSVSSVLASDVIHASRKDIPCIFRVTASQLSASNNKCSILMLADTENEKNKWVGVLSELHKILKKNKFRDRSVYVPKEAYDSTLPLIKTTQAAAIIDHERIALGNEEGLFVVHVTKDEIIRVGDNKKIHQIELIPNDQLVAVISGRNRHVRLFPMSALDGRETDFYKLSETKGCQTVTSGKVRHGALTCLCVAMKRQVLCYELFQSKTRHRKFKEIQVPYNVQWMAIFSEQLCVGFQSGFLRYPLNGEGNPYSMLHSNDHTLSFIAHQPMDAICAVEISSKEYLLCFNSIGIYTDCQGRRSRQQELMWPANPSSCCYNAPYLSVYSENAVDIFDVNSMEWIQTLPLKKVRPLNNEGSLNLLGLETIRLIYFKNKMAEGDELVVPETSDNSRKQMVRNINNKRRYSFRVPEEERMQQRREMLRDPEMRNKLISNPTNFNHIAHMGPGDGIQILKDLPMNPRPQESRTVFSGSVSIPSITKSRPEPGRSMSASSGLSARSSAQNGSALKREFSGGSYSAKRQPMPSPSEGSLSSGGMDQGSDAPARDFDGEDSDSPRHSTASNSSNLSSPPSPASPRKTKSLSLESTDRGSWDP

SEQ ID NO: 11504 - protein, 48 aa, Artificial Sequence
  Synthetic polypeptide
SACLLLHSFLTHCLLYSVFGDQSCSLPFRGSVLASNDRRFVLNHLLLK

SEQ ID NO: 11505 - protein, 8 aa, Artificial Sequence
  Synthetic polypeptide
LQMTGDLC

SEQ ID NO: 11506 - protein, 1583 aa, Artificial Sequence
  Synthetic polypeptide
QEICAKPFTSKVKQMRLHREDFEILKVIGRGAFGEVAVVKLKNADKVFAMKILNKWEMLKRAETACFREERDVLVNGDNKWITTLHYAFQDDNNLYLVMDYYVGGDLLTLLSKFEDRLPEDMARFYLAEMVIAIDSVHQLHYVHRDIKPDNILMDMNGHIRLADFGSCLKLMEDGTVQSSVAVGTPDYISPEILQAMEDGKGRYGPECDWWSLGVCMYEMLYGETPFYAESLVETYGKIMNHKERFQFPAQVTDVSENAKDLIRRLICSREHRLGQNGIEDFKKHPFFSGIDWDNIRNCEAPYIPEVSSPTDTSNFDVDDDCLKNSETMPPPTHTAFSGHHLPFVGFTYTSSCVLSDRSCLRVTAGPTSLDLDVNVQRTLDNNLATEAYERRIKRLEQEKLELSRKLQESTQTVQALQYSTVDGPLTASKDLEIKNLKEEIEKLRKQVTESSHLEQQLEEANAVRQELDDAFRQIKAYEKQIKTLQQEREDLNKLEVHTEALAAEASKDRKLREQSEHYSKQLENELEGLKQKQISYSPGVCSIEHQQEITKLKTDLEKKSIFYEEELSKREGIHANEIKNLKKELHDSEGQQLALNKEIMILKDKLEKTRRESQSEREEFESEFKQQYEREKVLLTEENKKLTSELDKLTTLYENLSIHNQQLEEEVKDLADKKESVAHWEAQITEIIQWVSDEKDARGYLQALASKMTEELEALRNSSLGTRATDMPWKMRRFAKLDMSARLELQSALDAEIRAKQAIQEELNKVKASNIITECKLKDSEKKNLELLSEIEQLIKDTEELRSEKGIEHQDSQHSFLAFLNTPTDALDQFETVDSTPLSVHTPTLRKKGCPGSTGFPPKRKTHQFFVKSFTTPTKCHQCTSLMVGLIRQGCSCEVCGFSCHITCVNKAPTTCPVPPEQTKGPLGIDPQKGIGTAYEGHVRIPKPAGVKKGWQRALAIVCDFKLFLYDIAEGKASQPSVVISQVIDMRDEEFSVSSVLASDVIHASRKDIPCIFRVTASQLSASNNKCSILMLADTENEKNKWVGVLSELHKILKKNKFRDRSVYVPKEAYDSTLPLIKTTQAAAIIDHERIALGNEEGLFVVHVTKDEIIRVGDNKKIHQIELIPNDQLVAVISGRNRHVRLFPMSALDGRETDFYKLSETKGCQTVTSGKVRHGALTCLCVAMKRQVLCYELFQSKTRHRKFKEIQVPYNVQWMAIFSEQLCVGFQSGFLRYPLNGEGNPYSMLHSNDHTLSFIAHQPMDAICAVEISSKEYLLCFNSIGIYTDCQGRRSRQQELMWPANPSSCCYNAPYLSVYSENAVDIFDVNSMEWIQTLPLKKVRPLNNEGSLNLLGLETIRLIYFKNKMAEGDELVVPETSDNSRKQMVRNINNKRRYSFRVPEEERMQQRREMLRDPEMRNKLISNPTNFNHIAHMGPGDGIQILKDLPMNPRPQESRTVFSGSVSIPSITKSRPEPGRSMSASSGLSARSSAQNGSALKREFSGGSYSAKRQPMPSPSEGSLSSGGMDQGSDAPARDFDGEDSDSPRHSTASNSSNLSSPPSPASPRKTKSLSLESTDRGSWDP

SEQ ID NO: 11507 - protein, 1664 aa, Artificial Sequence
  Synthetic polypeptide
QEICAKPFTSKVKQMRLHREDFEILKVIGRGAFGEVAVVKLKNADKVFAMKILNKWEMLKRAETACFREERDVLVNGDNKWITTLHYAFQDDNNLYLVMDYYVGGDLLTLLSKFEDRLPEDMARFYLAEMVIAIDSVHQLHYVHRDIKPDNILMDMNGHIRLADFGSCLKLMEDGTVQSSVAVGTPDYISPEILQAMEDGKGRYGPECDWWSLGVCMYEMLYGETPFYAESLVETYGKIMNHKERFQFPAQVTDVSENAKDLIRRLICSREHRLGQNGIEDFKKHPFFSGIDWDNIRNCEAPYIPEVSSPTDTSNFDVDDDCLKNSETMPPPTHTAFSGHHLPFVGFTYTSSCVLSDRSCLRVTAGPTSLDLDVNVQRTLDNNLATEAYERRIKRLEQEKLELSRKLQESTQTVQALQYSTVDGPLTASKDLEIKNLKEEIEKLRKQVTESSHLEQQLEEANAVRQELDDAFRQIKAYEKQIKTLQQEREDLNKELVQASERLKNQSKELKDAHCQRKLAMQEFMEINERLTELHTQKQKLARHVRDKEEEVDLVMQKVESLRQELRRTERAKKELEVHTEALAAEASKDRKLREQSEHYSKQLENELEGLKQKQISYSPGVCSIEHQQEITKLKTDLEKKSIFYEEELSKREGIHANEIKNLKKELHDSEGQQLALNKEIMILKDKLEKTRRESQSEREEFESEFKQQYEREKVLLTEENKKLTSELDKLTTLYENLSIHNQQLEEEVKDLADKKESVAHWEAQITEIIQWVSDEKDARGYLQALASKMTEELEALRNSSLGTRATDMPWKMRRFAKLDMSARLELQSALDAEIRAKQAIQEELNKVKASNIITECKLKDSEKKNLELLSEIEQLIKDTEELRSEKGIEHQDSQHSFLAFLNTPTDALDQFETVDSTPLSVHTPTLRKKGCPGSTGFPPKRKTHQFFVKSFTTPTKCHQCTSLMVGLIRQGCSCEVCGFSCHITCVNKAPTTCPVPPEQTKGPLGIDPQKGIGTAYEGHVRIPKPAGVKKGWQRALAIVCDFKLFLYDIAEGKASQPSVVISQVIDMRDEEFSVSSVLASDVIHASRKDIPCIFRVTASQLSASNNKCSILMLADTENEKNKWVGVLSELHKILKKNKFRDRSVYVPKEAYDSTLPLIKTTQAAAIIDHERIALGNEEGLFVVHVTKDEIIRVGDNKKIHQIELIPNDQLVAVISGRNRHVRLFPMSALDGRETDFYKLSETKGCQTVTSGKVRHGALTCLCVAMKRQVLCYELFQSKTRHRKFKEIQVPYNVQWMAIFSEQLCVGFQSGFLRYPLNGEGNPYSMLHSNDHTLSFIAHQPMDAICAVEISSKEYLLCFNSIGIYTDCQGRRSRQQELMWPANPSSCCYNAPYLSVYSENAVDIFDVNSMEWIQTLPLKKVRPLNNEGSLNLLGLETIRLIYFKNKMAEGDELVVPETSDNSRKQMVRNINNKRRYSFRVPEEERMQQRREMLRDPEMRNKLISNPTNFNHIAHMGPGDGIQILKDLPMNPRPQESRTVFSGSVSIPSITKSRPEPGRSMSASSGLSARSSAQNGSALKREFSGGSYSAKRQPMPSPSEGSLSSGGMDQGSDAPARDFDGEDSDSPRHSTASNSSNLSSPPSPASPRKTKSLSLESTDRGSWDP

SEQ ID NO: 11508 - protein, 1726 aa, Artificial Sequence
  Synthetic polypeptide
QEICAKPFTSKVKQMRLHREDFEILKVIGRGAFGEVAVVKLKNADKVFAMKILNKWEMLKRAETACFREERDVLVNGDNKWITTLHYAFQDDNNLYLVMDYYVGGDLLTLLSKFEDRLPEDMARFYLAEMVIAIDSVHQLHYVHRDIKPDNILMDMNGHIRLADFGSCLKLMEDGTVQSSVAVGTPDYISPEILQAMEDGKGRYGPECDWWSLGVCMYEMLYGETPFYAESLVETYGKIMNHKERFQFPAQVTDVSENAKDLIRRLICSREHRLGQNGIEDFKKHPFFSGIDWDNIRNCEAPYIPEVSSPTDTSNFDVDDDCLKNSETMPPPTHTAFSGHHLPFVGFTYTSSCVLSDRSCLRVTAGPTSLDLDVNVQRTLDNNLATEAYERRIKRLEQEKLELSRKLQESTQTVQALQYSTVDGPLTASKDLEIKNLKEEIEKLRKQVTESSHLEQQLEEANAVRQELDDAFRQIKAYEKQIKTLQQEREDLNKELVQASERLKNQSKELKDAHCQRKLAMQEFMEINERLTELHTQKQKLARHVRDKEEEVDLVMQKVESLRQELRRTERAKKELEVHTEALAAEASKDRKLREQSEHYSKQLENELEGLKQKQISYSPGVCSIEHQQEITKLKTDLEKKSIFYEEELSKREGIHANEIKNLKKELHDSEGQQLALNKEIMILKDKLEKTRRESQSEREEFESEFKQQYEREKVLLTEENKKLTSELDKLTTLYENLSIHNQQLEEEVKDLADKKESVAHWEAQITEIIQWVSDEKDARGYLQALASKMTEELEALRNSSLGTRATDMPWKMRRFAKLDMSARLELQSALDAEIRAKQAIQEELNKVKASNIITECKLKDSEKKNLELLSEIEQLIKDTEELRSEKGIEHQDSQHSFLAFLNTPTDALDQFETVDSTPLSVHTPTLRKKGCPGSTGFPPKRKTHQFFVKSFTTPTKCHQCTSLMVGLIRQGCSCEVCGFSCHITCVNKAPTTCPVPPEQTKGPLGIDPQKGIGTAYEGHVRIPKPAGVKKGWQRALAIVCDFKLFLYDIAEGKASQPSVVISQVIDMRDEEFSVSSVLASDVIHASRKDIPCIFRVTASQLSASNNKCSILMLADTENEKNKWVGVLSELHKILKKNKFRDRSVYVPKEAYDSTLPLIKTTQAAAIIDHERIALGNEEGLFVVHVTKDEIIRVGDNKKIHQIELIPNDQLVAVISGRNRHVRLFPMSALDGRETDFYKLSETKGCQTVTSGKVRHGALTCLCVAMKRQVLCYELFQSKTRHRKFKEIQVPYNVQWMAIFSEQLCVGFQSGFLRYPLNGEGNPYSMLHSNDHTLSFIAHQPMDAICAVEISSKEYLLCFNSIGIYTDCQGRRSRQQELMWPANPSSCCYNAPYLSVYSENAVDIFDVNSMEWIQTLPLKKVRPLNNEGSLNLLGLETIRLIYFKNKMAEGDELVVPETSDNSRKQMVRNINNKRRYSFRVPEEERMQQRREMLRDPEMRNKLISNPTNFNHIAHMGPGDGIQILKDLPMPGFPYPSPHHHSGLISSPINFEHIYHMTVNSAEKFLSPDSINPEYSPSLRSVPGTPSFMTLRNPRPQESRTVFSGSVSIPSITKSRPEPGRSMSASSGLSARSSAQNGSALKREFSGGSYSAKRQPMPSPSEGSLSSGGMDQGSDAPARDFDGEDSDSPRHSTASNSSNLSSPPSPASPRKTKSLSLESTDRGSWDP

SEQ ID NO: 11509 - protein, 1636 aa, Artificial Sequence
  Synthetic polypeptide
QEICAKPFTSKVKQMRLHREDFEILKVIGRGAFGEVAVVKLKNADKVFAMKILNKWEMLKRAETACFREERDVLVNGDNKWITTLHYAFQDDNNLYLVMDYYVGGDLLTLLSKFEDRLPEDMARFYLAEMVIAIDSVHQLHYVHRDIKPDNILMDMNGHIRLADFGSCLKLMEDGTVQSSVAVGTPDYISPEILQAMEDGKGRYGPECDWWSLGVCMYEMLYGETPFYAESLVETYGKIMNHKERFQFPAQVTDVSENAKDLIRRLICSREHRLGQNGIEDFKKHPFFSGIDWDNIRNCEAPYIPEVSSPTDTSNFDVDDDCLKNSETMPPPTHTAFSGHHLPFVGFTYTSSCVLSDRSCLRVTAGPTSLDLDVNVQRTLDNNLATEAYERRIKRLEQEKLELSRKLQESTQTVQALQYSTVDGPLTASKDLEIKNLKEEIEKLRKQVTESSHLEQQLEEANAVRQELDDAFRQIKAYEKQIKTLQQEREDLNKELVQASERLKNQSKELKDAHCQRKLAMQEFMEINERLTELHTQKQKLARHVRDKEEEVDLVMQKVESLRQELRRTERAKKELEVHTEALAAEASKDRKLREQSEHYSKQLENELEGLKQKQISYSPGVCSIEHQQEITKLKTDLEKKSIFYEEELSKREGIHANEIKNLKKELHDSEGQQLALNKEIMILKDKLEKTRRESQSEREEFESEFKQQYEREKVLLTEENKKLTSELDKLTTLYENLSIHNQQLEEEVKDLADKKESVAHWEAQITEIIQWVSDEKDARGYLQALASKMTEELEALRNSSLGTRATDMPWKMRRFAKLDMSARLELQSALDAEIRAKQAIQEELNKVKASNIITECKLKDSEKKNLELLSEIEQLIKDTEELRSEKGIEHQDSQHSFLAFLNTPTDALDQFERKTHQFFVKSFTTPTKCHQCTSLMVGLIRQGCSCEVCGFSCHITCVNKAPTTCPVPPEQTKGPLGIDPQKGIGTAYEGHVRIPKPAGVKKGWQRALAIVCDFKLFLYDIAEGKASQPSVVISQVIDMRDEEFSVSSVLASDVIHASRKDIPCIFRVTASQLSASNNKCSILMLADTENEKNKWVGVLSELHKILKKNKFRDRSVYVPKEAYDSTLPLIKTTQAAAIIDHERIALGNEEGLFVVHVTKDEIIRVGDNKKIHQIELIPNDQLVAVISGRNRHVRLFPMSALDGRETDFYKLSETKGCQTVTSGKVRHGALTCLCVAMKRQVLCYELFQSKTRHRKFKEIQVPYNVQWMAIFSEQLCVGFQSGFLRYPLNGEGNPYSMLHSNDHTLSFIAHQPMDAICAVEISSKEYLLCFNSIGIYTDCQGRRSRQQELMWPANPSSCCYNAPYLSVYSENAVDIFDVNSMEWIQTLPLKKVRPLNNEGSLNLLGLETIRLIYFKNKMAEGDELVVPETSDNSRKQMVRNINNKRRYSFRVPEEERMQQRREMLRDPEMRNKLISNPTNFNHIAHMGPGDGIQILKDLPMNPRPQESRTVFSGSVSIPSITKSRPEPGRSMSASSGLSARSSAQNGSALKREFSGGSYSAKRQPMPSPSEGSLSSGGMDQGSDAPARDFDGEDSDSPRHSTASNSSNLSSPPSPASPRKTKSLSLESTDRGSWDP

SEQ ID NO: 11510 - protein, 1699 aa, Artificial Sequence
  Synthetic polypeptide
QEICAKPFTSKVKQMRLHREDFEILKVIGRGAFGEVAVVKLKNADKVFAMKILNKWEMLKRAETACFREERDVLVNGDNKWITTLHYAFQDDNNLYLVMDYYVGGDLLTLLSKFEDRLPEDMARFYLAEMVIAIDSVHQLHYVHRDIKPDNILMDMNGHIRLADFGSCLKLMEDGTVQSSVAVGTPDYISPEILQAMEDGKGRYGPECDWWSLGVCMYEMLYGETPFYAESLVETYGKIMNHKERFQFPAQVTDVSENAKDLIRRLICSREHRLGQNGIEDFKKHPFFSGIDWDNIRNCEAPYIPEVSSPTDTSNFDVDDDCLKNSETMPPPTHTAFSGHHLPFVGFTYTSSCVLSDRSCLRVTAGPTSLDLDVNVQRTLDNNLATEAYERRIKRLEQEKLELSRKLQESTQTVQALQYSTVDGPLTASKDLEIKNLKEEIEKLRKQVTESSHLEQQLEEANAVRQELDDAFRQIKAYEKQIKTLQQEREDLNKELVQASERLKNQSKELKDAHCQRKLAMQEFMEINERLTELHTQKQKLARHVRDKEEEVDLVMQKVESLRQELRRTERAKKELEVHTEALAAEASKDRKLREQSEHYSKQLENELEGLKQKQISYSPGVCSIEHQQEITKLKTDLEKKSIFYEEELSKREGIHANEIKNLKKELHDSEGQQLALNKEIMILKDKLEKTRRESQSEREEFESEFKQQYEREKVLLTEENKKLTSELDKLTTLYENLSIHNQQLEEEVKDLADKKESVAHWEAQITEIIQWVSDEKDARGYLQALASKMTEELEALRNSSLGTRATDMPWKMRRFAKLDMSARLELQSALDAEIRAKQAIQEELNKVKASNIITECKLKDSEKKNLELLSEIEQLIKDTEELRSEKGIEHQDSQHSFLAFLNTPTDALDQFETDPVENTYVWNPSVKFHIQSRSTSPSTSSEAEPVKTVDSTPLSVHTPTLRKKGCPGSTGFPPKRKTHQFFVKSFTTPTKCHQCTSLMVGLIRQGCSCEVCGFSCHITCVNKAPTTCPVPPEQTKGPLGIDPQKGIGTAYEGHVRIPKPAGVKKGWQRALAIVCDFKLFLYDIAEGKASQPSVVISQVIDMRDEEFSVSSVLASDVIHASRKDIPCIFRVTASQLSASNNKCSILMLADTENEKNKWVGVLSELHKILKKNKFRDRSVYVPKEAYDSTLPLIKTTQAAAIIDHERIALGNEEGLFVVHVTKDEIIRVGDNKKIHQIELIPNDQLVAVISGRNRHVRLFPMSALDGRETDFYKLSETKGCQTVTSGKVRHGALTCLCVAMKRQVLCYELFQSKTRHRKFKEIQVPYNVQWMAIFSEQLCVGFQSGFLRYPLNGEGNPYSMLHSNDHTLSFIAHQPMDAICAVEISSKEYLLCFNSIGIYTDCQGRRSRQQELMWPANPSSCCYNAPYLSVYSENAVDIFDVNSMEWIQTLPLKKVRPLNNEGSLNLLGLETIRLIYFKNKMAEGDELVVPETSDNSRKQMVRNINNKRRYSFRVPEEERMQQRREMLRDPEMRNKLISNPTNFNHIAHMGPGDGIQILKDLPMNPRPQESRTVFSGSVSIPSITKSRPEPGRSMSASSGLSARSSAQNGSALKREFSGGSYSAKRQPMPSPSEGSLSSGGMDQGSDAPARDFDGEDSDSPRHSTASNSSNLSSPPSPASPRKTKSLSLESTDRGSWDP

SEQ ID NO: 11511 - protein, 1644 aa, Artificial Sequence
  Synthetic polypeptide
QEICAKPFTSKVKQMRLHREDFEILKVIGRGAFGEVAVVKLKNADKVFAMKILNKWEMLKRAETACFREERDVLVNGDNKWITTLHYAFQDDNNLYLVMDYYVGGDLLTLLSKFEDRLPEDMARFYLAEMVIAIDSVHQLHYVHRDIKPDNILMDMNGHIRLADFGSCLKLMEDGTVQSSVAVGTPDYISPEILQAMEDGKGRYGPECDWWSLGVCMYEMLYGETPFYAESLVETYGKIMNHKERFQFPAQVTDVSENAKDLIRRLICSREHRLGQNGIEDFKKHPFFSGIDWDNIRNCEAPYIPEVSSPTDTSNFDVDDDCLKNSETMPPPTHTAFSGHHLPFVGFTYTSSCVLSDRSCLRVTAGPTSLDLDVNVQRTLDNNLATEAYERRIKRLEQEKLELSRKLQESTQTVQALQYSTVDGPLTASKDLEIKNLKEEIEKLRKQVTESSHLEQQLEEANAVRQELDDAFRQIKAYEKQIKTLQQEREDLNKELVQASERLKNQSKELKDAHCQRKLAMQEFMEINERLTELHTQKQKLARHVRDKEEEVDLVMQKVESLRQELRRTERAKKELEVHTEALAAEASKDRKLREQSEHYSKQLENELEGLKQKQISYSPGVCSIEHQQEITKLKTDLEKKSIFYEEELSKREGIHANEIKNLKKELHDSEGQQLALNKEIMILKDKLEKTRRESQSEREEFESEFKQQYEREKVLLTEENKKLTSELDKLTTLYENLSIHNQQLEEEVKDLADKKESVAHWEAQITEIIQWVSDEKDARGYLQALASKMTEELEALRNSSLGTRATDMPWKMRRFAKLDMSARLELQSALDAEIRAKQAIQEELNKVKASNIITECKLKDSEKKNLELLSEIEQLIKDTEELRSEKASKGRRTVDSTPLSVHTPTLRKKGCPGSTGFPPKRKTHQFFVKSFTTPTKCHQCTSLMVGLIRQGCSCEVCGFSCHITCVNKAPTTCPVPPEQTKGPLGIDPQKGIGTAYEGHVRIPKPAGVKKGWQRALAIVCDFKLFLYDIAEGKASQPSVVISQVIDMRDEEFSVSSVLASDVIHASRKDIPCIFRVTASQLSASNNKCSILMLADTENEKNKWVGVLSELHKILKKNKFRDRSVYVPKEAYDSTLPLIKTTQAAAIIDHERIALGNEEGLFVVHVTKDEIIRVGDNKKIHQIELIPNDQLVAVISGRNRHVRLFPMSALDGRETDFYKLSETKGCQTVTSGKVRHGALTCLCVAMKRQVLCYELFQSKTRHRKFKEIQVPYNVQWMAIFSEQLCVGFQSGFLRYPLNGEGNPYSMLHSNDHTLSFIAHQPMDAICAVEISSKEYLLCFNSIGIYTDCQGRRSRQQELMWPANPSSCCYNAPYLSVYSENAVDIFDVNSMEWIQTLPLKKVRPLNNEGSLNLLGLETIRLIYFKNKMAEGDELVVPETSDNSRKQMVRNINNKRRYSFRVPEEERMQQRREMLRDPEMRNKLISNPTNFNHIAHMGPGDGIQILKDLPMNPRPQESRTVFSGSVSIPSITKSRPEPGRSMSASSGLSARSSAQNGSALKREFSGGSYSAKRQPMPSPSEGSLSSGGMDQGSDAPARDFDGEDSDSPRHSTASNSSNLSSPPSPASPRKTKSLSLESTDRGSWDP

SEQ ID NO: 11512 - protein, 1677 aa, Artificial Sequence
  Synthetic polypeptide
QEICAKPFTSKVKQMRLHREDFEILKVIGRGAFGEVAVVKLKNADKVFAMKILNKWEMLKRAETACFREERDVLVNGDNKWITTLHYAFQDDNNLYLVMDYYVGGDLLTLLSKFEDRLPEDMARFYLAEMVIAIDSVHQLHYVHRDIKPDNILMDMNGHIRLADFGSCLKLMEDGTVQSSVAVGTPDYISPEILQAMEDGKGRYGPECDWWSLGVCMYEMLYGETPFYAESLVETYGKIMNHKERFQFPAQVTDVSENAKDLIRRLICSREHRLGQNGIEDFKKHPFFSGIDWDNIRNCEAPYIPEVSSPTDTSNFDVDDDCLKNSETMPPPTHTAFSGHHLPFVGFTYTSSCVLSDRSCLRVTAGPTSLDLDVNVQRTLDNNLATEAYERRIKRLEQEKLELSRKLQESTQTVQALQYSTVDGPLTASKDLEIKNLKEEIEKLRKQVTESSHLEQQLEEANAVRQELDDAFRQIKAYEKQIKTLQQEREDLNKELVQASERLKNQSKELKDAHCQRKLAMQEFMEINERLTELHTQKQKLARHVRDKEEEVDLVMQKVESLRQELRRTERAKKELEVHTEALAAEASKDRKLREQSEHYSKQLENELEGLKQKQISYSPGVCSIEHQQEITKLKTDLEKKSIFYEEELSKREGIHANEIKNLKKELHDSEGQQLALNKEIMILKDKLEKTRRESQSEREEFESEFKQQYEREKVLLTEENKKLTSELDKLTTLYENLSIHNQQLEEEVKDLADKKESVAHWEAQITEIIQWVSDEKDARGYLQALASKMTEELEALRNSSLGTRATDMPWKMRRFAKLDMSARLELQSALDAEIRAKQAIQEELNKVKASNIITECKLKDSEKKNLELLSEIEQLIKDTEELRSEKGIEHQDSQHSFLAFLNTPTDALDQFERSPSCTPASKGRRTVDSTPLSVHTPTLRKKGCPGSTGFPPKRKTHQFFVKSFTTPTKCHQCTSLMVGLIRQGCSCEVCGFSCHITCVNKAPTTCPVPPEQTKGPLGIDPQKGIGTAYEGHVRIPKPAGVKKGWQRALAIVCDFKLFLYDIAEGKASQPSVVISQVIDMRDEEFSVSSVLASDVIHASRKDIPCIFRVTASQLSASNNKCSILMLADTENEKNKWVGVLSELHKILKKNKFRDRSVYVPKEAYDSTLPLIKTTQAAAIIDHERIALGNEEGLFVVHVTKDEIIRVGDNKKIHQIELIPNDQLVAVISGRNRHVRLFPMSALDGRETDFYKLSETKGCQTVTSGKVRHGALTCLCVAMKRQVLCYELFQSKTRHRKFKEIQVPYNVQWMAIFSEQLCVGFQSGFLRYPLNGEGNPYSMLHSNDHTLSFIAHQPMDAICAVEISSKEYLLCFNSIGIYTDCQGRRSRQQELMWPANPSSCCYNAPYLSVYSENAVDIFDVNSMEWIQTLPLKKVRPLNNEGSLNLLGLETIRLIYFKNKMAEGDELVVPETSDNSRKQMVRNINNKRRYSFRVPEEERMQQRREMLRDPEMRNKLISNPTNFNHIAHMGPGDGIQILKDLPMNPRPQESRTVFSGSVSIPSITKSRPEPGRSMSASSGLSARSSAQNGSALKREFSGGSYSAKRQPMPSPSEGSLSSGGMDQGSDAPARDFDGEDSDSPRHSTASNSSNLSSPPSPASPRKTKSLSLESTDRGSWDP

SEQ ID NO: 11513 - protein, 12 aa, Artificial Sequence
  Synthetic polypeptide
AEERGFSFPSEC

SEQ ID NO: 11514 - protein, 54 aa, Artificial Sequence
  Synthetic polypeptide
NKLTRHGGRCLLSQLLKRLKQEDGLSPGGQSCSELRKEGFHSLLNVRREGIFHP

SEQ ID NO: 11515 - protein, 6228 aa, Artificial Sequence
  Synthetic polypeptide
GAGEGGARPHGLGGHGGGQGADGLGLRGNLLRKLPRKTAVRVGDTAMFCVELAVPVGPVHWLRNQEEVVAGGRVAISAEGTRHTLTISQCCLEDVGQVAFMAGDCQTSTQFCVSAPRKPPLQPPVDPVVKARMESSVILSWSPPPHGERPVTIDGYLVEKKKLGTYTWIRCHEAEWVATPELTVADVAEEGNFQFRVSALNSFGQSPYLEFPGTVHLAPKLAVRTPLKAVQAVEGGEVTFSVDLTVASAGEWFLDGQALKASSVYEIHCDRTRHTLTIREVPASLHGAQLKFVANGIESSIRMEVRAAPGLTANKPPAAAAREVLARLHEEAQLLAELSDQAAAVTWLKDGRTLSPGPKYEVQASAGRRVLLVRDVARDDAGLYECVSRGGRIAYQLSVQGLARFLHKDMAGSCVDAVAGGPAQFECETSEAHVHVHWYKDGMELGHSGERFLQEDVGTRHRLVAATVTRQDEGTYSCRVGEDSVDFRLRVSEPKVVFAKEQLARRKLQAEAGASATLSCEVAQAQTEVTWYKDGKKLSSSSKVCMEATGCTRRLVVQQAGQADAGEYSCEAGGQRLSFHLDVKEPKVVFAKDQVAHSEVQAEAGASATLSCEVAQAQTEVMWYKDGKKLSSSLKVHVEAKGCRRRLVVQQAGKTDAGDYSCEARGQRVSFRLHITEPKMMFAKEQSVHNEVQAEAGASAMLSCEVAQAQTEVTWYKDGKKLSSSSKVGMEVKGCTRRLVLPQAGKADAGEYSCEAGGQRVSFHLHITEPKGVFAKEQSVHNEVQAEAGTTAMLSCEVAQPQTEVTWYKDGKKLSSSSKVRMEVKGCTRRLVVQQVGKADAGEYSCEAGGQRVSFQLHITEPKAVFAKEQLVHNEVRTEAGASATLSCEVAQAQTEVTWYKDGKKLSSSSKVRIEAAGCMRQLVVQQAGQADAGEYTCEAGGQRLSFHLDVSEPKAVFAKEQLAHRKVQAEAGAIATLSCEVAQAQTEVTWYKDGKKLSSSSKVRMEAVGCTRRLVVQQACQADTGEYSCEAGGQRLSFSLDVAEPKVVFAKEQPVHREVQAQAGASTTLSCEVAQAQTEVMWYKDGKKLSFSSKVRMEAVGCTRRLVVQQAGQAVAGEYSCEAGSQRLSFHLHVAEPKAVFAKEQPASREVQAEAGTSATLSCEVAQAQTEVTWYKDGKKLSSSSKVRMEAVGCTRRLVVQEAGQADAGEYSCKAGDQRLSFHLHVAEPKVVFAKEQPAHREVQAEAGASATLSCEVAQAQTEVTWYKDGKKLSSSSKVRVEAVGCTRRLVVQQAGQAEAGEYSCEAGGQQLSFRLQVAELEPQISERPCRREPLVVKEHEDIILTATLATPSAATVTWLKDGVEIRRSKRHETASQGDTHTLTVHGAQVLDSAIYSCRVGAEGQDFPVQVEEVAAKFCRLLEPVCGELGGTVTLACELSPACAEVVWRCGNTQLRVGKRFQMVAEGPVRSLTVLGLRAEDAGEYVCESRDDHTSAQLTVSVPRVVKFMSGLSTVVAEEGGEATFQCVVSPSDVAVVWFRDGALLQPSEKFAISQSGASHSLTISDLVLEDAGQITVEAEGASSSAALRVREAPVLFKKKLEPQTVEERSSVTLEVELTRPWPELRWTRNATALAPGKNVEIHAEGARHRLVLHNVGFADRGFFGCETPDDKTQAKLTVEMRQVRLVRGLQAVEAREQGTATMEVQLSHADVDGSWTRDGLRFQQGPTCHLAVRGPMHTLTLSGLRPEDSGLMVFKAEGVHTSARLVVTELPVSFSRPLQDVVTTEKEKVTLECELSRPNVDVRWLKDGVELRAGKTMAIAAQGACRSLTIYRCEFADQGVYVCDAHDAQSSASVKVQGRTYTLIYRRVLAEDAGEIQFVAENAESRAQLRVKELPVTLVRPLRDKIAMEKHRGVLECQVSRASAQVRWFKGSQELQPGPKYELVSDGLYRKLIISDVHAEDEDTYTCDAGDVKTSAQFFVEEQSITIVRGLQDVTVMEPAPAWFECETSIPSVRPPKWLLGKTVLQAGGNVGLEQEGTVHRLMLRRTCSTMTGPVHFTVGKSRSSARLVVSDIPVVLTRPLEPKTGRELQSVVLSCDFRPAPKAVQWYKDDTPLSPSEKFKMSLEGQMAELRILRLMPADAGVYRCQAGSAHSSTEVTVEAREVTVTGPLQDAEATEEGWASFSCELSHEDEEVEWSLNGMPLYNDSFHEISHKGRRHTLVLKSIQRADAGIVRASSLKVSTSARLEVRVKPVVFLKALDDLSAEERGTLALQCEVSDPEAHVVWRKDGVQLGPSDKYDFLHTAGTRGLVVHDVSPEDAGLYTCHVGSEETRARVRVHDLHVGITKRLKTMEVLEGESCSFECVLSHESASDPAMWTVGGKTVGSSSRFQATRQGRKYILVVREAAPSDAGEVVFSVRGLTSKASLIVRERPAAIIKPLEDQWVAPGEDVELRCELSRAGTPVHWLKDRKAIRKSQKYDVVCEGTMAMLVIRGASLKDAGEYTCEVEASKSTASLHVEEKANCFTEELTNLQVEEKGTAVFTCKTEHPAATVTWRKGLLELRASGKHQPSQEGLTLRLTISALEKADSDTYTCDIGQAQSRAQLLVQGRRVHIIEDLEDVDVQEGSSATFRCRISPANYEPVHWFLDKTPLHANELNEIDAQPGGYHVLTLRQLALKDSGTIYFEAGDQRASAALRVTEKPSVFSRELTDATITEGEDLTLVCETSTCDIPVCWTKDGKTLRGSARCQLSHEGHRAQLLITGATLQDSGRYKCEAGGACSSSIVRVHARPVRFQEALKDLEVLEGGAATLRCVLSSVAAPVKWCYGNNVLRPGDKYSLRQEGAMLELVVRNLRPQDSGRYSCSFGDQTTSATLTVTALPAQFIGKLRNKEATEGATATLRCELSKAAPVEWRKGSETLRDGDRYCLRQDGAMCELQIRGLAMVDAAEYSCVCGEERTSASLTIRPMPAHFIGRLRHQESIEGATATLRCELSKAAPVEWRKGRESLRDGDRHSLRQDGAVCELQICGLAVADAGEYSCVCGEERTSATLTVKALPAKFTEGLRNEEAVEGATAMLWCELSKVAPVEWRKGPENLRDGDRYILRQEGTRCELQICGLAMADAGEYLCVCGQERTSATLTIRALPARFIEDVKNQEAREGATAVLQCELNSAAPVEWRKGSETLRDGDRYSLRQDGTKCELQIRGLAMADTGEYSCVCGQERTSAMLTVRALPIKFTEGLRNEEATEGATAVLRCELSKMAPVEWWKGHETLRDGDRHSLRQDGARCELQIRGLVAEDAGEYLCMCGKERTSAMLTVRAMPSKFIEGLRNEEATEGDTATLWCELSKAAPVEWRKGHETLRDGDRHSLRQDGSRCELQIRGLAVVDAGEYSCVCGQERTSATLTVRALPARFIEDVKNQEAREGATAVLQCELSKAAPVEWRKGSETLRGGDRYSLRQDGTRCELQIHGLSVADTGEYSCVCGQERTSATLTVRAPQPVFREPLQSLQAEEGSTATLQCELSEPTATVVWSKGGLQLQANGRREPRLQGCTAELVLQDLQREDTGEYTCTCGSQATSATLTVTAAPVRFLRELQHQEVDEGGTAHLCCELSRAGASVEWRKGSLQLFPCAKYQMVQDGAAAELLVRGVEQEDAGDYTCDTGHTQSMASLSVRVPRPKFKTRLQSLEQETGDIARLCCQLSDAESGAVVQWLKEGVELHAGPKYEMRSQGATRELLIHQLEAKDTGEYACVTGGQKTAASLRVTEPEVTIVRGLVDAEVTADEDVEFSCEVSRAGATGVQWCLQGLPLQSNEVTEVAVRDGRIHTLRLKGVTPEDAGTVSFHLGNHASSAQLTVRAPEVTILEPLQDVQLSEGQDASFQCRLSRASGQEARWALGGVPLQANEMNDITVEQGTLHLLTLHKVTLEDAGTVSFHVGTCSSEAQLKVTAKNTVVRGLENVEALEGGEALFECQLSQPEVAAHTWLLDDEPVHTSENAEVVFFENGLRHLLLLKNLRPQDSCRVTFLAGDMVTSAFLTVRGWRLEILEPLKNAAVRAGAQACFTCTLSEAVPVGEASWYINGAAVQPDDSDWTVTADGSHHALLLRSAQPHHAGEVTFACRDAVASARLTVLGLPDPPEDAEVVARSSHTVTLSWAAPMSDGGGGLCGYRVEVKEGATGQWRLCHELVPGPECVVDGLAPGETYRFRVAAVGPVGAGEPVHLPQTVRLAEPPKPVPPQPSAPESRQVAAGEDVSLELEVVAEAGEVIWHKGMERIQPGGRFEVVSQGRQQMLVIKGFTAEDQGEYHCGLAQGSICPAAATFQVALSPASVDEAPQPSLPPEAAQEGDLHLLWEALARKRRMSREPTLDSISELPEEDGRSQRLPQEAEEVAPDLSEGYSTADELARTGDADLSHTSSDDESRAGTPSLVTYLKKAGRPGTSPLASKVGAPAAPSVKPQQQQEPLAAVRPPLGDLSTKDLGDPSMDKAAVKIQAAFKGYKVRKEMKQQEGPMFSHTFGDTEAQVGDALRLECVVASKADVRARWLKDGVELTDGRHHHIDQLGDGTCSLLITGLDRADAGCYTCQVSNKFGQVTHSACVVVSGSESEAESSSGGELDDAFRRAARRLHRLFRTKSPAEVSDEELFLSADEGPAEPEEPADWQTYREDEHFICIRFEALTEARQAVTRFQEMFATLGIGVEIKLVEQGPRRVEMCISKETPAPVVPPEPLPSLLTSDAAPVFLTELQNQEVQDGYPVSFDCVVTGQPMPSVRWFKDGKLLEEDDHYMINEDQQGGHQLIITAVVPADMGVYRCLAENSMGVSSTKAELRVDLTSTDYDTAADATESSSYFSAQGYLSSREQEGTESTTDEGQLPQVVEELRDLQVAPGTRLAKFQLKVKGYPAPRLYWFKDGQPLTASAHIRMTDKKILHTLEIISVTREDSGQYAAYISNAMGAAYSSARLLVRGPDEPEEKPASDVHEQLVPPRMLERFTPKKVKKGSSITFSVKVEGRPVPTVHWLREEAERGVLWIGPDTPGYTVASSAQQHSLVLLDVGRQHQGTYTCIASNAAGQALCSASLHVSGLPKVEEQEKVKEALISTFLQGTTQAISAQGLETASFADLGGQRKEEPLAAKEALGHLSLAEVGTEEFLQKLTSQITEMVSAKITQAKLQVPGGDSDEDSKTPSASPRHGRSRPSSSIQESSSESEDGDARGEIFDIYVVTADYLPLGAEQDAITLREGQYVEVLDAAHPLRWLVRTKPTKSSPSRQGWVSPAYLDRRLKLSPEWGAAEAPEFPGEAVSEDEYKARLSSVIQELLSSEQAFVEELQFLQSHHLQHLERCPHVPIAVAGQKAVIFRNVRDIGRFHSSFLQELQQCDTDDDVAMCFIKNQAAFEQYLEFLVGRVQAESVVVSTAIQEFYKKYAEEALLAGDPSQPPPPPLQHYLEQPVERVQRYQALLKELIRNKARNRQNCALLEQAYAVVSALPQRAENKLHVSLMENYPGTLQALGEPIRQGHFIVWEGAPGARMPWKGHNRHVFLFRNHLVICKPRRDSRTDTVSYVFRNMMKLSSIDLNDQVEGDDRAFEVWQEREDSVRKYLLQARTAIIKSSWVKEICGIQQRLALPVWRPPDFEEELADCTAELGETVKLACRVTGTPKPVISWYKDGKAVQVDPHHILIEDPDGSCALILDSLTGVDSGQYMCFAASAAGNCSTLGKILVQVPPRFVNKVRASPFVEGEDAQFTCTIEGAPYPQIRWYKDGALLTTGNKFQTLSEPRSGLLVLVIRAASKEDLGLYECELVNRLGSARASAELRIQSPMLQAQEQCHREQLVAAVEVTEQETKVPKKTVIIEETITTVVKSPRGQRRSPSKSPSRSPSRCSASPLRPGLLAPDLLYLPGAGQPRRPEAEPGQKPVVPTLYVTEAEAHSPALPGLSGPQPKWVEVEETIEVRVKKMGPQGVSPTTEVPRSSSGHLFTLPGATPGGDPNSNNSNNKLLAQEAWAQGTAMVGVREPLVFRVDARGSVDWAASGMGSLEEEGTMEEAGEEEGEDGDAFVTEESQDTHSLGDRDPKILTHNGRMLTLADLEDYVPGEGETFHCGGPGPGAPDDPPCEVSVIQREIGEPTVGQPVLLSVGHALGPRGPLGLFRPEPRGASPPGPQVRSLEGTSFLLREAPARPVGSAPWTQSFCTRIRRSADSGQSSFTTELSTQTVNFGTVGETVTLHICPDRDGDEAAQP

SEQ ID NO: 11516 - protein, 84 aa, Artificial Sequence
  Synthetic polypeptide
GRGRGEPGRTGWAGTGAGRVQTDWACEETSSESSLGRRRCAWATRLCFAWSWRSRWAPSTGCGTRRKWWRGAAWPSPRRARATH

SEQ ID NO: 11517 - protein, 173 aa, Artificial Sequence
  Synthetic polypeptide
GGGGGSQAARAGRARGRAGCRRTGLARKPPPKAPSEDGGARGRHGYVLRGAGGPGGPRPLAAEPGGSGGGGPRGHLRGGHAPHTNHLPVLPGGCGPGGLYGWRLPDVHPVLRVGPQEASPATPCGSCGKGQDGEFRDSQLVPTTPWGTPCHYRRLPGREEEAWHLHLDQVPRG

SEQ ID NO: 11518 - protein, 8531 aa, Artificial Sequence
  Synthetic polypeptide
GAGEGGARPHGLGGHGGGQGADGLGLRGNLLRKLPRKTAVRVGDTAMFCVELAVPVGPVHWLRNQEEVVAGGRVAISAEGTRHTLTISQCCLEDVGQVAFMAGDCQTSTQFCVSAPRKPPLQPPVDPVVKARMESSVILSWSPPPHGERPVTIDGYLVEKKKLGTYTWIRCHEAEWVATPELTVADVAEEGNFQFRVSALNSFGQSPYLEFPGTVHLAPKLAVRTPLKAVQAVEGGEVTFSVDLTVASAGEWFLDGQALKASSVYEIHCDRTRHTLTIREVPASLHGAQLKFVANGIESSIRMEVRAAPGLTANKPPAAAAREVLARLHEEAQLLAELSDQAAAVTWLKDGRTLSPGPKYEVQASAGRRVLLVRDVARDDAGLYECVSRGGRIAYQLSVQGLARFLHKDMAGSCVDAVAGGPAQFECETSEAHVHVHWYKDGMELGHSGERFLQEDVGTRHRLVAATVTRQDEGTYSCRVGEDSVDFRLRVSEPKAVFAKEQPACREVQAEVGASATLSCEVAQDQMEVTWYKDGKKLSSSSKVHVEAVGCMRRLVVQQVGQADSGEYSCEARGQRVSFRLDVAEPKVVFAKEQLARRKLQAEAGASATLSCEVAQAQTEVTWYKDGKKLSSSSKVCMEATGCTRRLVVQQAGQADAGEYSCEAGGQRLSFHLDVKEPKVVFAKDQVAHSEVQAEAGASATLSCEVAQAQTEVMWYKDGKKLSSSLKVHVEAKGCRRRLVVQQAGKTDAGDYSCEARGQRVSFRLHITEPKMMFAKEQSVHNEVQAEAGASAMLSCEVAQAQTEVTWYKDGKKLSSSSKVGMEVKGCTRRLVLPQAGKADAGEYSCEAGGQRVSFHLHITEPKGVFAKEQSVHNEVQAEAGTTAMLSCEVAQPQTEVTWYKDGKKLSSSSKVRMEVKGCTRRLVVQQVGKADAGEYSCEAGGQRVSFQLHITEPKAVFAKEQLVHNEVRTEAGASATLSCEVAQAQTEVTWYKDGKKLSSSSKVRIEAAGCMRQLVVQQAGQADAGEYTCEAGGQRLSFHLDVSEPKAVFAKEQLAHRKVQAEAGAIATLSCEVAQAQTEVTWYKDGKKLSSSSKVRMEAVGCTRRLVVQQACQADTGEYSCEAGGQRLSFSLDVAEPKVVFAKEQPVHREVQAQAGASTTLSCEVAQAQTEVMWYKDGKKLSFSSKVRMEAVGCTRRLVVQQAGQAVAGEYSCEAGSQRLSFHLHVAEPKAVFAKEQPAHREVQAEAGASATLSCEVAQAQTEVTWYKDGKKLSSSLKVHVEAAGCTRRLVVQQAGQADTGEYSCEAGGQQLSFRLQVAEPKAVFAKEQPASREVQAEAGTSATLSCEVAQAQTEVTWYKDGKKLSSSSKVRMEAVGCTRRLVVQEAGQADAGEYSCKAGDQRLSFHLHVAEPKVVFAKEQPAHREVQAEAGASATLSCEVAQAQTEVTWYKDGKKLSSSSKVRVEAVGCTRRLVVQQAGQAEAGEYSCEAGGQQLSFRLQVAEPKAVFAKEQVVFAKDQPVHREVQAEAGTSTMLSCEVAQAQTEVMWYKDGKKLSSSSKMRVEAVGCTRRLVVQEAGQADAGEYSCEAGGQRLSFHLHVAEPKVVFAKEQPACREVQAEAGASATLSCEVAQGQMEVTWYKDGKKLSSSSKVHMEASGYTRRLVVQQAGQADAGEYSCEAGGQRLSFRLHVAELEPQISERPCRREPLVVKEHEDIILTATLATPSAATVTWLKDGVEIRRSKRHETASQGDTHTLTVHGAQVLDSAIYSCRVGAEGQDFPVQVEEVAAKFCRLLEPVCGELGGTVTLACELSPACAEVVWRCGNTQLRVGKRFQMVAEGPVRSLTVLGLRAEDAGEYVCESRDDHTSAQLTVSVPRVVKFMSGLSTVVAEEGGEATFQCVVSPSDVAVVWFRDGALLQPSEKFAISQSGASHSLTISDLVLEDAGQITVEAEGASSSAALRVREAPVLFKKKLEPQTVEERSSVTLEVELTRPWPELRWTRNATALAPGKNVEIHAEGARHRLVLHNVGFADRGFFGCETPDDKTQAKLTVEMRQVRLVRGLQAVEAREQGTATMEVQLSHADVDGSWTRDGLRFQQGPTCHLAVRGPMHTLTLSGLRPEDSGLMVFKAEGVHTSARLVVTELPVSFSRPLQDVVTTEKEKVTLECELSRPNVDVRWLKDGVELRAGKTMAIAAQGACRSLTIYRCEFADQGVYVCDAHDAQSSASVKVQGRNIQIVRPLEDVEVMEKDGATFSCEVSHDEVPGQWFWEGSKLRPTDNVRIRQEGRTYTLIYRRVLAEDAGEIQFVAENAESRAQLRVKELPVTLVRPLRDKIAMEKHRGVLECQVSRASAQVRWFKGSQELQPGPKYELVSDGLYRKLIISDVHAEDEDTYTCDAGDVKTSAQFFVEEQSITIVRGLQDVTVMEPAPAWFECETSIPSVRPPKWLLGKTVLQAGGNVGLEQEGTVHRLMLRRTCSTMTGPVHFTVGKSRSSARLVVSDIPVVLTRPLEPKTGRELQSVVLSCDFRPAPKAVQWYKDDTPLSPSEKFKMSLEGQMAELRILRLMPADAGVYRCQAGSAHSSTEVTVEAREVTVTGPLQDAEATEEGWASFSCELSHEDEEVEWSLNGMPLYNDSFHEISHKGRRHTLVLKSIQRADAGIVRASSLKVSTSARLEVRVKPVVFLKALDDLSAEERGTLALQCEVSDPEAHVVWRKDGVQLGPSDKYDFLHTAGTRGLVVHDVSPEDAGLYTCHVGSEETRARVRVHDLHVGITKRLKTMEVLEGESCSFECVLSHESASDPAMWTVGGKTVGSSSRFQATRQGRKYILVVREAAPSDAGEVVFSVRGLTSKASLIVRERPAAIIKPLEDQWVAPGEDVELRCELSRAGTPVHWLKDRKAIRKSQKYDVVCEGTMAMLVIRGASLKDAGEYTCEVEASKSTASLHVEEKANCFTEELTNLQVEEKGTAVFTCKTEHPAATVTWRKGLLELRASGKHQPSQEGLTLRLTISALEKADSDTYTCDIGQAQSRAQLLVQGRRVHIIEDLEDVDVQEGSSATFRCRISPANYEPVHWFLDKTPLHANELNEIDAQPGGYHVLTLRQLALKDSGTIYFEAGDQRASAALRVTEKPSVFSRELTDATITEGEDLTLVCETSTCDIPVCWTKDGKTLRGSARCQLSHEGHRAQLLITGATLQDSGRYKCEAGGACSSSIVRVHARPVRFQEALKDLEVLEGGAATLRCVLSSVAAPVKWCYGNNVLRPGDKYSLRQEGAMLELVVRNLRPQDSGRYSCSFGDQTTSATLTVTALPAQFIGKLRNKEATEGATATLRCELSKAAPVEWRKGSETLRDGDRYCLRQDGAMCELQIRGLAMVDAAEYSCVCGEERTSASLTIRPMPAHFIGRLRHQESIEGATATLRCELSKAAPVEWRKGRESLRDGDRHSLRQDGAVCELQICGLAVADAGEYSCVCGEERTSATLTVKALPAKFTEGLRNEEAVEGATAMLWCELSKVAPVEWRKGPENLRDGDRYILRQEGTRCELQICGLAMADAGEYLCVCGQERTSATLTIRALPARFIEDVKNQEAREGATAVLQCELNSAAPVEWRKGSETLRDGDRYSLRQDGTKCELQIRGLAMADTGEYSCVCGQERTSAMLTVRALPIKFTEGLRNEEATEGATAVLRCELSKMAPVEWWKGHETLRDGDRHSLRQDGARCELQIRGLVAEDAGEYLCMCGKERTSAMLTVRAMPSKFIEGLRNEEATEGDTATLWCELSKAAPVEWRKGHETLRDGDRHSLRQDGSRCELQIRGLAVVDAGEYSCVCGQERTSATLTVRALPARFIEDVKNQEAREGATAVLQCELSKAAPVEWRKGSETLRGGDRYSLRQDGTRCELQIHGLSVADTGEYSCVCGQERTSATLTVRALPARFTQDLKTKEASEGATATLQCELSKVAPVEWKKGPETLRDGGRYSLKQDGTRCELQIHDLSVADAGEYSCMCGQERTSATLTVRALPARFTEGLRNEEAMEGATATLQCELSKAAPVEWRKGLEALRDGDKYSLRQDGAVCELQIHGLAMADNGVYSCVCGQERTSATLTVRALPARFIEDMRNQKATEGATVTLQCKLRKAAPVEWRKGPNTLKDGDRYSLKQDGTSCELQIRGLVIADAGEYSCICEQERTSATLTVRALPARFIEDVRNHEATEGATAVLQCELSKAAPVEWRKGSETLRDGDRYSLRQDGTRCELQIRGLAVEDTGEYLCVCGQERTSATLTVRALPARFIDNMTNQEAREGATATLHCELSKVAPVEWRKGPETLRDGDRHSLRQDGTRCELQIRGLSVADAGEYSCVCGQERTSATLTIRALPAKFTKGLRNEEATEGATAMLQCELSKVAPVEWRKGPETLRDGDRYNLRQDGTRCELQIHGLSVADTGEYSCVCGQEKTSATLTVKAPQPVFREPLQSLQAEEGSTATLQCELSEPTATVVWSKGGLQLQANGRREPRLQGCTAELVLQDLQREDTGEYTCTCGSQATSATLTVTAAPVRFLRELQHQEVDEGGTAHLCCELSRAGASVEWRKGSLQLFPCAKYQMVQDGAAAELLVRGVEQEDAGDYTCDTGHTQSMASLSVRVPRPKFKTRLQSLEQETGDIARLCCQLSDAESGAVVQWLKEGVELHAGPKYEMRSQGATRELLIHQLEAKDTGEYACVTGGQKTAASLRVTEPEVTIVRGLVDAEVTADEDVEFSCEVSRAGATGVQWCLQGLPLQSNEVTEVAVRDGRIHTLRLKGVTPEDAGTVSFHLGNHASSAQLTVRAPEVTILEPLQDVQLSEGQDASFQCRLSRASGQEARWALGGVPLQANEMNDITVEQGTLHLLTLHKVTLEDAGTVSFHVGTCSSEAQLKVTAKNTVVRGLENVEALEGGEALFECQLSQPEVAAHTWLLDDEPVHTSENAEVVFFENGLRHLLLLKNLRPQDSCRVTFLAGDMVTSAFLTVRGWRLEILEPLKNAAVRAGAQACFTCTLSEAVPVGEASWYINGAAVQPDDSDWTVTADGSHHALLLRSAQPHHAGEVTFACRDAVASARLTVLGLPDPPEDAEVVARSSHTVTLSWAAPMSDGGGGLCGYRVEVKEGATGQWRLCHELVPGPECVVDGLAPGETYRFRVAAVGPVGAGEPVHLPQTVRLAEPPKPVPPQPSAPESRQVAAGEDVSLELEVVAEAGEVIWHKGMERIQPGGRFEVVSQGRQQMLVIKGFTAEDQGEYHCGLAQGSICPAAATFQVALSPASVDEAPQPSLPPEAAQEGDLHLLWEALARKRRMSREPTLDSISELPEEDGRSQRLPQEAEEVAPDLSEGYSTADELARTGDADLSHTSSDDESRAGTPSLVTYLKKAGRPGTSPLASKVGAPAAPSVKPQQQQEPLAAVRPPLGDLSTKDLGDPSMDKAAVKIQAAFKGYKVRKEMKQQEGPMFSHTFGDTEAQVGDALRLECVVASKADVRARWLKDGVELTDGRHHHIDQLGDGTCSLLITGLDRADAGCYTCQVSNKFGQVTHSACVVVSGSESEAESSSGGELDDAFRRAARRLHRLFRTKSPAEVSDEELFLSADEGPAEPEEPADWQTYREDEHFICIRFEALTEARQAVTRFQEMFATLGIGVEIKLVEQGPRRVEMCISKETPAPVVPPEPLPSLLTSDAAPVFLTELQNQEVQDGYPVSFDCVVTGQPMPSVRWFKDGKLLEEDDHYMINEDQQGGHQLIITAVVPADMGVYRCLAENSMGVSSTKAELRVDLTSTDYDTAADATESSSYFSAQGYLSSREQEGTESTTDEGQLPQVVEELRDLQVAPGTRLAKFQLKVKGYPAPRLYWFKDGQPLTASAHIRMTDKKILHTLEIISVTREDSGQYAAYISNAMGAAYSSARLLVRGPDEPEEKPASDVHEQLVPPRMLERFTPKKVKKGSSITFSVKVEGRPVPTVHWLREEAERGVLWIGPDTPGYTVASSAQQHSLVLLDVGRQHQGTYTCIASNAAGQALCSASLHVSGLPKVEEQEKVKEALISTFLQGTTQAISAQGLETASFADLGGQRKEEPLAAKEALGHLSLAEVGTEEFLQKLTSQITEMVSAKITQAKLQVPGGDSDEDSKTPSASPRHGRSRPSSSIQESSSESEDGDARGEIFDIYVVTADYLPLGAEQDAITLREGQYVEVLDAAHPLRWLVRTKPTKSSPSRQGWVSPAYLDRRLKLSPEWGAAEAPEFPGEAVSEDEYKARLSSVIQELLSSEQAFVEELQFLQSHHLQHLERCPHVPIAVAGQKAVIFRNVRDIGRFHSSFLQELQQCDTDDDVAMCFIKNQAAFEQYLEFLVGRVQAESVVVSTAIQEFYKKYAEEALLAGDPSQPPPPPLQHYLEQPVERVQRYQALLKELIRNKARNRQNCALLEQAYAVVSALPQRAENKLHVSLMENYPGTLQALGEPIRQGHFIVWEGAPGARMPWKGHNRHVFLFRNHLVICKPRRDSRTDTVSYVFRNMMKLSSIDLNDQVEGDDRAFEVWQEREDSVRKYLLQARTAIIKSSWVKEICGIQQRLALPVWRPPDFEEELADCTAELGETVKLACRVTGTPKPVISWYKDGKAVQVDPHHILIEDPDGSCALILDSLTGVDSGQYMCFAASAAGNCSTLGKILVQVPPRFVNKVRASPFVEGEDAQFTCTIEGAPYPQIRWYKDGALLTTGNKFQTLSEPRSGLLVLVIRAASKEDLGLYECELVNRLGSARASAELRIQSPMLQAQEQCHREQLVAAVEDTTLERADQEVTSVLKRLLGPKAPGPSTGDLTGPGPCPRGAPALQETGSQPPVTGTSEAPAVPPRVPQPLLHEGPEQEPEAIARAQEWTVPIRMEGAAWPGAGTGELLWDVHSHVVRETTQRTYTYQAIDTHTARPPSMQVTIEDVQAQTGGTAQFEAIIEGDPQPSVTWYKDSVQLVDSTRLSQQQEGTTYSLVLRHVASKDAGVYTCLAQNTGGQVLCKAELLVLGGDNEPDSEKQSHRRKLHSFYEVKEEIGRGVFGFVKRVQHKGNKILCAAKFIPLRSRTRAQAYRERDILAALSHPLVTGLLDQFETRKTLILILELCSSEELLDRLYRKGVVTEAEVKVYIQQLVEGLHYLHSHGVLHLDIKPSNILMVHPAREDIKICDFGFAQNITPAELQFSQYGSPEFVSPEIIQQNPVSEASDIWAMGVISYLSLTCSSPFAGESDRATLLNVLEGRVSWSSPMAAHLSEDAKDFIKATLQRAPQARPSAAQCLSHPWFLKSMPAEEAHFINTKQLKFLLARSRWQRSLMSYKSILVMRSIPELLRGPPDSPSLGVARHLCRDTGGSSSSSSSSDNELAPFARAKSLPPSPVTHSPLLHPRGFLRPSASLPEEAEASERSTEAPAPPASPEGAGPPAAQGCVPRHSVIRSLFYHQAGESPEHGALAPGSRRHPARRRHLLKGGYIAGALPGLREPLMEHRVLEEEAAREEQATLLAKAPSFETALRLPASGTHLAPGHSHSLEHDSPSTPRPSSEACGEAQRLPSAPSGGAPIRDMGHPQGSKQLPSTGGHPGTAQPERPSPDSPWGQPAPFCHPKQGSAPQEGCSPHPAVAPCPPGSFPPGSCKEAPLVPSSPFLGQPQAPPAPAKASPPLDSKMGPGDISLPGRPKPGPCSSPGSASQASSSQVSSLRVGSSQVGTEPGPSLDAEGWTQEAEDLSDSTPTLQRPQEQATMRKFSLGGRGGYAGVAGYGTFAFGGDAGGMLGQGPMWARIAWAVSQSEEEEQEEARAESQSEEQQEARAESPLPQVSARPVPEVGRAPTRSSPEPTPWEDIGQVSLVQIRDLSGDAEAADTISLDISEVDPAYLNLSDLYDIKYLPFEFMIFRKVPKSAQPEPPSPMAEEELAEFPEPTWPWPGELGPHAGLEITEESEDVDALLAEAAVGRKRKWSSPSRSLFHFPGRHLPLDEPAELGLRERVKASVEHISRILKGRPEGLEKEGPPRKKPGLASFRLSGLKSWDRAPTFLRELSDETVVLGQSVTLACQVSAQPAAQATWSKDGAPLESSSRVLISATLKNFQLLTILVVVAEDLGVYTCSVSNALGTVTTTGVLRKAERPSSSPCPDIGEVYADGVLLVWKPVESYGPVTYIVQCSLEGGSWTTLASDIFDCCYLTSKLSRGGTYTFRTACVSKAGMGPYSSPSEQVLLGGPSHLASEEESQGRSAQPLPSTKTFAFQTQIQRGRFSVVRQCWEKASGRALAAKIIPYHPKDKTAVLREYEALKGLRHPHLAQLHAAYLSPRHLVLILELCSGPELLPCLAERASYSESEVKDYLWQMLSATQYLHNQHILHLDLRSENMIITEYNLLKVVDLGNAQSLSQEKVLPSDKFKDYLETMELLEGQGAVPQTDIWAIGVTAFIMLSAEYPVSSEGARDLQRGLRKGLVRLSRCYAGLSGGAVAFLRSTLCAQPWGRPCASSCLQCPWLTEEGPACSRPAPVTFPTARLRVFVRNREKRRALLYKRHNLAQVR

SEQ ID NO: 11519 - protein, 7576 aa, Artificial Sequence
  Synthetic polypeptide
GAGEGGARPHGLGGHGGGQGADGLGLRGNLLRKLPRKTAVRVGDTAMFCVELAVPVGPVHWLRNQEEVVAGGRVAISAEGTRHTLTISQCCLEDVGQVAFMAGDCQTSTQFCVSAPRKPPLQPPVDPVVKARMESSVILSWSPPPHGERPVTIDGYLVEKKKLGTYTWIRCHEAEWVATPELTVADVAEEGNFQFRVSALNSFGQSPYLEFPGTVHLAPKLAVRTPLKAVQAVEGGEVTFSVDLTVASAGEWFLDGQALKASSVYEIHCDRTRHTLTIREVPASLHGAQLKFVANGIESSIRMEVRAAPGLTANKPPAAAAREVLARLHEEAQLLAELSDQAAAVTWLKDGRTLSPGPKYEVQASAGRRVLLVRDVARDDAGLYECVSRGGRIAYQLSVQGLARFLHKDMAGSCVDAVAGGPAQFECETSEAHVHVHWYKDGMELGHSGERFLQEDVGTRHRLVAATVTRQDEGTYSCRVGEDSVDFRLRVSEPKVVFAKEQLARRKLQAEAGASATLSCEVAQAQTEVTWYKDGKKLSSSSKVCMEATGCTRRLVVQQAGQADAGEYSCEAGGQRLSFHLDVKEPKVVFAKDQVAHSEVQAEAGASATLSCEVAQAQTEVMWYKDGKKLSSSLKVHVEAKGCRRRLVVQQAGKTDAGDYSCEARGQRVSFRLHITEPKMMFAKEQSVHNEVQAEAGASAMLSCEVAQAQTEVTWYKDGKKLSSSSKVGMEVKGCTRRLVLPQAGKADAGEYSCEAGGQRVSFHLHITEPKGVFAKEQSVHNEVQAEAGTTAMLSCEVAQPQTEVTWYKDGKKLSSSSKVRMEVKGCTRRLVVQQVGKADAGEYSCEAGGQRVSFQLHITEPKAVFAKEQLVHNEVRTEAGASATLSCEVAQAQTEVTWYKDGKKLSSSSKVRIEAAGCMRQLVVQQAGQADAGEYTCEAGGQRLSFHLDVSEPKAVFAKEQLAHRKVQAEAGAIATLSCEVAQAQTEVTWYKDGKKLSSSSKVRMEAVGCTRRLVVQQACQADTGEYSCEAGGQRLSFSLDVAEPKVVFAKEQPVHREVQAQAGASTTLSCEVAQAQTEVMWYKDGKKLSFSSKVRMEAVGCTRRLVVQQAGQAVAGEYSCEAGSQRLSFHLHVAEPKAVFAKEQPASREVQAEAGTSATLSCEVAQAQTEVTWYKDGKKLSSSSKVRMEAVGCTRRLVVQEAGQADAGEYSCKAGDQRLSFHLHVAEPKVVFAKEQPAHREVQAEAGASATLSCEVAQAQTEVTWYKDGKKLSSSSKVRVEAVGCTRRLVVQQAGQAEAGEYSCEAGGQQLSFRLQVAELEPQISERPCRREPLVVKEHEDIILTATLATPSAATVTWLKDGVEIRRSKRHETASQGDTHTLTVHGAQVLDSAIYSCRVGAEGQDFPVQVEEVAAKFCRLLEPVCGELGGTVTLACELSPACAEVVWRCGNTQLRVGKRFQMVAEGPVRSLTVLGLRAEDAGEYVCESRDDHTSAQLTVSVPRVVKFMSGLSTVVAEEGGEATFQCVVSPSDVAVVWFRDGALLQPSEKFAISQSGASHSLTISDLVLEDAGQITVEAEGASSSAALRVREAPVLFKKKLEPQTVEERSSVTLEVELTRPWPELRWTRNATALAPGKNVEIHAEGARHRLVLHNVGFADRGFFGCETPDDKTQAKLTVEMRQVRLVRGLQAVEAREQGTATMEVQLSHADVDGSWTRDGLRFQQGPTCHLAVRGPMHTLTLSGLRPEDSGLMVFKAEGVHTSARLVVTELPVSFSRPLQDVVTTEKEKVTLECELSRPNVDVRWLKDGVELRAGKTMAIAAQGACRSLTIYRCEFADQGVYVCDAHDAQSSASVKVQGRTYTLIYRRVLAEDAGEIQFVAENAESRAQLRVKELPVTLVRPLRDKIAMEKHRGVLECQVSRASAQVRWFKGSQELQPGPKYELVSDGLYRKLIISDVHAEDEDTYTCDAGDVKTSAQFFVEEQSITIVRGLQDVTVMEPAPAWFECETSIPSVRPPKWLLGKTVLQAGGNVGLEQEGTVHRLMLRRTCSTMTGPVHFTVGKSRSSARLVVSDIPVVLTRPLEPKTGRELQSVVLSCDFRPAPKAVQWYKDDTPLSPSEKFKMSLEGQMAELRILRLMPADAGVYRCQAGSAHSSTEVTVEAREVTVTGPLQDAEATEEGWASFSCELSHEDEEVEWSLNGMPLYNDSFHEISHKGRRHTLVLKSIQRADAGIVRASSLKVSTSARLEVRVKPVVFLKALDDLSAEERGTLALQCEVSDPEAHVVWRKDGVQLGPSDKYDFLHTAGTRGLVVHDVSPEDAGLYTCHVGSEETRARVRVHDLHVGITKRLKTMEVLEGESCSFECVLSHESASDPAMWTVGGKTVGSSSRFQATRQGRKYILVVREAAPSDAGEVVFSVRGLTSKASLIVRERPAAIIKPLEDQWVAPGEDVELRCELSRAGTPVHWLKDRKAIRKSQKYDVVCEGTMAMLVIRGASLKDAGEYTCEVEASKSTASLHVEEKANCFTEELTNLQVEEKGTAVFTCKTEHPAATVTWRKGLLELRASGKHQPSQEGLTLRLTISALEKADSDTYTCDIGQAQSRAQLLVQGRRVHIIEDLEDVDVQEGSSATFRCRISPANYEPVHWFLDKTPLHANELNEIDAQPGGYHVLTLRQLALKDSGTIYFEAGDQRASAALRVTEKPSVFSRELTDATITEGEDLTLVCETSTCDIPVCWTKDGKTLRGSARCQLSHEGHRAQLLITGATLQDSGRYKCEAGGACSSSIVRVHARPVRFQEALKDLEVLEGGAATLRCVLSSVAAPVKWCYGNNVLRPGDKYSLRQEGAMLELVVRNLRPQDSGRYSCSFGDQTTSATLTVTALPAQFIGKLRNKEATEGATATLRCELSKAAPVEWRKGSETLRDGDRYCLRQDGAMCELQIRGLAMVDAAEYSCVCGEERTSASLTIRPMPAHFIGRLRHQESIEGATATLRCELSKAAPVEWRKGRESLRDGDRHSLRQDGAVCELQICGLAVADAGEYSCVCGEERTSATLTVKALPAKFTEGLRNEEAVEGATAMLWCELSKVAPVEWRKGPENLRDGDRYILRQEGTRCELQICGLAMADAGEYLCVCGQERTSATLTIRALPARFIEDVKNQEAREGATAVLQCELNSAAPVEWRKGSETLRDGDRYSLRQDGTKCELQIRGLAMADTGEYSCVCGQERTSAMLTVRALPIKFTEGLRNEEATEGATAVLRCELSKMAPVEWWKGHETLRDGDRHSLRQDGARCELQIRGLVAEDAGEYLCMCGKERTSAMLTVRAMPSKFIEGLRNEEATEGDTATLWCELSKAAPVEWRKGHETLRDGDRHSLRQDGSRCELQIRGLAVVDAGEYSCVCGQERTSATLTVRALPARFIEDVKNQEAREGATAVLQCELSKAAPVEWRKGSETLRGGDRYSLRQDGTRCELQIHGLSVADTGEYSCVCGQERTSATLTVRAPQPVFREPLQSLQAEEGSTATLQCELSEPTATVVWSKGGLQLQANGRREPRLQGCTAELVLQDLQREDTGEYTCTCGSQATSATLTVTAAPVRFLRELQHQEVDEGGTAHLCCELSRAGASVEWRKGSLQLFPCAKYQMVQDGAAAELLVRGVEQEDAGDYTCDTGHTQSMASLSVRVPRPKFKTRLQSLEQETGDIARLCCQLSDAESGAVVQWLKEGVELHAGPKYEMRSQGATRELLIHQLEAKDTGEYACVTGGQKTAASLRVTEPEVTIVRGLVDAEVTADEDVEFSCEVSRAGATGVQWCLQGLPLQSNEVTEVAVRDGRIHTLRLKGVTPEDAGTVSFHLGNHASSAQLTVRAPEVTILEPLQDVQLSEGQDASFQCRLSRASGQEARWALGGVPLQANEMNDITVEQGTLHLLTLHKVTLEDAGTVSFHVGTCSSEAQLKVTAKNTVVRGLENVEALEGGEALFECQLSQPEVAAHTWLLDDEPVHTSENAEVVFFENGLRHLLLLKNLRPQDSCRVTFLAGDMVTSAFLTVRGWRLEILEPLKNAAVRAGAQACFTCTLSEAVPVGEASWYINGAAVQPDDSDWTVTADGSHHALLLRSAQPHHAGEVTFACRDAVASARLTVLGLPDPPEDAEVVARSSHTVTLSWAAPMSDGGGGLCGYRVEVKEGATGQWRLCHELVPGPECVVDGLAPGETYRFRVAAVGPVGAGEPVHLPQTVRLAEPPKPVPPQPSAPESRQVAAGEDVSLELEVVAEAGEVIWHKGMERIQPGGRFEVVSQGRQQMLVIKGFTAEDQGEYHCGLAQGSICPAAATFQVALSPASVDEAPQPSLPPEAAQEGDLHLLWEALARKRRMSREPTLDSISELPEEDGRSQRLPQEAEEVAPDLSEGYSTADELARTGDADLSHTSSDDESRAGTPSLVTYLKKAGRPGTSPLASKVGAPAAPSVKPQQQQEPLAAVRPPLGDLSTKDLGDPSMDKAAVKIQAAFKGYKVRKEMKQQEGPMFSHTFGDTEAQVGDALRLECVVASKADVRARWLKDGVELTDGRHHHIDQLGDGTCSLLITGLDRADAGCYTCQVSNKFGQVTHSACVVVSGSESEAESSSGGELDDAFRRAARRLHRLFRTKSPAEVSDEELFLSADEGPAEPEEPADWQTYREDEHFICIRFEALTEARQAVTRFQEMFATLGIGVEIKLVEQGPRRVEMCISKETPAPVVPPEPLPSLLTSDAAPVFLTELQNQEVQDGYPVSFDCVVTGQPMPSVRWFKDGKLLEEDDHYMINEDQQGGHQLIITAVVPADMGVYRCLAENSMGVSSTKAELRVDLTSTDYDTAADATESSSYFSAQGYLSSREQEGTESTTDEGQLPQVVEELRDLQVAPGTRLAKFQLKVKGYPAPRLYWFKDGQPLTASAHIRMTDKKILHTLEIISVTREDSGQYAAYISNAMGAAYSSARLLVRGPDEPEEKPASDVHEQLVPPRMLERFTPKKVKKGSSITFSVKVEGRPVPTVHWLREEAERGVLWIGPDTPGYTVASSAQQHSLVLLDVGRQHQGTYTCIASNAAGQALCSASLHVSGLPKVEEQEKVKEALISTFLQGTTQAISAQGLETASFADLGGQRKEEPLAAKEALGHLSLAEVGTEEFLQKLTSQITEMVSAKITQAKLQVPGGDSDEDSKTPSASPRHGRSRPSSSIQESSSESEDGDARGEIFDIYVVTADYLPLGAEQDAITLREGQYVEVLDAAHPLRWLVRTKPTKSSPSRQGWVSPAYLDRRLKLSPEWGAAEAPEFPGEAVSEDEYKARLSSVIQELLSSEQAFVEELQFLQSHHLQHLERCPHVPIAVAGQKAVIFRNVRDIGRFHSSFLQELQQCDTDDDVAMCFIKNQAAFEQYLEFLVGRVQAESVVVSTAIQEFYKKYAEEALLAGDPSQPPPPPLQHYLEQPVERVQRYQALLKELIRNKARNRQNCALLEQAYAVVSALPQRAENKLHVSLMENYPGTLQALGEPIRQGHFIVWEGAPGARMPWKGHNRHVFLFRNHLVICKPRRDSRTDTVSYVFRNMMKLSSIDLNDQVEGDDRAFEVWQEREDSVRKYLLQARTAIIKSSWVKEICGIQQRLALPVWRPPDFEEELADCTAELGETVKLACRVTGTPKPVISWYKDGKAVQVDPHHILIEDPDGSCALILDSLTGVDSGQYMCFAASAAGNCSTLGKILVQVPPRFVNKVRASPFVEGEDAQFTCTIEGAPYPQIRWYKDGALLTTGNKFQTLSEPRSGLLVLVIRAASKEDLGLYECELVNRLGSARASAELRIQSPMLQAQEQCHREQLVAAVEDTTLERADQEVTSVLKRLLGPKAPGPSTGDLTGPGPCPRGAPALQETGSQPPVTGTSEAPAVPPRVPQPLLHEGPEQEPEAIARAQEWTVPIRMEGAAWPGAGTGELLWDVHSHVVRETTQRTYTYQAIDTHTARPPSMQVTIEDVQAQTGGTAQFEAIIEGDPQPSVTWYKDSVQLVDSTRLSQQQEGTTYSLVLRHVASKDAGVYTCLAQNTGGQVLCKAELLVLGGDNEPDSEKQSHRRKLHSFYEVKEEIGRGVFGFVKRVQHKGNKILCAAKFIPLRSRTRAQAYRERDILAALSHPLVTGLLDQFETRKTLILILELCSSEELLDRLYRKGVVTEAEVKVYIQQLVEGLHYLHSHGVLHLDIKPSNILMVHPAREDIKICDFGFAQNITPAELQFSQYGSPEFVSPEIIQQNPVSEASDIWAMGVISYLSLTCSSPFAGESDRATLLNVLEGRVSWSSPMAAHLSEDAKDFIKATLQRAPQARPSAAQCLSHPWFLKSMPAEEAHFINTKQLKFLLARSRWQRSLMSYKSILVMRSIPELLRGPPDSPSLGVARHLCRDTGGSSSSSSSSDNELAPFARAKSLPPSPVTHSPLLHPRGFLRPSASLPEEAEASERSTEAPAPPASPEGAGPPAAQGCVPRHSVIRSLFYHQAGESPEHGALAPGSRRHPARRRHLLKGGYIAGALPGLREPLMEHRVLEEEAAREEQATLLAKAPSFETALRLPASGTHLAPGHSHSLEHDSPSTPRPSSEACGEAQRLPSAPSGGAPIRDMGHPQGSKQLPSTGGHPGTAQPERPSPDSPWGQPAPFCHPKQGSAPQEGCSPHPAVAPCPPGSFPPGSCKEAPLVPSSPFLGQPQAPPAPAKASPPLDSKMGPGDISLPGRPKPGPCSSPGSASQASSSQVSSLRVGSSQVGTEPGPSLDAEGWTQEAEDLSDSTPTLQRPQEQATMRKFSLGGRGGYAGVAGYGTFAFGGDAGGMLGQGPMWARIAWAVSQSEEEEQEEARAESQSEEQQEARAESPLPQVSARPVPEVGRAPTRSSPEPTPWEDIGQVSLVQIRDLSGDAEAADTISLDISEVDPAYLNLSDLYDIKYLPFEFMIFRKVPKSAQPEPPSPMAEEELAEFPEPTWPWPGELGPHAGLEITEESEDVDALLAEAAVGRKRKWSSPSRSLFHFPGRHLPLDEPAELGLRERVKASVEHISRILKGRPEGLEKEGPPRKKPGLASFRLSGLKSWDRAPTFLRELSDETVVLGQSVTLACQVSAQPAAQATWSKDGAPLESSSRVLISATLKNFQLLTILVVVAEDLGVYTCSVSNALGTVTTTGVLRKAERPSSSPCPDIGEVYADGVLLVWKPVESYGPVTYIVQCSLEGGSWTTLASDIFDCCYLTSKLSRGGTYTFRTACVSKAGMGPYSSPSEQVLLGGPSHLASEEESQGRSAQPLPSTKTFAFQTQIQRGRFSVVRQCWEKASGRALAAKIIPYHPKDKTAVLREYEALKGLRHPHLAQLHAAYLSPRHLVLILELCSGPELLPCLAERASYSESEVKDYLWQMLSATQYLHNQHILHLDLRSENMIITEYNLLKVVDLGNAQSLSQEKVLPSDKFKDYLETMAPELLEGQGAVPQTDIWAIGVTAFIMLSAEYPVSSEGARDLQRGLRKGLVRLSRCYAGLSGGAVAFLRSTLCAQPWGRPCASSCLQCPWLTEEGPACSRPAPVTFPTARLRVFVRNREKRRALLYKRHNLAQVR

SEQ ID NO: 11520 - protein, 26 aa, Artificial Sequence
  Synthetic polypeptide
HRASKSLGISWVIGASFVLISDKHRL

SEQ ID NO: 11521 - protein, 45 aa, Artificial Sequence
  Synthetic polypeptide
THAHTHTVKHRHTRLEGEQGEDGWRDRNRGRERDSDRERPERWRG

SEQ ID NO: 11522 - protein, 187 aa, Artificial Sequence
  Synthetic polypeptide
NTDTHGLKESKEKMDGEIETEGGRETAIERDRRGGEDEFDKLRPLCYTNTDIFLLCFSVVSPSSFQNVSEKWVPEIRCHCPKAPIILVGTQSDLREDVKVLIELDKCKEKPVPEEAAKLCAEEIKAASYIECSALTQKNLKEVFDAAIVAGIQYSDTQQQPKKSKSRTPDKMKNLSKSWWKKYCCFV

SEQ ID NO: 11523 - protein, 23 aa, Artificial Sequence
  Synthetic polypeptide
KPREGERQRSRETGEVERMNLTS

SEQ ID NO: 11524 - protein, 177 aa, Artificial Sequence
  Synthetic polypeptide
DQPGQYAVVSVDGRPVRLQLCDTAGQDEFDKLRPLCYTNTDIFLLCFSVVSPSSFQNVSEKWVPEIRCHCPKAPIILVGTQSDLREDVKVLIELDKCKEKPVPEEAAKLCAEEIKAASYIECSALTQKNLKEVFDAAIVAGIQYSDTQQQPKKSKSRTPDKMKNLSKSWWKKYCCFV

SEQ ID NO: 11525 - protein, 20 aa, Artificial Sequence
  Synthetic polypeptide
GQEFETSLVNMRWCLWMGGP

SEQ ID NO: 11526 - protein, 39 aa, Artificial Sequence
  Synthetic polypeptide
HFGFWEAEMGGLLEAKSLRPAWSICGGVCGWAARETPTL

SEQ ID NO: 11527 - protein, 7 aa, Artificial Sequence
  Synthetic polypeptide
DQPGQYG

SEQ ID NO: 11528 - protein, 162 aa, Artificial Sequence
  Synthetic polypeptide
GQEFETSLVNMDEFDKLRPLCYTNTDIFLLCFSVVSPSSFQNVSEKWVPEIRCHCPKAPIILVGTQSDLREDVKVLIELDKCKEKPVPEEAAKLCAEEIKAASYIECSALTQKNLKEVFDAAIVAGIQYSDTQQQPKKSKSRTPDKMKNLSKSWWKKYCCFV

SEQ ID NO: 11529 - protein, 30 aa, Artificial Sequence
  Synthetic polypeptide
HFGFWEAEMGGLLEAKSLRPAWSIWMNLTS

SEQ ID NO: 11530 - protein, 17 aa, Artificial Sequence
  Synthetic polypeptide
FLIRGAPALIRFSKHCQ

SEQ ID NO: 11531 - protein, 13 aa, Artificial Sequence
  Synthetic polypeptide
SDSQSTASERCRR

SEQ ID NO: 11532 - protein, 161 aa, Artificial Sequence
  Synthetic polypeptide
FDQRSPSFNQILKALPVKDVEDKPEQQTRTRETDKSPTSTEPRQQPSALFARGNRKAVKSPQRSSSKIKENKHPFALYGWGEKQTDTGSQKTHNVCASAPVHEIHESALRAKNRRQVEKRKLVAQRQRAHSVDVEKNRKMKASSSENPWMTEYMRCYSARA

SEQ ID NO: 11533 - protein, 546 aa, Artificial Sequence
  Synthetic polypeptide
HSSKEVSTSGPFGYASKEDWNEIDPIKKKDLHHSNGEEKAQSMETLPPGKVRWPDFNQEAYVGGTMVRSGQDPYARNKFNQVESDKLRMDRAIPDTRHDQCQRKQWRVDLPATSVVITFHNEARSALLRTVVSVLKKSPPHLIKEIILVDDYSNDPEDGALLGKIEKVRVLRNDRREGLMRSRVRGADAAQAKVLTFLDSHCECNEHWLEPLLERVAEDRTRVVSPIIDVINMDNFQYVGASADLKGGFDWNLVFKWDYMTPEQRRSRQGNPVAPIKTPMIAGGLFVMDKFYFEELGKYDMMMDVWGGENLEISFRVWQCGGSLEIIPCSRVGHVFRKQHPYTFPGGSGTVFARNTRRAAEVWMDEYKNFYYAAVPSARNVPYGNIQSRLELRKKLSCKPFKWYLENVYPELRVPDHQDIAFGALQQGTNCLDTLGHFADGVVGVYECHNAGGNQEWALTKEKSVKHMDLCLTVVDRAPGSLIKLQGCRENDSRQKWEQIEGNSKLRHVGSNLCLDSRTAKSGGLSVEVCGPALSQQWKFTLNLQQ

SEQ ID NO: 11534 - protein, 115 aa, Artificial Sequence
  Synthetic polypeptide
TPPRKSLPQGPLATLLRRTGMKLTPLKRKTFITAMEKRKHKAWRPSLQGKYGGQTLTRKLMLEGRWSAPGRTLTPATSSTRWRVISFEWTEPSLTPGMTSVSGSSGGWICRPPAW

SEQ ID NO: 11535 - protein, 351 aa, Artificial Sequence
  Synthetic polypeptide
GWTQWLTPVIPALWEAEAGRSPEDRTRVVSPIIDVINMDNFQYVGASADLKGGFDWNLVFKWDYMTPEQRRSRQGNPVAPIKTPMIAGGLFVMDKFYFEELGKYDMMMDVWGGENLEISFRVWQCGGSLEIIPCSRVGHVFRKQHPYTFPGGSGTVFARNTRRAAEVWMDEYKNFYYAAVPSARNVPYGNIQSRLELRKKLSCKPFKWYLENVYPELRVPDHQDIAFGALQQGTNCLDTLGHFADGVVGVYECHNAGGNQEWALTKEKSVKHMDLCLTVVDRAPGSLIKLQGCRENDSRQKWEQIEGNSKLRHVGSNLCLDSRTAKSGGLSVEVCGPALSQQWKFTLNLQQ

SEQ ID NO: 11536 - protein, 40 aa, Artificial Sequence
  Synthetic polypeptide
SQHFGRPRQADHLRTGLGLCHPSSMSLIWTTFSMWGHLLT

SEQ ID NO: 11537 - protein, 135 aa, Artificial Sequence
  Synthetic polypeptide
GWTQWLTPVIPALWEAEAGRSPEDRTRVVSPIIDVINMDNFQYVGASADLKGGFDWNLVFKWDYMTPEQRRSRQGNPVAPIKDLVPRVAVWWQPGDHPVQPCGTRVPEAAPLHVPGWQWHCLCPKHPPGSRGLDG

SEQ ID NO: 11538 - protein, 80 aa, Artificial Sequence
  Synthetic polypeptide
GWARWLTPVIPALWEAEASGSQETPAGQQRSGWMNTKISIMQQCLLLETFLMEIFRADWSLGRNSAASLSNGTLKMSIQS

SEQ ID NO: 11539 - protein, 24 aa, Artificial Sequence
  Synthetic polypeptide
SQHFGKLRRVDHKKHPPGSRGLDG

SEQ ID NO: 11540 - protein, 198 aa, Artificial Sequence
  Synthetic polypeptide
GEWITRNTRRAAEVWMDEYKNFYYAAVPSARNVPYGNIQSRLELRKKLSCKPFKWYLENVYPELRVPDHQDIAFGALQQGTNCLDTLGHFADGVVGVYECHNAGGNQEWALTKEKSVKHMDLCLTVVDRAPGSLIKLQGCRENDSRQKWEQIEGNSKLRHVGSNLCLDSRTAKSGGLSVEVCGPALSQQWKFTLNLQQ

SEQ ID NO: 11541 - protein, 34 aa, Artificial Sequence
  Synthetic polypeptide
GWARWLTPVIPALWEAEASGSQETPAGQQRSGWM

SEQ ID NO: 11542 - protein, 17 aa, Artificial Sequence
  Synthetic polypeptide
GEWITRNTRRAAEVWMD

SEQ ID NO: 11543 - protein, 43 aa, Artificial Sequence
  Synthetic polypeptide
GWARWLTPVIPALWEAEASGSQGQEIETILANKHPPGSRGLDG

SEQ ID NO: 11544 - protein, 215 aa, Artificial Sequence
  Synthetic polypeptide
SQHFGKLRRVDHKVKRSRPSWLINTRRAAEVWMDEYKNFYYAAVPSARNVPYGNIQSRLELRKKLSCKPFKWYLENVYPELRVPDHQDIAFGALQQGTNCLDTLGHFADGVVGVYECHNAGGNQEWALTKEKSVKHMDLCLTVVDRAPGSLIKLQGCRENDSRQKWEQIEGNSKLRHVGSNLCLDSRTAKSGGLSVEVCGPALSQQWKFTLNLQQ

SEQ ID NO: 11545 - protein, 34 aa, Artificial Sequence
  Synthetic polypeptide
SQHFGKLRRVDHKVKRSRPSWLINTRRAAEVWMD

SEQ ID NO: 11546 - protein, 44 aa, Artificial Sequence
  Synthetic polypeptide
GWARWLTPVIPALWEAEASGSQGQEIETILANVKHPPGSRGLDG

SEQ ID NO: 11547 - protein, 59 aa, Artificial Sequence
  Synthetic polypeptide
CETPAGQQRSGWMNTKISIMQQCLLLETFLMEIFRADWSLGRNSAASLSNGTLKMSIQS

SEQ ID NO: 11548 - protein, 13 aa, Artificial Sequence
  Synthetic polypeptide
CETPAGQQRSGWM

SEQ ID NO: 11549 - protein, 19 aa, Artificial Sequence
  Synthetic polypeptide
TRQAWVLIQLCYLLPVWRI

SEQ ID NO: 11550 - protein, 16 aa, Artificial Sequence
  Synthetic polypeptide
SSSATYYLYGGSNLAR

SEQ ID NO: 11551 - protein, 241 aa, Artificial Sequence
  Synthetic polypeptide
WKQQAILNQTSLGFNPALLLTTCMADLTWQDEHSAPFSWETKSQMEFSISALSIQEPSNGTAASEPRPLSKASQGSQALKSSQGSRSSSLDALGPTRKEEEASFWKINAERSRGEGPEAEFQSLTPSQIKSMEKGEKVLPPCYRQEPAPKDREAKVERPSTLRQEQRPLPNVSTERERPQPVQAFSSALHEAAPSQLEGKLPSPDVRQDDGEDTLFSEPKFAQVSSSNVVLKTGFDFLDNW

SEQ ID NO: 11552 - protein, 117 aa, Artificial Sequence
  Synthetic polypeptide
WKQQAILNQTSLGFNPALLLTTCMADLTWQDEHSAPFSWETKSQMEFSISALSIQEPSNGTAASEPRPLSKASQGSQALKSSQGSRSSSLDALGPTRKEEEASFWKINAERSRGEGP

SEQ ID NO: 11553 - protein, 15 aa, Artificial Sequence
  Synthetic polypeptide
RGSFSSYQRCVTSEF

SEQ ID NO: 11554 - protein, 406 aa, Artificial Sequence
  Synthetic polypeptide
ANVLKNKGPRVIKILPKKRMLRLEGEASHLTRDVLHQNFESYKPEVQELICVADRLGSLMQYETPGFLPNKRIHRAMGLAALEVMQAVQRTWTNSKVRMNGKTRLMQWRDMFDIAVKWRRIADPDQPVLWLDQMPARSLSRGFNNHINLIRGQVINMRYLEYFEKILHFIKDRILVYHGANNPKGLLEVREALEKVHKVEDLLPIMKQFNTKTKDGFTVNTKVPSLKDQGKEYDGFTITITGDKVGNILFSVETQTTEERTQLYHAEIDALYKDLTAKGKVLILSSEFGEADAVCNLILSLVYYFYNLMPLSRGSSVIAYSVIVGALMASGKEVAGKIPKGKLVDFEAMTAPGSEAFSKVAKSWMNLKSISPSYKTLPSVSETFPTLRSMIEVLNTDSSPRCLKKL

SEQ ID NO: 11555 - protein, 37 aa, Artificial Sequence
  Synthetic polypeptide
SRYSQRRGCSGLKGKLLILPEMCYIRILRVISLKYRS

SEQ ID NO: 11556 - protein, 405 aa, Artificial Sequence
  Synthetic polypeptide
ANVLKNKGPRVIKILPKKRMLRLEGEASHLTRDVLHQNFESYKPEVQELICVADRLGSLMQYETPGFLPNKRIHRAMGLAALEVMQAVQRTWTNSKVRMNGKTRLMQWRDMFDIAVKWRRIADPDQPVLWLDQMPARSLSRGFNNHINLIRGQVINMRYLEYFEKILHFIKDRILVYHGANNPKGLLEVREALEKVHKVEDLLPIMKFNTKTKDGFTVNTKVPSLKDQGKEYDGFTITITGDKVGNILFSVETQTTEERTQLYHAEIDALYKDLTAKGKVLILSSEFGEADAVCNLILSLVYYFYNLMPLSRGSSVIAYSVIVGALMASGKEVAGKIPKGKLVDFEAMTAPGSEAFSKVAKSWMNLKSISPSYKTLPSVSETFPTLRSMIEVLNTDSSPRCLKKL

SEQ ID NO: 11557 - protein, 484 aa, Artificial Sequence
  Synthetic polypeptide
GRARWLTPVLPALWEGEAGGSRETLMDSTTATAELGWMVHPPSGWEEVSGYDENMNTIRTYQVCNVFESSQNNWLRTKFIRRRGAHRIHVEMKFSVRDCSSIPSVPGSCKETFNLYYYEADFDSATKTFPNWMENPWVKVDTIAADESFSQVDLGGRVMKINTEVRSFGPVSRSGFYLAFQDYGGCMSLIAVRVFYRKCPRIIQNGAIFQETLSGAESTSLVAARGSCIANAEEVDVPIKLYCNGDGEWLVPIGRCMCKAGFEAVENGTVCRGCPSGTFKANQGDEACTHCPINSRTTSEGATNCVCRNGYYRADLDPLDMPCTTIPSAPQAVISSVNETSLMLEWTPPRDSGGREDLVYNIICKSCGSGRGACTRCGDNVQYAPRQLGLTEPRIYISDLLAHTQYTFEIQAVNGVTDQSPFSPQFASVNITTNQAAPSAVSIMHQVSRTVDSITLSWSQPDQPNGVILDYELQYYEKMKTQRS

SEQ ID NO: 11558 - protein, 24 aa, Artificial Sequence
  Synthetic polypeptide
AGHGGSRLYSQHFGRARRADHEKR

SEQ ID NO: 11559 - protein, 32 aa, Artificial Sequence
  Synthetic polypeptide
PGTVAHACTPSTLGGRGGRITRNANGLHYSDC

SEQ ID NO: 11560 - protein, 988 aa, Artificial Sequence
  Synthetic polypeptide
GRARWLTPVLPALWEGEAGGSRETLMDSTTATAELGWMVHPPSGWEEVSGYDENMNTIRTYQVCNVFESSQNNWLRTKFIRRRGAHRIHVEMKFSVRDCSSIPSVPGSCKETFNLYYYEADFDSATKTFPNWMENPWVKVDTIAADESFSQVDLGGRVMKINTEVRSFGPVSRSGFYLAFQDYGGCMSLIAVRVFYRKCPRIIQNGAIFQETLSGAESTSLVAARGSCIANAEEVDVPIKLYCNGDGEWLVPIGRCMCKAGFEAVENGTVCRGCPSGTFKANQGDEACTHCPINSRTTSEGATNCVCRNGYYRADLDPLDMPCTTIPSAPQAVISSVNETSLMLEWTPPRDSGGREDLVYNIICKSCGSGRGACTRCGDNVQYAPRQLGLTEPRIYISDLLAHTQYTFEIQAVNGVTDQSPFSPQFASVNITTNQAAPSAVSIMHQVSRTVDSITLSWSQPDQPNGVILDYELQYYEKELSEYNATAIKSPTNTVTVQGLKAGAIYVFQVRARTVAGYGRYSGKMYFQTMTEAEYQTSIQEKLPLIIGSSAAGLVFLIAVVVIAIVCNRRGFERADSEYTDKLQHYTSGHMTPGMKIYIDPFTYEDPNEAVREFAKEIDISCVKIEQVIGAGEFGEVCSGHLKLPGKREIFVAIKTLKSGYTEKQRRDFLSEASIMGQFDHPNVIHLEGVVTKSTPVMIITEFMENGSLDSFLRQNDGQFTVIQLVGMLRGIAAGMKYLADMNYVHRDLAARNILVNSNLVCKVSDFGLSRFLEDDTSDPTYTSALGGKIPIRWTAPEAIQYRKFTSASDVWSYGIVMWEVMSYGERPYWDMTNQDVINAIEQDYRLPPPMDCPSALHQLMLDCWQKDRNHRPKFGQIVNTLDKMIRNPNSLKAMAPLSSGINLPLLDRTIPDYTSFNTVDEWLEAIKMGQYKESFANAGFTSFDVVSQMMMEDILRVGVTLAGHQKKILNSIQVMRAQMNQIQSVEV

SEQ ID NO: 11561 - protein, 1057 aa, Artificial Sequence
  Synthetic polypeptide
GRARWLTPVLPALWEGEAGGSRETLMDSTTATAELGWMVHPPSGWEEVSGYDENMNTIRTYQVCNVFESSQNNWLRTKFIRRRGAHRIHVEMKFSVRDCSSIPSVPGSCKETFNLYYYEADFDSATKTFPNWMENPWVKVDTIAADESFSQVDLGGRVMKINTEVRSFGPVSRSGFYLAFQDYGGCMSLIAVRVFYRKCPRIIQNGAIFQETLSGAESTSLVAARGSCIANAEEVDVPIKLYCNGDGEWLVPIGRCMCKAGFEAVENGTVCRGCPSGTFKANQGDEACTHCPINSRTTSEGATNCVCRNGYYRADLDPLDMPCTTIPSAPQAVISSVNETSLMLEWTPPRDSGGREDLVYNIICKSCGSGRGACTRCGDNVQYAPRQLGLTEPRIYISDLLAHTQYTFEIQAVNGVTDQSPFSPQFASVNITTNQAAPSAVSIMHQVSRTVDSITLSWSQPDQPNGVILDYELQYYEKELSEYNATAIKSPTNTVTVQGLKAGAIYVFQVRARTVAGYGRYSGKMYFQTMTEAEYQTSIQEKLPLIIGSSAAGLVFLIAVVVIAIVCNRRGFERADSEYTDKLQHYTSGHMTPGMKIYIDPFTYEDPNEAVREFAKEIDISCVKIEQVIGAGEFGEVCSGHLKLPGKREIFVAIKTLKSGYTEKQRRDFLSEASIMGQFDHPNVIHLEGVVTKSTPVMIITEFMENGSLDSFLRQNDGQFTVIQLVGMLRGIAAGMKYLADMNYVHRDLAARNILVNSNLVCKVSDFGLSRFLEDDTSDPTYTSALGGKIPIRWTAPEAIQYRKFTSASDVWSYGIVMWEVMSYGERPYWDMTNQDVINAIEQDYRLPPPMDCPSALHQLMLDCWQKDRNHRPKFGQIVNTLDKMIRNPNSLKAMAPLSSGINLPLLDRTIPDYTSFNTVDEWLEAIKMGQYKESFANAGFTSFDVVSQMMMEDILRVGVTLAGHQKKILNSIQVMRAQMNQIQSVEGQPLARRPRATGRTKRCQPRDVTKKTCNSNDGKKKGMGKKKTDPGRGREIQGIFFKEDSHKESNDCSCGG

SEQ ID NO: 11562 - protein, 989 aa, Artificial Sequence
  Synthetic polypeptide
GRARWLTPVLPALWEGEAGGSRETLMDSTTATAELGWMVHPPSGWEEVSGYDENMNTIRTYQVCNVFESSQNNWLRTKFIRRRGAHRIHVEMKFSVRDCSSIPSVPGSCKETFNLYYYEADFDSATKTFPNWMENPWVKVDTIAADESFSQVDLGGRVMKINTEVRSFGPVSRSGFYLAFQDYGGCMSLIAVRVFYRKCPRIIQNGAIFQETLSGAESTSLVAARGSCIANAEEVDVPIKLYCNGDGEWLVPIGRCMCKAGFEAVENGTVCRGCPSGTFKANQGDEACTHCPINSRTTSEGATNCVCRNGYYRADLDPLDMPCTTIPSAPQAVISSVNETSLMLEWTPPRDSGGREDLVYNIICKSCGSGRGACTRCGDNVQYAPRQLGLTEPRIYISDLLAHTQYTFEIQAVNGVTDQSPFSPQFASVNITTNQAAPSAVSIMHQVSRTVDSITLSWSQPDQPNGVILDYELQYYEKELSEYNATAIKSPTNTVTVQGLKAGAIYVFQVRARTVAGYGRYSGKMYFQTMTEAEYQTSIQEKLPLIIGSSAAGLVFLIAVVVIAIVCNRRRGFERADSEYTDKLQHYTSGHMTPGMKIYIDPFTYEDPNEAVREFAKEIDISCVKIEQVIGAGEFGEVCSGHLKLPGKREIFVAIKTLKSGYTEKQRRDFLSEASIMGQFDHPNVIHLEGVVTKSTPVMIITEFMENGSLDSFLRQNDGQFTVIQLVGMLRGIAAGMKYLADMNYVHRDLAARNILVNSNLVCKVSDFGLSRFLEDDTSDPTYTSALGGKIPIRWTAPEAIQYRKFTSASDVWSYGIVMWEVMSYGERPYWDMTNQDVINAIEQDYRLPPPMDCPSALHQLMLDCWQKDRNHRPKFGQIVNTLDKMIRNPNSLKAMAPLSSGINLPLLDRTIPDYTSFNTVDEWLEAIKMGQYKESFANAGFTSFDVVSQMMMEDILRVGVTLAGHQKKILNSIQVMRAQMNQIQSVEV

SEQ ID NO: 11563 - protein, 954 aa, Artificial Sequence
  Synthetic polypeptide
GRARWLTPVLPALWEGEAGGSRETLMDSTTATAELGWMVHPPSGWEEVSGYDENMNTIRTYQVCNVFESSQNNWLRTKFIRRRGAHRIHVEMKFSVRDCSSIPSVPGSCKETFNLYYYEADFDSATKTFPNWMENPWVKVDTIAADESFSQVDLGGRVMKINTEVRSFGPVSRSGFYLAFQDYGGCMSLIAVRVFYRKCPRIIQNGAIFQETLSGAESTSLVAARGSCIANAEEVDVPIKLYCNGDGEWLVPIGRCMCKAGFEAVENGTVCRGCPSGTFKANQGDEACTHCPINSRTTSEGATNCVCRNGYYRADLDPLDMPCTTIPSAPQAVISSVNETSLMLEWTPPRDSGGREDLVYNIICKSCGSGRGACTRCGDNVQYAPRQLGLTEPRIYISDLLAHTQYTFEIQAVNGVTDQSPFSPQFASVNITTNQAAPSAVSIMHQVSRTVDSITLSWSQPDQPNGVILDYELQYYEKQELSEYNATAIKSPTNTVTVQGLKAGAIYVFQVRARTVAGYGRYSGKMYFQTMTEAEYQTSIQEKLPLIIGSSAAGLVFLIAVVVIAIVCNRRGFERADSEYTDKLQHYTSGHMTPGMKIYIDPFTYEDPNEAVREFAKEIDISCVKIEQVIGAGEFGEVCSGHLKLPGKREIFVAIKTLKSGYTEKQRRDFLSEASIMGQFDHPNVIHLEGVVTKSTPVMIITEFMENGSLDSFLRQNDGQFTVIQLVGMLRGIAAGMKYLADMNYVHRDLAARNILVNSNLVCKVSDFGLSRFLEDDTSDPTYTSALGGKIPIRWTAPEAIQYRKFTSASDVWSYGIVMWEVMSYGERPYWDMTNQDVINAIEQDYRLPPPMDCPSALHQLMLDCWQKDRNHRPKFGQIVNTLDKMIRNPNSLKAMAPLSSGINLPLLDRTIPDYTSFNTVDEWLEAIKMGQYKESFANAGFTSFDVVSQMMME

SEQ ID NO: 11564 - protein, 35 aa, Artificial Sequence
  Synthetic polypeptide
GRARWLTPVLPALWEGEAGGSRGQEIETVLANTKR

SEQ ID NO: 11565 - protein, 43 aa, Artificial Sequence
  Synthetic polypeptide
AGHGGSRLYSQHFGRARRADHEVRRSRPSWLTRNANGLHYSDC

SEQ ID NO: 11566 - protein, 463 aa, Artificial Sequence
  Synthetic polypeptide
HETLMDSTTATAELGWMVHPPSGWEEVSGYDENMNTIRTYQVCNVFESSQNNWLRTKFIRRRGAHRIHVEMKFSVRDCSSIPSVPGSCKETFNLYYYEADFDSATKTFPNWMENPWVKVDTIAADESFSQVDLGGRVMKINTEVRSFGPVSRSGFYLAFQDYGGCMSLIAVRVFYRKCPRIIQNGAIFQETLSGAESTSLVAARGSCIANAEEVDVPIKLYCNGDGEWLVPIGRCMCKAGFEAVENGTVCRGCPSGTFKANQGDEACTHCPINSRTTSEGATNCVCRNGYYRADLDPLDMPCTTIPSAPQAVISSVNETSLMLEWTPPRDSGGREDLVYNIICKSCGSGRGACTRCGDNVQYAPRQLGLTEPRIYISDLLAHTQYTFEIQAVNGVTDQSPFSPQFASVNITTNQAAPSAVSIMHQVSRTVDSITLSWSQPDQPNGVILDYELQYYEKMKTQRS

SEQ ID NO: 11567 - protein, 967 aa, Artificial Sequence
  Synthetic polypeptide
HETLMDSTTATAELGWMVHPPSGWEEVSGYDENMNTIRTYQVCNVFESSQNNWLRTKFIRRRGAHRIHVEMKFSVRDCSSIPSVPGSCKETFNLYYYEADFDSATKTFPNWMENPWVKVDTIAADESFSQVDLGGRVMKINTEVRSFGPVSRSGFYLAFQDYGGCMSLIAVRVFYRKCPRIIQNGAIFQETLSGAESTSLVAARGSCIANAEEVDVPIKLYCNGDGEWLVPIGRCMCKAGFEAVENGTVCRGCPSGTFKANQGDEACTHCPINSRTTSEGATNCVCRNGYYRADLDPLDMPCTTIPSAPQAVISSVNETSLMLEWTPPRDSGGREDLVYNIICKSCGSGRGACTRCGDNVQYAPRQLGLTEPRIYISDLLAHTQYTFEIQAVNGVTDQSPFSPQFASVNITTNQAAPSAVSIMHQVSRTVDSITLSWSQPDQPNGVILDYELQYYEKELSEYNATAIKSPTNTVTVQGLKAGAIYVFQVRARTVAGYGRYSGKMYFQTMTEAEYQTSIQEKLPLIIGSSAAGLVFLIAVVVIAIVCNRRGFERADSEYTDKLQHYTSGHMTPGMKIYIDPFTYEDPNEAVREFAKEIDISCVKIEQVIGAGEFGEVCSGHLKLPGKREIFVAIKTLKSGYTEKQRRDFLSEASIMGQFDHPNVIHLEGVVTKSTPVMIITEFMENGSLDSFLRQNDGQFTVIQLVGMLRGIAAGMKYLADMNYVHRDLAARNILVNSNLVCKVSDFGLSRFLEDDTSDPTYTSALGGKIPIRWTAPEAIQYRKFTSASDVWSYGIVMWEVMSYGERPYWDMTNQDVINAIEQDYRLPPPMDCPSALHQLMLDCWQKDRNHRPKFGQIVNTLDKMIRNPNSLKAMAPLSSGINLPLLDRTIPDYTSFNTVDEWLEAIKMGQYKESFANAGFTSFDVVSQMMMEDILRVGVTLAGHQKKILNSIQVMRAQMNQIQSVEV

SEQ ID NO: 11568 - protein, 1036 aa, Artificial Sequence
  Synthetic polypeptide
HETLMDSTTATAELGWMVHPPSGWEEVSGYDENMNTIRTYQVCNVFESSQNNWLRTKFIRRRGAHRIHVEMKFSVRDCSSIPSVPGSCKETFNLYYYEADFDSATKTFPNWMENPWVKVDTIAADESFSQVDLGGRVMKINTEVRSFGPVSRSGFYLAFQDYGGCMSLIAVRVFYRKCPRIIQNGAIFQETLSGAESTSLVAARGSCIANAEEVDVPIKLYCNGDGEWLVPIGRCMCKAGFEAVENGTVCRGCPSGTFKANQGDEACTHCPINSRTTSEGATNCVCRNGYYRADLDPLDMPCTTIPSAPQAVISSVNETSLMLEWTPPRDSGGREDLVYNIICKSCGSGRGACTRCGDNVQYAPRQLGLTEPRIYISDLLAHTQYTFEIQAVNGVTDQSPFSPQFASVNITTNQAAPSAVSIMHQVSRTVDSITLSWSQPDQPNGVILDYELQYYEKELSEYNATAIKSPTNTVTVQGLKAGAIYVFQVRARTVAGYGRYSGKMYFQTMTEAEYQTSIQEKLPLIIGSSAAGLVFLIAVVVIAIVCNRRGFERADSEYTDKLQHYTSGHMTPGMKIYIDPFTYEDPNEAVREFAKEIDISCVKIEQVIGAGEFGEVCSGHLKLPGKREIFVAIKTLKSGYTEKQRRDFLSEASIMGQFDHPNVIHLEGVVTKSTPVMIITEFMENGSLDSFLRQNDGQFTVIQLVGMLRGIAAGMKYLADMNYVHRDLAARNILVNSNLVCKVSDFGLSRFLEDDTSDPTYTSALGGKIPIRWTAPEAIQYRKFTSASDVWSYGIVMWEVMSYGERPYWDMTNQDVINAIEQDYRLPPPMDCPSALHQLMLDCWQKDRNHRPKFGQIVNTLDKMIRNPNSLKAMAPLSSGINLPLLDRTIPDYTSFNTVDEWLEAIKMGQYKESFANAGFTSFDVVSQMMMEDILRVGVTLAGHQKKILNSIQVMRAQMNQIQSVEGQPLARRPRATGRTKRCQPRDVTKKTCNSNDGKKKGMGKKKTDPGRGREIQGIFFKEDSHKESNDCSCGG

SEQ ID NO: 11569 - protein, 968 aa, Artificial Sequence
  Synthetic polypeptide
HETLMDSTTATAELGWMVHPPSGWEEVSGYDENMNTIRTYQVCNVFESSQNNWLRTKFIRRRGAHRIHVEMKFSVRDCSSIPSVPGSCKETFNLYYYEADFDSATKTFPNWMENPWVKVDTIAADESFSQVDLGGRVMKINTEVRSFGPVSRSGFYLAFQDYGGCMSLIAVRVFYRKCPRIIQNGAIFQETLSGAESTSLVAARGSCIANAEEVDVPIKLYCNGDGEWLVPIGRCMCKAGFEAVENGTVCRGCPSGTFKANQGDEACTHCPINSRTTSEGATNCVCRNGYYRADLDPLDMPCTTIPSAPQAVISSVNETSLMLEWTPPRDSGGREDLVYNIICKSCGSGRGACTRCGDNVQYAPRQLGLTEPRIYISDLLAHTQYTFEIQAVNGVTDQSPFSPQFASVNITTNQAAPSAVSIMHQVSRTVDSITLSWSQPDQPNGVILDYELQYYEKELSEYNATAIKSPTNTVTVQGLKAGAIYVFQVRARTVAGYGRYSGKMYFQTMTEAEYQTSIQEKLPLIIGSSAAGLVFLIAVVVIAIVCNRRRGFERADSEYTDKLQHYTSGHMTPGMKIYIDPFTYEDPNEAVREFAKEIDISCVKIEQVIGAGEFGEVCSGHLKLPGKREIFVAIKTLKSGYTEKQRRDFLSEASIMGQFDHPNVIHLEGVVTKSTPVMIITEFMENGSLDSFLRQNDGQFTVIQLVGMLRGIAAGMKYLADMNYVHRDLAARNILVNSNLVCKVSDFGLSRFLEDDTSDPTYTSALGGKIPIRWTAPEAIQYRKFTSASDVWSYGIVMWEVMSYGERPYWDMTNQDVINAIEQDYRLPPPMDCPSALHQLMLDCWQKDRNHRPKFGQIVNTLDKMIRNPNSLKAMAPLSSGINLPLLDRTIPDYTSFNTVDEWLEAIKMGQYKESFANAGFTSFDVVSQMMMEDILRVGVTLAGHQKKILNSIQVMRAQMNQIQSVEV

SEQ ID NO: 11570 - protein, 933 aa, Artificial Sequence
  Synthetic polypeptide
HETLMDSTTATAELGWMVHPPSGWEEVSGYDENMNTIRTYQVCNVFESSQNNWLRTKFIRRRGAHRIHVEMKFSVRDCSSIPSVPGSCKETFNLYYYEADFDSATKTFPNWMENPWVKVDTIAADESFSQVDLGGRVMKINTEVRSFGPVSRSGFYLAFQDYGGCMSLIAVRVFYRKCPRIIQNGAIFQETLSGAESTSLVAARGSCIANAEEVDVPIKLYCNGDGEWLVPIGRCMCKAGFEAVENGTVCRGCPSGTFKANQGDEACTHCPINSRTTSEGATNCVCRNGYYRADLDPLDMPCTTIPSAPQAVISSVNETSLMLEWTPPRDSGGREDLVYNIICKSCGSGRGACTRCGDNVQYAPRQLGLTEPRIYISDLLAHTQYTFEIQAVNGVTDQSPFSPQFASVNITTNQAAPSAVSIMHQVSRTVDSITLSWSQPDQPNGVILDYELQYYEKQELSEYNATAIKSPTNTVTVQGLKAGAIYVFQVRARTVAGYGRYSGKMYFQTMTEAEYQTSIQEKLPLIIGSSAAGLVFLIAVVVIAIVCNRRGFERADSEYTDKLQHYTSGHMTPGMKIYIDPFTYEDPNEAVREFAKEIDISCVKIEQVIGAGEFGEVCSGHLKLPGKREIFVAIKTLKSGYTEKQRRDFLSEASIMGQFDHPNVIHLEGVVTKSTPVMIITEFMENGSLDSFLRQNDGQFTVIQLVGMLRGIAAGMKYLADMNYVHRDLAARNILVNSNLVCKVSDFGLSRFLEDDTSDPTYTSALGGKIPIRWTAPEAIQYRKFTSASDVWSYGIVMWEVMSYGERPYWDMTNQDVINAIEQDYRLPPPMDCPSALHQLMLDCWQKDRNHRPKFGQIVNTLDKMIRNPNSLKAMAPLSSGINLPLLDRTIPDYTSFNTVDEWLEAIKMGQYKESFANAGFTSFDVVSQMMME

SEQ ID NO: 11571 - protein, 34 aa, Artificial Sequence
  Synthetic polypeptide
MKCTSDTPDLLFRLYFVFLMNKLPILLAFLPSCG

SEQ ID NO: 11572 - protein, 133 aa, Artificial Sequence
  Synthetic polypeptide
SPVPALLCFSYEQTAYFIGIFTFLWVERPMTAKKKPNFILLLKALLLSSYGKLLLIPAVIWEHDYTSVCLKLIKVFVLTSNFQAIRVTLNINRKLSFLAVLSGLLLESIMVYFFQSMEWDVGSDYAIFKSQDF

SEQ ID NO: 11573 - protein, 14 aa, Artificial Sequence
  Synthetic polypeptide
LWISGCWDNDGKQV

SEQ ID NO: 11574 - protein, 28 aa, Artificial Sequence
  Synthetic polypeptide
HLDFGFLAAGTMTENKCEGKYYEVHGNT

SEQ ID NO: 11575 - protein, 16 aa, Artificial Sequence
  Synthetic polypeptide
RKTSVKENTMKYMETL

SEQ ID NO: 11576 - protein, 195 aa, Artificial Sequence
  Synthetic polypeptide
RKTSVKENTMKYMETLKNKLCSCKCPLLGKVWEADLEACRLLIQSLQLQEARGSLSVEDERQMDDLEGAAPPIPPRLHSEDKRKTPLKVLEEWKTHLIPSLHCAGGEQKEESYILSAELGEKCEDIGKKLLYLEDQLHTAIHSHDEDLIHSLRRELQMVKETLQAMILQLQPAKEAGEREAAASCMTAGVHEAQA

SEQ ID NO: 11577 - protein, 64 aa, Artificial Sequence
  Synthetic polypeptide
QGSPTPGPWTSTSPRPVENRAAQQEVNSSCKCPLLGKVWEADLEACRLLIQSLQLQEARGSLSV

SEQ ID NO: 11578 - protein, 37 aa, Artificial Sequence
  Synthetic polypeptide
TAAASVHCLGKCGKLTWKLVDCLSRAYSSRKPGEACL

SEQ ID NO: 11579 - protein, 23 aa, Artificial Sequence
  Synthetic polypeptide
EPGCTAGGEQQLQVSTAWESVGS

SEQ ID NO: 11580 - protein, 180 aa, Artificial Sequence
  Synthetic polypeptide
QGSPTPGPWTSTSPRPVENRAAQQEVNSSCKCPLLGKVWEADLEACRLLIQSLQLQEARGSLSVEDERQMDDLEGAAPPIPPRLHSEDKRKTPLKESYILSAELGEKCEDIGKKLLYLEDQLHTAIHSHDEDLIHSLRRELQMVKETLQAMILQLQPAKEAGEREAAASCMTAGVHEAQA

SEQ ID NO: 11581 - protein, 202 aa, Artificial Sequence
  Synthetic polypeptide
QGSPTPGPWTSTSPRPVENRAAQQEVNSSCKCPLLGKVWEADLEACRLLIQSLQLQEARGSLSVEDERQMDDLEGAAPPIPPRLHSEDKRKTPLKVLEEWKTHLIPSLHCAGGEQKEESYILSAELGEKCEDIGKKLLYLEDQLHTAIHSHDEDLIHSLRRELQMVKETLQAMILQLQPAKEAGEREAAASCMTAGVHEAQA

SEQ ID NO: 11582 - protein, 968 aa, Artificial Sequence
  Synthetic polypeptide
STEDVAHLMWFERLYVWLQCFEKYILYPALILNALTIDAFLISNHRRLGTHWDIFLMIIAGMKLLRTSFCNPVYQFINLSFTVIFFHFDYKDISESFLLDFFMVSILFSKLGDLLHKLQFVLTYVAPWQMAWGSSFHVFAQLFAIPHSAMLFFQTIATSIFSTPLSPFLGSVIFITSYVRPVKFWEKNYNTRRVDNSNTRLAVQIERDPGNDDNNLNSIFYEHLTRTLQESLCGDLVLGRWGNYSSGDCFILASDDLNAFVHLIEIGNGLVTFQLRGLEFRGTYCQQREVEAIMEGDEEDRGCCCCKPGHLPHLLSCNAAFHLRWLTWEITQTQYILEGYSILDNNAATMLQVFDLRRILIRYYIKSIIYYMVTSPKLLSWIKNESLLKSLQPFAKWHYIERDLAMFNINIDDDYVPCLQGITRASFCNVYLEWIQHCARKRQEPSTTLDSDEDSPLVTLSFALCTLGRRALGTAAHNMAISLDSFLYGLHVLFKGDFRITARDEWVFADMDLLHKVVAPAIRMSLKLHQDQFTCPDEYEDPAVLYEAIQSFEKKVVICHEGDPAWRGAVLSNKEELLTLRHVVDEGADEYKVIMLHRSFLSFKVIKVNKECVRGLWAGQQQELIFLRNRNPERGSIQNNKQVLRNLINSSCDQPLGYPMYVSPLTTSYLGTHRQLKNIWGGPITLDRIRTWFWTKWVRMRKDCNARQHSGGNIEDVDGGGAPTTGGNNAPSGGSQESSAEQPRKGGAQHGVSSCEGTQRTGRRKGRSQSVQAHSALSQRPPMLSSSGPILESRQTFLQTSTSVHELAQRLSGSRLSLHASATSLHSQPPPVTTTGHLSVRERAEALIRSSLGSSTSSTLSFLFGKRSFSSALVISGLSAAEGGNTSDTQSSSSVNIVMGPSARAASQATRHLSEPCEPPDATEQGQLHDRCLAEAVADTLGVVCRRASQEDMGLDDTASQQSVSDEQ

SEQ ID NO: 11583 - protein, 9 aa, Artificial Sequence
  Synthetic polypeptide
SRAPKMLPI

SEQ ID NO: 11584 - protein, 22 aa, Artificial Sequence
  Synthetic polypeptide
VEHRRCCPFNVVRKTLCLASVF

SEQ ID NO: 11585 - protein, 299 aa, Artificial Sequence
  Synthetic polypeptide
STEDVAHLMWFERLYVWLQCFEKYILYPALILNALTIDAFLISNHRRLGTHWDIFLMIIAGMKLLRTSFCNPVYQFINLSFTVIFFHFDYKDISESFLLDFFMVSILFSKLGDLLHKLQFVLTYVAPWQMAWGSSFHVFAQLFAIPHSAMLFFQTIATSIFSTPLSPFLGSVIFITSYVRPVKFWEKNYNTRRVDNSNTRLAVQIERDPGNDDNNLNSIFYEHLTRTLQESLCGDLVLGRWGNYSSGDCFILASDDLNAFVHLIEIGNGLVTFQLRGLEFREYNILYGNVSQTPLLDQK

SEQ ID NO: 11586 - protein, 173 aa, Artificial Sequence
  Synthetic polypeptide
STEDVAHLMWFERLYVWLQCFEKYILYPALILNALTIDAFLISNHRRLGTHWDIFLMIIAGMKLLRTSFCNPVYQFINLSFTVIFFHFDYKDISESFLLDFFMVSILFSKLGDLLHKLQFVLTYVAPWQMAWGSSFHVFAQLFAIPRILSASIFTLQLRFTFYGSKLFIDPWQ

SEQ ID NO: 11587 - protein, 8 aa, Artificial Sequence
  Synthetic polypeptide
STEDVAHL

SEQ ID NO: 11588 - protein, 9 aa, Artificial Sequence
  Synthetic polypeptide
VEHRRCCPF

SEQ ID NO: 11589 - protein, 122 aa, Artificial Sequence
  Synthetic polypeptide
STEDVAHLMWFERLYVWLQCFEKYILYPALILNALTIDAFLISNHRRLGTHWDIFLMIIAGMKLLRTSFCNPVYQFINLSFTVIFFHFDYKDISESFLLDFFMVSILFSKASELAIFFILTF

SEQ ID NO: 11590 - protein, 23 aa, Artificial Sequence
  Synthetic polypeptide
IMRTHGHREGNITHWGLSEVSFY

SEQ ID NO: 11591 - protein, 70 aa, Artificial Sequence
  Synthetic polypeptide
EHMDTGRGTSHTGACQRCHSIRRPSHSTSVIYLTWYQSGKLTCVSSTHAGNHDQVSNTCKTSCHRNSHQW

SEQ ID NO: 11592 - protein, 2024 aa, Artificial Sequence
  Synthetic polypeptide
AAVNKNEFMFFAGSWMKLETIILSKLTQEQKTKLTHKWELNNENTWTQGGEHHTLGPVRGVILLEDHPIAPVSSTSPGIKVESLPASQAHMLETTTKSVIPVKPVATETLINGKGKERGGKGQPPLRHRSEGGLVDKGPLKKLPHLSLSQYDLLETDVSFQPWGSENSVLIPEPVSCPRGSIRERVQSKSPQDSLSSSCPQCDTIVAKPVEEPADTSCQVDTSCQGDLPLHQEVDSSDSEVAVTLIDTSQPGDPLSLHEPIKIVITMSSTPNSMTDLESSLHLRVVGTEKTSVKSDAEPTNPGAAGSPNAEQISIPVITLDLPEGGGGGVPCPEGNGSERTPERLKTRVSTNQCSGYGSGEGGNAIKDHSSSSREPWESVSRLTPDTGSESKVGKEGQTNLDPSSCKSSHEKRHARVLSVDSGTDVFLSKSSAEIVNDTEKTMPTSKSDLEAKEGQMPNESNFLEFVSLLESINTSKMTASSQLNGSAEQNEESGLLRDNCSQEKKEEILENEKPSGHSSKQGKPDLQSQDHTSTGPACTQPAKTTAFFQGNRQRQIIYRVTSQQDSSVLQVISGPETSVQEEISVDAMHVFIDEHGEIRSCYLKSGNQKEGPLQPLPSNNDCLSQAREMQVSSSSTTTSESQDPSSGDPAVSALQQQLLLMVARRTQSETPRHVSQDLEASSCSSTQGKFNREQFYKFIIFPGKWIKVWYDRLTLLALLDRTEDIKENVLAILLIVLVSLLGFLTLSQGFCKDMWVLLFCLVMASCQYSLLKSVQPDPASPIHGHNQIITYSRPIYFCVLCGLILLLDTGAKARHPPSYVVYGLKLFSPVFLQSARDYLIVFLYCFPAISLLGLFPQINTFCTYLLEQIDMLFFGGSAVSGITSAVYSVARSVLAAALLHAVCFSAVKEPWSMQHIPALFSAFCGLLVALSYHLSRQSSDPSVLMSFIQCRLFPKFLHQNLAESAADPLPKKMKDSVTDVLKWDLIVCAVVAVLSFAVSASTVFLSLRPFLSIVLFALAGAVGFVTHYVLPQLRKHHPWMWISHPILKNKEYHQREVRDVAHLMWFERLYVWLQCFEKYILYPALILNALTIDAFLISNHRRLGTHWDIFLMIIAGMKLLRTSFCNPVYQFINLSFTVIFFHFDYKDISESFLLDFFMVSILFSKLGDLLHKLQFVLTYVAPWQMAWGSSFHVFAQLFAIPHSAMLFFQTIATSIFSTPLSPFLGSVIFITSYVRPVKFWEKNYNTRRVDNSNTRLAVQIERDPGNDDNNLNSIFYEHLTRTLQESLCGDLVLGRWGNYSSGDCFILASDDLNAFVHLIEIGNGLVTFQLRGLEFRGTYCQQREVEAIMEGDEEDRGCCCCKPGHLPHLLSCNAAFHLRWLTWEITQTQYILEGYSILDNNAATMLQVFDLRRILIRYYIKSIIYYMVTSPKLLSWIKNESLLKSLQPFAKWHYIERDLAMFNINIDDDYVPCLQGITRASFCNVYLEWIQHCARKRQEPSTTLDSDEDSPLVTLSFALCTLGRRALGTAAHNMAISLDSFLYGLHVLFKGDFRITARDEWVFADMDLLHKVVAPAIRMSLKLHQDQFTCPDEYEDPAVLYEAIQSFEKKVVICHEGDPAWRGAVLSNKEELLTLRHVVDEGADEYKVIMLHRSFLSFKVIKVNKECVRGLWAGQQQELIFLRNRNPERGSIQNNKQVLRNLINSSCDQPLGYPMYVSPLTTSYLGTHRQLKNIWGGPITLDRIRTWFWTKWVRMRKDCNARQHSGGNIEDVDGGGAPTTGGNNAPSGGSQESSAEQPRKGGAQHGVSSCEGTQRTGRRKGRSQSVQAHSALSQRPPMLSSSGPILESRQTFLQTSTSVHELAQRLSGSRLSLHASATSLHSQPPPVTTTGHLSVRERAEALIRSSLGSSTSSTLSFLFGKRSFSSALVISGLSAAEGGNTSDTQSSSSVNIVMGPSARAASQATRHLSEPCEPPDATEQGQLHDRCLAEAVADTLGVVCRRASQEDMGLDDTASQQSVSDEQ

SEQ ID NO: 11593 - protein, 19 aa, Artificial Sequence
  Synthetic polypeptide
RDLQLTVFMDCDGKFEREN

SEQ ID NO: 11594 - protein, 429 aa, Artificial Sequence
  Synthetic polypeptide
HSHCASFFILSNEEISSSQSSWIVMVNLKEKIKELHQQYKEASEVKPPRDITAEFLVKSKHRDLTALCKEYDELAETQGKLEEKLQELEANPPSDVYLSSRDRQILDWHFANLEFANATPLSTLSLKHWDQDDDFEFTGSHLTVRNGYSCVPVALAEGLDIKLNTAVRQVRYTASGCEVIAVNTRSTSQTFIYKCDAVLCTLPLGVLKQQPPAVQFVPPLPEWKTSAVQRMGFGNLNKVVLCFDRVFWDPSVNLFGHVGSTTASRGELFLFWNLYKAPILLALVAGEAAGIMENISDDVIVGRCLAILKGIFGSSAVPQPKETVVSRWRADPWARGSYSYVAAGSSGNDYDLMAQPITPGPSIPGAPQPIPRLFFAGEHTIRNYPATVHGALLSGLREAGRIADQFLGAMYTLPRQATPGVPAQQSPSM

SEQ ID NO: 11595 - protein, 364 aa, Artificial Sequence
  Synthetic polypeptide
ENSFTSSKLILKQALIVVLQWCFNHNFSVRLYALVALKKLWTVCKVLSVEEFDALTPVIESSLHQVESMHGAGNAKKNWQRIQEHFFFATFHPLKDYCLETIFYILPRLSGLIEDEWITIDKFTRFTDVPLAAGFQWYLSQTQLSKLKPGDWSQQDIGTNLVEADNQAEWTDVQKKIIPWNSRVSDLDLELLFQDRAARLGKSISRLIVVASLIDKPTNLGGLCRTCEVFGASVLVVGSLQCISDKQFQHLSVSAEQWLPLVEVKPPQLIDYLQQKKTEGYTIIGVEQTAKSLDLTQYCFPEKSLLLLGNEREGIPANLIQQLDVCVEIPQQGIIRSLNVHVSGALLIWEYTRQQLLSHGDTKP

SEQ ID NO: 11596 - protein, 8 aa, Artificial Sequence
  Synthetic polypeptide
KTRSHLPN

SEQ ID NO: 11597 - protein, 26 aa, Artificial Sequence
  Synthetic polypeptide
KLVHIFQTNSEASPYSCAAVVFQSQF

SEQ ID NO: 11598 - protein, 45 aa, Artificial Sequence
  Synthetic polypeptide
VAIPPEERNRSLPRRELGFPSYLTLKMLKLFRSSSLKKYSLVKSY

SEQ ID NO: 11599 - protein, 26 aa, Artificial Sequence
  Synthetic polypeptide
PGFELPFHQKKETEACQGESWAFQVT

SEQ ID NO: 11600 - protein, 113 aa, Artificial Sequence
  Synthetic polypeptide
MGLSCHSTRRKKQKLAKERAGLSKLPDLKDAEAVQKFFLEEIQLGEELLAQGEYEKGVDHLTNAIAVCGQPQQLLQVLQQTLPPPVFQMLLTKLPTISQRIVSAQSLAEDDVE

SEQ ID NO: 11601 - protein, 64 aa, Artificial Sequence
  Synthetic polypeptide
KYKKKKISWAWWHAPVVPATWETEEERNRSLPRRELGFPSYLTLKMLKLFRSSSLKKYSLVKSY

SEQ ID NO: 11602 - protein, 25 aa, Artificial Sequence
  Synthetic polypeptide
SQLLGRLRKKETEACQGESWAFQVT

SEQ ID NO: 11603 - protein, 38 aa, Artificial Sequence
  Synthetic polypeptide
CSCQFTRNIEDKDVKFILIRKILMPMLCLRRRVLPRKH

SEQ ID NO: 11604 - protein, 4 aa, Artificial Sequence
  Synthetic polypeptide
RTKT

SEQ ID NO: 11605 - protein, 213 aa, Artificial Sequence
  Synthetic polypeptide
SILLMQLPVYKKYRGQRRKIHPDQKNINAYVVFKEESAATQALKRNGAQIADGFRIRVDLASETSSRDKRSVFVGNLPYKVEESAIEKHFLDCGSIMAVRIVRDKMTGIGKGFGYVLFENTDSVHLALKLNNSELMGRKLRVMRSVNKEKFKQQNSNPRLKNVSKPKQGLNFTSKTAEGHPKSLFIGEKAVLLKTKKKGQKKSGRPKKQRKQK

SEQ ID NO: 11606 - protein, 37 aa, Artificial Sequence
  Synthetic polypeptide
TWSVSSLHCWRPLIVSLSLYPQSLELSRNPGKRSSEC

SEQ ID NO: 11607 - protein, 312 aa, Artificial Sequence
  Synthetic polypeptide
VGTRESALASADLEEEIHQKQGQKRKNSQPGVKVADRKILDDTEDTVVSQRKKIQINQEEERLKNERTVFVGNLPVTCNKKKLKSFFKEYGQIESVRFRSLIPAEGTLSKKLAAIKRKIHPDQKNINAYVVFKEESAATQALKRNGAQIADGFRIRVDLASETSSRDKRSVFVGNLPYKVEESAIEKHFLDCGSIMAVRIVRDKMTGIGKGFGYVLFENTDSVHLALKLNNSELMGRKLRVMRSVNKEKFKQQNSNPRLKNVSKPKQGLNFTSKTAEGHPKSLFIGEKAVLLKTKKKGQKKSGRPKKQRKQK

SEQ ID NO: 11608 - protein, 6 aa, Artificial Sequence
  Synthetic polypeptide
EPGKAL

SEQ ID NO: 11609 - protein, 292 aa, Artificial Sequence
  Synthetic polypeptide
VGTRESALASADLEEEIHQKQGQKRKNSQPGVKVADRKILDDTEDTVVSQRKKIQINQEEERLKNERTVFVGNLPVTCNKKIPAEGTLSKKLAAIKRKIHPDQKNINAYVVFKEESAATQALKRNGAQIADGFRIRVDLASETSSRDKRSVFVGNLPYKVEESAIEKHFLDCGSIMAVRIVRDKMTGIGKGFGYVLFENTDSVHLALKLNNSELMGRKLRVMRSVNKEKFKQQNSNPRLKNVSKPKQGLNFTSKTAEGHPKSLFIGEKAVLLKTKKKGQKKSGRPKKQRKQK

SEQ ID NO: 11610 - protein, 11 aa, Artificial Sequence
  Synthetic polypeptide
VGTRESALASA

SEQ ID NO: 11611 - protein, 64 aa, Artificial Sequence
  Synthetic polypeptide
VGTRESALASADLEEEIHQKQGQKRKNSQPGVKVADRKILDDTEDTVVSQRKKIQINQEEERLK

SEQ ID NO: 11612 - protein, 60 aa, Artificial Sequence
  Synthetic polypeptide
FPQFQLPVVNCGLKTEMKRIKKKMKMMKKQKRRRRRKKKKRMKMMMTTMRKRSLSAIHQA

SEQ ID NO: 11613 - protein, 3 aa, Artificial Sequence
  Synthetic polypeptide
KQR

SEQ ID NO: 11614 - protein, 799 aa, Artificial Sequence
  Synthetic polypeptide
STVSVTCGQLWSENRDETNKEEDEDDEEAEEEEEEEEEEEDEDDDDNNEEEEFECYPPGMKVQVRYGRGKNQKMYEASIKDSDVEGGEVLYLVHYCGWNVRYDEWIKADKIVRPADKNVPKIKHRKKIKNKLDKEKDKDEKYSPKNCKLRRLSKPPFQTNPSPEMVSKLDLTDAKNSDTAHIKSIEITSILNGLQASESSAEDSEQEDERGAQDMDNNGKEESKIDHLTNNRNDLISKEEQNSSSLLEENKVHADLVISKPVSKSPERLRKDIEVLSEDTDYEEDEVTKKRKDVKKDTTDKSSKPQIKRGKRRYCNTEECLKTGSPGKKEEKAKNKESLCMENSSNSSSDEDEEETKAKMTPTKKYNGLEEKRKSLRTTGFYSGFSEVAEKRIKLLNNSDERLQNSRAKDRKDVWSSIQGQWPKKTLKELFSDSDTEAAASPPHPAPEEGVAEESLQTVAEEESCSPSVELEKPPPVNVDSKPIEEKTVEVNDRKAEFPSSGSNSVLNTPPTTPESPSSVTVTEGSRQQSSVTVSEPLAPNQEEVRSIKSETDSTIEVDSVAGELQDLQSEGNSSPAGFDASVSSSSSNQPEPEHPEKACTGQKRVKDAQGGGSSSKKQKRSHKATVVNNKKKGKGTNSSDSEELSAGESITKSQPVKSVSTGMKSHSTKSPARTQSPGKCGKNGDKDPDLKEPSNRLPKVYKWSFQMSDLENMTSAERITILQEKLQEIRKHYLSLKSEVASIDRRRKRLKKKERESAATSSSSSSPSSSSITAAVMLTLAEPSMSSASQNGMSVECR

SEQ ID NO: 11615 - protein, 640 aa, Artificial Sequence
  Synthetic polypeptide
STVSVTCGQLWSENRDETNKEEDEDDEEAEEEEEEEEEEEDEDDDDNNEEEEFECYPPGMKVQVRYGRGKNQKMYEASIKDSDVEGGEVLYLVHYCGWNVRYDEWIKADKIVRPADKNVPKIKHRKKIKNKLDKEKDKDEKYSPKNCKLRRLSKPPFQTNPSPEMVSKLDLTDAKNSDTAHIKSIEITSILNGLQASESSAEDSEQEDERGAQDMDNNGKEESKIDHLTNNRNDLISKEEQNSSSLLEENKVHADLVISKPVSKSPERLRKDIEVLSEDTDYEEDEVTKKRKDVKKDTTDKSSKPQIKRGKRRYCNTEECLKTGSPGKKEEKAKNKESLCMENSSNSSSDEDEEETKAKMTPTKKYNGLEEKRKSLRTTGFYSGFSEVAEKRIKLLNNSDERLQNSRAKDRKDVWSSIQGQWPKKTLKELFSDSDTEAAASPPHPAPEEGVAEESLQTVAEEESCSPSVELEKPPPVNVDSKPIEEKTVEVNDRKAEFPSSGSNSVLNTPPTTPESPSSVTVTEGSRQQSSVTVSEPLAPNQEEVRSIKSETDSTIEVDSVAGELQDLQSEGNSSPAGFDASVSSSSSNQPEPEHPEKACTGQKRVKDAQGGGSSSKKQKRSHKATVVNNKKKGKGSAPH

SEQ ID NO: 11616 - protein, 9 aa, Artificial Sequence
  Synthetic polypeptide
LTPVIPALW

SEQ ID NO: 11617 - protein, 7 aa, Artificial Sequence
  Synthetic polypeptide
SQHSGDI

SEQ ID NO: 11618 - protein, 1286 aa, Artificial Sequence
  Synthetic polypeptide
PGVVTHTCNPSTLVTFRHDSSTVEVQDDHIKGPLKVGAIVEVKNLDGAYQEAVINKLTDASWYTVVFDDGDEKTLRRSSLCLKGERHFAESETLDQLPLTNPEHFGTPVIGKKTNRGRRSNHIPEEESSSSSSDEDEDDRKQIDELLGKVVCVDYISLDKKKALWFPALVVCPDCSDEIAVKKDNILVRSFKDGKFTSVPRKDVHEITSDTAPKPDAVLKQAFEQALEFHKSRTIPANWKTELKEDSSSSEAEEEEEEEDDEKEKEDNSSEEEEEIEPFPEERENFLQQLYKFMEDRGTPINKRPVLGYRNLNLFKLFRLVHKLGGFDNIESGAVWKQVYQDLGIPVLNSAAGYNVKCAYKKYLYGFEEYCRSANIEFQMALPEKVVNKQCKECENVKEIKVKEENETEIKEIKMEEERNIIPREEKPIEDEIERKENIKPSLGSKKNLLESIPTHSDQEKEVNIKKPEDNENLDDKDDDTTRVDESLNIKVEAEEEKAKSGDETNKEEDEDDEEAEEEEEEEEEEEDEDDDDNNEEEEFECYPPGMKVQVRYGRGKNQKMYEASIKDSDVEGGEVLYLVHYCGWNVRYDEWIKADKIVRPADKNVPKIKHRKKIKNKLDKEKDKDEKYSPKNCKLRRLSKPPFQTNPSPEMVSKLDLTDAKNSDTAHIKSIEITSILNGLQASESSAEDSEQEDERGAQDMDNNGKEESKIDHLTNNRNDLISKEEQNSSSLLEENKVHADLVISKPVSKSPERLRKDIEVLSEDTDYEEDEVTKKRKDVKKDTTDKSSKPQIKRGKRRYCNTEECLKTGSPGKKEEKAKNKESLCMENSSNSSSDEDEEETKAKMTPTKKYNGLEEKRKSLRTTGFYSGFSEVAEKRIKLLNNSDERLQNSRAKDRKDVWSSIQGQWPKKTLKELFSDSDTEAAASPPHPAPEEGVAEESLQTVAEEESCSPSVELEKPPPVNVDSKPIEEKTVEVNDRKAEFPSSGSNSVLNTPPTTPESPSSVTVTEGSRQQSSVTVSEPLAPNQEEVRSIKSETDSTIEVDSVAGELQDLQSEGNSSPAGFDASVSSSSSNQPEPEHPEKACTGQKRVKDAQGGGSSSKKQKRSHKATVVNNKKKGKGTNSSDSEELSAGESITKSQPVKSVSTGMKSHSTKSPARTQSPGKCGKNGDKDPDLKEPSNRLPKVYKWSFQMSDLENMTSAERITILQEKLQEIRKHYLSLKSEVASIDRRRKRLKKKERESAATSSSSSSPSSSSITAAVMLTLAEPSMSSASQNGMSVECR

SEQ ID NO: 11619 - protein, 1200 aa, Artificial Sequence
  Synthetic polypeptide
PGVVTHTCNPSTLVTFRHDSSTVEVQDDHIKGPLKVGAIVEVKNLDGAYQEAVINKLTDASWYTVVFDDGDEKTLRRSSLCLKGERHFAESETLDQLPLTNPEHFGTPVIGKKTNRGRRSNHIPEEESSSSSSDEDEDDRKQIDELLGKVVCVDYISLDKKKALWFPALVVCPDCSDEIAVKKDNILVRSFKDGKFTSVPRKDVHEITSDTAPKPDAVLKQAFEQALEFHKSRTIPANWKTELKEDSSSSEAEEEEEEEDDEKEKEDNSSEEEEEIEPFPEERENFLQQLYKFMEDRGTPINKRPVLGYRNLNLFKLFRLVHKLGGFDNIESGAVWKQVYQDLGIPVLNSAAGYNVKCAYKKYLYGFEEYCRSANIEFQMALPEKVVNKQCKECENVKEIKVKEENETEIKEIKMEEERNIIPREEKPIEDEIERKENIKPSLGSKKNLLESIPTHSDQEKEVNIKKPEDNENLDDKDDDTTRVDESLNIKVEAEEEKAKSGYDEWIKADKIVRPADKNVPKIKHRKKIKNKLDKEKDKDEKYSPKNCKLRRLSKPPFQTNPSPEMVSKLDLTDAKNSDTAHIKSIEITSILNGLQASESSAEDSEQEDERGAQDMDNNGKEESKIDHLTNNRNDLISKEEQNSSSLLEENKVHADLVISKPVSKSPERLRKDIEVLSEDTDYEEDEVTKKRKDVKKDTTDKSSKPQIKRGKRRYCNTEECLKTGSPGKKEEKAKNKESLCMENSSNSSSDEDEEETKAKMTPTKKYNGLEEKRKSLRTTGFYSGFSEVAEKRIKLLNNSDERLQNSRAKDRKDVWSSIQGQWPKKTLKELFSDSDTEAAASPPHPAPEEGVAEESLQTVAEEESCSPSVELEKPPPVNVDSKPIEEKTVEVNDRKAEFPSSGSNSVLNTPPTTPESPSSVTVTEGSRQQSSVTVSEPLAPNQEEVRSIKSETDSTIEVDSVAGELQDLQSEGNSSPAGFDASVSSSSSNQPEPEHPEKACTGQKRVKDAQGGGSSSKKQKRSHKATVVNNKKKGKGTNSSDSEELSAGESITKSQPVKSVSTGMKSHSTKSPARTQSPGKCGKNGDKDPDLKEPSNRLPKVYKWSFQMSDLENMTSAERITILQEKLQEIRKHYLSLKSEVASIDRRRKRLKKKERESAATSSSSSSPSSSSITAAVMLTLAEPSMSSASQNGMSVECR

SEQ ID NO: 11620 - protein, 1127 aa, Artificial Sequence
  Synthetic polypeptide
PGVVTHTCNPSTLVTFRHDSSTVEVQDDHIKGPLKVGAIVEVKNLDGAYQEAVINKLTDASWYTVVFDDGDEKTLRRSSLCLKGERHFAESETLDQLPLTNPEHFGTPVIGKKTNRGRRSNHIPEEESSSSSSDEDEDDRKQIDELLGKVVCVDYISLDKKKALWFPALVVCPDCSDEIAVKKDNILVRSFKDGKFTSVPRKDVHEITSDTAPKPDAVLKQAFEQALEFHKSRTIPANWKTELKEDSSSSEAEEEEEEEDDEKEKEDNSSEEEEEIEPFPEERENFLQQLYKFMEDRGTPINKRPVLGYRNLNLFKLFRLVHKLGGFDNIESGAVWKQVYQDLGIPVLNSAAGYNVKCAYKKYLYGFEEYCRSANIEFQMALPEKVVNKQCKECENVKEIKVKEENETEIKEIKMEEERNIIPREEKPIEDEIERKENIKPSLGSKKNLLESIPTHSDQEKEVNIKKPEDNENLDDKDDDTTRVDESLNIKVEAEEEKAKSGDETNKEEDEDDEEAEEEEEEEEEEEDEDDDDNNEEEEFECYPPGMKVQVRYGRGKNQKMYEASIKDSDVEGGEVLYLVHYCGWNVRYDEWIKADKIVRPADKNVPKIKHRKKIKNKLDKEKDKDEKYSPKNCKLRRLSKPPFQTNPSPEMVSKLDLTDAKNSDTAHIKSIEITSILNGLQASESSAEDSEQEDERGAQDMDNNGKEESKIDHLTNNRNDLISKEEQNSSSLLEENKVHADLVISKPVSKSPERLRKDIEVLSEDTDYEEDEVTKKRKDVKKDTTDKSSKPQIKRGKRRYCNTEECLKTGSPGKKEEKAKNKESLCMENSSNSSSDEDEEETKAKMTPTKKYNGLEEKRKSLRTTGFYSGFSEVAEKRIKLLNNSDERLQNSRAKDRKDVWSSIQGQWPKKTLKELFSDSDTEAAASPPHPAPEEGVAEESLQTVAEEESCSPSVELEKPPPVNVDSKPIEEKTVEVNDRKAEFPSSGSNSVLNTPPTTPESPSSVTVTEGSRQQSSVTVSEPLAPNQEEVRSIKSETDSTIEVDSVAGELQDLQSEGNSSPAGFDASVSSSSSNQPEPEHPEKACTGQKRVKDAQGGGSSSKKQKRSHKATVVNNKKKGKGSAPH

SEQ ID NO: 11621 - protein, 457 aa, Artificial Sequence
  Synthetic polypeptide
PGVVTHTCNPSTLVTFRHDSSTVEVQDDHIKGPLKVGAIVEVKNLDGAYQEAVINKLTDASWYTVVFDDGDEKTLRRSSLCLKGERHFAESETLDQLPLTNPEHFGTPVIGKKTNRGRRSNHIPEEESSSSSSDEDEDDRKQIDELLGKVVCVDYISLDKKKALWFPALVVCPDCSDEIAVKKDNILVRSFKDGKFTSVPRKDVHEITSDTAPKPDAVLKQAFEQALEFHKSRTIPANWKTELKEDSSSSEAEEEEEEEDDEKEKEDNSSEEEEEIEPFPEERENFLQQLYKFMEDRGTPINKRPVLGYRNLNLFKLFRLVHKLGGFDNIESGAVWKQVYQDLGIPVLNSAAGYNVKCAYKKYLYGFEEYCRSANIEFQMALPEKVVNKQCKECENVKEIKVKEENETEIKEIKMEEERNIIPREEKPIEDEIERKENIKPSLGSKKNLLESIPTHS

SEQ ID NO: 11622 - protein, 138 aa, Artificial Sequence
  Synthetic polypeptide
GQEFKTSLGNVARPCPYKKLKSFRLNWAVDRTGKWQELEYPSPAYPAFACGSGYVISKDIVKWLASNSGRLKTYQGEDVSMGIWMAAIGPKRYQDSLWLCEKTCETGMLSSPQYSPWELTELWKLKERCGDPCRCQAR

SEQ ID NO: 11623 - protein, 4 aa, Artificial Sequence
  Synthetic polypeptide
KVSD

SEQ ID NO: 11624 - protein, 22 aa, Artificial Sequence
  Synthetic polypeptide
PGQRCKTLSLQKIKKFQTELGS

SEQ ID NO: 11625 - protein, 88 aa, Artificial Sequence
  Synthetic polypeptide
VMLETQTRISGTNPGMVPSHGFSPRSYFFDNPRRYDSDDDLAWNIAPQGLQGGFAPDYYDWGQQTNSFLAQAGTLQDSTLDPDKPSLG

SEQ ID NO: 11626 - protein, 110 aa, Artificial Sequence
  Synthetic polypeptide
SKCGSLPSVSESLRALGVKILRSCWRPRPESLGPTLEWSPAMDSVPDLISLTTLEDMTVMMTLPGTLPLRDFREVLLQITMIGDNKLTASWHKQELCKTQLWILTNQALG

SEQ ID NO: 11627 - protein, 32 aa, Artificial Sequence
  Synthetic polypeptide
RFLGHVGDPDQNLWDQPWNGPQPWIQSQILFL

SEQ ID NO: 11628 - protein, 35 aa, Artificial Sequence
  Synthetic polypeptide
VMLETQTRISGTNPGMVPSHGFSPRSYFFDNPRRY

SEQ ID NO: 11629 - protein, 57 aa, Artificial Sequence
  Synthetic polypeptide
SKCGSLPSVSESLRALGVKILRSCWRPRPESLGPTLEWSPAMDSVPDLISLTTLEDM

SEQ ID NO: 11630 - protein, 55 aa, Artificial Sequence
  Synthetic polypeptide
VMLETQTRISGTNPGMVPSHGFSPRSYFFDNPRRYDSDDDLAWNIAPQGLQGGLL

SEQ ID NO: 11631 - protein, 77 aa, Artificial Sequence
  Synthetic polypeptide
SKCGSLPSVSESLRALGVKILRSCWRPRPESLGPTLEWSPAMDSVPDLISLTTLEDMTVMMTLPGTLPLRDFREDYY

SEQ ID NO: 11632 - protein, 235 aa, Artificial Sequence
  Synthetic polypeptide
QSYLHCLCLEKRVFYKLISGLHASINLHLCANYLLEETWGKPSWGPNIKEFKHRFDPVETKGEGPRRLKNLYFLYLIELRALSKVAPYFERSIVDLYTGNAEEDADTKTLLLNIFQDTKSFPMHFDEKSMFAGDKKGAKSLKEEFRLHFKNISRIMDCVGCDKCRLWGKLQTQGLGTALKILFSEKEIQKLPENSPSKGFQLTRQEIVALLNAFGRLSTSIRDLQNFKVLLQHSR

SEQ ID NO: 11633 - protein, 97 aa, Artificial Sequence
  Synthetic polypeptide
RQLTQPFLRFSFLIWSVERSNSSPTYTVCVWRKESSISLYRDFMLASIYIYAQIIFWKKPGVSPVGDLILKNSNTALTLWKPREKVQEGSRIFTFYT

SEQ ID NO: 11634 - protein, 28 aa, Artificial Sequence
  Synthetic polypeptide
DSVSSSGAWRGAIAVLLTLFVSGEKSLL

SEQ ID NO: 11635 - protein, 47 aa, Artificial Sequence
  Synthetic polypeptide
ERRKIAPSILSSVKYSGPERQECETSVMPASSPPLPHTWGQLFKIIW

SEQ ID NO: 11636 - protein, 43 aa, Artificial Sequence
  Synthetic polypeptide
STRDQRDRSVRLQSCLPPALPCPIPGVNCLRSYGKGTSGRHRP

SEQ ID NO: 11637 - protein, 30 aa, Artificial Sequence
  Synthetic polypeptide
GQMWWLVPVISALWEAEAGGSPQIVLKSPA

SEQ ID NO: 11638 - protein, 16 aa, Artificial Sequence
  Synthetic polypeptide
SLHFGRPKQADHPRSF

SEQ ID NO: 11639 - protein, 151 aa, Artificial Sequence
  Synthetic polypeptide
PDVVARACNLCTLGGRSRRITPDRSEVSSLSSEAPETPESLGSPASSSSLMSPLEPGDPSQAPPNSEEGLREPPGTSRPSLTSGTTPSEMYLPVRFSSESTRSYRRGARSPEDGPSARQPLPRRNVPVGITEGDGSRTGSLPASSVQLLQD

SEQ ID NO: 11640 - protein, 15 aa, Artificial Sequence
  Synthetic polypeptide
PQRGPSWRRSAIGPG

SEQ ID NO: 11641 - protein, 58 aa, Artificial Sequence
  Synthetic polypeptide
LPPSFSGFRSQLRHHFPTSPNEGQAGEGARSGQGDRRDPWGGGPGHAERAAHLPAAHV

SEQ ID NO: 11642 - protein, 794 aa, Artificial Sequence
  Synthetic polypeptide
LAPALSILALAPALGPSHGPSLLPSSSFLQASQASDPSSDITSQLAPTRAKLEKERDRARVTGGIPGEVAQDMQRERRIFQLHMCEYLLKAGESQMKQGPDFLQSLIKFFHAQHNFFQDGWKAAQSLFPFIEKLAASVHALHQAQEDELQKLTQLRDSLRGTLQLESREEHLSRKNSGCGYSIHQHQGNKQFGTEKVGFLYKKSDGIRRVWQKRKCGVKYGCLTISHSTINRPPVKLTLLTCQVRPNPEEKKCFDLVTHNRTYHFQAEDEHECEAWVSVLQNSKDEALSSAFLGEPSAGPGSWGSAGHDGEPHDLTKLLIAEVKSRPGNSQCCDCGAADPTWLSTNLGVLTCIQCSGVHRELGVRFSRMQSLTLDLLGPSELLLALNMGNTSFNEVMEAQLPSHGGPKPSAESDMGTRRDYIMAKYVEHRFARRCTPEPQRLWTAICNRDLLSVLEAFANGQDFGQPLPGPDAQAPEELVLHLAVKVANQASLPLVDFIIQNGGHLDAKAADGNTALHYAALYNQPDCLKLLLKGRALVGTVNEAGETALDIARKKHHKECEELLEQAQAGTFAFPLHVDYSWVISTEPGSDSEEDEEEKRCLLKLPAQAHWASGRLDISNKTYETVASLGAATPQGESEDCPPPLPVKNSSRTLVQGCARHASGDRSEVSSLSSEAPETPESLGSPASSSSLMSPLEPGDPSQAPPNSEEGLREPPGTSRPSLTSGTTPSEMYLPVRFSSESTRSYRRGARSPEDGPSARQPLPRRNVPVGITEGDGSRTGSLPASSVQLLQD

SEQ ID NO: 11643 - protein, 122 aa, Artificial Sequence
  Synthetic polypeptide
FNLHLLRTTCRYISRAPKGPSKSTCAQRRCRSRTVLPRSLSPLPPPSAPALTLPSPAAAPTLASWSPQHPQCQHQRQPPSRPHRLHPWSPWRLLTACWSCRTHSCSRLRTSSCPRPWRAAPL

SEQ ID NO: 11644 - protein, 158 aa, Artificial Sequence
  Synthetic polypeptide
SPFAEDNLQIYLKSTQGPIEVYLCPEEVQEPDSPSEEPLPSTSTLCPSPDSAQPSSSTDPSIMEPTASSVPAPAPTPQQAPPPPSLVPLEATDSLLELPHPLLQQTEDQFLSPTLACSSPLISFSPSLDQDDYLWGLEAGEGISDLFDSYDLGDLLIN

SEQ ID NO: 11645 - protein, 55 aa, Artificial Sequence
  Synthetic polypeptide
EPSWLSDQQITKRPVKLKQGKYTRSPQKSICSLSRKTWNNLLFKPKLTKRQRKIH

SEQ ID NO: 11646 - protein, 16 aa, Artificial Sequence
  Synthetic polypeptide
LRSHLGYQINRSQKGL

SEQ ID NO: 11647 - protein, 148 aa, Artificial Sequence
  Synthetic polypeptide
LGAILVIRSTDHKKACEVEAGKVYQVSSKEHMQPFKENMEQFIIQAKIDQEAEENSLTETHKCFLETTAYFFMKPKLGEKEVSPNAFFSIWHEFSSDFKDFWKKENKLLLQERVKEAEEVCRQKKGKSLYKIKPRHDSGIKAKISMKT

SEQ ID NO: 11648 - protein, 24 aa, Artificial Sequence
  Synthetic polypeptide
EPSWLSDQQITKRPKLTKRQRKIH

SEQ ID NO: 11649 - protein, 17 aa, Artificial Sequence
  Synthetic polypeptide
LRSHLGYQINRSQKGQN

SEQ ID NO: 11650 - protein, 117 aa, Artificial Sequence
  Synthetic polypeptide
LGAILVIRSTDHKKAKIDQEAEENSLTETHKCFLETTAYFFMKPKLGEKEVSPNAFFSIWHEFSSDFKDFWKKENKLLLQERVKEAEEVCRQKKGKSLYKIKPRHDSGIKAKISMKT

SEQ ID NO: 11651 - protein, 51 aa, Artificial Sequence
  Synthetic polypeptide
PSRRRTVDEPVKLKQGKYTRSPQKSICSLSRKTWNNLLFKPKLTKRQRKIH

SEQ ID NO: 11652 - protein, 3 aa, Artificial Sequence
  Synthetic polypeptide
MSL

SEQ ID NO: 11653 - protein, 764 aa, Artificial Sequence
  Synthetic polypeptide
GRVQCLTPVIPALWEAELLKYLKKLSTLPITVDILAETGVGKTVNSLRKHEHVGSFARDLVAQWKKLVPVERNAEPDEQDFEKSNSRKRPRDALQKEEEMEGDYQETWKATGSRSYSPDHRQKKHRKLSELERPHKVSHGHERRDERKRCHRMSPTYSSDPESSDYGHVQSPPSCTSPHQMYVDHYRSLEEDQEPIVSHQKPGKGHSNAFQDRLGASQERHLGEPHGKGVVSQNKEHKSSHKDKRPVDAKSDEKASVVSREKSHKALSKEENRRPPSGDNAREKPPSSGVKKEKDREGSSLKKKCLPPSEAASDNHLKKPKHRDPEKAKLDKSKQGLDSFDTGKGAGDLLPKVKEKGSNNLKTPEGKVKTNLDRKSLGSLPKVEETDMEDEFEQPTMSFESYLSYDQPRKKKKKIVKTSATALGDKGLKKNDSKSTGKNLDSVQKLPKVNKTKSEKPAGADLAKLRKVPDVLPVLPDLPLPAIQANYRPLPSLELISSFQPKRKAFSSPQEEEEAGFTGRRMNSKMQVYSGSKCAYLPKMMTLHQQCIRVLKNNIDSIFEVGGVPYSVLEPVLERCTPDQLYRIEEYNHVLIEETDQLWKVHCHRDFKEERPEEYESWREMYLRLQDAREQRLRVLTKNIQFAHANKPKGRQAKMAFVNSVAKPPRDVRRRQEKFGTGGAAVPEKIKIKPAPYPMGSSHASASSISFNPSPEEPAYDGPSTSSAHLAPVVSSTVSYDPRKPTVKKIAPMMAKTIKAFKNRFSRR

SEQ ID NO: 11654 - protein, 9 aa, Artificial Sequence
  Synthetic polypeptide
SQHFGRPSY

SEQ ID NO: 11655 - protein, 44 aa, Artificial Sequence
  Synthetic polypeptide
PSAVPHTCNPSTLGGRAIEIFEETLHPAYYSRHSCGDWGWENSK

SEQ ID NO: 11656 - protein, 42 aa, Artificial Sequence
  Synthetic polypeptide
ALSSLLGYQIDCPGIAVLVFESPLLYFRMTPKPKRTWMCKYN

SEQ ID NO: 11657 - protein, 280 aa, Artificial Sequence
  Synthetic polypeptide
PQSPSAPGCVNTTEVDIKKSSRMRNPHKTRKSVYGLQNDIRSHSPTHTPTPETKPPTEDELQQQIKYWQIQLDRHRLKMSKVADSLLSYTEQYLEYDPFLLPPDPSNPWLSDDTTFWELEASKEPSQQRVKRWGFGMDEALKDPVGREQFLKFLESEFSSENLRFWLAVEDLKKRPIKEVPSRVQEIWQEFLAPGAPSAINLDSKSYDKTTQNVKEPGRYTFEDAQEHIYKLMKSDSYPRFIRSSAYQELLQAKKKGRNIPIFPCHKNCTPTLRASTNLL

SEQ ID NO: 11658 - protein, 35 aa, Artificial Sequence
  Synthetic polypeptide
SSRLSDRLSWYCSACVRVTLTLLQNDPKAQAHLDV

SEQ ID NO: 11659 - protein, 298 aa, Artificial Sequence
  Synthetic polypeptide
PQSPSAPGCVNTTEVDIKKSSRMRNPHKTRKSVYGLQNDIRSHSPTHTPTPETKPPTEDELQQQIKYWQIQLDRHRLKMSKVADSLLSYTEQYLEYDPFLLPPDPSNPWLSDDTTFWELEASKEPSQQRVKRWGFGMDEALKDPVGREQFLKFLESEFSSENLRFWLAVEDLKKRPIKEVPSRVQEIWQEFLAPGAPSAINLDSKSYDKTTQNVKEPGRYTFEDAQEHIYKLMKSDSYPRFIRSSAYQELLQAKKKSGNSMDRRTSFEKFAQNVGRNIPIFPCHKNCTPTLRASTNLL

SEQ ID NO: 11660 - protein, 272 aa, Artificial Sequence
  Synthetic polypeptide
PQSPSAPGCVNTTEVDIKKSSRMRNPHKTRKSVYGLQNDIRSHSPTHTPTPETKPPTEDELQQQIKYWQIQLDRHRLKMSKVADSLLSYTEQYLEYDPFLLPPDPSNPWLSDDTTFWELEASKEPSQQRVKRWGFGMDEALKDPVGREQFLKFLESEFSSENLRFWLAVEDLKKRPIKEVPSRVQEIWQEFLAPGAPSAINLDSKSYDKTTQNVKEPGRYTFEDAQEHIYKLMKSDSYPRFIRSSAYQELLQAKKKGKSLTSKRLTSLAQSY

SEQ ID NO: 11661 - protein, 290 aa, Artificial Sequence
  Synthetic polypeptide
PQSPSAPGCVNTTEVDIKKSSRMRNPHKTRKSVYGLQNDIRSHSPTHTPTPETKPPTEDELQQQIKYWQIQLDRHRLKMSKVADSLLSYTEQYLEYDPFLLPPDPSNPWLSDDTTFWELEASKEPSQQRVKRWGFGMDEALKDPVGREQFLKFLESEFSSENLRFWLAVEDLKKRPIKEVPSRVQEIWQEFLAPGAPSAINLDSKSYDKTTQNVKEPGRYTFEDAQEHIYKLMKSDSYPRFIRSSAYQELLQAKKKSGNSMDRRTSFEKFAQNVGKSLTSKRLTSLAQSY

SEQ ID NO: 11662 - protein, 286 aa, Artificial Sequence
  Synthetic polypeptide
GWARWLTPVIPALWKAEYSFMAVIHFAGLKAVGESVQKPLDYYRVNLTGTIQLLEIMKAHGVKNLVFSSSATVYGNPQYLPLDEAHPTGGCTNPYGKSKFFIEEMIRDLCQADKTWNAVLLRYFNPTGAHASGCIGEDPQGIPNNLMPYVSQVAIGRREALNVFGNDYDTEDGTGVRDYIHVVDLAKGHIAALRKLKEQCGCRIYNLGTGTGYSVLQMVQAMEKASGKKIPYKVVARREGDVAACYANPSLAQEELGWTAALGLDRMCEDLWRWQKQNPSGFGTQA

SEQ ID NO: 11663 - protein, 37 aa, Artificial Sequence
  Synthetic polypeptide
FQHFGRPSTALWRSSTLRGSRPWASRCRSLWIITELT

SEQ ID NO: 11664 - protein, 44 aa, Artificial Sequence
  Synthetic polypeptide
MGTVAHACNSSTLEGRVQLYGGHPLCGAQGRGRVGAEASGLLQS

SEQ ID NO: 11665 - protein, 241 aa, Artificial Sequence
  Synthetic polypeptide
GWARWLTPVIPALWKAEYSFMAVIHFAGLKAVGESVQKPLDYYRVNLTGTIQLLEIMKAHGVKNLVFSSSATVYGNPQYLPLDEAHPTGGCTNPYGKSKFFIEEMIRDLCQADKTWNAVLLRYFNPTGAHASGCIGEDPQGIPNNLMPYVSQVAIGRREALNVFGNDYDTEDGTGVRDYIHVVDLAKGHIAALRKLKEQCGCRIPYKVVARREGDVAACYANPSLAQEELGWTAALGLDRM

SEQ ID NO: 11666 - protein, 229 aa, Artificial Sequence
  Synthetic polypeptide
GWARWLTPVIPALWKAEYSFMAVIHFAGLKAVGESVQKPLDYYRVNLTGTIQLLEIMKAHGVKNLVFSSSATVYGNPQYLPLDEAHPTGGCTNPYGKSKFFIEEMIRDLCQADKTWNAVLLRYFNPTGAHASGCIGEDPQGIPNNLMPYVSQVAIGRREALNVFGNDYDTEDGTGVRDYIHVVDLAKGHIAALRKLKEQCGCRIYNLGTGTGYSVLQMVQAMEKASGKK

SEQ ID NO: 11667 - protein, 132 aa, Artificial Sequence
  Synthetic polypeptide
GWARWLTPVIPALWKAEYSFMAVIHFAGLKAVGESVQKPLDYYRVNLTGTIQLLEIMKAHGVKNLVFSSSATVYGNPQYLPLDEAHPTGGCTNPYGKSKFFIEEMIRDLCQADKTWNAVLLRYFNPTGAHAS

SEQ ID NO: 11668 - protein, 320 aa, Artificial Sequence
  Synthetic polypeptide
NGQHSLGVVLEIRENVSTSSMGTLPKRVKIVEVGPRDGLQNEKNIVSTPVKIKLIDMLSEAGLSVIETTSFVSPKWVPQMGDHTEVLKGIQKFPGINYPVLTPNLKGFEAAVAAGAKEVVIFGAASELFTKKNINCSIEESFQRFDAILKAAQSANISVRGYVSCALGCPYEGKISPAKVAEVTKKFYSMGCYEISLGDTIGVGTPGIMKDMLSAVMQEVPLAALAVHCHDTYGQALANTLMALQMGVSVVDSSVAGLGGCPYAQGASGNLATEDLVYMLEGLGIHTGVNLQKLLEAGNFICQALNRKTSSKVAQATCKL

SEQ ID NO: 11669 - protein, 42 aa, Artificial Sequence
  Synthetic polypeptide
HSYLLSLNLSSFVCKTDNIPLGLFWKLEKMSAPHLWALYQSG

SEQ ID NO: 11670 - protein, 28 aa, Artificial Sequence
  Synthetic polypeptide
RKCQHLIYGHFTKAGENCGSWSPRWTTK

SEQ ID NO: 11671 - protein, 249 aa, Artificial Sequence
  Synthetic polypeptide
NGQHSLGVVLEIRENVSTSSMGTLPKRVKIVEVGPRDGLQNEKNIVSTPVKIKLIDMLSEAGLSVIETTSFVSPKWVPQMGDHTEVLKGIQKFPGINYPVLTPNLKGFEAAVTKKFYSMGCYEISLGDTIGVGTPGIMKDMLSAVMQEVPLAALAVHCHDTYGQALANTLMALQMGVSVVDSSVAGLGGCPYAQGASGNLATEDLVYMLEGLGIHTGVNLQKLLEAGNFICQALNRKTSSKVAQATCKL

SEQ ID NO: 11672 - protein, 181 aa, Artificial Sequence
  Synthetic polypeptide
NGQHSLGVVLEIRENVSTSSMGTLPKRVKIVEVGPRDGLQNEKVTKKFYSMGCYEISLGDTIGVGTPGIMKDMLSAVMQEVPLAALAVHCHDTYGQALANTLMALQMGVSVVDSSVAGLGGCPYAQGASGNLATEDLVYMLEGLGIHTGVNLQKLLEAGNFICQALNRKTSSKVAQATCKL

SEQ ID NO: 11673 - protein, 10 aa, Artificial Sequence
  Synthetic polypeptide
ATWQAKIPSG

SEQ ID NO: 11674 - protein, 20 aa, Artificial Sequence
  Synthetic polypeptide
DKTFLFLKLPGKPKFLPDRI

SEQ ID NO: 11675 - protein, 481 aa, Artificial Sequence
  Synthetic polypeptide
HQNCETRHFCFLSYLASQNSFRIEYDTFGELKVPNDKYYGAQTVRSTMNFKIGGVTERMPTPVIKAFGILKRAAAEVNQDYGLDPKIANAIMKAADEVAEGKLNDHFPLVVWQTGSGTQTNMNVNEVISNRAIEMLGGELGSKIPVHPNDHVNKSQSSNDTFPTAMHIAAAIEVHEVLLPGLQKLHDALDAKSKEFAQIIKIGRTHTQDAVPLTLGQEFSGYVQQVKYAMTRIKAAMPRIYELAAGGTAVGTGLNTRIGFAEKVAAKVAALTGLPFVTAPNKFEALAAHDALVELSGAMNTTACSLMKIANDIRFLGSGPRSGLGELILPENEPGSSIMPGKVNPTQCEAMTMVAAQVMGNHVAVTVGGSNGHFELNVFKPMMIKNVLHSARLLGDASVSFTENCVVGIQANTERINKLMNESLMLVTALNPHIGYDKAAKIAKTAHKNGSTLKETAIELGYLTAEQFDEWVKPKDMLGPK

SEQ ID NO: 11676 - protein, 71 aa, Artificial Sequence
  Synthetic polypeptide
PTLRTSFPSCVLPYPPCLPPSWLLPAQCASSSPNSEFLKSRDWVLCIFSPVTGTVSACSSFVVWKIFRQFK

SEQ ID NO: 11677 - protein, 26 aa, Artificial Sequence
  Synthetic polypeptide
LEQCLHVVASLCGRSSDNSSDQDFKI

SEQ ID NO: 11678 - protein, 55 aa, Artificial Sequence
  Synthetic polypeptide
GSANWPEGLVLCQFFKAHEVCSFDDKASRRLHKLAESCVLELELQRRGASSGFGW

SEQ ID NO: 11679 - protein, 355 aa, Artificial Sequence
  Synthetic polypeptide
GLQTGQRDWSSASFLRPMRYVVLTTKHHEGFTNWPSPVSWNWNSKDVGPHRDLVGELGTALRKRNIRYGLYHSLLEWFHPLYLLDKKNGFKTQHFVSAKTMPELYDLVNSYKPDLIWSDGEWECPDTYWNSTNFLSWLYNDSPVKDEVVVNDRWGQNCSCHHGGYYNCEDKFKPQSLPDHKWEMCTSIDKFSWGYRRDMALSDVTEESEIISELVQTVSLGGNYLLNIGPTKDGLIVPIFQERLLAVGKWLSINGEAIYASKPWRVQWEKNTTSVWYTSKGSAVYAIFLHWPENGVLNLESPITTSTTKITMLGIQGDLKWSTDPDKGLFISLPQLPPSAVPAEFAWTIKLTGVK

SEQ ID NO: 11680 - protein, 47 aa, Artificial Sequence
  Synthetic polypeptide
WVYQEFLFLLLSHFLLPLPCKKSVSSPATILRPPQPCGTNCPGGKYS

SEQ ID NO: 11681 - protein, 435 aa, Artificial Sequence
  Synthetic polypeptide
GLLSPVELIALVENIPEGLNYSENAPFHLSLFQGWMNLLNMAKKSVDIVSSHWDLNHTHPSACQGQRLFEKLLQLTSQNIEIKLVSDVTADSKVLEALKLKGAEVTYMNMTAYNKGRLQSSFWIVDKQHVYIGSAGLDWQSLGQMKELGVIFYNCSCLVLDLQRIFALYSSLKFKSRVPQTWSKRLYGVYDNEKKLQLQLNETKSQAFVSNSPKLFCPKNRSFDIDAIYSVIDDAKQYVYIAVMDYLPISSTSTKRTYWPDLDAKIREALVLRSVRVRLLLSFWKETDPLTFNFISSLKAICTEIANCSLKVKFFDLERENACATKEQKNHTFPRLNRNKYMVTDGAAYIGNFDWVGNDFTQNAGTGLVINQADVRNNRSIIKQLKDVFERDWYSPYAKTLQPTKQPNCSSLFKLKPLSNKTATDDTGGKDPRNV

SEQ ID NO: 11682 - protein, 96 aa, Artificial Sequence
  Synthetic polypeptide
GLLSPVELIALVENIPEGLNYSENAPFHLSLFQGWMNLLNMAKKSVDIVSSHWDLNHTHPSACQGQRLFEKLLQLTSQNIEIKLVSDVTADSKEPR

SEQ ID NO: 11683 - protein, 101 aa, Artificial Sequence
  Synthetic polypeptide
GLLSPVELIALVENIPEGLNYSENAPFHLSLFQGWMNLLNMAKKSVDIVSSHWDLNHTHPSACQGQRLFEKLLQLTSQNIEIKLVSDVTADSKVLEALKLK

SEQ ID NO: 11684 - protein, 455 aa, Artificial Sequence
  Synthetic polypeptide
DITTDPTEIQTTLREYYKHLYANKLENLEEMDKFLDTYTLPRLNQEEVESLNRPITGAEIVAIINSLPTKKSPGPDGFTAEFYQREEWTEAIQAVADRLQRQEEERMNCSPTSQIDNIGEEEMDASTTHHKRKTMNDFDYLKLLGKGTFGKVILVREKASGKYYAMKILKKEVIIAKDEVAHTLTESRVLKNTRHPFLTSLKYSFQTKDRLCFVMEYVNGGELFFHLSRERVFSEDRTRFYGAEIVSALDYLHSGKIVYRDLKLENLMLDKDGHIKITDFGLCKEGITDAATMKTFCGTPEYLAPEVLEDNDYGRAVDWWGLGVVMYEMMCGRLPFYNQDHEKLFELILMEDIKFPRTLSSDAKSLLSGLLIKDPNKRLGGGPDDAKEIMRHSFFSGVNWQDVYDKKLVPPFKPQVTSETDTRYFDEEFTAQTITITPPEKCQQSDCGMLGNWKK

SEQ ID NO: 11685 - protein, 31 aa, Artificial Sequence
  Synthetic polypeptide
SIAYQRKRVQDQMDSQPNSTRGKNGQKLSRL

SEQ ID NO: 11686 - protein, 43 aa, Artificial Sequence
  Synthetic polypeptide
LTNEKESRTRWIHSRILPEGRMDRSYPGCSRQTAEARRGENEL

SEQ ID NO: 11687 - protein, 469 aa, Artificial Sequence
  Synthetic polypeptide
DITTDPTEIQTTLREYYKHLYANKLENLEEMDKFLDTYTLPRLNQEEVESLNRPITGAEIVAIINSLPTKKSPGPDGFTAEFYQREEWTEAIQAVADRLQRQEEERMNCSPTSQIDNIGEEEMDASTTHHKRKTMNDFDYLKLLGKGTFGKVILVREKASGKYYAMKILKKEVIIAKDEVAHTLTESRVLKNTRHPFLTSLKYSFQTKDRLCFVMEYVNGGELFFHLSRERVFSEDRTRFYGAEIVSALDYLHSGKIVYRDLKLENLMLDKDGHIKITDFGLCKEGITDAATMKTFCGTPEYLAPEVLEDNDYGRAVDWWGLGVVMYEMMCGRLPFYNQDHEKLFELILMEDIKFPRTLSSDAKSLLSGLLIKDPNKRLGGGPDDAKEIMRHSFFSGVNWQDVYDKKLVPPFKPQVTSETDTRYFDEEFTAQTITITPPEKYDEDGMDCMDNERRPHFPQFSYSASGRE

SEQ ID NO: 11688 - protein, 129 aa, Artificial Sequence
  Synthetic polypeptide
DITTDPTEIQTTLREYYKHLYANKLENLEEMDKFLDTYTLPRLNQEEVESLNRPITGAEIVAIINSLPTKKSPGPDGFTAEFYQREEWTEAIQAVADRLQRQEEERMNCSPTSQIDNIGEEEMDASTTH

SEQ ID NO: 11689 - protein, 4 aa, Artificial Sequence
  Synthetic polypeptide
KENI

SEQ ID NO: 11690 - protein, 26 aa, Artificial Sequence
  Synthetic polypeptide
ALERRIYKKLEAKILPFEDRWLIHRI

SEQ ID NO: 11691 - protein, 461 aa, Artificial Sequence
  Synthetic polypeptide
PWAKVAVEHLKGEYIKNWRPRYFLLKTDGSFIGYKEKPQDVDLPYPLNNFSVAKCQLMKTERPKPNTFIIRCLQWTTVIERTFHVDTPEEREEWTEAIQAVADRLQRQEEERMNCSPTSQIDNIGEEEMDASTTHHKRKTMNDFDYLKLLGKGTFGKVILVREKASGKYYAMKILKKEVIIAKDEVAHTLTESRVLKNTRHPFLTSLKYSFQTKDRLCFVMEYVNGGELFFHLSRERVFSEDRTRFYGAEIVSALDYLHSGKIVYRDLKLENLMLDKDGHIKITDFGLCKEGITDAATMKTFCGTPEYLAPEVLEDNDYGRAVDWWGLGVVMYEMMCGRLPFYNQDHEKLFELILMEDIKFPRTLSSDAKSLLSGLLIKDPNKRLGGGPDDAKEIMRHSFFSGVNWQDVYDKKLVPPFKPQVTSETDTRYFDEEFTAQTITITPPEKCQQSDCGMLGNWKK

SEQ ID NO: 11692 - protein, 475 aa, Artificial Sequence
  Synthetic polypeptide
PWAKVAVEHLKGEYIKNWRPRYFLLKTDGSFIGYKEKPQDVDLPYPLNNFSVAKCQLMKTERPKPNTFIIRCLQWTTVIERTFHVDTPEEREEWTEAIQAVADRLQRQEEERMNCSPTSQIDNIGEEEMDASTTHHKRKTMNDFDYLKLLGKGTFGKVILVREKASGKYYAMKILKKEVIIAKDEVAHTLTESRVLKNTRHPFLTSLKYSFQTKDRLCFVMEYVNGGELFFHLSRERVFSEDRTRFYGAEIVSALDYLHSGKIVYRDLKLENLMLDKDGHIKITDFGLCKEGITDAATMKTFCGTPEYLAPEVLEDNDYGRAVDWWGLGVVMYEMMCGRLPFYNQDHEKLFELILMEDIKFPRTLSSDAKSLLSGLLIKDPNKRLGGGPDDAKEIMRHSFFSGVNWQDVYDKKLVPPFKPQVTSETDTRYFDEEFTAQTITITPPEKYDEDGMDCMDNERRPHFPQFSYSASGRE

SEQ ID NO: 11693 - protein, 135 aa, Artificial Sequence
  Synthetic polypeptide
PWAKVAVEHLKGEYIKNWRPRYFLLKTDGSFIGYKEKPQDVDLPYPLNNFSVAKCQLMKTERPKPNTFIIRCLQWTTVIERTFHVDTPEEREEWTEAIQAVADRLQRQEEERMNCSPTSQIDNIGEEEMDASTTH

SEQ ID NO: 11694 - protein, 323 aa, Artificial Sequence
  Synthetic polypeptide
KKVFDFHQAADGIQEQQRQEQAGKNLGTTKKGIGPVYSSKAARSGLRMCDLVSDFDGFSERFKVLANQYKSIYPTLEIDIEGELQKLKGYMEKIKPMVRDGVYFLYEALHGPPKKILVEGANAALLDIDFGTYPFVTSSNCTVGGVCTGLGMPPQNVGEVYGVVKAYTTRVGIGAFPTEQDNEIGELLQTRGREFGVTTGRKRRCGWLDLVLLKYAHMINGFTALALTKLDILDMFTEIKVGVAYKLDGEIIPHIPANQEVLNKVEVQYKTLPGWNTDISNARAFKELPVNAQNYVRFIEDELQIPVKWIGVGKSRESMIQLF

SEQ ID NO: 11695 - protein, 71 aa, Artificial Sequence
  Synthetic polypeptide
AEIYLFEKKYLIFIKQLMVSRNNRDKNKQEKIWVQQKRALAQFIRPKLLGVDSGCATLFLTLMASLRGLKF

SEQ ID NO: 11696 - protein, 11 aa, Artificial Sequence
  Synthetic polypeptide
RLKFTCLKKSI

SEQ ID NO: 11697 - protein, 31 aa, Artificial Sequence
  Synthetic polypeptide
MAGEKKEEREKRQIQLASCYLHWIFFGKVFH

SEQ ID NO: 11698 - protein, 984 aa, Artificial Sequence
  Synthetic polypeptide
NLVFSFEDDFYVMLKDNERVLFFPLDKWQGKKRRRERRDRFSWPHAIFIGSSLERYSTNSPNYRIFSTRSTIKLEYEGTLFTEWSVPETCFVLNKSSPTTELRCSSPGVHAIKPIVTGPDEEERYLFVESSHTCFLWYYRVRHFFNNFTQLITVWAYDPESADPDELLGNAEEPSINSIVLSTQMATLGQKPVIHTVLKRKVYSSNEKMRRGTWRIVVPMTKDDALKEIRGNQVTFQDCFIADFLILLTFPLLTIPEIPGYLPISSPRGSQLMASWDACVVASAVLVTDMETFHTTDSFKSWTRIRVPPDILSDDERRSVAHVILSRDGIVFLINGVLYIKSFRGFIRLGGIVNLPDGGITGISSRKWCWVNYLLKAKGRRSTFAVWTENEIYLGSILLKFARLVTTTELKNILSLSVTATLTIDRVEYTGHPLEIAVFLNYCTVCNVTKKIFLVIYNEDTKQWVSQDFTLDAPIDSVTMPHFTFSALPGLLLWNKHSIYYCYHNFTFTGILQTPAGHGNLSMLSNDSIIHEVFIDYYGDILVKMENNVIFYSKINTRDAVKLHLWTNYTTRAFIFLSTSGQTYFLYALDDGTIQIQDYPLHLEAQSIAFTTKDKCPYMAFHNNVAHVFYFLDKGEALTVWTQIVYPENTGLYVIVESYGPKILQESHEISFEAAFGYCTKTLTLTFYQNVDYERISDYFETQDKHTGLVLVQFRPSEYSKACPIAQKVFQIAVGCDDKKFIAIKGFSKKGCHHHDFSYVIEKSYLRHQPSKNLRVRYIWGEYGCPLRLDFTEKFQPVVQLFDDNGYVKDVEANFIVWEIHGRDDYSFNNTMAQSGCLHEAQTWKSMIELNKHLPLEEVWGPENYKHCFSYAIGKPGDLNQPYEIINSSNGNHIFWPMGHSGMYVFRVKILDPNYSFCNLTAMFAIETFGLIPSPSVYLVASFLFVLMLLFFTILVLSYFRYMRIYRRYIYEPLHKPQRKRKKN

SEQ ID NO: 11699 - protein, 59 aa, Artificial Sequence
  Synthetic polypeptide
KIMKGFCFFLWINGRGKKGGEREETDSVGLMLSSLDLLWKGIPLTAQTIAFLVPEVLLS

SEQ ID NO: 11700 - protein, 865 aa, Artificial Sequence
  Synthetic polypeptide
NLVFSFEDDFYVMLKDNERVLFFPLDKWQGKKRRRERRDRFSWPHAIFIGSSLERYSTNSPNYRIFSTRSTIKLEYEGTLFTEWSVPETCFVLNKSSPTTELRCSSPGVHAIKPIVTGPDEEERYLFVESSHTCFLWYYRVRHFFNNFTQLITVWAYDPESADPDELLGNAEEPSINSIVLSTQMATLGQKPVIHTVLKRKVYSSNEKMRRGTWRIVVPMTKDDALKEIRGNQVTFQDCFIADFLILLTFPLLTIPEIPGYLPISSPRGSQLMASWDACVVASAVLVTDMETFHTTDSFKSWTRIRVPPDILSDDERRSVAHVILSRDGIVFLINGVLYIKSFRGFIRLGGIVNLPDGGITGISSRKWCWVNYLLKAKGRRSTFAVWTENEIYLGSILLKFARLVTTTELKNILSLSVTATLTIDRVEYTGHPLEIAVFLNYCTVCNVTKKIFLVIYNEDTKQWVSQDFTLDAPIDSVTMPHFTFSALPGLLLWNKHSIYYCYHNFTFTGILQTPAGHGNLSMLSNDSIIHEVFIDYYGDILVKMENNVIFYSKINTRDAVKLHLWTNYTTRAFIFLSTSGQTYFLYALDDGTIQIQDYPLHLEAQSIAFTTKDKCPYMAFHNNVAHVFYFLDKGEALTVWTQIVYPENTGLYVIVESYGPKILQESHEISFEAAFGYCTKTLTLTFYQNVDYERISDYFETQDKHTGLVLVQFRPSEYSKACPIAQKVFQIAVGCDDKKFIAIKGFSKKGCHHHDFSYVIEKSYLRHQPSKNLRVRYIWGEYGCPLRLDFTEKFQPVVQLFDDNGYVKDVEANFIVWEIHGRDDYSFNNTMAQSGCLHEAQTWKSMIELNKHLPLEEVWGPEFL

SEQ ID NO: 11701 - protein, 941 aa, Artificial Sequence
  Synthetic polypeptide
MAGEKKEEREKRQIQLASCYLHWIFFGKIKLEYEGTLFTEWSVPETCFVLNKSSPTTELRCSSPGVHAIKPIVTGPDEEERYLFVESSHTCFLWYYRVRHFFNNFTQLITVWAYDPESADPDELLGNAEEPSINSIVLSTQMATLGQKPVIHTVLKRKVYSSNEKMRRGTWRIVVPMTKDDALKEIRGNQVTFQDCFIADFLILLTFPLLTIPEIPGYLPISSPRGSQLMASWDACVVASAVLVTDMETFHTTDSFKSWTRIRVPPDILSDDERRSVAHVILSRDGIVFLINGVLYIKSFRGFIRLGGIVNLPDGGITGISSRKWCWVNYLLKAKGRRSTFAVWTENEIYLGSILLKFARLVTTTELKNILSLSVTATLTIDRVEYTGHPLEIAVFLNYCTVCNVTKKIFLVIYNEDTKQWVSQDFTLDAPIDSVTMPHFTFSALPGLLLWNKHSIYYCYHNFTFTGILQTPAGHGNLSMLSNDSIIHEVFIDYYGDILVKMENNVIFYSKINTRDAVKLHLWTNYTTRAFIFLSTSGQTYFLYALDDGTIQIQDYPLHLEAQSIAFTTKDKCPYMAFHNNVAHVFYFLDKGEALTVWTQIVYPENTGLYVIVESYGPKILQESHEISFEAAFGYCTKTLTLTFYQNVDYERISDYFETQDKHTGLVLVQFRPSEYSKACPIAQKVFQIAVGCDDKKFIAIKGFSKKGCHHHDFSYVIEKSYLRHQPSKNLRVRYIWGEYGCPLRLDFTEKFQPVVQLFDDNGYVKDVEANFIVWEIHGRDDYSFNNTMAQSGCLHEAQTWKSMIELNKHLPLEEVWGPENYKHCFSYAIGKPGDLNQPYEIINSSNGNHIFWPMGHSGMYVFRVKILDPNYSFCNLTAMFAIETFGLIPSPSVYLVASFLFVLMLLFFTILVLSYFRYMRIYRRYIYEPLHKPQRKRKKN

SEQ ID NO: 11702 - protein, 57 aa, Artificial Sequence
  Synthetic polypeptide
NLVFSFEDDFYVMLKDNERVLFFPLDKWQGKKRRRERRDRFSWPHAIFIGSSLERLS

SEQ ID NO: 11703 - protein, 41 aa, Artificial Sequence
  Synthetic polypeptide
KIMKGFCFFLWINGRGKKGGEREETDSVGLMLSSLDLLWKD

SEQ ID NO: 11704 - protein, 822 aa, Artificial Sequence
  Synthetic polypeptide
MAGEKKEEREKRQIQLASCYLHWIFFGKIKLEYEGTLFTEWSVPETCFVLNKSSPTTELRCSSPGVHAIKPIVTGPDEEERYLFVESSHTCFLWYYRVRHFFNNFTQLITVWAYDPESADPDELLGNAEEPSINSIVLSTQMATLGQKPVIHTVLKRKVYSSNEKMRRGTWRIVVPMTKDDALKEIRGNQVTFQDCFIADFLILLTFPLLTIPEIPGYLPISSPRGSQLMASWDACVVASAVLVTDMETFHTTDSFKSWTRIRVPPDILSDDERRSVAHVILSRDGIVFLINGVLYIKSFRGFIRLGGIVNLPDGGITGISSRKWCWVNYLLKAKGRRSTFAVWTENEIYLGSILLKFARLVTTTELKNILSLSVTATLTIDRVEYTGHPLEIAVFLNYCTVCNVTKKIFLVIYNEDTKQWVSQDFTLDAPIDSVTMPHFTFSALPGLLLWNKHSIYYCYHNFTFTGILQTPAGHGNLSMLSNDSIIHEVFIDYYGDILVKMENNVIFYSKINTRDAVKLHLWTNYTTRAFIFLSTSGQTYFLYALDDGTIQIQDYPLHLEAQSIAFTTKDKCPYMAFHNNVAHVFYFLDKGEALTVWTQIVYPENTGLYVIVESYGPKILQESHEISFEAAFGYCTKTLTLTFYQNVDYERISDYFETQDKHTGLVLVQFRPSEYSKACPIAQKVFQIAVGCDDKKFIAIKGFSKKGCHHHDFSYVIEKSYLRHQPSKNLRVRYIWGEYGCPLRLDFTEKFQPVVQLFDDNGYVKDVEANFIVWEIHGRDDYSFNNTMAQSGCLHEAQTWKSMIELNKHLPLEEVWGPEFL

SEQ ID NO: 11705 - protein, 871 aa, Artificial Sequence
  Synthetic polypeptide
MAGEKKEEREKRQIQLASCYLHWIFFGKIKLEYEGTLFTEWSVPETCFVLNKSSPTTELRCSSPGVHAIKPIVTGPDEEERYLFVESSHTCFLWYYRVRTWRIVVPMTKDDALKEIRGNQVTFQDCFIADFLILLTFPLLTIPEIPGYLPISSPRGSQLMASWDACVVASAVLVTDMETFHTTDSFKSWTRIRVPPDILSDDERRSVAHVILSRDGIVFLINGVLYIKSFRGFIRLGGIVNLPDGGITGISSRKWCWVNYLLKAKGRRSTFAVWTENEIYLGSILLKFARLVTTTELKNILSLSVTATLTIDRVEYTGHPLEIAVFLNYCTVCNVTKKIFLVIYNEDTKQWVSQDFTLDAPIDSVTMPHFTFSALPGLLLWNKHSIYYCYHNFTFTGILQTPAGHGNLSMLSNDSIIHEVFIDYYGDILVKMENNVIFYSKINTRDAVKLHLWTNYTTRAFIFLSTSGQTYFLYALDDGTIQIQDYPLHLEAQSIAFTTKDKCPYMAFHNNVAHVFYFLDKGEALTVWTQIVYPENTGLYVIVESYGPKILQESHEISFEAAFGYCTKTLTLTFYQNVDYERISDYFETQDKHTGLVLVQFRPSEYSKACPIAQKVFQIAVGCDDKKFIAIKGFSKKGCHHHDFSYVIEKSYLRHQPSKNLRVRYIWGEYGCPLRLDFTEKFQPVVQLFDDNGYVKDVEANFIVWEIHGRDDYSFNNTMAQSGCLHEAQTWKSMIELNKHLPLEEVWGPENYKHCFSYAIGKPGDLNQPYEIINSSNGNHIFWPMGHSGMYVFRVKILDPNYSFCNLTAMFAIETFGLIPSPSVYLVASFLFVLMLLFFTILVLSYFRYMRIYRRYIYEPLHKPQRKRKKN

SEQ ID NO: 11706 - protein, 52 aa, Artificial Sequence
  Synthetic polypeptide
MAGEKKEEREKRQIQLASCYLHWIFFGKLTHDRIALFLTWCSRYKTNCYWPR

SEQ ID NO: 11707 - protein, 943 aa, Artificial Sequence
  Synthetic polypeptide
NLVFSFEDDFYVMLKDNERVLFFPLDKWQGKKRRRERRDRFSWPHAIFIGSSLESSPTTELRCSSPGVHAIKPIVTGPDEEERYLFVESSHTCFLWYYRVRHFFNNFTQLITVWAYDPESADPDELLGNAEEPSINSIVLSTQMATLGQKPVIHTVLKRKVYSSNEKMRRGTWRIVVPMTKDDALKEIRGNQVTFQDCFIADFLILLTFPLLTIPEIPGYLPISSPRGSQLMASWDACVVASAVLVTDMETFHTTDSFKSWTRIRVPPDILSDDERRSVAHVILSRDGIVFLINGVLYIKSFRGFIRLGGIVNLPDGGITGISSRKWCWVNYLLKAKGRRSTFAVWTENEIYLGSILLKFARLVTTTELKNILSLSVTATLTIDRVEYTGHPLEIAVFLNYCTVCNVTKKIFLVIYNEDTKQWVSQDFTLDAPIDSVTMPHFTFSALPGLLLWNKHSIYYCYHNFTFTGILQTPAGHGNLSMLSNDSIIHEVFIDYYGDILVKMENNVIFYSKINTRDAVKLHLWTNYTTRAFIFLSTSGQTYFLYALDDGTIQIQDYPLHLEAQSIAFTTKDKCPYMAFHNNVAHVFYFLDKGEALTVWTQIVYPENTGLYVIVESYGPKILQESHEISFEAAFGYCTKTLTLTFYQNVDYERISDYFETQDKHTGLVLVQFRPSEYSKACPIAQKVFQIAVGCDDKKFIAIKGFSKKGCHHHDFSYVIEKSYLRHQPSKNLRVRYIWGEYGCPLRLDFTEKFQPVVQLFDDNGYVKDVEANFIVWEIHGRDDYSFNNTMAQSGCLHEAQTWKSMIELNKHLPLEEVWGPENYKHCFSYAIGKPGDLNQPYEIINSSNGNHIFWPMGHSGMYVFRVKILDPNYSFCNLTAMFAIETFGLIPSPSVYLVASFLFVLMLLFFTILVLSYFRYMRIYRRYIYEPLHKPQRKRKKN

SEQ ID NO: 11708 - protein, 56 aa, Artificial Sequence
  Synthetic polypeptide
KIMKGFCFFLWINGRGKKGGEREETDSVGLMLSSLDLLWKAHPRQNCVVPHLVFTL

SEQ ID NO: 11709 - protein, 824 aa, Artificial Sequence
  Synthetic polypeptide
NLVFSFEDDFYVMLKDNERVLFFPLDKWQGKKRRRERRDRFSWPHAIFIGSSLESSPTTELRCSSPGVHAIKPIVTGPDEEERYLFVESSHTCFLWYYRVRHFFNNFTQLITVWAYDPESADPDELLGNAEEPSINSIVLSTQMATLGQKPVIHTVLKRKVYSSNEKMRRGTWRIVVPMTKDDALKEIRGNQVTFQDCFIADFLILLTFPLLTIPEIPGYLPISSPRGSQLMASWDACVVASAVLVTDMETFHTTDSFKSWTRIRVPPDILSDDERRSVAHVILSRDGIVFLINGVLYIKSFRGFIRLGGIVNLPDGGITGISSRKWCWVNYLLKAKGRRSTFAVWTENEIYLGSILLKFARLVTTTELKNILSLSVTATLTIDRVEYTGHPLEIAVFLNYCTVCNVTKKIFLVIYNEDTKQWVSQDFTLDAPIDSVTMPHFTFSALPGLLLWNKHSIYYCYHNFTFTGILQTPAGHGNLSMLSNDSIIHEVFIDYYGDILVKMENNVIFYSKINTRDAVKLHLWTNYTTRAFIFLSTSGQTYFLYALDDGTIQIQDYPLHLEAQSIAFTTKDKCPYMAFHNNVAHVFYFLDKGEALTVWTQIVYPENTGLYVIVESYGPKILQESHEISFEAAFGYCTKTLTLTFYQNVDYERISDYFETQDKHTGLVLVQFRPSEYSKACPIAQKVFQIAVGCDDKKFIAIKGFSKKGCHHHDFSYVIEKSYLRHQPSKNLRVRYIWGEYGCPLRLDFTEKFQPVVQLFDDNGYVKDVEANFIVWEIHGRDDYSFNNTMAQSGCLHEAQTWKSMIELNKHLPLEEVWGPEFL

SEQ ID NO: 11710 - protein, 873 aa, Artificial Sequence
  Synthetic polypeptide
NLVFSFEDDFYVMLKDNERVLFFPLDKWQGKKRRRERRDRFSWPHAIFIGSSLESSPTTELRCSSPGVHAIKPIVTGPDEEERYLFVESSHTCFLWYYRVRTWRIVVPMTKDDALKEIRGNQVTFQDCFIADFLILLTFPLLTIPEIPGYLPISSPRGSQLMASWDACVVASAVLVTDMETFHTTDSFKSWTRIRVPPDILSDDERRSVAHVILSRDGIVFLINGVLYIKSFRGFIRLGGIVNLPDGGITGISSRKWCWVNYLLKAKGRRSTFAVWTENEIYLGSILLKFARLVTTTELKNILSLSVTATLTIDRVEYTGHPLEIAVFLNYCTVCNVTKKIFLVIYNEDTKQWVSQDFTLDAPIDSVTMPHFTFSALPGLLLWNKHSIYYCYHNFTFTGILQTPAGHGNLSMLSNDSIIHEVFIDYYGDILVKMENNVIFYSKINTRDAVKLHLWTNYTTRAFIFLSTSGQTYFLYALDDGTIQIQDYPLHLEAQSIAFTTKDKCPYMAFHNNVAHVFYFLDKGEALTVWTQIVYPENTGLYVIVESYGPKILQESHEISFEAAFGYCTKTLTLTFYQNVDYERISDYFETQDKHTGLVLVQFRPSEYSKACPIAQKVFQIAVGCDDKKFIAIKGFSKKGCHHHDFSYVIEKSYLRHQPSKNLRVRYIWGEYGCPLRLDFTEKFQPVVQLFDDNGYVKDVEANFIVWEIHGRDDYSFNNTMAQSGCLHEAQTWKSMIELNKHLPLEEVWGPENYKHCFSYAIGKPGDLNQPYEIINSSNGNHIFWPMGHSGMYVFRVKILDPNYSFCNLTAMFAIETFGLIPSPSVYLVASFLFVLMLLFFTILVLSYFRYMRIYRRYIYEPLHKPQRKRKKN

SEQ ID NO: 11711 - protein, 54 aa, Artificial Sequence
  Synthetic polypeptide
KSRDLPISPSLLLLLSPCDVPALLLFSTMIGSFLRPSPKTDAGAMLVQPAELIG

SEQ ID NO: 11712 - protein, 36 aa, Artificial Sequence
  Synthetic polypeptide
DPRQKQMLEPCLYSLQNLLDERIYLIHWNWSFSFRN

SEQ ID NO: 11713 - protein, 213 aa, Artificial Sequence
  Synthetic polypeptide
RACSPFVFHHDWKLPETLAKNRCWSHACTACRTYWMNEYTSSIGIGVFHSGIEVYGREFAYGGHPYPFSGIFEISPGNASELGETFKFKEAVVLGSTDFLEDDIEKIVEELGKEYKGNAYHLMHKNCNHFSSALSEILCGKEIPRWINRLAYFSSCIPFLQSCLPKEWLTPAALQSSVSQELQDELEEAEDAAASASVASTAAGSRPGRHTKL

SEQ ID NO: 11714 - protein, 180 aa, Artificial Sequence
  Synthetic polypeptide
RACSPFVFHHDWKLPETLAKNRCWSHACTACRTYWMNEYTSSIGIGVFHSGIEVYGRAVVLGSTDFLEDDIEKIVEELGKEYKGNAYHLMHKNCNHFSSALSEILCGKEIPRWINRLAYFSSCIPFLQSCLPKEWLTPAALQSSVSQELQDELEEAEDAAASASVASTAAGSRPGRHTKL

SEQ ID NO: 11715 - protein, 103 aa, Artificial Sequence
  Synthetic polypeptide
RACSPFVFHHDWKLPETLAKNRCWSHACTACRTYWMNEYTSSIGIGVFHSGIEVYGREFAYGGHPYPFSGIFEISPGNASELGETFKFKEAVVLGSTDFLEDD

SEQ ID NO: 11716 - protein, 41 aa, Artificial Sequence
  Synthetic polypeptide
ADSLWERDSSLDQSTCLLQLLYTLSTELPPEGVAHARSPAV

SEQ ID NO: 11717 - protein, 84 aa, Artificial Sequence
  Synthetic polypeptide
LSKFYRQILCGKEIPRWINRLAYFSSCIPFLQSCLPKEWLTPAALQSSVSQELQDELEEAEDAAASASVASTAAGSRPGRHTKL

SEQ ID NO: 11718 - protein, 89 aa, Artificial Sequence
  Synthetic polypeptide
RRCFDCQNSIGRFFVGKRFLAGSIDLPTSAPVYPFYRVASRRSGSRPQPCSLVSAKNSRMNWRKQRMLPHPLPWQALQQAPDPGATLNY

SEQ ID NO: 11719 - protein, 113 aa, Artificial Sequence
  Synthetic polypeptide
TGALIGRLWSLKLLGFLDVENTPCARHSILYGSLGSVVAGFGHFLFTSRIRRSCDVGVGGFILVTLGCWFHCRYNYAKQRIQERIAREEIKKKILYEGTHLDPERKHNGSSSN

SEQ ID NO: 11720 - protein, 9 aa, Artificial Sequence
  Synthetic polypeptide
LADFGPLSS

SEQ ID NO: 11721 - protein, 30 aa, Artificial Sequence
  Synthetic polypeptide
FLANHGRDDTEETPDPKEIDWSTDWPTLVP

SEQ ID NO: 11722 - protein, 16 aa, Artificial Sequence
  Synthetic polypeptide
SRPGSSAFSSIRPLSS

SEQ ID NO: 11723 - protein, 13 aa, Artificial Sequence
  Synthetic polypeptide
PDLVLRLSLQFVP

SEQ ID NO: 11724 - protein, 115 aa, Artificial Sequence
  Synthetic polypeptide
QTWFFGFLFNSSLKLLGFLDVENTPCARHSILYGSLGSVVAGFGHFLFTSRIRRSCDVGVGGFILVTLGCWFHCRYNYAKQRIQERIAREEIKKKILYEGTHLDPERKHNGSSSN

SEQ ID NO: 11725 - protein, 17 aa, Artificial Sequence
  Synthetic polypeptide
VLCRVLGTWAWDTTVMR

SEQ ID NO: 11726 - protein, 19 aa, Artificial Sequence
  Synthetic polypeptide
SVNTECCAECLERGPGIQQ

SEQ ID NO: 11727 - protein, 185 aa, Artificial Sequence
  Synthetic polypeptide
SSKRSGTISDLLILSVVQSAWNVGLGYNSDEIRPRTLLIEHLMEGGRRDHHTMTVLWGTQEIIVAEFHKKIKEAFEVFDHESNNTVDVREIGTIIRSLGCCPTEGELHDLIAEVEEEEPTGYIRFEKFLPVMTEILLERKYRPIPEDVLLRAFEVLDSAKRGFLTKDELIKYMTEEDGVSLRRPG

SEQ ID NO: 11728 - protein, 214 aa, Artificial Sequence
  Synthetic polypeptide
SSKRSGTISDLLILSVVQSAWNVGLGYNSDEIRPRTLLIEHLMEGGRRDHHTMTVLWGTQEIIVAEFHKKIKEAFEVFDHESNNTVDVREIGTIIRSLGCCPTEGELHDLIAEVEEEEPTGYIRFEKFLPVMTEILLERKYRPIPEDVLLRAFEVLDSAKRGFLTKDELIKYMTEEGEPFSQEEMEEMLSAAIDPESNSINYKDYITMMVIDEN

SEQ ID NO: 11729 - protein, 167 aa, Artificial Sequence
  Synthetic polypeptide
SVNTECCAECLEREIIVAEFHKKIKEAFEVFDHESNNTVDVREIGTIIRSLGCCPTEGELHDLIAEVEEEEPTGYIRFEKFLPVMTEILLERKYRPIPEDVLLRAFEVLDSAKRGFLTKDELIKYMTEEGEPFSQEEMEEMLSAAIDPESNSINYKDYITMMVIDEN

SEQ ID NO: 11730 - protein, 24 aa, Artificial Sequence
  Synthetic polypeptide
SSKRSGTISDLLILSVVQSAWNVR

SEQ ID NO: 11731 - protein, 138 aa, Artificial Sequence
  Synthetic polypeptide
SVNTECCAECLEREIIVAEFHKKIKEAFEVFDHESNNTVDVREIGTIIRSLGCCPTEGELHDLIAEVEEEEPTGYIRFEKFLPVMTEILLERKYRPIPEDVLLRAFEVLDSAKRGFLTKDELIKYMTEEDGVSLRRPG

SEQ ID NO: 11732 - protein, 144 aa, Artificial Sequence
  Synthetic polypeptide
SVNTECCAECLEREIIVAEFHKKIKEAFEVFDHESNNTVDVREIGTIIRSLGCCPTEGELHDLIAEVEEEEPTGYIRFEKFLPVMTEILLERKYRPIPEDVLLRAFEVLDSAKRGFLTKDELIKYMTEEGKCDLLLITMTYVRN

SEQ ID NO: 11733 - protein, 140 aa, Artificial Sequence
  Synthetic polypeptide
SVNTECCAECLEREIIVAEFHKKIKEAFEVFDHESNNTVDVREIGTIIRSLGCCPTEGELHDLIAEVEEEEPTGYIRFEKFLPVMTEILLERKYRPIPEDVLLRAFEVLDSAKRGFLTKDELIKYMTEEETGKLRWGAVK

SEQ ID NO: 11734 - protein, 62 aa, Artificial Sequence
  Synthetic polypeptide
RSSLNRKKMIKESSWNIRKEERIWSAKVWAFDIMRVTHGREHSLIEDLILLLEECDANIRAS

SEQ ID NO: 11735 - protein, 23 aa, Artificial Sequence
  Synthetic polypeptide
KKALGTSGKKKEYGQQKCGLLIL

SEQ ID NO: 11736 - protein, 70 aa, Artificial Sequence
  Synthetic polypeptide
NVCCPARISFRNEEEIKTFSDEGKLKELIASRLTVKEWLKKFSKQKENDKRKLLEHQERRKNMVSKSVGF

SEQ ID NO: 11737 - protein, 271 aa, Artificial Sequence
  Synthetic polypeptide
TLSLLQHPYCSPCIGFSGQQVICNSFTICNAEMQEVGVGLYPSISLLNHSCDPNCSIVFNGPHLLLRAVRDIEVGEELTICYLDMLMTSEERRKQLRDQYCFECDCFRCQTQDKDADMLTGDEQVWKEVQESLKKIEELKAHWKWEQVLAMCQAIISSNSERLPDINIYQLKVLDCAMDACINLGLLEEALFYGTRTMEPYRIFFPGSHPVRGVQVMKVGKLQLHQGMFPQAMKNLRLAFDIMRVTHGREHSLIEDLILLLEECDANIRAS

SEQ ID NO: 11738 - protein, 35 aa, Artificial Sequence
  Synthetic polypeptide
EIPPLLLLSCLAVIKLFLCCNTPTVLRVLAFLGSR

SEQ ID NO: 11739 - protein, 30 aa, Artificial Sequence
  Synthetic polypeptide
LNSFSAATPLLFSVYWLFWAAGDLQLFHHL

SEQ ID NO: 11740 - protein, 33 aa, Artificial Sequence
  Synthetic polypeptide
TLSLLQHPYCSPCIGFSGQQVICNSFTICNAEM

SEQ ID NO: 11741 - protein, 383 aa, Artificial Sequence
  Synthetic polypeptide
MKSQHCGRLRKEKLMRCSQCRVAKYCSAKCQKKAWPDHKRECKCLKSCKPRYPPDSVRLLGRVVFKLMDGAPSESEKLYSFYDLESNINKLTEDKKEGLRQLVMTFQHFMREEIQDASQLPPAFDLFEAFAKVICNSFTICNAEMQEVGVGLYPSISLLNHSCDPNCSIVFNGPHLLLRAVRDIEVGEELTICYLDMLMTSEERRKQLRDQYCFECDCFRCQTQDKDADMLTGDEQVWKEVQESLKKIEELKAHWKWEQVLAMCQAIISSNSERLPDINIYQLKVLDCAMDACINLGLLEEALFYGTRTMEPYRIFFPGSHPVRGVQVMKVGKLQLHQGMFPQAMKNLRLAFDIMRVTHGREHSLIEDLILLLEECDANIRAS

SEQ ID NO: 11742 - protein, 25 aa, Artificial Sequence
  Synthetic polypeptide
EIPALWEAEEGKADAMLSVPRRQIL

SEQ ID NO: 11743 - protein, 137 aa, Artificial Sequence
  Synthetic polypeptide
MKSQHCGRLRKEKLMRCSQCRVAKYCSAKCQKKAWPDHKRECKCLKSCKPRYPPDSVRLLGRVVFKLMDGAPSESEKLYSFYDLESNINKLTEDKKEGLRQLVMTFQHFMREEIQDASQLPPAFDLFEAFAKPIGMK

SEQ ID NO: 11744 - protein, 53 aa, Artificial Sequence
  Synthetic polypeptide
TWEAEAAVSRDHAMALQPGQQERNSVSKKKKTFFRRYCTFNARKSTKRSHICC

SEQ ID NO: 11745 - protein, 621 aa, Artificial Sequence
  Synthetic polypeptide
AEIMPWHSSLGNKNGTLSQRKKRLFSGDIAPLMQEKVLSAVTYAVDDEEAAEVNANEQPEAPKLVLQSLFSLIRGEVEQLDSRALPLCLHQIAESYFQEEDYEKAMKFIQLERLYHEQLLANLSAIQEQWETKWKTVQPHTVTALRNSEKGFNGEDFERLTKICATHQDPLLSKHKIAAVEKSQERKCSTQLLVSEDPKEGGATTKESESKTCLGTESSKESQHTVEPLGSSPCCHQMDVQTDSPSLSVTAGKDHMEELLCSAEATLALHTQSSETAGSPSGPDSSEDACEDDSRLQLAQTEACQDVARIEGIAEDPKVFLSSKSKTEPLISPGCDRIPPALISEGKYSQAQRKELRLPLRDASEALPTDQLENNELNELQQPDLTDSDGKSPQAQADSDGSENVLCGNNQISDLGILLPEVCMAPEEKGDKDDQLNKETEDYLNSLLEGCLKDTEDSLSYEDNQDDDSDLLQDLSPEEASYSLQENLPSDESCLSLDDLAKRIEIAEVVPTEGLVSILKKRNDTVGDHPAQMQHKPSKRRVRFQEIDDSLDQDEVGGGSCILLVLLCIATVFLSVGGTALYCTFGDMESPVCTDFADNMDFYYTKLLQGVAELKHWIYLS

SEQ ID NO: 11746 - protein, 53 aa, Artificial Sequence
  Synthetic polypeptide
SQLLGRLKQENCLNLGGRGCSEPRSCHGTPAWATRTELCLKEKKDFFQEILHL

SEQ ID NO: 11747 - protein, 512 aa, Artificial Sequence
  Synthetic polypeptide
AEIMPWHSSLGNKNGTLSQRKKRLFSGDIAPLMQEKVLSAVTYAVDDEEAAEVNANEQPEAPKLVLQSLFSLIRGEVEQLDSRALPLCLHQIAESYFQEEDYEKAMKFIQLERLYHEQLLANLSAIQEQWETKWKTVQPHTVTALRNSEKGFNGEDFERLTKICATHQDPLLSKHKIAAVEKSQERKCSTQLLVSEDPKEGGATTKESESKTCLGTESSKESQHTVEPLGSSPCCHQMDVQTDSPSLSVTAGKDHMEELLCSAEATLALHTQSSETAGSPSGPDSSEDACEDDSRLQLAQTEACQDVARIEGIAEDPKVFLSSKSKTEPLISPGCDRIPPALISEGKYSQAQRKELRLPLRDASEALPTDQLENNELNELQQPDLTDSDGKSPQAQADSDGSENVLCGNNQISDLGILLPEVCMAPEEKGDKDDQLNKETEDYLNSLLEGCLKDTEDSLSYEDNQDDDSDLLQDLSPEEASYSLQENLPSDESCLSLDDLAKRIEIAEVNQR

SEQ ID NO: 11748 - protein, 7 aa, Artificial Sequence
  Synthetic polypeptide
KYKNFWN

SEQ ID NO: 11749 - protein, 19 aa, Artificial Sequence
  Synthetic polypeptide
NPMSTKNTKISGTNATEVS

SEQ ID NO: 11750 - protein, 344 aa, Artificial Sequence
  Synthetic polypeptide
PGTVAHTCTPSTLGGQGGQIMRSGDRDHPGQHGETPCLLKIQKFLELMQLKYHEKAADKGVYIIGSSGFDSIPADLGVIYTRNKMNGTLTAVESFLTIHSGPEGLSIHDGTWKSAIYGFGDQSNLRKLRNVSNLKPVPLIGPKLKRRWPISYCRELKGYSIPFMGSDVSVVRRTQRYLYENLEESPVQYAAYVTVGGITSVIKLMFAGLFFLFFVRFGIGRQLLIKFPWFFSFGYFSKQGPTQKQIDAASFTLTFFGQGYSQGTGTDKNKPNIKICTQVKGPEAGYVATPIAMVQAAMTLLSDASHLPKAGGVFTPGAAFSKTKLIDRLNKHGIEFSVISSSEV

SEQ ID NO: 11751 - protein, 31 aa, Artificial Sequence
  Synthetic polypeptide
VFCVLLRIGLDHRAAHPGHILLVTIRIALVL

SEQ ID NO: 11752 - protein, 288 aa, Artificial Sequence
  Synthetic polypeptide
LGVLCSSADRVRSQSRTPRPHSFSNHQNRSSTLTAVESFLTIHSGPEGLSIHDGTWKSAIYGFGDQSNLRKLRNVSNLKPVPLIGPKLKRRWPISYCRELKGYSIPFMGSDVSVVRRTQRYLYENLEESPVQYAAYVTVGGITSVIKLMFAGLFFLFFVRFGIGRQLLIKFPWFFSFGYFSKQGPTQKQIDAASFTLTFFGQGYSQGTGTDKNKPNIKICTQVKGPEAGYVATPIAMVQAAMTLLSDASHLPKAGGVFTPGAAFSKTKLIDRLNKHGIEFSVISSSEV

SEQ ID NO: 11753 - protein, 59 aa, Artificial Sequence
  Synthetic polypeptide
QGSPTPGPWSSTCRWPVRIQAMQQEVSSRIQCHLKMWLWPLLRRSGLCWILLKRISTEM

SEQ ID NO: 11754 - protein, 7 aa, Artificial Sequence
  Synthetic polypeptide
AAGFSVI

SEQ ID NO: 11755 - protein, 399 aa, Artificial Sequence
  Synthetic polypeptide
DPGHAAGGEQQDSVSFEDVAVAFTQEEWALLDPSQKNLYRDVMQEIFRNLASVGNKSEDQNIQDDFKNPGRNLSSHVVERLFEIKEGSQYGETFSQDSNLNLNKKVSTGVKPCECSVCGKVFICHSALHRHILSHIGNKLFECEECPEKLYHCKQCGKAFISLTSVDRHMVTHTSNGPYKGPVYEKPFDFPSVFQMPQSTYTGEKTYKCKHCDKAFNYSSYLREHERTHTGEKPYACKKCGKSFTFSSSLRQHERSHTGEKPYECKECGKAFSRSTYLGIHERTHTGEKPYECIKCGKAFRCSRVLRVHERTHSGEKPYECKQCGKAFKYSSNLCEHERTHTGVKPYGCKECGKSFTSSSALRSHERTHTGEKPYECKKCGKAFSCSSSLRKHERAYMW

SEQ ID NO: 11756 - protein, 26 aa, Artificial Sequence
  Synthetic polypeptide
SQHFGRPRQADHLSWRQPAISREQPG

SEQ ID NO: 11757 - protein, 30 aa, Artificial Sequence
  Synthetic polypeptide
LGVVWLVPIIPALWEAEAGGSPELAATRDL

SEQ ID NO: 11758 - protein, 137 aa, Artificial Sequence
  Synthetic polypeptide
GRARRLTSVIPALGEAEAEADRMELLEIAKTNAAKALGTTNIDLPASLRTVPSAKETSRGIGVSSNGAKPELSEKVTEDGTRNPNEKPTQQRSIAFSSNNSVAKPIQKSAKAATEEASSRSPKIDQKKSPYGLWIPI

SEQ ID NO: 11759 - protein, 16 aa, Artificial Sequence
  Synthetic polypeptide
SQHLGRRRRRRIEWSC

SEQ ID NO: 11760 - protein, 41 aa, Artificial Sequence
  Synthetic polypeptide
PGAAAHLCNPSTWGGGGGGGSNGAVRNSKNQCSESSRNNQH

SEQ ID NO: 11761 - protein, 73 aa, Artificial Sequence
  Synthetic polypeptide
GRARRLTSVIPALGEAEAEADRMELLEIAKTNAAKALGTTNIDLPASLRTVPSAKETSRGIGVSSNGAKPEKS

SEQ ID NO: 11762 - protein, 73 aa, Artificial Sequence
  Synthetic polypeptide
GRARRLTSVIPALGEAEAEADRMELLEIAKTNAAKALGTTNIDLPASLRTVPSAKETSRGIGVSSNGAKPEMF

SEQ ID NO: 11763 - protein, 145 aa, Artificial Sequence
  Synthetic polypeptide
GRARRLTSVIPALGEAEAEADRMELLEIAKTNAAKALGTTNIDLPASLRTVPSAKETSRGIDIDEENLLVIDTWAKASELSEKVTEDGTRNPNEKPTQQRSIAFSSNNSVAKPIQKSAKAATEEASSRSPKIDQKKSPYGLWIPI

SEQ ID NO: 11764 - protein, 24 aa, Artificial Sequence
  Synthetic polypeptide
GRAWWLTPVIPTLWEAKAGRPPED

SEQ ID NO: 11765 - protein, 102 aa, Artificial Sequence
  Synthetic polypeptide
SQHFGRPRRADHLRINAVSNGQVRGDSYSEGCLGQTGARIWLFVGFMLAFGSLIASMWILFGGYVAKEKDIVYPGIAVFFQNAFIFFGGLVFKFGRTEDLWQ

SEQ ID NO: 11766 - protein, 34 aa, Artificial Sequence
  Synthetic polypeptide
SSMDGAEYSGVILLGCASSFSAESAGPSSCVSLG

SEQ ID NO: 11767 - protein, 264 aa, Artificial Sequence
  Synthetic polypeptide
AQWMEQSTQESSCWVVLAHSVPSLQALLAVCPWAKASGKKLQKVTLKVSPRGIILTDNLTNQLIENVSIYRISYCTADKMHDKVFAYIAQSQHNQSLECHAFLCTKRKMAQAVTLTVAQAFKVAFEFWQVSKEEKEKRDKASQEGGDVLGARQDCTPSLKSLVATGNLLDLEETAKAPLSTVSANTTNMDEVPRPQALSGSSVVWELDDGLDEAFSRLAQSRTNPQVLDTGLTAQDMHYAQCLSPVDWDKPDSSGTEQDDLFSF

SEQ ID NO: 11768 - protein, 15 aa, Artificial Sequence
  Synthetic polypeptide
LCVLGLRPVGRSCRR

SEQ ID NO: 11769 - protein, 420 aa, Artificial Sequence
  Synthetic polypeptide
AHSRTQRQETLPNATFCLISGHRPEAASRFLQALQAGCIPVLLSPRWELPFSEVIDWTKAAIVADERLPLQVLAALQEMSPARVLALRQQTQFLWDAYFSSVEKVIHTTLEVIQDRIFGTSAHPSLLWNSPPGALLALSTFSTSPQDFPFYYLQQGSRPEGRFSALIWVGPPGQPPLKLIQAVAGSQHCAQILVLWSNERPLPSRWPETAVPLTVIDGHRKVSDRFYPYSTIRTDAILSLDARSSLSTSEVDFAFLVWQSFPERMVGFLTSSHFWDEAHGGWGYTAERTNEFSMVLTTAAFYHRYYHTLFTHSLPKALRTLADEAPTCVDVLMNFIVAAVTKLPPIKVPYGKQRQEAAPLAPGGPGPRPKPPAPAPDCINQIAAAFGHMPLLSSRLRLDPVLFKDPVSVQRKKYRSLEKP

SEQ ID NO: 11770 - protein, 62 aa, Artificial Sequence
  Synthetic polypeptide
HTAGPSARRRCPMPPSASSLATVPRLPRASSKPCRPAASQCFSAPAGSCPSPRSSTGPRQPS

SEQ ID NO: 11771 - protein, 63 aa, Artificial Sequence
  Synthetic polypeptide
TQQDPAPGDAAQCHLLPHLWPPSRGCLALPPSPAGRLHPSASQPPLGAALLRGHRLDQGSHRS

SEQ ID NO: 11772 - protein, 16 aa, Artificial Sequence
  Synthetic polypeptide
KGSTRGQEGEASGNRG

SEQ ID NO: 11773 - protein, 214 aa, Artificial Sequence
  Synthetic polypeptide
RAAHGARKGRLLGTVVSDRFYPYSTIRTDAILSLDARSSLSTSEVDFAFLVWQSFPERMVGFLTSSHFWDEAHGGWGYTAERTNEFSMVLTTAAFYHRYYHTLFTHSLPKALRTLADEAPTCVDVLMNFIVAAVTKLPPIKVPYGKQRQEAAPLAPGGPGPRPKPPAPAPDCINQIAAAFGHMPLLSSRLRLDPVLFKDPVSVQRKKYRSLEKP

SEQ ID NO: 11774 - protein, 62 aa, Artificial Sequence
  Synthetic polypeptide
GQHTGPGRGGFWEPWLVIASTHIAPSEQMPSSASMPAAVFPQVRWTLPFWCGRASQSGWWAS

SEQ ID NO: 11775 - protein, 129 aa, Artificial Sequence
  Synthetic polypeptide
PNGAEWPRPQGSRYYHTLFTHSLPKALRTLADEAPTCVDVLMNFIVAAVTKLPPIKVPYGKQRQEAAPLAPGGPGPRPKPPAPAPDCINQIAAAFGHMPLLSSRLRLDPVLFKDPVSVQRKKYRSLEKP

SEQ ID NO: 11776 - protein, 26 aa, Artificial Sequence
  Synthetic polypeptide
RTEQSGLDPRDPGITTLSSPTPCPRL

SEQ ID NO: 11777 - protein, 24 aa, Artificial Sequence
  Synthetic polypeptide
TPGIQVLPHSLHPLPAQGSEDPGR

SEQ ID NO: 11778 - protein, 696 aa, Artificial Sequence
  Synthetic polypeptide
LPKDFCSSSGSPPFQPIKSHVTIPTAHVMPSTLGTSPAKPNSTPVGPSSSKLPLSGLAESVGMTRNGDLGAMKHSPGLSRDLMYFSGATGENGIEQSWFPAVGHERQEEARKFDIPSMESTLNQSAMMETLYSDPHHRVRFHNPRTSTSKELYRVLPEAKKAPGSGAVFERNGPHSNSSGVLPLGLQPAPGLSKPLPSQVWQPSPDTWHPREQSCELSTCRQQLELIRLQMEQMQLQNGAICHHPAAFGPSLPILEPAQWISILNSNEHLLKEKELLIDKQRKHISQLEQKVRESELQVHSALLGRPAPFGDVCLLRLQELQRENTFLRAQFAQKTEALSREKIDLEKKLSASEVEVQLIRESLKVALQKHSEEVKKQEERVKGRDKHINNLKKKCQKESEQNREKQQRIETLERYLADLPTLEDHQKQSQQLKDSELKSTELQEKVTELESLLEETQAICREKEIQLESLRQREAEFSSAGHSLQDKQSVEETSGEGPEVEMESWQKRYDSLQKIVEKQQQKMDQLRSQVQSLEQEVAQEEGTSQALREEAQRRDSALQQLRTAVKELSVQNQDLIEKNLTLQEHLRQAQPGSPPSPDTAQLALELHQELASCLQDLQAVCSIVTQRAQGHDPNLSLLLGIHSAQHPETQLDLQKPDVIKRKLEEVQQLRRDIEDLRTTMSDRYAQDMGENCVTQ

SEQ ID NO: 11779 - protein, 30 aa, Artificial Sequence
  Synthetic polypeptide
GFGSWWKQHDCQRIFAAQVAVLLSSPSKAT

SEQ ID NO: 11780 - protein, 63 aa, Artificial Sequence
  Synthetic polypeptide
WFSRASEAGGNSMTAKGFLQLKWQSSFPAHQKPRNHSNSPCDAFYFRDLSCQAKFYTCWTLFL

SEQ ID NO: 11781 - protein, 695 aa, Artificial Sequence
  Synthetic polypeptide
LPKDFCSSSGSPPFQPIKSHVTIPTAHVMPSTLGTSPAKPNSTPVGPSSSKLPLSGLAESVGMTRNGDLGAMKHSPGLSRDLMYFSGATGENGIEQSWFPAVGHERQEEARKFDIPSMESTLNQSAMMETLYSDPHHRVRFHNPRTSTSKELYRVLPEAKKAPGSGAVFERNGPHSNSSGVLPLGLQPAPGLSKPLPSQVWQPSPDTWHPREQSCELSTCRQQLELIRLQMEQMQLQNGAICHHPAAFGPSLPILEPAQWISILNSNEHLLKEKELLIDKQRKHISQLEQKVRESELQVHSALLGRPAPFGDVCLLRLQELQRENTFLRAQFAQKTEALSREKIDLEKKLSASEVEVQLIRESLKVALQKHSEEVKKQEERVKGRDKHINNLKKKCQKESEQNREKQQRIETLERYLADLPTLEDHQKQSQQLKDSELKSTELQEKVTELESLLEETQAICREKEIQLESLRQREAEFSSAGHSLQDKQSVEETSGEGPEVEMESWQKRYDSLQKIVEKQQQKMDQLRSQVQSLEQEVAQEEGTSQALREEAQRRDSALQQLRTAVKELSVQNQDLIEKNLTLQEHLRQAQPGSPPSPDTAQLALELHQELASCLQDLQAVCSIVTQRAQGHDPNLSLLLGIHSQHPETQLDLQKPDVIKRKLEEVQQLRRDIEDLRTTMSDRYAQDMGENCVTQ

SEQ ID NO: 11782 - protein, 60 aa, Artificial Sequence
  Synthetic polypeptide
GRACWLTPVIPALWEAEAGRSQGRPNAETHCIHNGREPSLCQEVPGGAAGRPLTGLQQAS

SEQ ID NO: 11783 - protein, 65 aa, Artificial Sequence
  Synthetic polypeptide
SQHSGRLRQADHKAGPMPKHIAFIMDGNRRYAKKCQVERQEGHSQGFNKLAELLAFSPLRLCGGV

SEQ ID NO: 11784 - protein, 16 aa, Artificial Sequence
  Synthetic polypeptide
GRQITRQAQCRNTLHS

SEQ ID NO: 11785 - protein, 190 aa, Artificial Sequence
  Synthetic polypeptide
SQHSGRLRQADHKAGPMPKHIAFIMDGNRRYAKKCQVERQEGHSQGFNKLAETLRWCLNLGILEVTVYAFSIENFKRSKSEVDGLMDLARQKFSRLMEEKEKLQKHGVCIRVLGDLHLLPLDLQELIAQAVQATKNYNKCFLNVCFAYTSRHEISNAVREMAWGVEQGLLDPSRDRFHHIGQASLELLTS

SEQ ID NO: 11786 - protein, 291 aa, Artificial Sequence
  Synthetic polypeptide
SQHSGRLRQADHKAGPMPKHIAFIMDGNRRYAKKCQVERQEGHSQGFNKLAETLRWCLNLGILEVTVYAFSIENFKRSKSEVDGLMDLARQKFSRLMEEKEKLQKHGVCIRVLGDLHLLPLDLQELIAQAVQATKNYNNDISESLLDKCLYTNRSPHPDILIRTSGEVRLSDFLLWQTSHSCLVFQPVLWPEYTFWNLFEAILQFQMNHSVLQKARDMYAEERKRQQLERDQATVTEQLLREGLQASGDAQLRRTRLHKLSARREERVQGFLQALELKRADWLARLGTASA

SEQ ID NO: 11787 - protein, 325 aa, Artificial Sequence
  Synthetic polypeptide
SQHSGRLRQADHKAGPMPKHIAFIMDGNRRYAKKCQVERQEGHSQGFNKLAETLRWCLNLGILEVTVYAFSIENFKRSKSEVDGLMDLARQKFSRLMEEKEKLQKHGVCIRVLGDLHLLPLDLQELIAQAVQATKNYNKCFLNVCFAYTSRHEISNAVREMAWGVEQGLLDPSDISESLLDKCLYTNRSPHPDILIRTSGEVRLSDFLLWQTSHSCLVFQPVLWPEYTFWNLFEAILQFQMNHSVLQKARDMYAEERKRQQLERDQATVTEQLLREGLQASGDAQLRRTRLHKLSARREERVQGFLQALELKRADWLARLGTASA

SEQ ID NO: 11788 - protein, 286 aa, Artificial Sequence
  Synthetic polypeptide
SQHSGRLRQADHKAGPMPKHIAFIMDGNRRYAKKCQVERQEGHSQGFNKLAETLRWCLNLGILEVTVYAFSIENFKRSKSEVDGLMDLARQKFSRLMEEKCFLNVCFAYTSRHEISNAVREMAWGVEQGLLDPSDISESLLDKCLYTNRSPHPDILIRTSGEVRLSDFLLWQTSHSCLVFQPVLWPEYTFWNLFEAILQFQMNHSVLQKARDMYAEERKRQQLERDQATVTEQLLREGLQASGDAQLRRTRLHKLSARREERVQGFLQALELKRADWLARLGTASA

SEQ ID NO: 11789 - protein, 201 aa, Artificial Sequence
  Synthetic polypeptide
SQHSGRLRQADHKAGPMPKHIAFIMDGNRRYAKKCQVERQEGHSQGFNKLAETLRWCLNLGILEVTVYAFSIENFKRSKSEVDGLMDLARQKFSRLMEEKEKLQKHGVCIRVLGDLHLLPLDLQELIAQAVQATKNYNKCFLNVCFAYTSRHEISNAVREMAWGVEQGLLDPRYPELFCMVIVKENRPGPAWQLTPVILAH

SEQ ID NO: 11790 - protein, 326 aa, Artificial Sequence
  Synthetic polypeptide
SQHSGRLRQADHKAGPMPKHIAFIMDGNRRYAKKCQVERQEGHSQGFNKLAETLRWCLNLGILEVTVYAFSIENFKRSKSEVDGLMDLARQKFSRLMEEKEKLQKHGVCIRVLGDLHLLPLDLQELIAQAVQATKNYNKCFLNVCFAYTSRHEISNAVREMAWGVEQGLLDPSDISESLLDKCLYTNRSPHPDILIRTSGEVRLSDFLLWQTSHSCLVFQPVLWPEYTFWNLFEAILQFQMNHSVLQQKARDMYAEERKRQQLERDQATVTEQLLREGLQASGDAQLRRTRLHKLSARREERVQGFLQALELKRADWLARLGTASA

SEQ ID NO: 11791 - protein, 157 aa, Artificial Sequence
  Synthetic polypeptide
SQHSGRLRQADHKAGPMPKHIAFIMDGNRRYAKKCQVERQEGHSQGFNKLAETLRWCLNLGILEVTVYAFSIENFKRSKSEVDGLMDLARQKFSRLMEEKEKLQKHGVCIRVLGDLHLLPLDLQELIAQAVQATKNYNKCFLNVCFAYTSRHEISNA

SEQ ID NO: 11792 - protein, 122 aa, Artificial Sequence
  Synthetic polypeptide
SQHSGRLRQADHKAGPMPKHIAFIMDGNRRYAKKCQVERQEGHSQGFNKLAETLRWCLNLGILEVTVYAFSIENFKRSKSEVDGLMDLARQKFSRLMEEKEKLQKHGVCIRVLGDLHLLPLD

SEQ ID NO: 11793 - protein, 114 aa, Artificial Sequence
  Synthetic polypeptide
SQHSGRLRQADHKAGPMPKHIAFIMDGNRRYAKKCQVERQEGHSQGFNKLAETLRWCLNLGILEVTVYAFSIENFKRSKSEVDGLMDLARQKFSRLMEEKEKLQKHGVCIRVLG

SEQ ID NO: 11794 - protein, 63 aa, Artificial Sequence
  Synthetic polypeptide
SQHSGRLRQADHKAGPMPKHIAFIMDGNRRYAKKCQVERQEGHSQGFNKLAETLRWCLNLGIL

SEQ ID NO: 11795 - protein, 77 aa, Artificial Sequence
  Synthetic polypeptide
SQHSGRLRQADHKAGPMPKHIAFIMDGNRRYAKKCQVERQEGHSQGFNKLAETLRWCLNLGILEVTVYAFSIENFKR

SEQ ID NO: 11796 - protein, 165 aa, Artificial Sequence
  Synthetic polypeptide
SQHSGRLRQADHKAGPMPKHIAFIMDGNRRYAKKCQVERQEGHSQGFNKLAETLRWCLNLGILEVTVYAFSIENFKRSKSEVDGLMDLARQKFSRLMEEKEKLQKHGVCIRVLGDLHLLPLDLQELIAQAVQATKNYNKCFLNVCFAYTSRHEISNAVREMAWGV

SEQ ID NO: 11797 - protein, 52 aa, Artificial Sequence
  Synthetic polypeptide
SQHSGRLRQADHKAGPMPKHIAFIMDGNRRYAKKCQVERQEGHSQGFNKLAE

SEQ ID NO: 11798 - protein, 208 aa, Artificial Sequence
  Synthetic polypeptide
SQHSGRLRQADHKAGPMPKHIAFIMDGNRRYAKKCQVERQEGHSQGFNKLAETLRWCLNLGILEVTVYAFSIENFKRSKSEVDGLMDLARQKFSRLMEEKCFLNVCFAYTSRHEISNAVREMAWGVEQGLLDPSDISESLLDKCLYTNRSPHPDILIRTSGEVRLSDFLLWQTSHSCLVFQPVLWPEYTFWNLFEAILQFQMNHSVLQ

SEQ ID NO: 11799 - protein, 438 aa, Artificial Sequence
  Synthetic polypeptide
GCVNMPACSSGPDGAEEIKRHVFYSTIDWNKLYRREIKPPFKPAVAQPDDTFYFDTEFTSRTPKDSPGIPPSAGAHQLFRGFSFVATGLMEDDGKPRAPQAPLHSVVQQLHGKNLVFSDGYVVKETIGVGSYSECKRCVHKATNMEYAVKVIDKSKRDPSEEIEILLRYGQHPNIITLKDVYDDGKHVYLVTELMRGGELLDKILRQKFFSEREASFVLHTIGKTVEYLHSQGVVHRDLKPSNILYVDESGNPECLRICDFGFAKQLRAENGLLMTPCYTANFVAPEVLKRQGYDEGCDIWSLGILLYTMLAGYTPFANGPSDTPEEILTRIGSGKFTLSGGNWNTVSETAKDLVSKMLHVDPHQRLTAKQVLQHPWVTQKDKLPQSQLSHQDLQLVKGAMAATYSALNSSKPTPQLKPIESSILAQRRVRKLPSTTL

SEQ ID NO: 11800 - protein, 85 aa, Artificial Sequence
  Synthetic polypeptide
TCRHVAPALMGQRKSSGMSSTPPLTGISYTVVRSSHPSSQQWLSLMTPSTLTPSSRPAHPRIPQASPPALGPISCSGASASWPPA

SEQ ID NO: 11801 - protein, 71 aa, Artificial Sequence
  Synthetic polypeptide
KRPSICAHHILQPTYVCTFVLSVLKALFNAIIPDHHAEAFSPPRLAPSGFVDQLVEGLLGGLSHWDAEHFL

SEQ ID NO: 11802 - protein, 70 aa, Artificial Sequence
  Synthetic polypeptide
KALEETFHMRPSHSSAYLCLHLCAFSTEGPLQCHHPRSPCRSLLSSSPGPLRLCGPTRGRSSGRPVSLGC

SEQ ID NO: 11803 - protein, 73 aa, Artificial Sequence
  Synthetic polypeptide
KRPSICAHHILQPTYVCTFVLSVLKALFNAIIPDHHAEAFSPPRLAPSGFVDQLVEVLCLHPILSARLSPPHS

SEQ ID NO: 11804 - protein, 77 aa, Artificial Sequence
  Synthetic polypeptide
KALEETFHMRPSHSSAYLCLHLCAFSTEGPLQCHHPRSPCRSLLSSSPGPLRLCGPTRGSIMPTPNSVCQAQPAPFL

SEQ ID NO: 11805 - protein, 492 aa, Artificial Sequence
  Synthetic polypeptide
KRPSICAHHILQPTYVCTFVLSVLKALFNAIIPDHHAEAFSPPRLAPSGFVDQLVEGLLGGLSHWDAEHFLFIAEHGYLYEHNFAFFPGFPLALLVGTELLRPLRGLLSLRSCLLISVASLNFLFFMLAAVALHDLGCLVLHCPHQSFYAALLFCLSPANVFLAAGYSEALFALLTFSAMGQLERGRVWTSVLLFAFATGVRSNGLVSVGFLMHSQCQGFFSSLTMLNPLRQLFKLMASLFLSVFTLGLPFALFQYYAYTQFCLPGSARPIPEPLVQLAVDKGYRIAEGNEPPWCFWDVPLIYSYIQDVYWNVGFLKYYELKQVPNFLLAAPVAILVAWATWTYVTTHPWLCLTLGLQRSKNNKTLEKPDLGFLSPQVFVYVVHAAVLLLFGGLCMHVQVLTRFLGSSTPIMYWFPAHLLQDQEPLLRSLKTVPWKPLAEDSPPGQKVPRNPIMGLLYHWKTCSPVTRYILGYFLTYWLLGLLLHCNFLPWT

SEQ ID NO: 11806 - protein, 119 aa, Artificial Sequence
  Synthetic polypeptide
KRPSICAHHILQPTYVCTFVLSVLKALFNAIIPDHHAEAFSPPRLAPSGFVDQLVEGLLGGLSHWDAEHFLFIAEHGYLYEHNFAFFPGFPLALLVGTELLRPLRGLLSLRSCLLISVA

SEQ ID NO: 11807 - protein, 181 aa, Artificial Sequence
  Synthetic polypeptide
KRPSICAHHILQPTYVCTFVLSVLKALFNAIIPDHHAEAFSPPRLAPSGFVDQLVEGLLGGLSHWDAEHFLFIAEHGYLYEHNFAFFPGFPLALLVGTELLRPLRGLLSLRSCLLISVASLNFLFFMLAAVALHDLGCLVLHCPHQSFYAALLFCLSPANVFLAAGYSEALFALLTFSAMG

SEQ ID NO: 11808 - protein, 23 aa, Artificial Sequence
  Synthetic polypeptide
SQHFGRPRILRKMRRKMRRTKEN

SEQ ID NO: 11809 - protein, 18 aa, Artificial Sequence
  Synthetic polypeptide
PGAVAHTCNPSTLGGRGY

SEQ ID NO: 11810 - protein, 55 aa, Artificial Sequence
  Synthetic polypeptide
QAQWLTPVIPALWEAEDTEEDEEEDEKDKGKLKPNLGNGADLPNYRWTQTLSELD

SEQ ID NO: 11811 - protein, 204 aa, Artificial Sequence
  Synthetic polypeptide
QAQWLTPVIPALWEAEDTEEDEEEDEKDKGKLKPNLGNGADLPNYRWTQTLSELDLAVPFCVNFRLKGKDMVVDIQRRHLRVGLKGQPAIIDGELYNEVKVEESSWLIEDGKVVTVHLEKINKMEWWSRLVSSDPEINTKKINPENSKLSDLDSETRSMVEKMMYDQRQKSMGLPTSDEQKKQEILKKFMDQHPEMDFSKAKFN

SEQ ID NO: 11812 - protein, 44 aa, Artificial Sequence
  Synthetic polypeptide
SRPPRPHLQNGNNSVIGRRAIKRDNPSTSKATSSRISRASARRR

SEQ ID NO: 11813 - protein, 35 aa, Artificial Sequence
  Synthetic polypeptide
LGLLVLIFKMGTTALLGGVRLSETIPLRQKLPPPG

SEQ ID NO: 11814 - protein, 264 aa, Artificial Sequence
  Synthetic polypeptide
ARQSLYVKSYLLPDKQSKRKTAVKKRNLNPVFNETLRYSVPQAELQGRVLSLSVWHRESLGRNIFLGEVEVPLDTWDWGSEPTWLPLQPRVPPSPDDLPSRGLLALSLKYVPAGSEGAGLPPSGELHFWVKEARDLLPLRAGSLDTYVQCFVLPDDSQASRQRTRVVRRSLSPVFNHTMVYDGFGPADLRQACAELSLWDHGALANRQLGGTRLSLGTGSSYGLQVPWMDSTPEEKQLWQALLEQPCEWVDGLLPLRTNLAPRT

SEQ ID NO: 11815 - protein, 314 aa, Artificial Sequence
  Synthetic polypeptide
GQKLIIDEKKYYLFGRNPDLCDFTIDHQSCSRVHAALVYHKHLKRVFLIDLNSTHGTFLGHIRLEPHKPQQIPIDSTVSFGASTRAYTLREKPQTLPSAVKGDEKMGGEDDELKGLLGLPEEETELDNLTEFNTAHNKRISTLTIEEGNLDIQRPKRKRKNSRVTFSEDDEIINPEDVDPSVGRFRNMVQTAVVPVKKKRVEGPGSLGLEESGSRRMQNFAFSGGLYGGLPPTHSEAGSQPHGIHGTALIGGLPMPYPNLAPDVDLTPVVPSAVNMNPAPNPAVYNPEAVNEPKKKKYAKEAWPGKKPTPSLLI

SEQ ID NO: 11816 - protein, 7 aa, Artificial Sequence
  Synthetic polypeptide
KKYKDRN

SEQ ID NO: 11817 - protein, 13 aa, Artificial Sequence
  Synthetic polypeptide
SRIKRNIRTETDY

SEQ ID NO: 11818 - protein, 726 aa, Artificial Sequence
  Synthetic polypeptide
GALPPSLSPSPSCHLVKKTPCFSFTSHHYEEADQPTTEPGMVLDSVEAGDTTPPTKRKSKFSGFGKIFKPWKWRKKKSSDKFKETSEVLERKISMRKPREELVKRGVLLEDPEQGGEDPGKPSDAMLKNGHTTPIGNARSSSPVQVEEEPVRLASLRKAIPEEDLKKRLGSTGSQPNSEAESVPENVPKPPLLPPKRPLSSSHEASEGQAKDATSSGGTARFIISTSITTAPAATTAATSLAKTVNLSVTPSPAPRTLPAAPASTNTTATPSLTHMVPAKQPPIPPPKPAHRNSNPVIAELSQAINSGTLLSKPSPPLPPKRGIPSTSVPTLESAAAITTKTPSDEREKSTCSMGSELLPMISPRSPSPPLPTHIPPEPPRTPPFPAKTFQVVPEIEFPPSLDLHQEIPQQEDQKKEVPKRILDQNFGEPHIPSRLPPLPLHIRIQQALTSPLPMTPILEGSHRAHSLLFENSDSFSEDSSTLGRTRSLPITIEMLKVPDDEEEEEQTCPSTFSEEMTPTSVIPKLPQCLREEEEKESDSDSEGPIQYRDEEDEDESYQSALANKVKRKDTLAMKLNHRPSEPELNLNSWPCKSKEEWNEIRHQIGNTLIRRLSQRPTPEELEQRNILQPKNEADRQAEKREIKRRLTRKLSQRPTVAELLARKILRFNEYVEVTDAQDYDRRADKPWTKLTPADKAAIRKELNEFKSSEMEVHEESKHFTRYHRP

SEQ ID NO: 11819 - protein, 72 aa, Artificial Sequence
  Synthetic polypeptide
RRHLASPSPPTIMRKQTSPLQSQAWSWTVWKQETQHLLPKGRASSQALARSSSPGNGGKKKVVINLKRLQKF

SEQ ID NO: 11820 - protein, 110 aa, Artificial Sequence
  Synthetic polypeptide
QPGQHGKTPPLQKKIYISQAWWYAPVISATWEAELSQRPTVAELLARKILRFNEYVEVTDAQDYDRRADKPWTKLTPADKAAIRKELNEFKSSEMEVHEESKHFTRYHRP

SEQ ID NO: 11821 - protein, 23 aa, Artificial Sequence
  Synthetic polypeptide
YQLLGRLSSVKGQLSLNSLPGRF

SEQ ID NO: 11822 - protein, 11 aa, Artificial Sequence
  Synthetic polypeptide
DFGTGRCHPSA

SEQ ID NO: 11823 - protein, 22 aa, Artificial Sequence
  Synthetic polypeptide
ILIPPLAVHETLGQEDVTQAHS

SEQ ID NO: 11824 - protein, 277 aa, Artificial Sequence
  Synthetic polypeptide
SHHLLFMRLWDRKMSPKRIAKRRSPPADAIPKSKKVKVSHRSHSTEPGLVLTLGQGDVGQLGLGENVMERKKPALVSIPEDVVQAEAGGMHTVCLSKSGQVYSFGCNDEGALGRDTSVEGSEMVPGKVELQEKVVQVSAGDSHTAALTDDGRVFLWGSFRHCLFHTSQRLGWGKEVWRQGLSHLRVSKDNNGVIGLLEPMKKSMVPVQVQLDVPVVKVASGNDHLVMLTADGDLYTLGCGEQGQLGRVPELFANRGGRQGLERLLVPKCVMLKSRGS

SEQ ID NO: 11825 - protein, 59 aa, Artificial Sequence
  Synthetic polypeptide
SHHLLFMRLWDRKMSPKRIAKRRSPPADAIPKSKKVKDTRAAASRRVPGARSCQVSHRS

SEQ ID NO: 11826 - protein, 23 aa, Artificial Sequence
  Synthetic polypeptide
LTWFRSWPSLPILRQEDVTQAHS

SEQ ID NO: 11827 - protein, 32 aa, Artificial Sequence
  Synthetic polypeptide
NTQGRQLWSLTNLVQILAFSSNLETGRCHPSA

SEQ ID NO: 11828 - protein, 25 aa, Artificial Sequence
  Synthetic polypeptide
GQARWLTPVIPHFGRPRTGRCHPSA

SEQ ID NO: 11829 - protein, 17 aa, Artificial Sequence
  Synthetic polypeptide
SRTLGGQGQEDVTQAHS

SEQ ID NO: 11830 - protein, 283 aa, Artificial Sequence
  Synthetic polypeptide
PGTMAHACNPALWEAKDRKMSPKRIAKRRSPPADAIPKSKKVKVSHRSHSTEPGLVLTLGQGDVGQLGLGENVMERKKPALVSIPEDVVQAEAGGMHTVCLSKSGQVYSFGCNDEGALGRDTSVEGSEMVPGKVELQEKVVQVSAGDSHTAALTDDGRVFLWGSFRHCLFHTSQRLGWGKEVWRQGLSHLRVSKDNNGVIGLLEPMKKSMVPVQVQLDVPVVKVASGNDHLVMLTADGDLYTLGCGEQGQLGRVPELFANRGGRQGLERLLVPKCVMLKSRGS

SEQ ID NO: 11831 - protein, 65 aa, Artificial Sequence
  Synthetic polypeptide
PGTMAHACNPALWEAKDRKMSPKRIAKRRSPPADAIPKSKKVKDTRAAASRRVPGARSCQVSHRS

SEQ ID NO: 11832 - protein, 37 aa, Artificial Sequence
  Synthetic polypeptide
VRRSRPSWLTRLTQVPQHRTRLGADTRPGRRGPAGAG

SEQ ID NO: 11833 - protein, 398 aa, Artificial Sequence
  Synthetic polypeptide
HVSHRSHSTEPGLVLTLGQGDVGQLGLGENVMERKKPALVSIPEDVVQAEAGGMHTVCLSKSGQVYSFGCNDEGALGRDTSVEGSEMVPGKVELQEKVVQVSAGDSHTAALTDDGRVFLWGSFRDNNGVIGLLEPMKKSMVPVQVQLDVPVVKVASGNDHLVMLTADGDLYTLGCGEQGQLGRVPELFANRGGRQGLERLLVPKCVMLKSRGSRGHVRFQDAFCGAYFTFAISHEGHVYGFGLSNYHQLGTPGTESCFIPQNLTSFKNSTKSWVGFSGGQHHTVCMDSEGKAYSLGRAEYGRLGLGEGAEEKSIPTLISRLPAVSSVACGASVGYAVTKDGRVFAWGMGTNYQLGTGQDEDAWSPVEMMGKQLENRVVLSVSSGGQHTVLLVKDKEQS

SEQ ID NO: 11834 - protein, 23 aa, Artificial Sequence
  Synthetic polypeptide
QKIETILANTSHTGPTAQNPAWC

SEQ ID NO: 11835 - protein, 207 aa, Artificial Sequence
  Synthetic polypeptide
HVSHRSHSTEPGLVLTLGQGDVGQLGLGENVMERKKPALVSIPEDVVQAEAGGMHTVCLSKSGQVYSFGCNDEGALGRDTSVEGSEMVPGKVELQEKVVQVSAGDSHTAALTDDGRVFLWGSFRDNNGVIGLLEPMKKSMVPVQVQLDVPVVKVASGNDHLVMLTADGDLYTLGCGEQGQLGRVPELFANRGGRQGLERLLVPKCVM

SEQ ID NO: 11836 - protein, 241 aa, Artificial Sequence
  Synthetic polypeptide
HVSHRSHSTEPGLVLTLGQGDVGQLGLGENVMERKKPALVSIPEDVVQAEAGGMHTVCLSKSGQVYSFGCNDEGALGRDTSVEGSEMVPGKVELQEKVVQVSAGDSHTAALTDDGRVFLWGSFRHCLFHTSQRLGWGKEVWRQGLSHLRVSKDNNGVIGLLEPMKKSMVPVQVQLDVPVVKVASGNDHLVMLTADGDLYTLGCGEQGQLGRVPELFANRGGRQGLERLLVPKCVMLKSRGS

SEQ ID NO: 11837 - protein, 249 aa, Artificial Sequence
  Synthetic polypeptide
HVSHRSHSTEPGLVLTLGQGDVGQLGLGENVMERKKPALVSIPEDVVQAEAGGMHTVCLSKSGQVYSFGCNDEGALGRDTSVEGSEMVPGKVELQEKVVQVSAGDSHTAALTDDGRVFLWGSFRDNNGVIGLLEPMKKSMVPVQVQLDVPVVKVASGNDHLVMLTADGDLYTLGCGEQGQLGRVPELFANRGGRQGLERLLVPKCVMLKSRGSRGHVRFQDAFCGAYFTFAISHEGHVYGFGLSNYHQL

SEQ ID NO: 11838 - protein, 332 aa, Artificial Sequence
  Synthetic polypeptide
HVSHRSHSTEPGLVLTLGQGDVGQLGLGENVMERKKPALVSIPEDVVQAEAGGMHTVCLSKSGQVYSFGCNDEGALGRDTSVEGSEMVPGKVELQEKVVQVSAGDSHTAALTDDGRVFLWGSFRDNNGVIGLLEPMKKSMVPVQVQLDVPVVKVASGNDHLVMLTADGDLYTLGCGEQGQLGRVPELFANRGGRQGLERLLVPKCVMLKSRGSRGHVRFQDAFCGAYFTFAISHEGHVYGFGLSNYHQLGTPGTESCFIPQNLTSFKNSTKSWVGFSGGQHHTVCMDSEGKAYSLGRAEYGRLGLGEGAEEKSIPTLISRLPAVSSVACGAS

SEQ ID NO: 11839 - protein, 16 aa, Artificial Sequence
  Synthetic polypeptide
VRRSRPSWLTRLTQVP

SEQ ID NO: 11840 - protein, 6 aa, Artificial Sequence
  Synthetic polypeptide
HVSHRS

SEQ ID NO: 11841 - protein, 15 aa, Artificial Sequence
  Synthetic polypeptide
QKIETILANTSHTGP

SEQ ID NO: 11842 - protein, 260 aa, Artificial Sequence
  Synthetic polypeptide
HVSHRSHSTEPGLVLTLGQGDVGQLGLGENVMERKKPALVSIPEDVVQAEAGGMHTVCLSKSGQVYSFGCNDEGALGRDTSVEGSEMVPGKVELQEKVVQVSAGDSHTAALTDDGRVFLWGSFRDNNGVIGLLEPMKKSMVPVQVQLDVPVVKVASGNDHLVMLTADGDLYTLGCGEQGQLGRVPELFANRGGRQGLERLLVPKCVMLKSRGSRGHVRFQDAFCGAYFTFAISHEGHVYGFGLSNYHQLGTPGTESCFIP

SEQ ID NO: 11843 - protein, 17 aa, Artificial Sequence
  Synthetic polypeptide
VNEKNIRQMNDSWSPSV

SEQ ID NO: 11844 - protein, 207 aa, Artificial Sequence
  Synthetic polypeptide
EEYQADERLLVPKCVMLKSRGSRGHVRFQDAFCGAYFTFAISHEGHVYGFGLSNYHQLGTPGTESCFIPQNLTSFKNSTKSWVGFSGGQHHTVCMDSEGKAYSLGRAEYGRLGLGEGAEEKSIPTLISRLPAVSSVACGASVGYAVTKDGRVFAWGMGTNYQLGTGQDEDAWSPVEMMGKQLENRVVLSVSSGGQHTVLLVKDKEQS

SEQ ID NO: 11845 - protein, 16 aa, Artificial Sequence
  Synthetic polypeptide
EEYQADERLLVPKCVM

SEQ ID NO: 11846 - protein, 22 aa, Artificial Sequence
  Synthetic polypeptide
EEYQADERLLVPKCVMLKSRGS

SEQ ID NO: 11847 - protein, 58 aa, Artificial Sequence
  Synthetic polypeptide
EEYQADERLLVPKCVMLKSRGSRGHVRFQDAFCGAYFTFAISHEGHVYGFGLSNYHQL

SEQ ID NO: 11848 - protein, 141 aa, Artificial Sequence
  Synthetic polypeptide
EEYQADERLLVPKCVMLKSRGSRGHVRFQDAFCGAYFTFAISHEGHVYGFGLSNYHQLGTPGTESCFIPQNLTSFKNSTKSWVGFSGGQHHTVCMDSEGKAYSLGRAEYGRLGLGEGAEEKSIPTLISRLPAVSSVACGAS

SEQ ID NO: 11849 - protein, 69 aa, Artificial Sequence
  Synthetic polypeptide
EEYQADERLLVPKCVMLKSRGSRGHVRFQDAFCGAYFTFAISHEGHVYGFGLSNYHQLGTPGTESCFIP

SEQ ID NO: 11850 - protein, 27 aa, Artificial Sequence
  Synthetic polypeptide
SMAIKTTSSGAKLPGSNPSSNTGVMVL

SEQ ID NO: 11851 - protein, 31 aa, Artificial Sequence
  Synthetic polypeptide
AWRLRPQALEPNCLVQIPAPIQGLWFCEIHR

SEQ ID NO: 11852 - protein, 168 aa, Artificial Sequence
  Synthetic polypeptide
DHKLWSQTAWFKSQLQYRGYGFVKFTDELEQKRALTECQGAVGLGSKPVRLSVAIPKASRVKPVEYSQMYSYSYNQYYQQYQNYYAQWGYDQNTGSYSYSYPQYGYTQSTMQTYEEVGDDALEDPMPQLDVTEANKEFMEQSEELYDALMDCHWQPLDTVSSEIPAMM

SEQ ID NO: 11853 - protein, 717 aa, Artificial Sequence
  Synthetic polypeptide
QIVDSEARLPAQEELREDPDFEIKEGEGLEECSKIEVKEESPQSKAETELKASQKPIRKHRNMHCKVSLLDDTVYECVVEKHAKGQDLLKRVCEHLNLLEEDYFGLAIWDNATSKTWLDSAKEIKKQVRGVPWNFTFNVKFYPPDPAQLTEDITRYYLCLQLRQDIVAGRLPCSFATLALLGSYTIQSELGDYDPELHGVDYVSDFKLAPNQTKELEEKVMELHKSYRSMTPAQADLEFLENAKKLSMYGVDLHKAKDLEGVDIILGVCSSGLLVYKDKLRINRFPWPKVLKISYKRSSFFIKIRPGEQEQYESTIGFKLPSYRAAKKLWKVCVEHHTFFRLTSTDTIPKSKFLALGSKFRYSGRTQAQTRQASALIDRPAPHFERTASKRASRSLDGAAAVDSADRSPRPTSAPAITQGQVAEGGVLDASAKKTVVPKAQKETVKAEVKKEDEPPEQAEPEPTEAWKVEKTHIEVTVPTSNGDQTQKLAEKTEDLIRMRKKKRERLDGENIYIRHSNLMLEDLDKSQEEIKKHHASISELKKNFMESVPEPRPSEWDKRLSTHSPFRTLNINGQIPTGEGPPLVKTQTVTISDNANAVKSEIPTKDVPIVHTETKTITYEAAQTDDNSGDLDPGVLLTAQTITSETPSSTTTTQITKTVKGGISETRIEKRIVITGDADIDHDQVLVQAIKEAKEQHPDMSVTKVVVHQETEIADE

SEQ ID NO: 11854 - protein, 34 aa, Artificial Sequence
  Synthetic polypeptide
KSWILKPDCLLRKNSEKIQILKLRKEKDLKSAPK

SEQ ID NO: 11855 - protein, 15 aa, Artificial Sequence
  Synthetic polypeptide
SQTACSGRTQRRSRF

SEQ ID NO: 11856 - protein, 684 aa, Artificial Sequence
  Synthetic polypeptide
QIVDSEARLPAQEELREDPDFEIKEGEGLEECSKIEVKEESPQSKAETELKASQKPIRKHRNMHCKVSLLDDTVYECVVEKHAKGQDLLKRVCEHLNLLEEDYFGLAIWDNATSKTWLDSAKEIKKQVRGVPWNFTFNVKFYPPDPAQLTEDITRYYLCLQLRQDIVAGRLPCSFATLALLGSYTIQSELGDYDPELHGVDYVSDFKLAPNQTKELEEKVMELHKSYRSMTPAQADLEFLENAKKLSMYGVDLHKAKDLEGVDIILGVCSSGLLVYKDKLRINRFPWPKVLKISYKRSSFFIKIRPGEQEQYESTIGFKLPSYRAAKKLWKVCVEHHTFFRLTSTDTIPKSKFLALGSKFRYSGRTQAQTRQASALIDRPAPHFERTASKRASRSLDGAAAVDSADRSPRPTSAPAITQGQVAEGGVLDASAKKTVVPKAQKETVKAEVKKEDEPPEQAEPEPTEAWKKKRERLDGENIYIRHSNLMLEDLDKSQEEIKKHHASISELKKNFMESVPEPRPSEWDKRLSTHSPFRTLNINGQIPTGEGPPLVKTQTVTISDNANAVKSEIPTKDVPIVHTETKTITYEAAQTDDNSGDLDPGVLLTAQTITSETPSSTTTTQITKTVKGGISETRIEKRIVITGDADIDHDQVLVQAIKEAKEQHPDMSVTKVVVHQETEIADE

SEQ ID NO: 11857 - protein, 620 aa, Artificial Sequence
  Synthetic polypeptide
QIVDSEARLPAQEELREDPDFEIKEGEGLEECSKIEVKEESPQSKAETELKASQKPIRKHRNMHCKVSLLDDTVYECVVEKHAKGQDLLKRVCEHLNLLEEDYFGLAIWDNATSKTWLDSAKEIKKQVRGVPWNFTFNVKFYPPDPAQLTEDITRYYLCLQLRQDIVAGRLPCSFATLALLGSYTIQSELGDYDPELHGVDYVSDFKLAPNQTKELEEKVMELHKSYRSMTPAQADLEFLENAKKLSMYGVDLHKAKDLEGVDIILGVCSSGLLVYKDKLRINRFPWPKVLKISYKRSSFFIKIRPGEQEQYESTIGFKLPSYRAAKKLWKVCVEHHTFFRLTSTDTIPKSKFLALGSKFRYSGRTQAQTRQASALIDRPAPHFERTASKRASRSLDGAAAVDSADRSPRPTSAPAITQGQVAEGGVLDASAKKTVVPKAQKETVKAEVKKEDEPPEQAEPEPTEAWKDLDKSQEEIKKHHASISELKKNFMESVPEPRPSEWDKRLSTHSPFRTLNINGQIPTGEGTDDNSGDLDPGVLLTAQTITSETPSSTTTTQITKTVKGGISETRIEKRIVITGDADIDHDQVLVQAIKEAKEQHPDMSVTKVVVHQETEIADE

SEQ ID NO: 11858 - protein, 628 aa, Artificial Sequence
  Synthetic polypeptide
QIVDSEARLPAQEELREDPDFEIKEGEGLEECSKIEVKEESPQSKAETELKASQKPIRKHRNMHCKVSLLDDTVYECVVETWLDSAKEIKKQVRGVPWNFTFNVKFYPPDPAQLTEDITRYYLCLQLRQDIVAGRLPCSFATLALLGSYTIQSELGDYDPELHGVDYVSDFKLAPNQTKELEEKVMELHKSYRSMTPAQADLEFLENAKKLSMYGVDLHKAKDLEGVDIILGVCSSGLLVYKDKLRINRFPWPKVLKISYKRSSFFIKIRPGEQEQYESTIGFKLPSYRAAKKLWKVCVEHHTFFRLTSTDTIPKSKFLALGSKFRYSGRTQAQTRQASALIDRPAPHFERTASKRASRSLDGAAAVDSADRSPRPTSAPAITQGQVAEGGVLDASAKKTVVPKAQKETVKAEVKKEDEPPEQAEPEPTEAWKDLDKSQEEIKKHHASISELKKNFMESVPEPRPSEWDKRLSTHSPFRTLNINGQIPTGEGPPLVKTQTVTISDNANAVKSEIPTKDVPIVHTETKTITYEAAQTDDNSGDLDPGVLLTAQTITSETPSSTTTTQITKTVKGGISETRIEKRIVITGDADIDHDQVLVQAIKEAKEQHPDMSVTKVVVHQETEIADE

SEQ ID NO: 11859 - protein, 573 aa, Artificial Sequence
  Synthetic polypeptide
QIVDSEARLPAQEELREDPDFEIKEGEGLEECSKIEVKEESPQSKAETELKASQKPIRKHRNMHCKVSLLDDTVYECVVEKHAKGQDLLKRVCEHLNLLEEDYFGLAIWDNATSKTWLDSAKEIKKQVRGVPWNFTFNVKFYPPDPAQLTEDITRYYLCLQLRQDIVAGRLPCSFATLALLGSYTIQSELGDYDPELHGVDYVSDFKLAPNQTKELEEKVMELHKSYRSMTPAQADLEFLENAKKLSMYGVDLHKAKDLEGVDIILGVCSSGLLVYKDKLRINRFPWPKVLKISYKRSSFFIKIRPGEQEQYESTIGFKLPSYRAAKKLWKVCVEHHTFFRLTSTDTIPKSKFLALGSKFRYSGRTQAQTRQASALIDRPAPHFERTASKRASRSLDGAAAVDSADRSPRPTSAPAITQGQVAEGGVLDASAKKTVVPKAQKETVKAEVKKEDEPPEQAEPEPTEAWKVEKTHIEVTVPTSNGDQTQKKRERLDGENIYIRHSNLMLEDLDKSQEEIKKHHASISELKKNFMESVPEPRPSEWDKRLSTHSPFRTLNINGQIPTGEGVSTLST

SEQ ID NO: 11860 - protein, 484 aa, Artificial Sequence
  Synthetic polypeptide
SQQFGRLRRPIAQAQEFKTRLGNMDLEGVDIILGVCSSGLLVYKDKLRINRFPWPKVLKISYKRSSFFIKIRPGEQEQYESTIGFKLPSYRAAKKLWKVCVEHHTFFRLTSTDTIPKSKFLALGSKFRYSGRTQAQTRQASALIDRPAPHFERTASKRASRSLDGAAAVDSADRSPRPTSAPAITQGQVAEGGVLDASAKKTVVPKAQKETVKAEVKKEDEPPEQAEPEPTEAWKVEKTHIEVTVPTSNGDQTQKLAEKTEDLIRMRKKKRERLDGENIYIRHSNLMLEDLDKSQEEIKKHHASISELKKNFMESVPEPRPSEWDKRLSTHSPFRTLNINGQIPTGEGPPLVKTQTVTISDNANAVKSEIPTKDVPIVHTETKTITYEAAQTDDNSGDLDPGVLLTAQTITSETPSSTTTTQITKTVKGGISETRIEKRIVITGDADIDHDQVLVQAIKEAKEQHPDMSVTKVVVHQETEIADE

SEQ ID NO: 11861 - protein, 21 aa, Artificial Sequence
  Synthetic polypeptide
GGRSLKLRNSRPDWGTWTWKE

SEQ ID NO: 11862 - protein, 45 aa, Artificial Sequence
  Synthetic polypeptide
QAWWLTPVIPTIWEAEAADRSSSGIQDQTGEHGLGRSRYHPRCLL

SEQ ID NO: 11863 - protein, 451 aa, Artificial Sequence
  Synthetic polypeptide
SQQFGRLRRPIAQAQEFKTRLGNMDLEGVDIILGVCSSGLLVYKDKLRINRFPWPKVLKISYKRSSFFIKIRPGEQEQYESTIGFKLPSYRAAKKLWKVCVEHHTFFRLTSTDTIPKSKFLALGSKFRYSGRTQAQTRQASALIDRPAPHFERTASKRASRSLDGAAAVDSADRSPRPTSAPAITQGQVAEGGVLDASAKKTVVPKAQKETVKAEVKKEDEPPEQAEPEPTEAWKKKRERLDGENIYIRHSNLMLEDLDKSQEEIKKHHASISELKKNFMESVPEPRPSEWDKRLSTHSPFRTLNINGQIPTGEGPPLVKTQTVTISDNANAVKSEIPTKDVPIVHTETKTITYEAAQTDDNSGDLDPGVLLTAQTITSETPSSTTTTQITKTVKGGISETRIEKRIVITGDADIDHDQVLVQAIKEAKEQHPDMSVTKVVVHQETEIADE

SEQ ID NO: 11864 - protein, 387 aa, Artificial Sequence
  Synthetic polypeptide
SQQFGRLRRPIAQAQEFKTRLGNMDLEGVDIILGVCSSGLLVYKDKLRINRFPWPKVLKISYKRSSFFIKIRPGEQEQYESTIGFKLPSYRAAKKLWKVCVEHHTFFRLTSTDTIPKSKFLALGSKFRYSGRTQAQTRQASALIDRPAPHFERTASKRASRSLDGAAAVDSADRSPRPTSAPAITQGQVAEGGVLDASAKKTVVPKAQKETVKAEVKKEDEPPEQAEPEPTEAWKDLDKSQEEIKKHHASISELKKNFMESVPEPRPSEWDKRLSTHSPFRTLNINGQIPTGEGTDDNSGDLDPGVLLTAQTITSETPSSTTTTQITKTVKGGISETRIEKRIVITGDADIDHDQVLVQAIKEAKEQHPDMSVTKVVVHQETEIADE

SEQ ID NO: 11865 - protein, 470 aa, Artificial Sequence
  Synthetic polypeptide
SQQFGRLRRPIAQAQEFKTRLGNMDLEGVDIILGVCSSGLLVYKDKLRINRFPWPKVLKISYKRSSFFIKIRPGEQEQYESTIGFKLPSYRAAKKLWKVCVEHHTFFRLTSTDTIPKSKFLALGSKFRYSGRTQAQTRQASALIDRPAPHFERTASKRASRSLDGAAAVDSADRSPRPTSAPAITQGQVAEGGVLDASAKKTVVPKAQKETVKAEVKKEDEPPEQAEPEPTEAWKVEKTHIEVTVPTSNGDQTQKKRERLDGENIYIRHSNLMLEDLDKSQEEIKKHHASISELKKNFMESVPEPRPSEWDKRLSTHSPFRTLNINGQIPTGEGPPLVKTQTVTISDNANAVKSEIPTKDVPIVHTETKTITYEAAQTDDNSGDLDPGVLLTAQTITSETPSSTTTTQITKTVKGGISETRIEKRIVITGDADIDHDQVLVQAIKEAKEQHPDMSVTKVVVHQETEIADE

SEQ ID NO: 11866 - protein, 417 aa, Artificial Sequence
  Synthetic polypeptide
SQQFGRLRRPIAQAQEFKTRLGNMDLEGVDIILGVCSSGLLVYKDKLRINRFPWPKVLKISYKRSSFFIKIRPGEQEQYESTIGFKLPSYRAAKKLWKVCVEHHTFFRLTSTDTIPKSKFLALGSKFRYSGRTQAQTRQASALIDRPAPHFERTASKRASRSLDGAAAVDSADRSPRPTSAPAITQGQVAEGGVLDASAKKTVVPKAQKETVKAEVKKEDEPPEQAEPEPTEAWKKKRERLDGENIYIRHSNLMLEDLDKSQEEIKKHHASISELKKNFMESVPEPRPSEWDKRLSTHSPFRTLNINGQIPTGEGPPLVKTQTVTISDNANAVKSEIPTKDVPIVHTETKTITYEAAQTVKGGISETRIEKRIVITGDADIDHDQVLVQAIKEAKEQHPDMSVTKVVVHQETEIADE

SEQ ID NO: 11867 - protein, 430 aa, Artificial Sequence
  Synthetic polypeptide
SQQFGRLRRPIAQAQEFKTRLGNMDLEGVDIILGVCSSGLLVYKDKLRINRFPWPKVLKISYKRSSFFIKIRPGEQEQYESTIGFKLPSYRAAKKLWKVCVEHHTFFRLTSTDTIPKSKFLALGSKFRYSGRTQAQTRQASALIDRPAPHFERTASKRASRSLDGAAAVDSADRSPRPTSAPAITQGQVAEGGVLDASAKKTVVPKAQKETVKAEVKKEDEPPEQAEPEPTEAWKDLDKSQEEIKKHHASISELKKNFMESVPEPRPSEWDKRLSTHSPFRTLNINGQIPTGEGPPLVKTQTVTISDNANAVKSEIPTKDVPIVHTETKTITYEAAQTDDNSGDLDPGVLLTAQTITSETPSSTTTTQITKTVKGGISETRIEKRIVITGDADIDHDQVLVQAIKEAKEQHPDMSVTKVVVHQETEIADE

SEQ ID NO: 11868 - protein, 340 aa, Artificial Sequence
  Synthetic polypeptide
SQQFGRLRRPIAQAQEFKTRLGNMDLEGVDIILGVCSSGLLVYKDKLRINRFPWPKVLKISYKRSSFFIKIRPGEQEQYESTIGFKLPSYRAAKKLWKVCVEHHTFFRLTSTDTIPKSKFLALGSKFRYSGRTQAQTRQASALIDRPAPHFERTASKRASRSLDGAAAVDSADRSPRPTSAPAITQGQVAEGGVLDASAKKTVVPKAQKETVKAEVKKEDEPPEQAEPEPTEAWKVEKTHIEVTVPTSNGDQTQKKRERLDGENIYIRHSNLMLEDLDKSQEEIKKHHASISELKKNFMESVPEPRPSEWDKRLSTHSPFRTLNINGQIPTGEGVSTLST

SEQ ID NO: 11869 - protein, 41 aa, Artificial Sequence
  Synthetic polypeptide
HGRIARDQEAEVAVSHTPTWATENLADRGCVQRGSTDPSSE

SEQ ID NO: 11870 - protein, 246 aa, Artificial Sequence
  Synthetic polypeptide
ATLQPGQQRTWRTEAVFSEEALIQVPSDIPLQSAATLGVNPCTAYRMLMDFEQLQPGDSVIQNASNSGVGQAVIQIAAALGLRTINVVRDRPDIQKLSDRLKSLGAEHVITEEELRRPEMKNFFKDMPQPRLALNCVGGKSSTELLRQLARGGTMVTYGGMAKQPVVASVSLLIFKDLKLRGFWLSQWKKDHSPDQFKELILTLCDLIRRGQLTAPACSQVPLQDYQSALEASMKPFISSKQILTM

SEQ ID NO: 11871 - protein, 43 aa, Artificial Sequence
  Synthetic polypeptide
SQPLGRLTWKDSSRPGSRSCSKPHSNLGNREPGGPRLCSARKH

SEQ ID NO: 11872 - protein, 212 aa, Artificial Sequence
  Synthetic polypeptide
ATLQPGQQRTWRTEAVFSEEALIQVPSDIPLQSAATLGVNPCTAYRMLMDFEQLQPGDSVIQNASNSGVGQAVIQIAAALGLRTINVVRDRPDIQKLSDRLKSLGAEHVITEEELRRPEMKNFFKDMPQPRLALNCVGGKSSTELLRQLARGGTMVTYGGMAKQPVVASVVSWVQREACLEPGQTPQPGHIPWHDSCLSLGNAPFLEGSLYP

SEQ ID NO: 11873 - protein, 52 aa, Artificial Sequence
  Synthetic polypeptide
LCDTLLAAPSRRQVTQQCPASTARPSTMTSSGSKCESTLAPGHLRTCPTAPT

SEQ ID NO: 11874 - protein, 39 aa, Artificial Sequence
  Synthetic polypeptide
SSVWWLRAWVQGPDHLGSNPKPTTSSCVILCWLHLRGGK

SEQ ID NO: 11875 - protein, 1424 aa, Artificial Sequence
  Synthetic polypeptide
YFAGCTFEEASDPAVPCEYSQAQYDDFQWEQVRIHPGTRAPADLPHGSYLMVNTSQHAPGQRAHVIFQSLSENDTHCVQFSYFLYSRDGHSPGTLGVYVRVNGGPLGSAVWNMTGSHGRQWHQAELAVSTFWPNEYQVLFEALISPDRRGYMGLDDILLLSYPCAKAPHFSRLGDVEVNAGQNASFQCMAAGRAAEAERFLLQRQSGALVPAAGVRHISHRRFLATFPLAAVSRAEQDLYRCVSQAPRGAGVSNFAELIVKEPPTPIAPPQLLRAGPTYLIIQLNTNSIIGDGPIVRKEIEYRMARGPWAEVHAVSLQTYKLWHLDPDTEYEISVLLTRPGDGGTGRPGPPLISRTKCAEPMRAPKGLAFAEIQARQLTLQWEPLGYNVTRCHTYTVSLCYHYTLGSSHNQTIRECVKTEQGVSRYTIKNLLPYRNVHVRLVLTNPEGRKEGKEVTFQTDEDVPSGIAAESLTFTPLEDMIFLKWEEPQEPNGLITQYEISYQSIESSDPAVNVPGPRRTISKLRNETYHVFSNLHPGTTYLFSVRARTGKGFGQAALTEITTNISAPSFDYADMPSPLGESENTITVLLRPAQGRGAPISVYQVIVEEERARRLRREPGGQDCFPVPLTFEAALARGLVHYFGAELAASSLPEAMPFTVGDNQTYRGFWNPPLEPRKAYLIYFQAASHLKGETRLNCIRIARKAACKESKRPLEVSQRSEEMGLILGICAGGLAVLILLLGAIIVIIRKGRDHYAYSYYPKPVNMTKATVNYRQEKTHMMSAVDRSFTDQSTLQEDERLGLSFMDTHGYSTRGDQRSGGVTEASSLLGGSPRRPCGRKGSPYHTGQLHPAVRVADLLQHINQMKTAEGYGFKQEYESFFEGWDATKKKDKVKGSRQEPMPAYDRHRVKLHPMLGDPNADYINANYIDGYHRSNHFIATQGPKPEMVYDFWRMVWQEHCSSIVMITKLVEVGRVKCSRYWPEDSDTYGDIKIMLVKTETLAEYVVRTFALERRGYSARHEVRQFHFTAWPEHGVPYHATGLLAFIRRVKASTPPDAGPIVIHCSAGTGRTGCYIVLDVMLDMAECEGVVDIYNCVKTLCSRRVNMIQTEEQYIFIHDAILEACLCGETTIPVSEFKATYKEMIRIDPQSNSSQLREEFQTLNSVTPPLDVEECSIALLPRNRDKNRSMDVLPPDRCLPFLISTDGDSNNYINAALTDSYTRSAAFIVTLHPLQSTTPDFWRLVYDYGCTSIVMLNQLNQSNSAWPCLQYWPEPGRQQYGLMEVEFMSGTADEDLVARVFRVQNISRLQEGHLLVRHFQFLRWSAYRDTPDSKKAFLHLLAEVDKWQAESGDGRTIVHCLNGGGRSGTFCACATVLEMIRCHNLVDVFFAAKTLRNYKPNMVETMDQYHFCYDVALEYLEGLESR

SEQ ID NO: 11876 - protein, 1414 aa, Artificial Sequence
  Synthetic polypeptide
YFAGCTFEEASDPAVPCEYSQAQYDDFQWEQVRIHPGTRAPADLPHGSYLMVNTSQHAPGQRAHVIFQSLSENDTHCVQFSYFLYSRDGHSPGTLGVYVRVNGGPLGSAVWNMTGSHGRQWHQAELAVSTFWPNEYQVLFEALISPDRRGYMGLDDILLLSYPCAKAPHFSRLGDVEVNAGQNASFQCMAAGRAAEAERFLLQRQSGALVPAAGVRHISHRRFLATFPLAAVSRAEQDLYRCVSQAPRGAGVSNFAELIVKEPPTPIAPPQLLRAGPTYLIIQLNTNSIIGDGPIVRKEIEYRMARGPWAEVHAVSLQTYKLWHLDPDTEYEISVLLTRPGDGGTGRPGPPLISRTKCAEPMRAPKGLAFAEIQARQLTLQWEPLGYNVTRCHTYTVSLCYHYTLGSSHNQTIRECVKTEQGVSRYTIKNLLPYRNVHVRLVLTNPEGRKEGKEVTFQTDEDVPSGIAAESLTFTPLEDMIFLKWEEPQEPNGLITQYEISYQSIESSDPAVNVPGPRRTISKLRNETYHVFSNLHPGTTYLFSVRARTGKGFGQAALTEITTNISAPSFDYADMPSPLGESENTITVLLRPAQGRGAPISVYQVIVEEERARRLRREPGGQDCFPVPLTFEAALARGLVHYFGAELAASSLPEAMPFTVGDNQTYRGFWNPPLEPRKAYLIYFQAASHLKGETRLNCIRIARKAACKESKRPLEVSQRSEEMGLILGICAGGLAVLILLLGAIIVIIRKGKPVNMTKATVNYRQEKTHMMSAVDRSFTDQSTLQEDERLGLSFMDTHGYSTRGDQRSGGVTEASSLLGGSPRRPCGRKGSPYHTGQLHPAVRVADLLQHINQMKTAEGYGFKQEYESFFEGWDATKKKDKVKGSRQEPMPAYDRHRVKLHPMLGDPNADYINANYIDGYHRSNHFIATQGPKPEMVYDFWRMVWQEHCSSIVMITKLVEVGRVKCSRYWPEDSDTYGDIKIMLVKTETLAEYVVRTFALERRGYSARHEVRQFHFTAWPEHGVPYHATGLLAFIRRVKASTPPDAGPIVIHCSAGTGRTGCYIVLDVMLDMAECEGVVDIYNCVKTLCSRRVNMIQTEEQYIFIHDAILEACLCGETTIPVSEFKATYKEMIRIDPQSNSSQLREEFQTLNSVTPPLDVEECSIALLPRNRDKNRSMDVLPPDRCLPFLISTDGDSNNYINAALTDSYTRSAAFIVTLHPLQSTTPDFWRLVYDYGCTSIVMLNQLNQSNSAWPCLQYWPEPGRQQYGLMEVEFMSGTADEDLVARVFRVQNISRLQEGHLLVRHFQFLRWSAYRDTPDSKKAFLHLLAEVDKWQAESGDGRTIVHCLNGGGRSGTFCACATVLEMIRCHNLVDVFFAAKTLRNYKPNMVETMDQYHFCYDVALEYLEGLESR

SEQ ID NO: 11877 - protein, 1420 aa, Artificial Sequence
  Synthetic polypeptide
YFAGCTFEEASDPAVPCEYSQAQYDDFQWEQVRIHPGTRAPADLPHGSYLMVNTSQHAPGQRAHVIFQSLSENDTHCVQFSYFLYSRDGHSPGTLGVYVRVNGGPLGSAVWNMTGSHGRQWHQAELAVSTFWPNEYQVLFEALISPDRRGYMGLDDILLLSYPCAKAPHFSRLGDVEVNAGQNASFQCMAAGRAAEAERFLLQRQSGALVPAAGVRHISHRRFLATFPLAAVSRAEQDLYRCVSQAPRGAGVSNFAELIVKEPPTPIAPPQLLRAGPTYLIIQLNTNSIIGDGPIVRKEIEYRMARGPWAEVHAVSLQTYKLWHLDPDTEYEISVLLTRPGDGGTGRPGPPLISRTKCAEPMRAPKGLAFAEIQARQLTLQWEPLGYNVTRCHTYTVSLCYHYTLGSSHNQTIRECVKTEQGVSRYTIKNLLPYRNVHVRLVLTNPEGRKEGKEVTFQTDEDVPSGIAAESLTFTPLEDMIFLKWEEPQEPNGLITQYEISYQSIESSDPAVNVPGPRRTISKLRNETYHVFSNLHPGTTYLFSVRARTGKGFGQAALTEITTNISAPSFDYADMPSPLGESENTITVLLRPAQGRGAPISVYQVIVEEERARRLRREPGGQDCFPVPLTFEAALARGLVHYFGAELAASSLPEAMPFTVGDNQTYRGFWNPPLEPRKAYLIYFQAASHLKGETRLNCIRIARKAACKESKRPLEVSQRSEEMGLILGICAGGLAVLILLLGAIIVIIRKGKPVNMTKATVNYRQEKTHMMSAVDRSFTDQSTLQEDERLGLSFMDTHGYSTRGDQRSGGVTEASSLLGGSPRRPCGRKGSPYHTGQLHPAVRVADLLQHINQMKTAEGYGFKQEYESFFEGWDATKKKDKVKGSRQEPMPAYDRHRVKLHPMLGDPNADYINANYIDLRGGRTGYHRSNHFIATQGPKPEMVYDFWRMVWQEHCSSIVMITKLVEVGRVKCSRYWPEDSDTYGDIKIMLVKTETLAEYVVRTFALERRGYSARHEVRQFHFTAWPEHGVPYHATGLLAFIRRVKASTPPDAGPIVIHCSAGTGRTGCYIVLDVMLDMAECEGVVDIYNCVKTLCSRRVNMIQTEEQYIFIHDAILEACLCGETTIPVSEFKATYKEMIRIDPQSNSSQLREEFQTLNSVTPPLDVEECSIALLPRNRDKNRSMDVLPPDRCLPFLISTDGDSNNYINAALTDSYTRSAAFIVTLHPLQSTTPDFWRLVYDYGCTSIVMLNQLNQSNSAWPCLQYWPEPGRQQYGLMEVEFMSGTADEDLVARVFRVQNISRLQEGHLLVRHFQFLRWSAYRDTPDSKKAFLHLLAEVDKWQAESGDGRTIVHCLNGGGRSGTFCACATVLEMIRCHNLVDVFFAAKTLRNYKPNMVETMDQYHFCYDVALEYLEGLESR

SEQ ID NO: 11878 - protein, 1420 aa, Artificial Sequence
  Synthetic polypeptide
YFAGCTFEEASDPAVPCEYSQAQYDDFQWEQVRIHPGTRAPADLPHGSYLMVNTSQHAPGQRAHVIFQSLSENDTHCVQFSYFLYSRDGHSPGTLGVYVRVNGGPLGSAVWNMTGSHGRQWHQAELAVSTFWPNEYQVLFEALISPDRRGYMGLDDILLLSYPCAKAPHFSRLGDVEVNAGQNASFQCMAAGRAAEAERFLLQRQSGALVPAAGVRHISHRRFLATFPLAAVSRAEQDLYRCVSQAPRGAGVSNFAELIVKEPPTPIAPPQLLRAGPTYLIIQLNTNSIIGDGPIVRKEIEYRMARGPWAEVHAVSLQTYKLWHLDPDTEYEISVLLTRPGDGGTGRPGPPLISRTKCAEPMRAPKGLAFAEIQARQLTLQWEPLGYNVTRCHTYTVSLCYHYTLGSSHNQTIRECVKTEQGVSRYTIKNLLPYRNVHVRLVLTNPEGRKEGKEVTFQTDEDVPSGIAAESLTFTPLEDMIFLKWEEPQEPNGLITQYEISYQSIESSDPAVNVPGPRRTISKLRNETYHVFSNLHPGTTYLFSVRARTGKGFGQAALTEITTNISAPSFDYADMPSPLGESENTITVLLRPAQGRGAPISVYQVIVEEERARRLRREPGGQDCFPVPLTFEAALARGLVHYFGAELAASSLPEAMPFTVGDNQTYRGFWNPPLEPRKAYLIYFQAASHLKGETRLNCIRIARKAACKESKRPLEVSQRSEEMGLILGICAGGLAVLILLLGAIIVIIRKGKPVNMTKATVNYRQEKTHMMSAVDRSFTDQSTLQEDERLGLSFMDTHGYSTRGDQRSGGVTEASSLLGGSPRRPCGRKGSPYHTGQLHPAVRVADLLQHINQMKTAEGYGFKQEYESFFEGWDATKKKDKVKGSRQEPMPAYDRHRVKLHPMLGDPNADYINANYIDIRINREGYHRSNHFIATQGPKPEMVYDFWRMVWQEHCSSIVMITKLVEVGRVKCSRYWPEDSDTYGDIKIMLVKTETLAEYVVRTFALERRGYSARHEVRQFHFTAWPEHGVPYHATGLLAFIRRVKASTPPDAGPIVIHCSAGTGRTGCYIVLDVMLDMAECEGVVDIYNCVKTLCSRRVNMIQTEEQYIFIHDAILEACLCGETTIPVSEFKATYKEMIRIDPQSNSSQLREEFQTLNSVTPPLDVEECSIALLPRNRDKNRSMDVLPPDRCLPFLISTDGDSNNYINAALTDSYTRSAAFIVTLHPLQSTTPDFWRLVYDYGCTSIVMLNQLNQSNSAWPCLQYWPEPGRQQYGLMEVEFMSGTADEDLVARVFRVQNISRLQEGHLLVRHFQFLRWSAYRDTPDSKKAFLHLLAEVDKWQAESGDGRTIVHCLNGGGRSGTFCACATVLEMIRCHNLVDVFFAAKTLRNYKPNMVETMDQYHFCYDVALEYLEGLESR

SEQ ID NO: 11879 - protein, 1411 aa, Artificial Sequence
  Synthetic polypeptide
YFAGCTFEEASDPAVPCEYSQAQYDDFQWEQVRIHPGTRAPADLPHGSYLMVNTSQHAPGQRAHVIFQSLSENDTHCVQFSYFLYSRDGHSPGTLGVYVRVNGGPLGSAVWNMTGSHGRQWHQAELAVSTFWPNEYQVLFEALISPDRRGYMGLDDILLLSYPCAKAPHFSRLGDVEVNAGQNASFQCMAAGRAAEAERFLLQRQSGALVPAAGVRHISHRRFLATFPLAAVSRAEQDLYRCVSQAPRGAGVSNFAELIVKEPPTPIAPPQLLRAGPTYLIIQLNTNSIIGDGPIVRKEIEYRMARGPWAEVHAVSLQTYKLWHLDPDTEYEISVLLTRPGDGGTGRPGPPLISRTKCAEPMRAPKGLAFAEIQARQLTLQWEPLGYNVTRCHTYTVSLCYHYTLGSSHNQTIRECVKTEQGVSRYTIKNLLPYRNVHVRLVLTNPEGRKEGKEVTFQTDEDVPSGIAAESLTFTPLEDMIFLKWEEPQEPNGLITQYEISYQSIESSDPAVNVPGPRRTISKLRNETYHVFSNLHPGTTYLFSVRARTGKGFGQAALTEITTNISAPSFDYADMPSPLGESENTITVLLRPAQGRGAPISVYQVIVEEERARRLRREPGGQDCFPVPLTFEAALARGLVHYFGAELAASSLPEAMPFTVGDNQTYRGFWNPPLEPRKAYLIYFQAASHLKGETRLNCIRIARKAACKESKRPLEVSQRSEEMGLILGICAGGLAVLILLLGAIIVIIRKGKPVNMTKATVNYRQEKTHMMSAVDRSFTDQSTLQEDERLGLSFMDTHGYSTRGDQRSGGVTEASSLLGGSPRRPCGRKGSPYHTGQLHPAVRVADLLQHINQMKTAEGYGFKQEYESFFEGWDATKKKDKVKGSRQEPMPAYDRHRVKLHPMLGDPNADYINANYIDGYHRSNHFIATQGPKPEMVYDFWRMVWQEHCSSIVMITKLVEVKCSRYWPEDSDTYGDIKIMLVKTETLAEYVVRTFALERRGYSARHEVRQFHFTAWPEHGVPYHATGLLAFIRRVKASTPPDAGPIVIHCSAGTGRTGCYIVLDVMLDMAECEGVVDIYNCVKTLCSRRVNMIQTEEQYIFIHDAILEACLCGETTIPVSEFKATYKEMIRIDPQSNSSQLREEFQTLNSVTPPLDVEECSIALLPRNRDKNRSMDVLPPDRCLPFLISTDGDSNNYINAALTDSYTRSAAFIVTLHPLQSTTPDFWRLVYDYGCTSIVMLNQLNQSNSAWPCLQYWPEPGRQQYGLMEVEFMSGTADEDLVARVFRVQNISRLQEGHLLVRHFQFLRWSAYRDTPDSKKAFLHLLAEVDKWQAESGDGRTIVHCLNGGGRSGTFCACATVLEMIRCHNLVDVFFAAKTLRNYKPNMVETMDQYHFCYDVALEYLEGLESR

SEQ ID NO: 11880 - protein, 1418 aa, Artificial Sequence
  Synthetic polypeptide
YFAGCTFEEASDPAVPCEYSQAQYDDFQWEQVRIHPGTRAPADLPHGSYLMVNTSQHAPGQRAHVIFQSLSENDTHCVQFSYFLYSRDGHSPGTLGVYVRVNGGPLGSAVWNMTGSHGRQWHQAELAVSTFWPNEYQVLFEALISPDRRGYMGLDDILLLSYPCAKAPHFSRLGDVEVNAGQNASFQCMAAGRAAEAERFLLQRQSGALVPAAGVRHISHRRFLATFPLAAVSRAEQDLYRCVSQAPRGAGVSNFAELIVKEPPTPIAPPQLLRAGPTYLIIQLNTNSIIGDGPIVRKEIEYRMARGPWAEVHAVSLQTYKLWHLDPDTEYEISVLLTRPGDGGTGRPGPPLISRTKCAEPMRAPKGLAFAEIQARQLTLQWEPLGYNVTRCHTYTVSLCYHYTLGSSHNQTIRECVKTEQGVSRYTIKNLLPYRNVHVRLVLTNPEGRKEGKEVTFQTDEDVPSGIAAESLTFTPLEDMIFLKWEEPQEPNGLITQYEISYQSIESSDPAVNVPGPRRTISKLRNETYHVFSNLHPGTTYLFSVRARTGKGFGQAALTEITTNISAPSFDYADMPSPLGESENTITVLLRPAQGRGAPISVYQVIVEEERARRLRREPGGQDCFPVPLTFEAALARGLVHYFGAELAASSLPEAMPFTVGDNQTYRGFWNPPLEPRKAYLIYFQAASHLKGETRLNCIRIARKAACKESKRPLEVSQRSEEMGLILGICAGGLAVLILLLGAIIVIIRKGKPVNMTKATVNYRQEKTHMMSAVDRSFTDQSTLQEDERLGLSFMDTHGYSTRGDQRSGGVTEASSLLGGSPRRPCGRKGSPYHTGQLHPAVRVADLLQHINQMKTAEGYGFKQEYESFFEGWDATKKKDKVKGSRQEPMPAYDRHRVKLHPMLGDPNADYINANYIDIRINREGYHRSNHFIATQGPKPEMVYDFWRMVWQEHCSSIVMITKLVEVGRVKCSRYWPEDSDTYGDIKIMLVKTETLAEYVVRTFALERRGYSARHEVRQFHFTAWPEHGVPYHATGLLAFIRRVKASTPPDAGPIVIHCSAGTGRTGCYIVLDVMLDMAECEGVVDIYNCVKTLCSRRVNMIQTEEQYIFIHDAILEACLCGETTIPVSEFKATYKEMIRIDPQSNSSQLREEFQTLNSVTPPLDVEECSIALLPRNRDKNRSMDVLPPDRCLPFLISTDGDSNNYINAALTDSYTRSAAFIVTLHPLQSTTPDFWRLVYDYGCTSIVMLNQLNQSNSAWPCLQYWPEPGRQQYGLMEVEFMSGTADEDLVARVFRVQNISREGHLLVRHFQFLRWSAYRDTPDSKKAFLHLLAEVDKWQAESGDGRTIVHCLNGGGRSGTFCACATVLEMIRCHNLVDVFFAAKTLRNYKPNMVETMDQYHFCYDVALEYLEGLESR

SEQ ID NO: 11881 - protein, 235 aa, Artificial Sequence
  Synthetic polypeptide
INIMSVLLFIEHSVEVAHGKASCKLSQMGYLRIADLISSFLLITMLFIISLSLLIGVVKNREKYLLPFLSLQIMDYLLCLLTLLGSYIELPAYLKLASRSRASSSKFPLMTLQLLDFCLSILTLCSSYMEVPTYLNFKSMNHMNYLPSQEDMPHNQFIKMMIIFSIAFITVLIFKVYMFKCVWRCYRLIKCMNSVEEKRNSKMLQKVVLPSYEEALSLPSKTPEGGPAPPPYSEV

SEQ ID NO: 11882 - protein, 36 aa, Artificial Sequence
  Synthetic polypeptide
VLNKYHERLVVHRALSRGGPWQGVLQALPDGLPQDR

SEQ ID NO: 11883 - protein, 70 aa, Artificial Sequence
  Synthetic polypeptide
PTWRNPISTKNTKLASSCQVKSFGKQMNPAKMDQKEYSWVINGETVPGEHQIIQFPSQSWCREDLVRVSM

SEQ ID NO: 11884 - protein, 5 aa, Artificial Sequence
  Synthetic polypeptide
PALAR

SEQ ID NO: 11885 - protein, 1047 aa, Artificial Sequence
  Synthetic polypeptide
KYKISQLLPGKKFWETDESSKDGPKGIFLGDQWRDSAWGTSDHSVSQPIMVQRRPGQSFHVNSEVNSVLSPRSESGGLGVSMVEYVLSSSPGDSCLRKGGFGPRDADSDENDKGEKKNKGTFDGDKLGDLKEEGDVMDKTNGLPVQNGIDADVKDFSRTPGNCQNSANEVDLLGPNQNGSEGLAQLTSTNGAKPVEDFSNMESQSVPLDPMEHVGMEPLQFDYSGTQVPVDSAAATVGLFDYNSQQQLFQRPNALAVQQLTAAQQQQYALAAAHQPHIGLAPAAFVPNPYIISAAPPGTDPYTAGLAAAATLGPAVVPHQYYGVTPWGVYPASLFQQQAAAAAAATNSANQQTTPQAQQGQQQVLRGGASQRPLTPNQNQQGQQTDPLVAAAAVNSALAFGQGLAAGMPGYPVLAPAAYYDQTGALVVNAGARNGLGAPVRLVAPAPVIISSSAAQAAVAAAAASANGAAGGLAGTTNGPFRPLGTQQPQPQPQQQPNNNLASSSFYGNNSLNSNSQSSSLFSQGSAQPANTSLGFGSSSSLGATLGSALGGFGTAVANSNTGSGSRRDSLTGSSDLYKRTSSSLTPIGHSFYNGLSFSSSPGPVGMPLPSQGPGHSQTPPPSLSSHGSSSSLNLGGLTNGSGRYISAAPGAEAKYRSASSASSLFSPSSTLFSSSRLRYGMSDVMPSGRSRLLEDFRNNRYPNLQLREIAGHIMEFSQDQHGSRFIQLKLERATPAERQLVFNEILQAAYQLMVDVFGNYVIQKFFEFGSLEQKLALAERIRGHVLSLALQMYGCRVIQKALEFIPSDQQNEMVRELDGHVLKCVKDQNGNHVVQKCIECVQPQSLQFIIDAFKGQVFALSTHPYGCRVIQRILEHCLPDQTLPILEELHQHTEQLVQDQYGNYVIQHVLEHGRPEDKSKIVAEIRGNVLVLSQHKFASNVVEKCVTHASRTERAVLIDEVCTMNDGPHSALYTMMKDQYANYVVQKMIDVAEPGQRKIVMHKIRPHIATLRKYTYGKHILAKLEKYYMKNGVDLGPICGPPNGII

SEQ ID NO: 11886 - protein, 1050 aa, Artificial Sequence
  Synthetic polypeptide
KYKISQLLPGKKFWETDESSKDGPKGIFLGDQWRDSAWGTSDHSVSQPIMVQRRPGQSFHVNSEVNSVLSPRSESGGLGVSMVEYVLSSSPGDSCLRKGGFGPRDADSDENDKGEKKNKGTFDGDKLGDLKEEGDVMDKTNGLPVQNGIDADVKDFSRTPGNCQNSANEVDLLGPNQNGSEGLAQLTSTNGAKPVEDFSNMESQSVPLDPMEHVGMEPLQFDYSGTQVPVDSAAATVGLFDYNSQQQLFQRPNALAVQQLTAAQQQQYALAAAHQPHIAGLAPAAFVPNPYIISAAPPGTDPYTAGLAAAATLGPAVVPHQYYGVTPWGVYPASLFQQQAAAAAAATNSANQQTTPQAQQGQQQVLRGGASQRPLTPNQNQQGQQTDPLVAAAAVNSALAFGQGLAAGMPGYPVLAPAAYYDQTGALVVNAGARNGLGAPVRLVAPAPVIISSSAAQAAVAAAAASANGAAGGLAGTTNGPFRPLGTQQPQPQPQQQPNNNLASSSFYGNNSLNSNSQSSSLFSQGSAQPANTSLGFGSSSSLGATLGSALGGFGTAVANSNTGSGSRRDSLTGSSDLYKRTSSSLTPIGHSFYNGLSFSSSPGPVGMPLPSQGPGHSQTPPPSLSSHGSSSSLNLGGLTNGSGRYISAAPGAEAKYRSASSASSLFSPSSTLFSSSRLRYGMSDVMPSGRSRLLEDFRNNRYPNLQLREIAGHIMEFSQDQHGSRFIQLKLERATPAERQLVFNEILQAAYQLMVDVFGNYVIQKFFEFGSLEQKLALAERIRGHVLSLALQMYGCRVIQKALEFIPSDQQVINEMVRELDGHVLKCVKDQNGNHVVQKCIECVQPQSLQFIIDAFKGQVFALSTHPYGCRVIQRILEHCLPDQTLPILEELHQHTEQLVQDQYGNYVIQHVLEHGRPEDKSKIVAEIRGNVLVLSQHKFASNVVEKCVTHASRTERAVLIDEVCTMNDGPHSALYTMMKDQYANYVVQKMIDVAEPGQRKIVMHKIRPHIATLRKYTYGKHILAKLEKYYMKNGVDLGPICGPPNGII

SEQ ID NO: 11887 - protein, 969 aa, Artificial Sequence
  Synthetic polypeptide
KYKISQLLPGKKFWETDESSKDGPKGIFLGDQWRDSAWGTSDHSVSQPIMVQRRPGQSFHVNSEVNSVLSPRSESGGLGVSMVEYVLSSSPGDSCLRKGGFGPRDADSDENDKGEKKNKGTFDGDKLGDLKEEGDVMDKTNGLPVQNGIDADVKDFSRTPGNCQNSANEVDLLGPNQNGSEGLAQLTSTNGAKPVEDFSNMESQSVPLDPMEHVGMEPLQFDYSGTQVPVDSAAATVGLFDYNSQQQLFQRPNALAVQQLTAAQQQQYALAAAHQPHIAGLAPAAFVPNPYIISAAPPGTDPYTAGLAAAATLGPAVVPHQYYGVTPWGVYPASLFQQQAAAAAAATNSANQQTTPQAQQGQQQVLRGGASQRPLTPNQNQQGQQTDPLVAAAAVNSALAFGQGLAAGMPGYPVLAPAAYYDQTGALVVNAGARNGLGAPVRLVAPAPVIISSSAAQAAVAAAAASANGAAGGLAGTTNGPFRPLGTQQPQPQPQQQPNNNLASSSFYGNNSLNSNSQSSSLFSQGSAQPANTSLGFGSSSSLGATLGSALGGFGTAGGLTNGSGRYISAAPGAEAKYRSASSASSLFSPSSTLFSSSRLRYGMSDVMPSGRSRLLEDFRNNRYPNLQLREIAGHIMEFSQDQHGSRFIQLKLERATPAERQLVFNEILQAAYQLMVDVFGNYVIQKFFEFGSLEQKLALAERIRGHVLSLALQMYGCRVIQKALEFIPSDQQNEMVRELDGHVLKCVKDQNGNHVVQKCIECVQPQSLQFIIDAFKGQVFALSTHPYGCRVIQRILEHCLPDQTLPILEELHQHTEQLVQDQYGNYVIQHVLEHGRPEDKSKIVAEIRGNVLVLSQHKFASNVVEKCVTHASRTERAVLIDEVCTMNDGPHSALYTMMKDQYANYVVQKMIDVAEPGQRKIVMHKIRPHIATLRKYTYGKHILAKLEKYYMKNGVDLGPICGPPNGII

SEQ ID NO: 11888 - protein, 1049 aa, Artificial Sequence
  Synthetic polypeptide
KYKISQLLPGKKFWETDESSKDGPKGIFLGDQWRDSAWGTSDHSVSQPIMVQRRPGQSFHVNSEVNSVLSPRSESGGLGVSMVEYVLSSSPGDSCLRKGGFGPRDADSDENDKGEKKNKGTFDGDKLGDLKEEGDVMDKTNGLPVQNGIDADVKDFSRTPGNCQNSANEVDLLGPNQNGSEGLAQLTSTNGAKPVEDFSNMESQSVPLDPMEHVGMEPLQFDYSGTQVPVDSAAATVGLFDYNSQQQLFQRPNALAVQQLTAAQQQQYALAAAHQPHIGLAPAAFVPNPYIISAAPPGTDPYTAGLAAAATLGPAVVPHQYYGVTPWGVYPASLFQQQAAAAAAATNSANQQTTPQAQQGQQQVLRGGASQRPLTPNQNQQGQQTDPLVAAAAVNSALAFGQGLAAGMPGYPVLAPAAYYDQTGALVVNAGARNGLGAPVRLVAPAPVIISSSAAQAAVAAAAASANGAAGGLAGTTNGPFRPLGTQQPQPQPQQQPNNNLASSSFYGNNSLNSNSQSSSLFSQGSAQPANTSLGFGSSSSLGATLGSALGGFGTAVANSNTGSGSRRDSLTGSSDLYKRTSSSLTPIGHSFYNGLSFSSSPGPVGMPLPSQGPGHSQTPPPSLSSHGSSSSLNLGGLTNGSGRYISAAPGAEAKYRSASSASSLFSPSSTLFSSSRLRYGMSDVMPSGRSRLLEDFRNNRYPNLQLREIAGHIMEFSQDQHGSRFIQLKLERATPAERQLVFNEILQAAYQLMVDVFGNYVIQKFFEFGSLEQKLALAERIRGHVLSLALQMYGCRVIQKALEFIPSDQQVINEMVRELDGHVLKCVKDQNGNHVVQKCIECVQPQSLQFIIDAFKGQVFALSTHPYGCRVIQRILEHCLPDQTLPILEELHQHTEQLVQDQYGNYVIQHVLEHGRPEDKSKIVAEIRGNVLVLSQHKFASNVVEKCVTHASRTERAVLIDEVCTMNDGPHSALYTMMKDQYANYVVQKMIDVAEPGQRKIVMHKIRPHIATLRKYTYGKHILAKLEKYYMKNGVDLGPICGPPNGII

SEQ ID NO: 11889 - protein, 1023 aa, Artificial Sequence
  Synthetic polypeptide
KYKISQLLPGKKFWETDESSKDGPKGIFLGDQWRDSAWGTSDHSVSQPIMVQRRPGQSFHVNSEVNSVLSPRSESGGLGVSMVEYVLSSSPGDSCLRKGGFGPRDADSDENDKGEKKNKGTFDGDKLGDLKEEGDVMDKTNGLPVQNGIDADVKDFSRTPGNCQNSANEVDLLGPNQNGSEGLAQLTSTNGAKPVEDFSNMESQSVPLDPMEHVGMEPLQFDYSGTQVPVDSAAATVGLFDYNSQQQLFQRPNALAVQQLTAAQQQQYALAAAHQPHIAGLAPAAFVPNPYIISAAPPGTDPYTAGLAAAATLGPAVVPHQYYGVTPWGVYPASLFQQQAAAAAAATNSANQQTTPQAQQGQQQVLRGGASQRPLTPNQNQQGQQTDPLVAAAAVNSALAFGQGLAAGMPGYPVLAPAAYYDQTGALVVNAGARNGLGAPVRLVAPAPVIISSSAAQAGTQQPQPQPQQQPNNNLASSSFYGNNSLNSNSQSSSLFSQGSAQPANTSLGFGSSSSLGATLGSALGGFGTAVANSNTGSGSRRDSLTGSSDLYKRTSSSLTPIGHSFYNGLSFSSSPGPVGMPLPSQGPGHSQTPPPSLSSHGSSSSLNLGGLTNGSGRYISAAPGAEAKYRSASSASSLFSPSSTLFSSSRLRYGMSDVMPSGRSRLLEDFRNNRYPNLQLREIAGHIMEFSQDQHGSRFIQLKLERATPAERQLVFNEILQAAYQLMVDVFGNYVIQKFFEFGSLEQKLALAERIRGHVLSLALQMYGCRVIQKALEFIPSDQQVINEMVRELDGHVLKCVKDQNGNHVVQKCIECVQPQSLQFIIDAFKGQVFALSTHPYGCRVIQRILEHCLPDQTLPILEELHQHTEQLVQDQYGNYVIQHVLEHGRPEDKSKIVAEIRGNVLVLSQHKFASNVVEKCVTHASRTERAVLIDEVCTMNDGPHSALYTMMKDQYANYVVQKMIDVAEPGQRKIVMHKIRPHIATLRKYTYGKHILAKLEKYYMKNGVDLGPICGPPNGII

SEQ ID NO: 11890 - protein, 28 aa, Artificial Sequence
  Synthetic polypeptide
EDWTLPLRPISALFVSGMSGHLPPKRDV

SEQ ID NO: 11891 - protein, 31 aa, Artificial Sequence
  Synthetic polypeptide
DPSQLCSCLGCPAICPQREMCKDISRKCAQL

SEQ ID NO: 11892 - protein, 119 aa, Artificial Sequence
  Synthetic polypeptide
ASVSTLIRRLDFTFKTHLSSVRVWDVRPFAPKERCVKIFQGNVHNFEKNLLRCSWSPDGSKIAAGSADRFVYVWDTTSRRILYKLPGHAGSINEVAFHPDEPIIISASSDKRLYMGEIQ

SEQ ID NO: 11893 - protein, 171 aa, Artificial Sequence
  Synthetic polypeptide
ASVSTLIRRLDFTFKTHLSSVRVWDVRPFAPKERCVKIFQGNVHNFEKNLLRCSWSPDGSKIAAGSADRFVYVWDTTSRRILYKLPGHAGSINEVAFHPDEPIIETGFHRIGQGGHELLTSSNPPASASQSAGITGVSHCAQLQTVFMWVSMSVSPLLISGESKSNAPFSS

SEQ ID NO: 11894 - protein, 83 aa, Artificial Sequence
  Synthetic polypeptide
HTHCVYSDEKHEAERGGVTRTQPHSVLPLRLCPLHPVQLLPRQPQLHREPPHLHVLPLPGGAGVHHYAEPGRGESALQAALGV

SEQ ID NO: 11895 - protein, 466 aa, Artificial Sequence
  Synthetic polypeptide
TPIVCTLMRSMRLREEESPGPSHTASCLCGSAPCILCSCCPASRNSTVSRLIFTFFLFLGVLVSIIMLSPGVESQLYKLPWVCEEGAGIPTVLQGHIDCGSLLGYRAVYRMCFATAAFFFFFTLLMLCVSSSRDPRAAIQNGFWFFKFLILVGLTVGAFYIPDGSFTNIWFYFGVVGSFLFILIQLVLLIDFAHSWNQRWLGKAEECDSRAWYAGLFFFTLLFYLLSIAAVALMFMYYTEPSGCHEGKVFISLNLTFCVCVSIAAVLPKVQDAQPNSGLLQASVITLYTMFVTWSALSSIPEQKCNPHLPTQLGNETVVAGPEGYETQWWDAPSIVGLIIFLLCTLFISLRSSDHRQVNSLMQTEECPPMLDATQQQQQVAACEGRAFDNEQDGVTYSYSFFHFCLVLASLHVMMTLTNWYKPGETRKMISTWTAVWVKICASWAGLLLYLWTLVAPLLLRNRDFS

SEQ ID NO: 11896 - protein, 37 aa, Artificial Sequence
  Synthetic polypeptide
MNLSAVINLLCDLWRPASAALPPASCAAAAPPAATPP

SEQ ID NO: 11897 - protein, 71 aa, Artificial Sequence
  Synthetic polypeptide
ISVLLSTCCVTSGVLPLRLCPLHPVQLLPRQPQLHREPPHLHVLPLPGGAGVHHYAEPGRGESALQAALGV

SEQ ID NO: 11898 - protein, 444 aa, Artificial Sequence
  Synthetic polypeptide
PLASCLCGSAPCILCSCCPASRNSTVSRLIFTFFLFLGVLVSIIMLSPGVESQLYKLPWVCEEGAGIPTVLQGHIDCGSLLGYRAVYRMCFATAAFFFFFTLLMLCVSSSRDPRAAIQNGFWFFKFLILVGLTVGAFYIPDGSFTNIWFYFGVVGSFLFILIQLVLLIDFAHSWNQRWLGKAEECDSRAWYAGLFFFTLLFYLLSIAAVALMFMYYTEPSGCHEGKVFISLNLTFCVCVSIAAVLPKVQDAQPNSGLLQASVITLYTMFVTWSALSSIPEQKCNPHLPTQLGNETVVAGPEGYETQWWDAPSIVGLIIFLLCTLFISLRSSDHRQVNSLMQTEECPPMLDATQQQQQVAACEGRAFDNEQDGVTYSYSFFHFCLVLASLHVMMTLTNWYKPGETRKMISTWTAVWVKICASWAGLLLYLWTLVAPLLLRNRDFS

SEQ ID NO: 11899 - protein, 36 aa, Artificial Sequence
  Synthetic polypeptide
WLTPVIPALWEAKVHNAHLHSRKDSNWNTVVACQPT

SEQ ID NO: 11900 - protein, 24 aa, Artificial Sequence
  Synthetic polypeptide
SQLFGRPRCTMPTFTAGRTQIGTQ

SEQ ID NO: 11901 - protein, 1596 aa, Artificial Sequence
  Synthetic polypeptide
PGIVAHACNPSSLGGQGAQCPPSQQEGLKLEHSSSLPANVTGFNLIHRLSLMKTSAIKKIRNPKGPLILRLGAAPVTQPTRRVFPRGLPEEFALVLTLLLKKHTHQKTWYLFQVTDANGYPQISLEVNSQERSLELRAQGQDGDFVSCIFPVPQLFDLRWHKLMLSVAGRVASVHVDCSSASSQPLGPRRPMRPVGHVFLGLDAEQGKPVSFDLQQVHIYCDPELVLEEGCCEILPAGCPPETSKARRDTQSNELIEINPQSEGKVYTRCFCLEEPQNSEVDAQLTGRISQKAERGAKVHQETAADECPPCVHGARDSNVSEWRVGPEGGKGERGLPGPPGSKGEKGARGNDCVRISPDAPLQCAEGPKGEKGESGALGPSGLPGSTGEKGQKGEKGDGGIKGVPGKPGRDGRPGEICVIGPKGQKGDPGFVGPEGLAGEPGPPGLPGPPGIGLPGTPGDPGGPPGPKGDKGSSGIPGKEGPGGKPGKPGVKGEKGDPCEVCPTLPEGFQNFVGLPGKPGPKGEPGDPVPARGDPGIQGIKGEKGEPCLSCSSVVGAQHLVSSTGASGDVGSPGFGLPGLPVKAGVPGLSPGGNFGEAGPAGSPGPPGPVGPAGIKGAKGEPCEPCPALSNLQDGDVRVVALPGPSGEKGEPGPPGFGLPGKQGKAGERGLKGQKGDAGNPGDPGTPGTTGRPGLSGEPGVQGPAGPKGEKGDGCTACPSLQGTVTDMAGRPGQPGPKGEQGPEGVGRPGKPGQPGLPGVQGPPGLKGVQGEPGPPGRGVQGPQGEPGAPGLPGIQGLPGPRGPPGPTGEKGAQGSPGVKGATGPVGPPGASVSGPPGRDGQQGQTGLRGTPGEKGPRGEKGEPGECSCPSQGDLIFSGMPGAPGLWMGSSWQPGPQGPPGIPGPPGPPGVPGLQGVPGNNGLPGQPGLTAELGALALGSHWGSPSICGDCVQGQRAHPGYLVEKGEKGDQGIPGVPGLDNCAQCFLSLERPRAEEARGDNSEGDPGCVGSPGLPGPPGLPGQRGEEGPPGMRGSPGPPGPIGPPGFPGAVGSPGLPGLQGERGLTGLTGDKGEPGPPGQPGYPGATGPPGLPGIKGERGYTGSAGEKGEPGPPGSEGLPGPPGPAGPRGERGPQGNSGEKGDQGFQGQPGFPGPPGPPGFPGKVGSPGPPGPQAEKGSEGIRGPSGLPGSPGPPGPPGIQGPAGLDGLDGKDGKPGLRGDPGPAGPPGLMGPPGFKGKTGHPGLPGPKGDCGKPGPPGSTGRPGAEGEPGAMGPQGRPGPPGHVGPPGPPGQPGPAGISAVGLKGDRGATGERGLAGLPGQPGPPGHPGPPGEPGTDGAAGKEGPPGKQGFYGPPGPKGDPGAAGQKGQAGEKGRAGMPGGPGKSGSMGPVGPPGPAGERGHPGAPGPSGSPGLPGVPGSMGDMVNYDEIKRFIRQEIIKMFDERMAYYTSRMQFPMEMAAAPGRPGPPGKDGAPGRPGAPGSPGLPGQIGREGRQGLPGVRGLPGTKGEKGDIGIGIAGENGLPGPPGPQGPPGYGKMGATGPMGQQGIPGIPGPPGPMGQPGKAGHCNPSDCFGAMPMEQQYPPMKTMKGPFG

SEQ ID NO: 11902 - protein, 1596 aa, Artificial Sequence
  Synthetic polypeptide
PGIVAHACNPSSLGGQGAQCPPSQQEGLKLEHSSSLPANVTGFNLIHRLSLMKTSAIKKIRNPKGPLILRLGAAPVTQPTRRVFPRGLPEEFALVLTLLLKKHTHQKTWYLFQVTDANGYPQISLEVNSQERSLELRAQGQDGDFVSCIFPVPQLFDLRWHKLMLSVAGRVASVHVDCSSASSQPLGPRRPMRPVGHVFLGLDAEQGKPVSFDLQQVHIYCDPELVLEEGCCEILPAGCPPETSKARRDTQSNELIEINPQSEGKVYTRCFCLEEPQNSEVDAQLTGRISQKAERGAKVHQETAADECPPCVHGARDSNVTLAPSGPKGGKGERGLPGPPGSKGEKGARGNDCVRISPDAPLQCAEGPKGEKGESGALGPSGLPGSTGEKGQKGEKGDGGIKGVPGKPGRDGRPGEICVIGPKGQKGDPGFVGPEGLAGEPGPPGLPGPPGIGLPGTPGDPGGPPGPKGDKGSSGIPGKEGPGGKPGKPGVKGEKGDPCEVCPTLPEGFQNFVGLPGKPGPKGEPGDPVPARGDPGIQGIKGEKGEPCLSCSSVVGAQHLVSSTGASGDVGSPGFGLPGLPGRAGVPGLKGEKGNFGEAGPAGSPGPPGPVGPAGIKGAKGEPCEPCPALSNLQDGDVRVVALPGPSGEKGEPGPPGFGLPGKQGKAGERGLKGQKGDAGNPGDPGTPGTTGRPGLSGEPGVQGPAGPKGEKGDGCTACPSLQGTVTDMAGRPGQPGPKGEQGPEGVGRPGKPGQPGLPGVQGPPGLKGVQGEPGPPGRGVQGPQGEPGAPGLPGIQGLPGPRGPPGPTGEKGAQGSPGVKGATGPVGPPGASVSGPPGRDGQQGQTGLRGTPGEKGPRGEKGEPGECSCPSQGDLIFSGMPGAPGLWMGSSWQPGPQGPPGIPGPPGPPGVPGLQGVPGNNGLPGQPGLTAELGSLPIEQHLLKSICGDCVQGQRAHPGYLVEKGEKGDQGIPGVPGLDNCAQCFLSLERPRAEEARGDNSEGDPGCVGSPGLPGPPGLPGQRGEEGPPGMRGSPGPPGPIGPPGFPGAVGSPGLPGLQGERGLTGLTGDKGEPGPPGQPGYPGATGPPGLPGIKGERGYTGSAGEKGEPGPPGSEGLPGPPGPAGPRGERGPQGNSGEKGDQGFQGQPGFPGPPGPPGFPGKVGSPGPPGPQAEKGSEGIRGPSGLPGSPGPPGPPGIQGPAGLDGLDGKDGKPGLRGDPGPAGPPGLMGPPGFKGKTGHPGLPGPKGDCGKPGPPGSTGRPGAEGEPGAMGPQGRPGPPGHVGPPGPPGQPGPAGISAVGLKGDRGATGERGLAGLPGQPGPPGHPGPPGEPGTDGAAGKEGPPGKQGFYGPPGPKGDPGAAGQKGQAGEKGRAGMPGGPGKSGSMGPVGPPGPAGERGHPGAPGPSGSPGLPGVPGSMGDMVNYDEIKRFIRQEIIKMFDERMAYYTSRMQFPMEMAAAPGRPGPPGKDGAPGRPGAPGSPGLPGQIGREGRQGLPGVRGLPGTKGEKGDIGIGIAGENGLPGPPGPQGPPGYGKMGATGPMGQQGIPGIPGPPGPMGQPGKAGHCNPSDCFGAMPMEQQYPPMKTMKGPFG

SEQ ID NO: 11903 - protein, 958 aa, Artificial Sequence
  Synthetic polypeptide
PGIVAHACNPSSLGGQGAQCPPSQQEGLKLEHSSSLPANVTGFNLIHRLSLMKTSAIKKIRNPKGPLILRLGAAPVTQPTRRVFPRGLPEEFALVLTLLLKKHTHQKTWYLFQVTDANGYPQISLEVNSQERSLELRAQGQDGDFVSCIFPVPQLFDLRWHKLMLSVAGRVASVHVDCSSASSQPLGPRRPMRPVGHVFLGLDAEQGKPVSFDLQQVHIYCDPELVLEEGCCEILPAGCPPETSKARRDTQSNELIEINPQSEGKVYTRCFCLEEPQNSEVDAQLTGRISQKAERGAKVHQETAADECPPCVHGARDSNVTLAPSGPKGGKGERGLPGPPGSKGEKGARGNDCVRISPDAPLQCAEGPKGEKGESGALGPSGLPGSTGEKGQKGEKGDGGIKGVPGKPGRDGRPGEICVIGPKGQKGDPGFVGPEGLAGEPGPPGLPGPPGIGLPGTPGDPGGPPGPKGDKGSSGIPGKEGPGGKPGKPGVKGEKGDPCEVCPTLPEGFQNFVGLPGKPGPKGEPGDPVPARGDPGIQGIKGEKGEPCLSCSSVVGAQHLVSSTGASGDVGSPGFGLPGLPGRAGVPGLKGEKGNFGEAGPAGSPGPPGPVGPAGIKGAKGEPCEPCPALSNLQDGDVRVVALPGPSGEKGEPGPPGFGLPGKQGKAGERGLKGQKGDAGNPGDPGTPGTTGRPGLSGEPGVQGPAGPKGEKGDGCTACPSLQGTVTDMAGRPGQPGPKGEQGPEGVGRPGKPGQPGLPGVQGPPGLKGVQGEPGPPGRGVQGPQGEPGAPGLPGIQGLPGPRGPPGPTGEKGAQGSPGVKGATGPVGPPGASVSGPPGRDGQQGQTGLRGTPGEKGPRGEKGEPGECSCPSQGDLIFSGMPGPPGIPGPPGPPGVPGLQVKGEKRMRSLGGRAHGSGWLLPAGPQGCCSPTPKTQTCHFSLLCLPASQGGKEGPLSL

SEQ ID NO: 11904 - protein, 76 aa, Artificial Sequence
  Synthetic polypeptide
GRAWWLTPVIPALWETKADRSPEVRSSRPDQPGQHGETSSPLKIQKLASSFSANPCGSSTSSCCWRALSLSISCTP

SEQ ID NO: 11905 - protein, 32 aa, Artificial Sequence
  Synthetic polypeptide
PVLFQQTPADPQHPPAAGGRCHCLSAVLPNVL

SEQ ID NO: 11906 - protein, 92 aa, Artificial Sequence
  Synthetic polypeptide
NLVSTKNTKISQFFFSKPLRILNILLLLEGAVIVYQLYSLMSSEKWHQTISLALILFSNYYAFFKLLRDRLVLGKAYSYSASPQRDLDHRFS

SEQ ID NO: 11907 - protein, 20 aa, Artificial Sequence
  Synthetic polypeptide
SLNLDDHGEPRERQLSNEEL

SEQ ID NO: 11908 - protein, 537 aa, Artificial Sequence
  Synthetic polypeptide
IWMTMASPGKDNYRMKSYKNNALNPEEMRRRREEEGIQLRKQKREQQLFKRRNVELINEEAAMFDSLLMDSYVSSTTGESVITREMVEMLFSDDSDLQLATTQKFRKLLSKEPSPPIDEVINTPRVVDRFVEFLKRNENCTLQFEAAWALTNIASGTSQQTKIVIEAGAVPIFIELLNSDFEDVQEQAVWALGNIAGDSSVCRDYVLNCSILNPLLTLLTKSTRLTMTRNAVWALSNLCRGKNPPPEFAKVSPCLPVLSRLLFSSDSDLLADACWALSYLSDGPNEKIQAVIDSGVCRRLVELLMHNDYKVASPALRAVGNIVTGDDIQTQVILNCSALPCLLHLLSSPKESIRKEACWTISNITAGNRAQIQAVIDANIFPVLIEILQKAEFRTRKEAAWAITNATSGGTPEQIRYLVSLGCIKPLCDLLTVMDSKIVQVALNGLENILRLGEQEGKRSGSGVNPYCGLIEEAYGLDKIEFLQSHENQEIYQKAFDLIEHYFGVEDDDSSLAPQVDETQQQFIFQQPEAPMEGFQL

SEQ ID NO: 11909 - protein, 187 aa, Artificial Sequence
  Synthetic polypeptide
IWMTMASPGKDNYRMKSYKNNALNPEEMRRRREEEGIQLRKQKREQQLFKRRNVELINEEAAMFDSLLMDSYESVITREMVEMLFSDDSDLQLATTQKFRKLLSKEPSPPIDEVINTPRVVDRFVEFLKRNENCTLQFEAAWALTNIASGTSQQTKIVIEAGAVPIFIELLNSDFEDVQEQSGHWET

SEQ ID NO: 11910 - protein, 49 aa, Artificial Sequence
  Synthetic polypeptide
KNLVFGVKQYLMPFLLNQCGSLLYYLTLASTGWSQTSEFRSSCWNPGKH

SEQ ID NO: 11911 - protein, 10 aa, Artificial Sequence
  Synthetic polypeptide
RIWSLESNST

SEQ ID NO: 11912 - protein, 49 aa, Artificial Sequence
  Synthetic polypeptide
EFGLWSQTVPDALSPQPVWIPSLLPHLGIDRLVPDLRVQVFMLESWEAL

SEQ ID NO: 11913 - protein, 117 aa, Artificial Sequence
  Synthetic polypeptide
KNLVFGVKQYLMPFLLNQCGSLLYYLTLASTDLTLAVPICNSLAIIFTLIVGKALGEDIGGKRAVAGMVLTVIGISLCITSSVPWTAELQLHGKGQLQTLSQKCKREASGTQSERFG

SEQ ID NO: 11914 - protein, 39 aa, Artificial Sequence
  Synthetic polypeptide
EFGLWSQTVPDALSPQPVWIPSLLPHLGIDRSDPGCAHL

SEQ ID NO: 11915 - protein, 114 aa, Artificial Sequence
  Synthetic polypeptide
KNLVFGVKQYLMPFLLNQCGSLLYYLTLASTDLTLAVPICNSLAIIFTLIVGKALGEDIGGKPVLLPCGHQSSLPLDSLEKDRGWGLGLKTRPHLSPSSSPVPAPTGMAELRPS

SEQ ID NO: 11916 - protein, 93 aa, Artificial Sequence
  Synthetic polypeptide
KNLVFGVKQYLMPFLLNQCGSLLYYLTLASTDLTLAVPICNSLAIIFTLIVGKALGEDIGGKRAVAGMVLTVIGISLCITSSVSKTQGQQSTL

SEQ ID NO: 11917 - protein, 133 aa, Artificial Sequence
  Synthetic polypeptide
KNLVFGVKQYLMPFLLNQCGSLLYYLTLASTDLTLAVPICNSLAIIFTLIVGKALGEDIGGKRKLDYCECGTQLCGSRHTCVSSFPEPISPEWVRTRPFPILPFPLQLFCFLVAIRVPFPWTVWRKTEAGVWD

SEQ ID NO: 11918 - protein, 32 aa, Artificial Sequence
  Synthetic polypeptide
HGGLAPVVSATSESETRGSLERDRQCMVLCEW

SEQ ID NO: 11919 - protein, 117 aa, Artificial Sequence
  Synthetic polypeptide
PDMVASRLWSQLLRSLKREDRLSAIVNVWYSVNGERLGTYMGHTGAVWCVDADWDTKHVLTGSADNSCRLWDCETGKQLALLKTNSAVRTCGFDFGGNIIMFSTDKQMGYQCFVSFF

SEQ ID NO: 11920 - protein, 9 aa, Artificial Sequence
  Synthetic polypeptide
ARSSMYGTL

SEQ ID NO: 11921 - protein, 317 aa, Artificial Sequence
  Synthetic polypeptide
PDMVASRLWSQLLRSLKREDRLSAIVNVWYSVNGERLGTYMGHTGAVWCVDADWDTKHVLTGSADNSCRLWDCETGKQLALLKTNSAVRTCGFDFGGNIIMFSTDKQMGYQCFVSFFDLRDPSQIDNNEPYMKIPCNDSKITSAVWGPLGECIIAGHESGELNQYSAKSGEVLVNVKEHSRQINDIQLSRDMTMFVTASKDNTAKLFDSTTLEHQKTFRTERPVNSAALSPNYDHVVLGGGQEAMDVTTTSTRIGKFEARFFHLAFEEEFGRVKGHFGPINSVAFHPDGKSYSSGGEDGYVRIHYFDPQYFEFEFEA

SEQ ID NO: 11922 - protein, 43 aa, Artificial Sequence
  Synthetic polypeptide
PIRWGEEFSLSKHPQGTEVKAITYSAMQVYNEENPEVFVIIDI

SEQ ID NO: 11923 - protein, 38 aa, Artificial Sequence
  Synthetic polypeptide
GQEFETSLTNKVGRRIFIVQAPSGNRSQSNNIFSNAGL

SEQ ID NO: 11924 - protein, 30 aa, Artificial Sequence
  Synthetic polypeptide
PIRWGEEFSLSKHPQGTEVKAITYSAMQVY

SEQ ID NO: 11925 - protein, 43 aa, Artificial Sequence
  Synthetic polypeptide
SQLLGRLRQENRLNPGGGGCGYTHGEILWRKHLSNVQWPCLVT

SEQ ID NO: 11926 - protein, 19 aa, Artificial Sequence
  Synthetic polypeptide
TREAEVAVTRMGRYSGGSI

SEQ ID NO: 11927 - protein, 160 aa, Artificial Sequence
  Synthetic polypeptide
KYKISWAWWSMSVIPATRETEAGESLEPGRRRLRLHAWGDTLEEAFEQCAMAMFGYMTDTGTVEPLQTVEVETQGDDLQSLLFHFLDEWLYKFSADEFFIPREVKVLSIDQRNFKLRSIGWGEEFSLSKHPQGTEVKAITYSAMQVYNEENPEVFVIIDI

SEQ ID NO: 11928 - protein, 57 aa, Artificial Sequence
  Synthetic polypeptide
KYKISWAWWSMSVIPATRETEAGESLEPGRRRLRLHAWGDTLEEAFEQCAMAMFGYM

SEQ ID NO: 11929 - protein, 129 aa, Artificial Sequence
  Synthetic polypeptide
KYKISWAWWSMSVIPATRETEAGESLEPGRRRLRLHAWGDTLEEAFEQCAMAMFGYMTDTGTVEPLQTVEVETQGDDLQSLLFHFLDEWLYKFSADEFFIPRVGRRIFIVQAPSGNRSQSNNIFSNAGL

SEQ ID NO: 11930 - protein, 155 aa, Artificial Sequence
  Synthetic polypeptide
SQLLGRLRQENRLNPGGGGCDLDHTADVQLHAWGDTLEEAFEQCAMAMFGYMTDTGTVEPLQTVEVETQGDDLQSLLFHFLDEWLYKFSADEFFIPREVKVLSIDQRNFKLRSIGWGEEFSLSKHPQGTEVKAITYSAMQVYNEENPEVFVIIDI

SEQ ID NO: 11931 - protein, 38 aa, Artificial Sequence
  Synthetic polypeptide
TREAEVAIWIIQQMSSYTHGEILWRKHLSNVQWPCLVT

SEQ ID NO: 11932 - protein, 54 aa, Artificial Sequence
  Synthetic polypeptide
KYKISWAWWSMSVIPATRETEAGESLEPGRRRLRFGSYSRCPVTRMGRYSGGSI

SEQ ID NO: 11933 - protein, 64 aa, Artificial Sequence
  Synthetic polypeptide
SQLLGRLRQENRLNPGGGGCDLDHTADVHGLYYTEHEYTSLGYTHGEILWRKHLSNVQWPCLVT

SEQ ID NO: 11934 - protein, 27 aa, Artificial Sequence
  Synthetic polypeptide
TREAEVAIWIIQQMSMDCITQSMNILL

SEQ ID NO: 11935 - protein, 49 aa, Artificial Sequence
  Synthetic polypeptide
KYKISWAWWSMSVIPATRETEAGESLEPGRRRLRFGSYSRCPWIVLHRA

SEQ ID NO: 11936 - protein, 124 aa, Artificial Sequence
  Synthetic polypeptide
SQLLGRLRQENRLNPGGGGCDLDHTADVQLHAWGDTLEEAFEQCAMAMFGYMTDTGTVEPLQTVEVETQGDDLQSLLFHFLDEWLYKFSADEFFIPRVGRRIFIVQAPSGNRSQSNNIFSNAGL

SEQ ID NO: 11937 - protein, 54 aa, Artificial Sequence
  Synthetic polypeptide
GRARWLRPVIPALWEAEAGGSPEIWIIQQMSSYTHGEILWRKHLSNVQWPCLVT

SEQ ID NO: 11938 - protein, 34 aa, Artificial Sequence
  Synthetic polypeptide
SQHFGRPRRADHLRFGSYSRCPVTRMGRYSGGSI

SEQ ID NO: 11939 - protein, 43 aa, Artificial Sequence
  Synthetic polypeptide
GRARWLRPVIPALWEAEAGGSPEIWIIQQMSMDCITQSMNILL

SEQ ID NO: 11940 - protein, 29 aa, Artificial Sequence
  Synthetic polypeptide
SQHFGRPRRADHLRFGSYSRCPWIVLHRA

SEQ ID NO: 11941 - protein, 9 aa, Artificial Sequence
  Synthetic polypeptide
TQEAEVESL

SEQ ID NO: 11942 - protein, 27 aa, Artificial Sequence
  Synthetic polypeptide
SQLLGRLRQEEPLEPRRRRLRVCDPTR

SEQ ID NO: 11943 - protein, 307 aa, Artificial Sequence
  Synthetic polypeptide
TQEAEVEESKIDLLDRKEDVKKKLKKAFCEPGNVENNGVLSFIKHVLFPLKSEFVILRDEKWGGNKTYTAYVDLEKDFAAEVVHPGDLKNSVEVALNKLLDPIREKFNTPALKKLASAAYPDPSKQKPMAKGPAKNSEPEEVIPSRLDIRVGKIITVEKHPDADSLYVEKIDVGEAEPRTVVSGLVQFVPKEELQDRLVVVLCNLKPQKMRGVESQGMLLCASIEGINRQVEPLDPPAGSAPGEHVFVKGYEKGQPDEELKPKKKVFEKLQADFKISEECIAQWKQTNFMTKLGSISCKSLKGGNIS

SEQ ID NO: 11944 - protein, 33 aa, Artificial Sequence
  Synthetic polypeptide
SQLLGRLRQEEPLEPRRRRLRSPRLISLIGRRM

SEQ ID NO: 11945 - protein, 24 aa, Artificial Sequence
  Synthetic polypeptide
GWAWWLSPVIPALWEAKVGGQGFG

SEQ ID NO: 11946 - protein, 370 aa, Artificial Sequence
  Synthetic polypeptide
SQHFGRPRWVAKALDEEYLKVDAQFGGIDQRKIFTFAEKYLPALGYSKRVHLMNPMVPGLTGSKMSSSEEESKIDLLDRKEDVKKKLKKAFCEPGNVENNGVLSFIKHVLFPLKSEFVILRDEKWGGNKTYTAYVDLEKDFAAEVVHPGDLKNSVEVALNKLLDPIREKFNTPALKKLASAAYPDPSKQKPMAKGPAKNSEPEEVIPSRLDIRVGKIITVEKHPDADSLYVEKIDVGEAEPRTVVSGLVQFVPKEELQDRLVVVLCNLKPQKMRGVESQGMLLCASIEGINRQVEPLDPPAGSAPGEHVFVKGYEKGQPDEELKPKKKVFEKLQADFKISEECIAQWKQTNFMTKLGSISCKSLKGGNIS

SEQ ID NO: 11947 - protein, 27 aa, Artificial Sequence
  Synthetic polypeptide
MGMVALACNPSTLGGQGGWPRLWMKSI

SEQ ID NO: 11948 - protein, 375 aa, Artificial Sequence
  Synthetic polypeptide
GWAWWLSPVIPALWEAKALDEEYLKVDAQFGGIDQRKIFTFAEKYLPALGYSKRVHLMNPMVPGLTGSKMSSSEEESKIDLLDRKEDVKKKLKKAFCEPGNVENNGVLSFIKHVLFPLKSEFVILRDEKWGGNKTYTAYVDLEKDFAAEVVHPGDLKNSVEVALNKLLDPIREKFNTPALKKLASAAYPDPSKQKPMAKGPAKNSEPEEVIPSRLDIRVGKIITVEKHPDADSLYVEKIDVGEAEPRTVVSGLVQFVPKEELQDRLVVVLCNLKPQKMRGVESQGMLLCASIEGINRQVEPLDPPAGSAPGEHVFVKGYEKGQPDEELKPKKKVFEKLQADFKISEECIAQWKQTNFMTKLGSISCKSLKGGNIS

SEQ ID NO: 11949 - protein, 14 aa, Artificial Sequence
  Synthetic polypeptide
SQHFGRPRLWMKSI

SEQ ID NO: 11950 - protein, 19 aa, Artificial Sequence
  Synthetic polypeptide
MGMVALACNPSTLGGQGFG

SEQ ID NO: 11951 - protein, 364 aa, Artificial Sequence
  Synthetic polypeptide
THSIAEALDEEYLKVDAQFGGIDQRKIFTFAEKYLPALGYSKRVHLMNPMVPGLTGSKMSSSEEESKIDLLDRKEDVKKKLKKAFCEPGNVENNGVLSFIKHVLFPLKSEFVILRDEKWGGNKTYTAYVDLEKDFAAEVVHPGDLKNSVEVALNKLLDPIREKFNTPALKKLASAAYPDPSKQKPMAKGPAKNSEPEEVIPSRLDIRVGKIITVEKHPDADSLYVEKIDVGEAEPRTVVSGLVQFVPKEELQDRLVVVLCNLKPQKMRGVESQGMLLCASIEGINRQVEPLDPPAGSAPGEHVFVKGYEKGQPDEELKPKKKVFEKLQADFKISEECIAQWKQTNFMTKLGSISCKSLKGGNIS

SEQ ID NO: 11952 - protein, 22 aa, Artificial Sequence
  Synthetic polypeptide
VTLLWLSGTEPTVSLRLWMKSI

SEQ ID NO: 11953 - protein, 34 aa, Artificial Sequence
  Synthetic polypeptide
EVRSPSAWQPPRLGSEERLRPAAAPSGRLWMKSI

SEQ ID NO: 11954 - protein, 28 aa, Artificial Sequence
  Synthetic polypeptide
GAPPPGSRPVWEVRSVSARQPPRPGGFG

SEQ ID NO: 11955 - protein, 370 aa, Artificial Sequence
  Synthetic polypeptide
GASPPGSRPVREALDEEYLKVDAQFGGIDQRKIFTFAEKYLPALGYSKRVHLMNPMVPGLTGSKMSSSEEESKIDLLDRKEDVKKKLKKAFCEPGNVENNGVLSFIKHVLFPLKSEFVILRDEKWGGNKTYTAYVDLEKDFAAEVVHPGDLKNSVEVALNKLLDPIREKFNTPALKKLASAAYPDPSKQKPMAKGPAKNSEPEEVIPSRLDIRVGKIITVEKHPDADSLYVEKIDVGEAEPRTVVSGLVQFVPKEELQDRLVVVLCNLKPQKMRGVESQGMLLCASIEGINRQVEPLDPPAGSAPGEHVFVKGYEKGQPDEELKPKKKVFEKLQADFKISEECIAQWKQTNFMTKLGSISCKSLKGGNIS

SEQ ID NO: 11956 - protein, 63 aa, Artificial Sequence
  Synthetic polypeptide
GASLPGCPSSQMWGAPLPRRPVWDVRSASVRPRPGLGTEECLCPTATPSGSTSLHLAIQNGSI

SEQ ID NO: 11957 - protein, 60 aa, Artificial Sequence
  Synthetic polypeptide
GAPLSGRDPVWELRSVSARPPPRLGVPPCTWLFKTGPSDESYGSRINRQQNELFRRGVQD

SEQ ID NO: 11958 - protein, 343 aa, Artificial Sequence
  Synthetic polypeptide
GVSLPDRHPVWEYLPALGYSKRVHLMNPMVPGLTGSKMSSSEEESKIDLLDRKEDVKKKLKKAFCEPGNVENNGVLSFIKHVLFPLKSEFVILRDEKWGGNKTYTAYVDLEKDFAAEVVHPGDLKNSVEVALNKLLDPIREKFNTPALKKLASAAYPDPSKQKPMAKGPAKNSEPEEVIPSRLDIRVGKIITVEKHPDADSLYVEKIDVGEAEPRTVVSGLVQFVPKEELQDRLVVVLCNLKPQKMRGVESQGMLLCASIEGINRQVEPLDPPAGSAPGEHVFVKGYEKGQPDEELKPKKKVFEKLQADFKISEECIAQWKQTNFMTKLGSISCKSLKGGNIS

SEQ ID NO: 11959 - protein, 409 aa, Artificial Sequence
  Synthetic polypeptide
QAYLIALCFTALRRYCVFYKLKVCGNPVYSKSTSTIFPTACAHFVSLCYILALDEEYLKVDAQFGGIDQRKIFTFAEKYLPALGYSKRVHLMNPMVPGLTGSKMSSSEEESKIDLLDRKEDVKKKLKKAFCEPGNVENNGVLSFIKHVLFPLKSEFVILRDEKWGGNKTYTAYVDLEKDFAAEVVHPGDLKNSVEVALNKLLDPIREKFNTPALKKLASAAYPDPSKQKPMAKGPAKNSEPEEVIPSRLDIRVGKIITVEKHPDADSLYVEKIDVGEAEPRTVVSGLVQFVPKEELQDRLVVVLCNLKPQKMRGVESQGMLLCASIEGINRQVEPLDPPAGSAPGEHVFVKGYEKGQPDEELKPKKKVFEKLQADFKISEECIAQWKQTNFMTKLGSISCKSLKGGNIS

SEQ ID NO: 11960 - protein, 36 aa, Artificial Sequence
  Synthetic polypeptide
RCVATLCTASPPAPFFQQHVLTSCLCATFWLWMKSI

SEQ ID NO: 11961 - protein, 53 aa, Artificial Sequence
  Synthetic polypeptide
GISYCTLLYCTTQILCFLQIEGVWQPCVQQVHQHHFSNSMCSLRVSVLHFGFG

SEQ ID NO: 11962 - protein, 56 aa, Artificial Sequence
  Synthetic polypeptide
AFYLSLSTYAHREKAMWRHDEKPPLQAEERGLTRTGPCRCLDPGLPASRTDGRASI

SEQ ID NO: 11963 - protein, 471 aa, Artificial Sequence
  Synthetic polypeptide
DWGPYERRKRHPPERSISPSRRMHTEKRPCGDTMKSPLCKLRREASPEPDHAGASILDFQPPELMAEPRFNNPYFWPPPPTMPSQLDNLVLINKIKEQLMAEKIRPPHLPPTSASSQQPLLVPPAPAESSQAVMSLPKLQQVPGLHPQAVPQPDVALHARPATSTVTGLGLSTRTPSVSTSESSAGAGTGTGTSTPSTPTTTSQSRLIASSPTLISGITSPPLLDSIKTIQGHGLLGPPKSERGRKKIKAENPGGPPVLVVPYPILASGETAKEGKTYRCKVCPLTFFTKSEMQIHSKSHTEAKPHKCPHCSKSFANASYLAQHLRIHLGVKPYHCSYCDKSFRQLSHLQQHTRIHTGDRPYKCPHPGCEKAFTQLSNLQSHQRQHNKDKPYKCPNCYRAYSDSASLQIHLSAHAIKHAKAYCCSMCGRAYTSETYLMKHMSKHTVVEHLVSHHSPQRTESPGIPVRISLI

SEQ ID NO: 11964 - protein, 152 aa, Artificial Sequence
  Synthetic polypeptide
GASLPDRHPVWEIPGEVPGALPGDGGAALHGGPERDVLRVHRASGSGAPRGAGPGTPAARGARGARAALARRVDGAHAHVARGAGRAAGPRGALHVLHGRGPALQRHFWARGAGRVGGAAALLALPLAVVAAALRTRRAFGRRDGVGPGRLL

SEQ ID NO: 11965 - protein, 254 aa, Artificial Sequence
  Synthetic polypeptide
GVPLPGRDPRLGTEERLCPTATPSGRYLEKYLERFLETAEQHFMAGQSVMYYVFTELPGAVPRVALGPGRRLPVERVARERRWQDVSMARMRTLHAALGGLPGREAHFMFCMDVDQHFSGTFGPEALAESVAQLHSWHYHWPSWLLPFERDAHSAAAMAWGQGDFYNHAAVFGGSVAALRGLTAHCAGGLDWDRARGLEARWHDESHLNKFFWLHKPAKVLSPEFCWSPDIGPRAEIRRPRLLWAPKGYRLLRN

SEQ ID NO: 11966 - protein, 63 aa, Artificial Sequence
  Synthetic polypeptide
DVGSASAPPPFLGCEECLCLAVTPVWELRSVSARPPPRLGDTWRSTWSASWRRRSSTSWRARA

SEQ ID NO: 11967 - protein, 1184 aa, Artificial Sequence
  Synthetic polypeptide
RTSRWCQRGPDVDECRTHNGGCQHRCVNTPGSYLCECKPGFRLHTDSRTCLAINSCALGNGGCQHHCVQLTITRHRCQCRPGFQLQEDGRHCVRRSPCANRNGSCMHRCQVVRGLARCECHVGYQLAADGKACEDVDECAAGLAQCAHGCLNTQGSFKCVCHAGYELGADGRQCYRIEMEIVNSCEANNGGCSHGCSHTSAGPLCTCPRGYELDTDQRTCIDVDDCADSPCCQQVCTNNPGGYECGCYAGYRLSADGCGCEDVDECASSRGGCEHHCTNLAGSFQCSCEAGYRLHEDRRGCSPLEEPMVDLDGELPFVRPLPHIAVLQDELPQLFQDDDVGADEEEAELRGEHTLTEKFVCLDDSFGHDCSLTCDDCRNGGTCLLGLDGCDCPEGWTGLICNETCPPDTFGKNCSFSCSCQNGGTCDSVTGACRCPPGVSGTNCEDGCPKGYYGKHCRKKCNCANRGRCHRLYGACLCDPGLYGRFCHLTCPPWAFGPGCSEECQCVQPHTQSCDKRDGSCSCKAGFRGERCQAECELGYFGPGCWQACTCPVGVACDSVSGECGKRCPAGFQGEDCGQECPVGTFGVNCSSSCSCGGAPCHGVTGQCRCPPGRTGEDCEADCPEGRWGLGCQEICPACQHAARCDPETGACLCLPGFVGSRCQDVCPAGWYGPSCQTRCSCANDGHCHPATGHCSCAPGWTGFSCQRACDTGHWGPDCSHPCNCSAGHGSCDAISGLCLCEAGYVGPRCEQQCPQGHFGPGCEQRCQCQHGAACDHVSGACTCPAGWRGTFCEHACPAGFFGLDCRSACNCTAGAACDAVNGSCLCPAGRRGPRCAEKCLPRDVRAGCRHSGGCLNGGLCDPHTGRCLCPAGWTGDKCQSPCLRGWFGEACAQRCSCPPGAACHHVTGACRCPPGFTGSGCEQGCPPGRYGPGCEQLCGCLNGGSCDAATGACRCPTGFLGTDCNLTCPQGRFGPNCTHVCGCGQGAACDPVTGTCLCPPGRAGVRCERGCPQNRFGVGCEHTCSCRNGGLCHASNGSCSCGLGWTGRHCELACPPGRYGAACHLECSCHNNSTCEPATGTCRCGPGFYGQACEHRRSGATCNLDCRRGQFGPSCTLHCDCGGGADCDPVSGQCHCVDGYMGPTCREGGPLRLPENPSLAQGSAGTLPASSRPTSRSGGPARH

SEQ ID NO: 11968 - protein, 26 aa, Artificial Sequence
  Synthetic polypeptide
EPAVGVSEGQMWTNAEPTTVAASTGA

SEQ ID NO: 11969 - protein, 34 aa, Artificial Sequence
  Synthetic polypeptide
NQPLVSARARCGRMPNPQRWLPAPVREHPRLLPL

SEQ ID NO: 11970 - protein, 1391 aa, Artificial Sequence
  Synthetic polypeptide
RTSRWCQRGPDVDECRTHNGGCQHRCVNTPGSYLCECKPGFRLHTDSRTCLAINSCALGNGGCQHHCVQLTITRHRCQCRPGFQLQEDGRHCVRRSPCANRNGSCMHRCQVVRGLARCECHVGYQLAADGKACEDVDECAAGLAQCAHGCLNTQGSFKCVCHAGYELGADGRQCYRIEMEIVNSCEANNGGCSHGCSHTSAGPLCTCPRGYELDTDQRTCIDVDDCADSPCCQQVCTNNPGGYECGCYAGYRLSADGCGCEDVDECASSRGGCEHHCTNLAGSFQCSCEAGYRLHEDRRGCSPLEEPMVDLDGELPFVRPLPHIAVLQDELPQLFQDDDVGADEEEAELRGEHTLTEKFVCLDDSFGHDCSLTCDDCRNGGTCLLGLDGCDCPEGWTGLICNETCPPDTFGKNCSFSCSCQNGGTCDSVTGACRCPPGVSGTNCEDGCPKGYYGKHCRKKCNCANRGRCHRLYGACLCDPGLYGRFCHLTCPPWAFGPGCSEECQCVQPHTQSCDKRDGSCSCKAGFRGERCQAECELGYFGPGCWQACTCPVGVACDSVSGECGKRCPAGFQGEDCGQECPVGTFGVNCSSSCSCGGAPCHGVTGQCRCPPGRTGEDCEADCPEGRWGLGCQEICPACQHAARCDPETGACLCLPGFVGSRCQDVCPAGWYGPSCQTRCSCANDGHCHPATGHCSCAPGWTGFSCQRACDTGHWGPDCSHPCNCSAGHGSCDAISGLCLCEAGYVGPRCEQQCPQGHFGPGCEQRCQCQHGAACDHVSGACTCPAGWRGTFCEHACPAGFFGLDCRSACNCTAGAACDAVNGSCLCPAGRRGPRCAETCPAHTYGHNCSQACACFNGASCDPVHGQCHCAPGWMGPSCLQACPAGLYGDNCRHSCLCQNGGTCDPVSGHCACPEGWAGLACEKECLPRDVRAGCRHSGGCLNGGLCDPHTGRCLCPAGWTGDKCQSPCLRGWFGEACAQRCSCPPGAACHHVTGACRCPPGFTGSGCEQACPPGSFGEDCAQMCQCPGENPACHPATGTCSCAAGYHGPSCQQRCPPGRYGPGCEQLCGCLNGGSCDAATGACRCPTGFLGTDCNLTCPQGRFGPNCTHVCGCGQGAACDPVTGTCLCPPGRAGVRCERGCPQNRFGVGCEHTCSCRNGGLCHASNGSCSCGLGWTGRHCELACPPGRYGAACHLECSCHNNSTCEPATGTCRCGPGFYGQACEHPCPPGFHGAGCQGLCWCQHGAPCDPISGRCLCPAGFHGHFCERGCEPGSFGEGCHQRCDCDGGAPCDPVTGLCLCPPGRSGATCNLDCRRGQFGPSCTLHCDCGGGADCDPVSGQCHCVDGYMGPTCREGGPLRLPENPSLAQGSAGTLPASSRPTSRSGGPARH

SEQ ID NO: 11971 - protein, 1166 aa, Artificial Sequence
  Synthetic polypeptide
RTSRWCQRGPDVDECRTHNGGCQHRCVNTPGSYLCECKPGFRLHTDSRTCLAINSCALGNGGCQHHCVQLTITRHRCQCRPGFQLQEDGRHCVRRSPCANRNGSCMHRCQVVRGLARCECHVGYQLAADGKACEDVDECAAGLAQCAHGCLNTQGSFKCVCHAGYELGADGRQCYRIEMEIVNSCEANNGGCSHGCSHTSAGPLCTCPRGYELDTDQRTCIDVDDCADSPCCQQVCTNNPGGYECGCYAGYRLSADGCGCEDVDECASSRGGCEHHCTNLAGSFQCSCEAGYRLHEDRRGCSPLEEPMVDLDGELPFVRPLPHIAVLQDELPQLFQDDDVGADEEEAELRGEHTLTEKFVCLDDSFGHDCSLTCDDCRNGGTCLLGLDGCDCPEGWTGLICNETCPPDTFGKNCSFSCSCQNGGTCDSVTGACRCPPGVSGTNCEDGCPKGYYGKHCRKKCNCANRGRCHRLYGACLCDPGLYGRFCHLTCPPWAFGPGCSEECQCVQPHTQSCDKRDGSCSCKAGFRGERCQAECELGYFGPGCWQACTCPVGVACDSVSGECGKRCPAGFQGEDCGQECPVGTFGVNCSSSCSCGGAPCHGVTGQCRCPPGRTGEDCEADCPEGRWGLGCQEICPACQHAARCDPETGACLCLPGFVGSRCQDVCPAGWYGPSCQTRCSCANDGHCHPATGHCSCAPGWTGFSCQRACDTGHWGPDCSHPCNCSAGHGSCDAISGLCLCEAGYVGPRCEQQCPQGHFGPGCEQRCQCQHGAACDHVSGACTCPAGWRGTFCEHACPAGFFGLDCRSACNCTAGAACDAVNGSCLCPAGRRGPRCAETCPAHTYGHNCSQACACFNGASCDPVHGQCHCAPGWMGPSCLQACPAGLYGDNCRHSCLCQNGGTCDPVSGHCACPEGWAGLACEKECLPRDVRAGCRHSGGCLNGGLCDPHTGRCLCPAGWTGDKCQSPCAKGTFGPHCEGRCACRWGGPCHLATGACLCPPGWRGAPGVRMPACGAGLERPVPSAAAARLALPATTSLGPAAVPLASLAPAASRPAHPAALGRTVRRCASVPVRTRPATLPPGPAHVLLATTAPAASNDVRPGGMGQAVNSCVGVSTGAPVMRPRGPAAAPLGSSGRTATSPVRRAASAPTAPTCVGVGRGRPATL

SEQ ID NO: 11972 - protein, 37 aa, Artificial Sequence
  Synthetic polypeptide
DVTCSSLPSAMIVRPPQPRGTMWTNAEPTTVAASTGA

SEQ ID NO: 11973 - protein, 32 aa, Artificial Sequence
  Synthetic polypeptide
GLPSHVELCGRMPNPQRWLPAPVREHPRLLPL

SEQ ID NO: 11974 - protein, 1218 aa, Artificial Sequence
  Synthetic polypeptide
DLMVYKGEFPRTSSLSLPAAIHVRCDLLLLAFCHDCEASPATWNYVDECRTHNGGCQHRCVNTPGSYLCECKPGFRLHTDSRTCLAINSCALGNGGCQHHCVQLTITRHRCQCRPGFQLQEDGRHCVRRSPCANRNGSCMHRCQVVRGLARCECHVGYQLAADGKACEDVDECAAGLAQCAHGCLNTQGSFKCVCHAGYELGADGRQCYRIEMEIVNSCEANNGGCSHGCSHTSAGPLCTCPRGYELDTDQRTCIDVDDCADSPCCQQVCTNNPGGYECGCYAGYRLSADGCGCEDVDECASSRGGCEHHCTNLAGSFQCSCEAGYRLHEDRRGCSPLEEPMVDLDGELPFVRPLPHIAVLQDELPQLFQDDDVGADEEEAELRGEHTLTEKFVCLDDSFGHDCSLTCDDCRNGGTCLLGLDGCDCPEGWTGLICNETCPPDTFGKNCSFSCSCQNGGTCDSVTGACRCPPGVSGTNCEDGCPKGYYGKHCRKKCNCANRGRCHRLYGACLCDPGLYGRFCHLTCPPWAFGPGCSEECQCVQPHTQSCDKRDGSCSCKAGFRGERCQAECELGYFGPGCWQACTCPVGVACDSVSGECGKRCPAGFQGEDCGQECPVGTFGVNCSSSCSCGGAPCHGVTGQCRCPPGRTGEDCEADCPEGRWGLGCQEICPACQHAARCDPETGACLCLPGFVGSRCQDVCPAGWYGPSCQTRCSCANDGHCHPATGHCSCAPGWTGFSCQRACDTGHWGPDCSHPCNCSAGHGSCDAISGLCLCEAGYVGPRCEQQCPQGHFGPGCEQRCQCQHGAACDHVSGACTCPAGWRGTFCEHACPAGFFGLDCRSACNCTAGAACDAVNGSCLCPAGRRGPRCAEKCLPRDVRAGCRHSGGCLNGGLCDPHTGRCLCPAGWTGDKCQSPCLRGWFGEACAQRCSCPPGAACHHVTGACRCPPGFTGSGCEQGCPPGRYGPGCEQLCGCLNGGSCDAATGACRCPTGFLGTDCNLTCPQGRFGPNCTHVCGCGQGAACDPVTGTCLCPPGRAGVRCERGCPQNRFGVGCEHTCSCRNGGLCHASNGSCSCGLGWTGRHCELACPPGRYGAACHLECSCHNNSTCEPATGTCRCGPGFYGQACEHRRSGATCNLDCRRGQFGPSCTLHCDCGGGADCDPVSGQCHCVDGYMGPTCREGGPLRLPENPSLAQGSAGTLPASSRPTSRSGGPARH

SEQ ID NO: 11975 - protein, 1425 aa, Artificial Sequence
  Synthetic polypeptide
DLMVYKGEFPRTSSLSLPAAIHVRCDLLLLAFCHDCEASPATWNYVDECRTHNGGCQHRCVNTPGSYLCECKPGFRLHTDSRTCLAINSCALGNGGCQHHCVQLTITRHRCQCRPGFQLQEDGRHCVRRSPCANRNGSCMHRCQVVRGLARCECHVGYQLAADGKACEDVDECAAGLAQCAHGCLNTQGSFKCVCHAGYELGADGRQCYRIEMEIVNSCEANNGGCSHGCSHTSAGPLCTCPRGYELDTDQRTCIDVDDCADSPCCQQVCTNNPGGYECGCYAGYRLSADGCGCEDVDECASSRGGCEHHCTNLAGSFQCSCEAGYRLHEDRRGCSPLEEPMVDLDGELPFVRPLPHIAVLQDELPQLFQDDDVGADEEEAELRGEHTLTEKFVCLDDSFGHDCSLTCDDCRNGGTCLLGLDGCDCPEGWTGLICNETCPPDTFGKNCSFSCSCQNGGTCDSVTGACRCPPGVSGTNCEDGCPKGYYGKHCRKKCNCANRGRCHRLYGACLCDPGLYGRFCHLTCPPWAFGPGCSEECQCVQPHTQSCDKRDGSCSCKAGFRGERCQAECELGYFGPGCWQACTCPVGVACDSVSGECGKRCPAGFQGEDCGQECPVGTFGVNCSSSCSCGGAPCHGVTGQCRCPPGRTGEDCEADCPEGRWGLGCQEICPACQHAARCDPETGACLCLPGFVGSRCQDVCPAGWYGPSCQTRCSCANDGHCHPATGHCSCAPGWTGFSCQRACDTGHWGPDCSHPCNCSAGHGSCDAISGLCLCEAGYVGPRCEQQCPQGHFGPGCEQRCQCQHGAACDHVSGACTCPAGWRGTFCEHACPAGFFGLDCRSACNCTAGAACDAVNGSCLCPAGRRGPRCAETCPAHTYGHNCSQACACFNGASCDPVHGQCHCAPGWMGPSCLQACPAGLYGDNCRHSCLCQNGGTCDPVSGHCACPEGWAGLACEKECLPRDVRAGCRHSGGCLNGGLCDPHTGRCLCPAGWTGDKCQSPCLRGWFGEACAQRCSCPPGAACHHVTGACRCPPGFTGSGCEQACPPGSFGEDCAQMCQCPGENPACHPATGTCSCAAGYHGPSCQQRCPPGRYGPGCEQLCGCLNGGSCDAATGACRCPTGFLGTDCNLTCPQGRFGPNCTHVCGCGQGAACDPVTGTCLCPPGRAGVRCERGCPQNRFGVGCEHTCSCRNGGLCHASNGSCSCGLGWTGRHCELACPPGRYGAACHLECSCHNNSTCEPATGTCRCGPGFYGQACEHPCPPGFHGAGCQGLCWCQHGAPCDPISGRCLCPAGFHGHFCERGCEPGSFGEGCHQRCDCDGGAPCDPVTGLCLCPPGRSGATCNLDCRRGQFGPSCTLHCDCGGGADCDPVSGQCHCVDGYMGPTCREGGPLRLPENPSLAQGSAGTLPASSRPTSRSGGPARH

SEQ ID NO: 11976 - protein, 1200 aa, Artificial Sequence
  Synthetic polypeptide
DLMVYKGEFPRTSSLSLPAAIHVRCDLLLLAFCHDCEASPATWNYVDECRTHNGGCQHRCVNTPGSYLCECKPGFRLHTDSRTCLAINSCALGNGGCQHHCVQLTITRHRCQCRPGFQLQEDGRHCVRRSPCANRNGSCMHRCQVVRGLARCECHVGYQLAADGKACEDVDECAAGLAQCAHGCLNTQGSFKCVCHAGYELGADGRQCYRIEMEIVNSCEANNGGCSHGCSHTSAGPLCTCPRGYELDTDQRTCIDVDDCADSPCCQQVCTNNPGGYECGCYAGYRLSADGCGCEDVDECASSRGGCEHHCTNLAGSFQCSCEAGYRLHEDRRGCSPLEEPMVDLDGELPFVRPLPHIAVLQDELPQLFQDDDVGADEEEAELRGEHTLTEKFVCLDDSFGHDCSLTCDDCRNGGTCLLGLDGCDCPEGWTGLICNETCPPDTFGKNCSFSCSCQNGGTCDSVTGACRCPPGVSGTNCEDGCPKGYYGKHCRKKCNCANRGRCHRLYGACLCDPGLYGRFCHLTCPPWAFGPGCSEECQCVQPHTQSCDKRDGSCSCKAGFRGERCQAECELGYFGPGCWQACTCPVGVACDSVSGECGKRCPAGFQGEDCGQECPVGTFGVNCSSSCSCGGAPCHGVTGQCRCPPGRTGEDCEADCPEGRWGLGCQEICPACQHAARCDPETGACLCLPGFVGSRCQDVCPAGWYGPSCQTRCSCANDGHCHPATGHCSCAPGWTGFSCQRACDTGHWGPDCSHPCNCSAGHGSCDAISGLCLCEAGYVGPRCEQQCPQGHFGPGCEQRCQCQHGAACDHVSGACTCPAGWRGTFCEHACPAGFFGLDCRSACNCTAGAACDAVNGSCLCPAGRRGPRCAETCPAHTYGHNCSQACACFNGASCDPVHGQCHCAPGWMGPSCLQACPAGLYGDNCRHSCLCQNGGTCDPVSGHCACPEGWAGLACEKECLPRDVRAGCRHSGGCLNGGLCDPHTGRCLCPAGWTGDKCQSPCAKGTFGPHCEGRCACRWGGPCHLATGACLCPPGWRGAPGVRMPACGAGLERPVPSAAAARLALPATTSLGPAAVPLASLAPAASRPAHPAALGRTVRRCASVPVRTRPATLPPGPAHVLLATTAPAASNDVRPGGMGQAVNSCVGVSTGAPVMRPRGPAAAPLGSSGRTATSPVRRAASAPTAPTCVGVGRGRPATL

SEQ ID NO: 11977 - protein, 50 aa, Artificial Sequence
  Synthetic polypeptide
VSLMRSDGFKKQSFPAQAVFSRLPPCEMGLSPSAMIVRPPQPHGTAGMRL

SEQ ID NO: 11978 - protein, 10 aa, Artificial Sequence
  Synthetic polypeptide
GLPSHMEPLE

SEQ ID NO: 11979 - protein, 24 aa, Artificial Sequence
  Synthetic polypeptide
DGSFTFCHDCEASPATWNRWNEAV

SEQ ID NO: 11980 - protein, 19 aa, Artificial Sequence
  Synthetic polypeptide
SELNHIYFAGLCEDKIRLE

SEQ ID NO: 11981 - protein, 7 aa, Artificial Sequence
  Synthetic polypeptide
NKAGMRL

SEQ ID NO: 11982 - protein, 51 aa, Artificial Sequence
  Synthetic polypeptide
EEAEGIVIIGSGKINLKGDLMSICKPIEGYHSGQSDRRTRGNGFSMQQRLE

SEQ ID NO: 11983 - protein, 33 aa, Artificial Sequence
  Synthetic polypeptide
AFVNLSKVIIQGRVTGGHAEMGLVCSKGWNEAV

SEQ ID NO: 11984 - protein, 9 aa, Artificial Sequence
  Synthetic polypeptide
YAAKAGMRL

SEQ ID NO: 11985 - protein, 19 aa, Artificial Sequence
  Synthetic polypeptide
FCSEFPTQYLAQKDPREGL

SEQ ID NO: 11986 - protein, 59 aa, Artificial Sequence
  Synthetic polypeptide
LLFPFLNKELPKTTTSSDSALNSQHSTWHKKIPEKDSDWLTWSGAPIPGFFRLSFDPHG

SEQ ID NO: 11987 - protein, 38 aa, Artificial Sequence
  Synthetic polypeptide
IPNTVPGTKRSQRRTLTGSPGVELLSLDSSGFHLTHMV

SEQ ID NO: 11988 - protein, 9 aa, Artificial Sequence
  Synthetic polypeptide
HFGRARTSG

SEQ ID NO: 11989 - protein, 860 aa, Artificial Sequence
  Synthetic polypeptide
TLGGQGPPASLFQPPRRPGLGTVGKPIRLLANHFQVQIPKIDVYHYDVDIKPEKRPRRVNREVVDTMVRHFKMQIFGDRQPGYDGKRNMYTAHPLPIGRDRVDMEVTLPGEGKDQTFKVSVQWVSVVSLQLLLEALAGHLNEVPDDSVQALDVITRHLPSMRYTPVGRSFFSPPEGYYHPLGGGREVWFGFHQSVRPAMWNMMLNIDVSATAFYRAQPIIEFMCEVLDIQNINEQTKPLTDSQRVKFTKEIRGLKVEVTHCGQMKRKYRVCNVTRRPASHQTFPLQLENGQAMECTVAQYFKQKYSLQLKYPHLPCLQVGQEQKHTYLPLEVCNIVAGQRCIKKLTDNQTSTMIKATARSAPDRQEEISRLVKSNSMVGGPDPYLKEFGIVVHNEMTELTGRVLPAPMLQYGGRNKTVATPNQGVWDMRGKQFYAGIEIKVWAVACFAPQKQCREDLLKSFTDQLRKISKDAGMPIQGQPCFCKYAQGADSVEPMFKHLKMTYVGLQLIVVILPGKTPVYAEVKRVGDTLLGMATQCVQVKNVVKTSPQTLSNLCLKINAKLGGINNVLVPHQRPSVFQQPVIFLGADVTHPPAGDGKKPSIAAVVGSMDGHPSRYCATVRVQTSRQEISQELLYSQEVIQDLTNMVRELLIQFYKSTRFKPTRIIYYRGGVSEGQMKQVAWPELIAIRKACISLEEDYRPGITYIVVQKRHHTRLFCADKTERVGKSGNVPAGTTVDSTITHPSEFDFYLCSHAGIQGTSRPSHYQVLWDDNCFTADELQLLTYQLCHTYVRCTRSVSIPAPAYYARLVAFRARYHLVDKDHDSAEGSHVSGQSNGRDPQALAKAVQIHHDTQHTMYFA

SEQ ID NO: 11990 - protein, 29 aa, Artificial Sequence
  Synthetic polypeptide
LWEGKDLRLACFSHLVVLALELLENQFDC

SEQ ID NO: 11991 - protein, 29 aa, Artificial Sequence
  Synthetic polypeptide
HPSPPIQPSPKSDFCHCLLQSTTCNSVHV

SEQ ID NO: 11992 - protein, 658 aa, Artificial Sequence
  Synthetic polypeptide
EAVFDTLLPQSSHPPSLISATAFYKAQPVIQFMCEVLDIHNIDEQPRPLTDSHRVKFTKEIKGLKVEVTHCGTMRRKYRVCNVTRRPASHQTFPLQLENGQTVERTVAQYFREKYTLQLKYPHLPCLQVGQEQKHTYLPLEVCNIVAGQRCIKKLTDNQTSTMIKATARSAPDRQEEISRLVRSANYETDPFVQEFQFKVRDEMAHVTGRVLPAPMLQYGGRNRTVATPSHGVWDMRGKQFHTGVEIKMWAIACFATQRQCREEILKGFTDQLRKISKDAGMPIQGQPCFCKYAQGADSVEPMFRHLKNTYSGLQLIIVILPGKTPVYAEVKRVGDTLLGMATQCVQVKNVIKTSPQTLSNLCLKINVKLGGINNILVPHQRPSVFQQPVIFLGADVTHPPAGDGKKPSIAAVVGSMDAHPSRYCATVRVQRPRQEIIQDLASMVRELLIQFYKSTRFKPTRIIFYRDGVSEGQFRQVLYYELLAIREACISLEKDYQPGITYIVVQKRHHTRLFCADRTERVGRSGNIPAGTTVDTDITHPYEFDFYLCSHAGIQGTSRPSHYHVLWDDNCFTADELQLLTYQLCHTYVRCTRSVSIPAPAYYAHLVAFRARYHLVDKEHDSAEGSHVSGQSNGRDPQALAKAVQIHQDTLRTMYFA

SEQ ID NO: 11993 - protein, 18 aa, Artificial Sequence
  Synthetic polypeptide
VSFCHCLLQSTTCNSVHV

SEQ ID NO: 11994 - protein, 655 aa, Artificial Sequence
  Synthetic polypeptide
HPSPPIQPSPKSELVSATAFYKAQPVIQFMCEVLDIHNIDEQPRPLTDSHRVKFTKEIKGLKVEVTHCGTMRRKYRVCNVTRRPASHQTFPLQLENGQTVERTVAQYFREKYTLQLKYPHLPCLQVGQEQKHTYLPLEVCNIVAGQRCIKKLTDNQTSTMIKATARSAPDRQEEISRLVRSANYETDPFVQEFQFKVRDEMAHVTGRVLPAPMLQYGGRNRTVATPSHGVWDMRGKQFHTGVEIKMWAIACFATQRQCREEILKGFTDQLRKISKDAGMPIQGQPCFCKYAQGADSVEPMFRHLKNTYSGLQLIIVILPGKTPVYAEVKRVGDTLLGMATQCVQVKNVIKTSPQTLSNLCLKINVKLGGINNILVPHQRPSVFQQPVIFLGADVTHPPAGDGKKPSIAAVVGSMDAHPSRYCATVRVQRPRQEIIQDLASMVRELLIQFYKSTRFKPTRIIFYRDGVSEGQFRQVLYYELLAIREACISLEKDYQPGITYIVVQKRHHTRLFCADRTERVGRSGNIPAGTTVDTDITHPYEFDFYLCSHAGIQGTSRPSHYHVLWDDNCFTADELQLLTYQLCHTYVRCTRSVSIPAPAYYAHLVAFRARYHLVDKEHDSAEGSHVSGQSNGRDPQALAKAVQIHQDTLRTMYFA

SEQ ID NO: 11995 - protein, 34 aa, Artificial Sequence
  Synthetic polypeptide
VMLIGSKPQLCYSLAVELNCGRQDPPRAKTFSRR

SEQ ID NO: 11996 - protein, 792 aa, Artificial Sequence
  Synthetic polypeptide
LWSLTVVARTPPEPRPSPEGDPSPPPPPMSALVPDTPPDTPPAMKNATSSKQLPLEPESPSGQVGPRPAPPQEESPSSEAKSRGPTPPAMGPRDARPPRRSSQPSPTAVPASDSPPTKQEVKKAGERHKLAKERREERAKYLAAKKAVWLEKEEKAKALREKQLQERRRRLEEQRLKAEQRRAALEERQRQKLEKNKERYEAAIQRSVKKTWAEIRQQRWSWAGALHHSSPGHKTNRSLQLSAWESSIVDRLMTPTLSFLARSRSAVTLPRNGRDQGRGCDPGRGPTWGRAGASLARGPQPDRTHPSAAVPVCPRSASASPLTPCSVTRSVHRCAPAGERGERRKPNAGGSPAPVRRRPEASPVQKKEKKDKERENEKEKSALARERSLKKRQSLPASPRARLSASTASELSPKSKARPSSPSTSWHRPASPCPSPGPGHTLPPKPPSPRGTTASPKGRVRRKEEAKESPSAAGPEDKSQSKRRASNEKESAAPASPAPSPAPSPTPAPPQKEQPPAETPTDAAVLTSPPAPAPPVTPSKPMAGTTDREEATRLLAEKRRQAREQREREEQERRLQAERDKRMREEQLAREAEARAEREAEARRREEQEAREKAQAEQEEQERLQKQKEEAEARSREEAERQRLEREKHFQQQEQERQERRKRLEEIMKRTRKSEVSETKKQDSKEANANGSSPEPVKAVEARSPGLQKEAVQKEEPIPQEPQWSLPSKELPASLVNGLQPLPAHQENGFSTNGPSGDKSLSRTPETLLPFAEAEAFLKKAVVQSPQVTEVL

SEQ ID NO: 11997 - protein, 797 aa, Artificial Sequence
  Synthetic polypeptide
LWSLTVVARTPPEPRPSPEGDPSPPPPPMSALVPDTPPDTPPAMKNATSSKQLPLEPESPSGQVGPRPAPPQEESPSSEAKSRGPTPPAMGPRDARPPRRSSQPSPTAVPASDSPPTKQEVKKAGERHKLAKERREERAKYLAAKKAVWLEKEEKAKALREKQLQERRRRLEEQRLKAEQRRAALEERQRQKLEKNKERYEAAIQRSVKKTWAEIRQQRWSWAGALHHSSPGHKTSGSRCSVSAVNLPKHVDSIINKRLSKSSATLWNSPSRNRSLQLSAWESSIVDRLMTPTLSFLARSRSAVTLPRNGRDQAVPVCPRSASASPLTPCSVTRSVHRCAPAGERGERRKPNAGGSPAPVRRRPEASPVQKKEKKDKERENEKEKSALARERSLKKRQSLPASPRARLSASTASELSPKSKARPSSPSTSWHRPASPCPSPGPGHTLPPKPPSPRGTTASPKGRVRRKEEAKESPSAAGPEDKSQSKRRASNEKESAAPASPAPSPAPSPTPAPPQKEQPPAETPTDAAVLTSPPAPAPPVTPSKPMAGTTDREEATRLLAEKRRQAREQREREEQERRLQAERDKRMREEQLAREAEARAEREAEARRREEQEAREKAQAEQEEQERLQKQKEEAEARSREEAERQRLEREKHFQQQEQERQERRKRLEEIMKRTRKSEVSETKKQDSKEANANGSSPEPVKAVEARSPGLQKEAVQKEEPIPQEPQWSLPSKELPASLVNGLQPLPAHQENGFSTNGPSGDKSLSRTPETLLPFAEAEAFLKKAVVQSPQVTEVL

SEQ ID NO: 11998 - protein, 830 aa, Artificial Sequence
  Synthetic polypeptide
LWSLTVVARTPPEPRPSPEGDPSPPPPPMSALVPDTPPDTPPAMKNATSSKQLPLEPESPSGQVGPRPAPPQEESPSSEAKSRGPTPPAMGPRDARPPRRSSQPSPTAVPASDSPPTKQEVKKAGERHKLAKERREERAKYLAAKKAVWLEKEEKAKALREKQLQERRRRLEEQRLKAEQRRAALEERQRQKLEKNKERYEAAIQRSVKKTWAEIRQQRWSWAGALHHSSPGHKTSGSRCSVSAVNLPKHVDSIINKRLSKSSATLWNSPSRNRSLQLSAWESSIVDRLMTPTLSFLARSRSAVTLPRNGRDQGRGCDPGRGPTWGRAGASLARGPQPDRTHPSAAVPVCPRSASASPLTPCSVTRSVHRCAPAGERGERRKPNAGGSPAPVRRRPEASPVQKKEKKDKERENEKEKSALARERSLKKRQSLPASPRARLSASTASELSPKSKARPSSPSTSWHRPASPCPSPGPGHTLPPKPPSPRGTTASPKGRVRRKEEAKESPSAAGPEDKSQSKRRASNEKESAAPASPAPSPAPSPTPAPPQKEQPPAETPTDAAVLTSPPAPAPPVTPSKPMAGTTDREEATRLLAEKRRQAREQREREEQERRLQAERDKRMREEQLAREAEARAEREAEARRREEQEAREKAQAEQEEQERLQKQKEEAEARSREEAERQRLEREKHFQQQEQERQERRKRLEEIMKRTRKSEVSETKQKQDSKEANANGSSPEPVKAVEARSPGLQKEAVQKEEPIPQEPQWSLPSKELPASLVNGLQPLPAHQENGFSTNGPSGDKSLSRTPETLLPFAEAEAFLKKAVVQSPQVTEVL

SEQ ID NO: 11999 - protein, 336 aa, Artificial Sequence
  Synthetic polypeptide
GQARWLTTVIPATWEAEVGRSQGQEIETILANKDRTCEIVEDTESSRMVKKMKKRICLVLDCLCAHDFSDKTADLINLQHYVIKEKRLSERETVVIFYDVVRVVEALHQKNIVHRDLKLGNMVLNKRTHRITITNFCLGKHLVSEGDLLKDQRGSPAYISPDVLSGRPYRGKPSDMWALGVVLFTMLYGQFPFYDSIPQELFRKIKAAEYTIPEDGRVSENTVCLIRKLLVLDPQQRLAAADVLEALSAIIASWQSLSSLSGPLQVVPDIDDQMSNADSSQEVSWGGQMGHYPAPRDRLLGAGRARAEVAATRRPQSFLGLLPQPWGGKGRLQSSA

SEQ ID NO: 12000 - protein, 42 aa, Artificial Sequence
  Synthetic polypeptide
SQQRGKPRWADHKVRRSRPSWPTRTAPVKSLRTQNPAGWLRR

SEQ ID NO: 12001 - protein, 36 aa, Artificial Sequence
  Synthetic polypeptide
PGTVAHNCNPSNVGSRGGQITRSGDRDHPGQQGPHL

SEQ ID NO: 12002 - protein, 354 aa, Artificial Sequence
  Synthetic polypeptide
GQARWLTTVIPATWEAEVGRSQGQEIETILANKDRTCEIVEDTESSRMVKKMKKRICLVLDCLCAHDFSDKTADLINLQHYVIKEKRLSERETVVIFYDVVRVVEALHQKNIVHRDLKLGNMVLNKRTHRITITNFCLGKHLVSEGDLLKDQRGSPAYISPDVLSGRPYRGKPSDMWALGVVLFTMLYGQFPFYDSIPQELFRKIKAAEYTIPEDGRVSENTVCLIRKLLVLDPQQRLAAADVLEALSAIIASWQSLSSLSGPLQVVPDIDDQMSNADSSQEAKVTEECSQYEFENYMRQQLLLAEEKSSIHDARSWVPKRQFGSAPPVRRLGHDAQPMTSLDTAILAQRYLRK

SEQ ID NO: 12003 - protein, 144 aa, Artificial Sequence
  Synthetic polypeptide
MESTPSWTLYHCVSLVIALSVKIRSYEEHLEKHRKDKAHKRYLLMSIDQRKKMLKNLRNTNYDVFEKICWGLGIEYTFPPLYYRRAHRRFVTKKALCIRVFQETQKLKKRRRALKAAAAAQKQAKRRNPDSPAKAIPKTLKDSQ

SEQ ID NO: 12004 - protein, 30 aa, Artificial Sequence
  Synthetic polypeptide
AWLLPCLSRSAVMKNTWRNIERTKPTNAIC

SEQ ID NO: 12005 - protein, 25 aa, Artificial Sequence
  Synthetic polypeptide
GVNTQLDLVPLCELGYCLVCQDPQL

SEQ ID NO: 12006 - protein, 228 aa, Artificial Sequence
  Synthetic polypeptide
PGVVTKLHEDLCEKRTAATLATHELRAVKGPLLYCARPPQDLKIVPLGRKEAKAKELVRQLQLEAEEQRKQKKRQSVSGLHRYLHLLDGNENYPCLVDADGDVISFPPITNSEKTKVKKTTSDLFLEVTSATSLQICKDVMDALILKMAEMKKYTLENKEEGSLSDTEADAVSGQLPDPTTNPSAGKDGPSLLVVEQVRVVDLEGSLKVVYPSKADLATAPPHVTVVR

SEQ ID NO: 12007 - protein, 30 aa, Artificial Sequence
  Synthetic polypeptide
DQPGQHDETPSLPKTQKLARRGDQAPRRSL

SEQ ID NO: 12008 - protein, 24 aa, Artificial Sequence
  Synthetic polypeptide
SQLLRRLGQEDGLHPGGQSCRKRK

SEQ ID NO: 12009 - protein, 237 aa, Artificial Sequence
  Synthetic polypeptide
PDMVVSTCNPSYSGGWGRRMACTQEAKAAEKESDAVKPKNQDIQGGKAAPAEALGIPDEHYLDNLCIFCGERSESFTEEGLDLHYWKHCLMLTRCDHCKQVVEISSLTEHLLTECDKKDGFGKCYRCSEAVFKEELPRHIKHKDCNPAKPEKLANRCPLCHENFSPGEEAWKAHLMGPAGCTMNLRKTHILQKAPALQPGKSSAVAASGPLGSKAGSKIPTPKGGLSKSSSRTYAKR

SEQ ID NO: 12010 - protein, 30 aa, Artificial Sequence
  Synthetic polypeptide
APVIPATQEAGAGGWLAPRRPKLQKKKVML

SEQ ID NO: 12011 - protein, 205 aa, Artificial Sequence
  Synthetic polypeptide
PDMVVSTCNPSYSGGWGRRMACTQEAKAAEKESDAVKPKNQDIQGGKAAPAEALGIPDEHYLDNLCIFCGERSESFTEEGLDLHYWKHCLMLTRCDHCKQVVEISSLTEHLLTECDKKDGFGKCYRCSEAVFKEELPRHIKHKDCNPAKPEKLANRCPLCHENFSPGEEAWKAHLMGPAGCTMNLRKTHILQKAPALQPGEGQRR

SEQ ID NO: 12012 - protein, 178 aa, Artificial Sequence
  Synthetic polypeptide
PDMVVSTCNPSYSGGWGRRMACTQEAKAAEKESDAVKPKNQDIQGGKAAPAEALGIPDEHYLDNLCIFCGERSESFTEEGLDLHYWKHCLMLTRCDHCKQVVEISSLTEHLLTECDKKDGFGKCYRCSEAVFKEELPRHIKHKDCNPAKPEKLANRCPLCHENFSPGEEVRGLGRRDQ

SEQ ID NO: 12013 - protein, 770 aa, Artificial Sequence
  Synthetic polypeptide
GWVQWLTPVISALWESEMGGSSDVRSSRPTWLTWKSDYISPLDDLAFDMYQDPEVAQIIRKLDERKREAVQKERYDYAKKLKQAIADLQKVGERLGRYEVEKRCAVEKEDYDLAKEKKQQMEQYRAEVYEQLELHSLLDAELMRRPFDLPLQPLARSGSPCHQKPMPSLPQLEERGTENQFAEPFLQEKPSSYSLTISPQHSAVDPLLPATDPHPKINAESLPYDERPLPAIRKHYGEAVVEPEMSNADISDARRGGMLGEPEPLTEKALREASSAIDVLGETLVAEAYCKTWSYREDALLALSKKLMEMPVGTPKEDLKNTLRASVFLVRRAIKDIVTSVFQASLKLLKMIITQYIPKHKLSKLETAHCVERTIPVLLTRTGDSSARLRVTAANFIQEMALFKEVKSLQIIPSYLVQPLKANSSVHLAMSQMGLLARLLKDLGTGSSGFTIDNVMKFSVSALEHRVYEVRETAVRIILDMYRQHQASILEYLPPDDSNTRRNILYKTIFEGFAKIDGRATDAEMRARRKAATEEAEKQKKEEIKALQGQLAALKEIQAEVQEKESDAVKPKNQDIQGGKAAPAEALGIPDEHYLDNLCIFCGERSESFTEEGLDLHYWKHCLMLTRCDHCKQVVEISSLTEHLLTECDKKDGFGKCYRCSEAVFKEELPRHIKHKDCNPAKPEKLANRCPLCHENFSPGEEAWKAHLMGPAGCTMNLRKTHILQKAPALQPGKSSAVAASGPLGSKAGSKIPTPKGGLSKSSSRTYAKR

SEQ ID NO: 12014 - protein, 9 aa, Artificial Sequence
  Synthetic polypeptide
HGNLTISLR

SEQ ID NO: 12015 - protein, 13 aa, Artificial Sequence
  Synthetic polypeptide
RQEFQTNLANMEI

SEQ ID NO: 12016 - protein, 102 aa, Artificial Sequence
  Synthetic polypeptide
GWVQWLTPVISALWESEMGGSSDVRSSRPTWLTWKSDYISPLDDLAFDMYQDPEVAQIIRKLDERKREAVQKERYDYAKKLKQAIADLQKVGERLGRYEVEK

SEQ ID NO: 12017 - protein, 10 aa, Artificial Sequence
  Synthetic polypeptide
TPMPSNVLPE

SEQ ID NO: 12018 - protein, 29 aa, Artificial Sequence
  Synthetic polypeptide
ALGGKRQCLQMSCLNRKETHHHSYTGGSN

SEQ ID NO: 12019 - protein, 53 aa, Artificial Sequence
  Synthetic polypeptide
GQIRWLMPIIPELWEPKGSQEVGRKVTLLQTSTIRKMSPARRTLRIWMDLCRE

SEQ ID NO: 12020 - protein, 16 aa, Artificial Sequence
  Synthetic polypeptide
SQNFGSPRGARKWDGK

SEQ ID NO: 12021 - protein, 104 aa, Artificial Sequence
  Synthetic polypeptide
PDTVAHAYNPRTLGAQGEPGSGTESDTSPDFHNQENEPSQEDPEDLDGSVQGVKPQKAASSTSSGSHHSSHKKRKNKNRHSPSGMFDYDFEIDLKLNKKPRADY

SEQ ID NO: 12022 - protein, 94 aa, Artificial Sequence
  Synthetic polypeptide
PDTVAHAYNPRTLGAQGEPGSGTESDTSPDFHNQENEPSQEDPEDLDGSVQGVKPQKAASSTSSGSHHSSHKKRKNKNRHRIDLKLNKKPRADY

SEQ ID NO: 12023 - protein, 95 aa, Artificial Sequence
  Synthetic polypeptide
PDTVAHAYNPRTLGAQGEPGSGTESDTSPDFHNQENEPSQEDPEDLDGSVQGVKPQKAASSTSSGSHHSSHKKRKNKNRHRMNVSPKTGWHQLHL

SEQ ID NO: 12024 - protein, 94 aa, Artificial Sequence
  Synthetic polypeptide
PDTVAHAYNPRTLGAQGEPGSGTESDTSPDFHNQENEPSQEDPEDLDGSVQGVKPQKAASSTSSGSHHSSHKKRKNKNRHSPSGMFDYDFEYVY

SEQ ID NO: 12025 - protein, 228 aa, Artificial Sequence
  Synthetic polypeptide
AGRGDAQLWSQLLGGLRYGSHGAFYRYKNSMGKSLPLFYIYDSYLTSPEAWAHLLTPNGPHSIRNTPYDGVFIALLVEEGHTHDILAAGFDGMYTYFASNGFSFGSSHQNWKAVKNFCDANNLMFIPSVGPGYIDTSIRPWNNHNTRNRVNGKYYETALQAALTVRPEIVSITSFNEWHEGTQIEKAIPKKTPTRLYLDYLPHQPSLYLELTRRWAEHFIKEKEQWLM

SEQ ID NO: 12026 - protein, 22 aa, Artificial Sequence
  Synthetic polypeptide
CTAMVPATWGAKVWLPWCILPL

SEQ ID NO: 12027 - protein, 27 aa, Artificial Sequence
  Synthetic polypeptide
AGRGDAQLWSQLLGGLRYGSHGAFYRY

SEQ ID NO: 12028 - protein, 21 aa, Artificial Sequence
  Synthetic polypeptide
AGRGDAQLWSQLLGGLRTGKL

SEQ ID NO: 12029 - protein, 131 aa, Artificial Sequence
  Synthetic polypeptide
CTAMVPATWGAKNWKAVKNFCDANNLMFIPSVGPGYIDTSIRPWNNHNTRNRVNGKYYETALQAALTVRPEIVSITSFNEWHEGTQIEKAIPKKTPTRLYLDYLPHQPSLYLELTRRWAEHFIKEKEQWLM

SEQ ID NO: 12030 - protein, 17 aa, Artificial Sequence
  Synthetic polypeptide
CTAMVPATWGAKNWKAV

SEQ ID NO: 12031 - protein, 29 aa, Artificial Sequence
  Synthetic polypeptide
LLRRLRQENRLNPGGGGREAGLYHIPVHL

SEQ ID NO: 12032 - protein, 352 aa, Artificial Sequence
  Synthetic polypeptide
TQEAEVAKLDYITYLSIFDQLFDIPKERKNAEYKRYLEMLLEYLQDYTDRVKPLQDQNELFGKIQAEFEKKWENGTFPGWPKETSSALTHAGAHLDLSAFSSWEELASLGLDRLKSALLALGLKCGGTLEERAQRLFSTKGKSLESLDTSLFAKNPKSKGTKRDTERNKDIAFLEAQIYEYVEILGEQRHLTHENVQRKQARTGEEREEEEEEQISESESEDEENEIIYNPKNLPLGWDGKPIPYWLYKLHGLNINYNCEICGNYTYRGPKAFQRHFAEWRHAHGMRCLGIPNTAHFANVTQIEDAVSLWAKLKLQKASERWQPDTEEEYEDSSGNVVNKKTYEDLKRQGLL

SEQ ID NO: 12033 - protein, 63 aa, Artificial Sequence
  Synthetic polypeptide
KYKISWAWWRMPVILATQEAEAGESLEPRRRRSRSWIISHTCPSLTNYLTFLKKGRMQSIRDT

SEQ ID NO: 12034 - protein, 36 aa, Artificial Sequence
  Synthetic polypeptide
PPPCCLGPPAPSSCHHLSETRRVSNYQPAEVLEADV

SEQ ID NO: 12035 - protein, 35 aa, Artificial Sequence
  Synthetic polypeptide
HLHAALDHLPRPAAITCQKQEESAITSQPRSWKLT

SEQ ID NO: 12036 - protein, 33 aa, Artificial Sequence
  Synthetic polypeptide
TSMLPWTTCPVQLPSPVRNKKSQQLPASRGPGS

SEQ ID NO: 12037 - protein, 100 aa, Artificial Sequence
  Synthetic polypeptide
VGDLTRSASARRDVDWLGLDQGLQASDVETEAQQDPLGPQPPRSWTCPGPGRETAAVSAAGPLPGQSESHPHPSGSEATEEEAAEEKQRAAAGQPTPRDL

SEQ ID NO: 12038 - protein, 131 aa, Artificial Sequence
  Synthetic polypeptide
RAAPQPGETWTGWGWTKDSRLQMWKLRLSRTPWVLSLHAPGPAQAPAERPLLCLLQGHCPASPSPIRTPRAVRPLRRRQPKKSNELPQANRLPGIFDDVHGSHGRQVCRRHELYVSFQDLGWLVIADSSCF

SEQ ID NO: 12039 - protein, 29 aa, Artificial Sequence
  Synthetic polypeptide
GGPDAQRLSQERRGLAGAGPRTPGFRCGN

SEQ ID NO: 12040 - protein, 14 aa, Artificial Sequence
  Synthetic polypeptide
YMRQLLQSLKHGCY

SEQ ID NO: 12041 - protein, 44 aa, Artificial Sequence
  Synthetic polypeptide
ERTWKLQAPSHSLALCISSIWLFICIPHNIPHNKLVHETAVAIP

SEQ ID NO: 12042 - protein, 4 aa, Artificial Sequence
  Synthetic polypeptide
ESIN

SEQ ID NO: 12043 - protein, 6 aa, Artificial Sequence
  Synthetic polypeptide
RINESQ

SEQ ID NO: 12044 - protein, 1714 aa, Artificial Sequence
  Synthetic polypeptide
MRVNKLIAQEGPSFLQMRIKHLLKSNCIPQATALSKLCAESKEISNVSSFQQAYITCLCSMLPNEDAIKEIAKVDCKEVLDIICNLESEGQDNTAFVLCTTYLTQQLQTASVYCSWELTLFWSKLQRRIDPSLDTFLERCRQFGVIAKTQQHLFCLIRVIQTEAQDAGLGVSILLCVRALQLRSSEDEEMKASVCKTIACLLPEDLEVRRACQLTEFLIEPSLDGFNMLEELYLQPDQKFDEENAPVPNSLRCELLLALKAHWPFDPEFWDWKTLKRHCHQLLGQEASDSDDDLSGYEMSINDTDVLESFLSDYDEGKEDKQYRRRDLTDQHKEKRDKKPIGSSERYQRWLQYKFFCLLCKRECIEARILHHSKMHMEDGIYTCPVCIKKFKRKEMFVPHVMEHVKMPPSRRDRSKKKLLLKGSQKGICPKSPSAIPEQNHSLNDQAKGESHEYVTFSKLEDCHLQDRDLYPCPGTDCSRVFKQFKYLSVHLKAEHQNNDENAKHYLDMKNRREKCTYCRRHFMSAFHLREHEQVHCGPQPYMCVSIDCYARFGSVNELLNHKQKHDDLRYKCELNGCNIVFSDLGQLYHHEAQHFRDASYTCNFLGCKKFYYSKIEYQNHLSMHNVENSNGDIKKSVKLEESATGEKQDCINQPHLLNQTDKSHLPEDLFCAESANSQIDTETAENLKENSDSNSSDQLSHSSSASMNEELIDTLDHSETMQDVLLSNEKVFGPSSLKEKCSSMAVCFDGTKFTCGFDGCGSTYKNARGMQKHLRKVHPYHFKPKKIKTKDLFPSLGNEHNQTTEKLDAEPKPCSDTNSDSPDEGLDHNIHIKCKREHQGYSSESSICASKRPCTEDTMLELLLRLKHLSLKNSITHGSFSGSLQGYPSSGAKSLQSVSSISDLNFQNQDENMPSQYLAQLAAKPFFCELQGCKYEFVTREALLMHYLKKHNYSKEKVLQLTMFQHRYSPFQCHICQRSFTRKTHLRIHYKNKHQIGSDRATHKLLDNEKCDHEGPCSVDRLKGDCSAELGGDPSSNSEKPHCHPKKDECSSETDLESSCEETESKTSDISSPIGSHREEQEGREGRGSRRTVAKGNLCYILNKYHKPFHCIHKTCNSSFTNLKGLIRHYRTVHQYNKEQLCLEKDKARTKRELVKCKKIFACKYKECNKRFLCSKALAKHCSDSHNLDHIEEPKVLSEAGSAARFSCNQPQCPAVFYTFNKLKHHLMEQHNIEGEIHSDYEIHCDLNGCGQIFTHRSNYSQHVYYRHKDYYDDLFRSQKVANERLLRSEKVCQTADTQGHEHQTTRRSFNAKSKKCGLIKEKKAPISFKTRAEALHMCVEHSEHTQYPCMVQGCLSVVKLESSIVRHYKRTHQMSSAYLEQQMENLVVCVKYGTKIKEEPPSEADPCIKKEENRSCESERTEHSHSPGDSSAPIQNTDCCHSSERDGGQKGCIESSSVFDADTLLYRGTLKCNHSSKTTSLEQCNIVQPPPPCKIENSIPNPNGTESGTYFTSFQLPLPRIKESETRQHSSGQENTVKNPTHVPKENFRKHSQPRSFDLKTYKPMGFESSFLKFIQESEEKEDDFDDWEPSEHLTLSNSSQSSNDLTGNVVANNMVNDSEPEVDIPHSSSDSTIHENLTAIPPLIVAETTTVPSLENLRVVLDKALTDCGELALKQLHYLRPVVVLERSKFSTPILDLFPTKKTDELCVGSS

SEQ ID NO: 12045 - protein, 98 aa, Artificial Sequence
  Synthetic polypeptide
VSKKPRLRSRVPRASGATQAWQGPRERRALMDIKAWWALSVPLGHRVRKVLGDRQAELGRRVTRAAQVFVDPRGSQARKEQRAPQASTARMGPQARLA

SEQ ID NO: 12046 - protein, 25 aa, Artificial Sequence
  Synthetic polypeptide
GPGSPGHQGLPRHGRAQGRDGPSWI

SEQ ID NO: 12047 - protein, 470 aa, Artificial Sequence
  Synthetic polypeptide
QQEAQAEVQGPQGIRGYPGMAGPKGETGPHGYKGMVGAIGATGPPGEEGPRGPPGRAGEKGDEGSPGIRGPQGITGPKGATGPPGINGKDGTPGTPGMKGSAGQAGQPGSPGHQGLAGVPGQPGTKGGPGDQGEPGPQGLPGFSGPPGKEGEPGPRGEIGPQGIMGQKGDQGERGPVGQPGPQGRQGPKGEQGPPGIPGPQGLPGVKGDKGSPGKTGPRGKVGDPGVAGLPGEKGEKGESGEPGPKGQQGVRGEPGYPGPSGDAGAPGVQGYPGPPGPRGLAGNRGVPGQPGRQGVEGRDATDQHIVDVALKMLQEQLAEVAVSAKREALGAVGMMGPPGPPGPPGYPGKQGPHGHPGPRGVPGIVGAVGQIGNTGPKGKRGEKGDPGEVGRGHPGMPGPPGIPGLPGRPGQAINGKDGDRGSPGAPGEAGRPGLPGPVGLPGFCEPAACLGASAYASARLTEPGSIKGP

SEQ ID NO: 12048 - protein, 19 aa, Artificial Sequence
  Synthetic polypeptide
VSKKPRLRSRVPRASGATQ

SEQ ID NO: 12049 - protein, 11 aa, Artificial Sequence
  Synthetic polypeptide
GPGSPGHQGLP

SEQ ID NO: 12050 - protein, 18 aa, Artificial Sequence
  Synthetic polypeptide
QQEAQAEVQGPQGIRGYP

SEQ ID NO: 12051 - protein, 58 aa, Artificial Sequence
  Synthetic polypeptide
DQKEKDDKWKRGSEPVPEKKLEPVVFEKVKMPQKKEDPQLPRKSSPKSTAPVMDLLGL

SEQ ID NO: 12052 - protein, 28 aa, Artificial Sequence
  Synthetic polypeptide
TRKKKMTSGKEGANQFQKKNWNLLFLRR

SEQ ID NO: 12053 - protein, 5 aa, Artificial Sequence
  Synthetic polypeptide
PERKR

SEQ ID NO: 12054 - protein, 297 aa, Artificial Sequence
  Synthetic polypeptide
DQKEKDDKWKRGSEPVPEKKLEPVVFEKVKMPQKKEDPQLPRKSSPKSTAPVMDLLGLDAPVACSIANSKTSNTLEKDLDLLASVPSPSSSGSRKVVGSMPTAGSAGSVPENLNLFPEPGSKSEEIGKKQLSKDSILSLYGSQTPQMPTQAMFMAPAQMAYPTAYPSFPGVTPPNSIMGSMMPPPVGMVAQPGASGMVAPMAMPAGYMGGMQASMMGVPNGMMTTQQAGYMAGMAAMPQTVYGVQPAQQLQWNLTQMTQQMAGMNFYGANGMMNYGQSMSGGNGQAANQTLSPQMWK

SEQ ID NO: 12055 - protein, 261 aa, Artificial Sequence
  Synthetic polypeptide
SFYILYIDSADLEPITSQEEPVRYHEAWQKLCSAHGVLVPGGFGVRGTEGKIQAIAWARNQKKPFLGVCLGMQLAVVEFSRNVLGWQDANSTEFDPTTSHPVVVDMPEHNPGQMGGTMRLGKRRTLFQTKNSVMRKLYGDADYLEERHRHRFEVNPVWKKCLEEQGLKFVGQDVEGERMEIVELEDHPFFVGVQYHPEFLSRPIKPSPPYFGLLLASVGRLSHYLQKGCRLSPRDTYSDRSGSSSPDSEITELKFPSINHD

SEQ ID NO: 12056 - protein, 6 aa, Artificial Sequence
  Synthetic polypeptide
HSISCT

SEQ ID NO: 12057 - protein, 31 aa, Artificial Sequence
  Synthetic polypeptide
ILYLVHRFCGLGAHHLARRARALPRSLAEAL

SEQ ID NO: 12058 - protein, 331 aa, Artificial Sequence
  Synthetic polypeptide
DLISTKNLKRKPRTLLNPPPASPTTSTPEPDTSTVPQDAATIPSSAMQAPTVCIYLNKNGSTGPHLDKKKVQQLPDHFGPARASVVLQQAVQACIDCAYHQKTVFSFLKQGHGGEVISAVFDREQHTLNLPAVNSITYVLRFLEKLCHNLRSDNLFGNQPFTQTHLSLTAIEYSHSHDRYLPGETFVLGNSLARSLEPHSDSMDSASNPTNLVSTSQRHRPLLSSCGLPPSTASAVRRLCSRGSDRYLESRDASRLSGRDPSSWTVEDVMQFVREADPQLGPHADLFRKHEIDGKALLLLRSDMMMKYMGLKLGPALKLSYHIDRLKQGKF

SEQ ID NO: 12059 - protein, 62 aa, Artificial Sequence
  Synthetic polypeptide
QTWWLLPIIPTLWEAKVGGSLEQEKFETSLGNIMRPHLYKKFKKETSDFAEPTTCLTNNQHS

SEQ ID NO: 12060 - protein, 353 aa, Artificial Sequence
  Synthetic polypeptide
DLISTKNLKRKPRTLLNPPPASPTTSTPEPDTSTVPQDAATIPSSAMQAPTVCIYLNKNGSTGPHLDKKKVQQLPDHFGPARASVVLQQAVQACIDCAYHQKTVFSFLKQGHGGEVISAVFDREQHTLNLPAVNSITYVLRFLEKLCHNLRSDNLFGNQPFTQTHLSLTAIEYSHSHDRYLPGETFVLGNSLARSLEPHSDSMDSASNPTNLVSTSQRHRPLLSSCGLPPSTASAVRRLCSRGVLKGSNERRDMESFWKLNRSPGSDRYLESRDASRLSGRDPSSWTVEDVMQFVREADPQLGPHADLFRKHEIDGKALLLLRSDMMMKYMGLKLGPALKLSYHIDRLKQGKF

SEQ ID NO: 12061 - protein, 372 aa, Artificial Sequence
  Synthetic polypeptide
WSIVTSHPESVSQSLTPQQQPQYNLPERDKQLLFSEYNFEDLSASFRSLYKSVFEQSLSQQGLMNIPSESSQQSHTSCTYQHSPSSTVSTHPHSNQSSLSNSHGSGLNTTGSNSVAQVSLSHPQMHTQPSPHPPHRPHGLPQHPQRSPHPAPHPQQHSQLQSPHPQHPSPHQHIQHHPNHQHQTLTHQAPPPPQQVSCNSGVSNDWYATLDMLKESCRIASSVNWSDVDLSQFQGLMESMRQADLKNWSLDQVQFADLCSSLNQFFTQTGLIHSQSNVQQNVCHGAMHPTKPSQHIGTGNLYIDSRQNLPPSVMPPPGYPHIPQALSTPGTTMAGHHRAMNQQHMMPSQAFQMRRSLPPDDIQDDFDWDSIV

SEQ ID NO: 12062 - protein, 8 aa, Artificial Sequence
  Synthetic polypeptide
MPEDNGAL

SEQ ID NO: 12063 - protein, 49 aa, Artificial Sequence
  Synthetic polypeptide
RLLFDATKCQKIMEHCDKPSRISLSIINSSAATTVQPSRKRQATTFLRI

SEQ ID NO: 12064 - protein, 166 aa, Artificial Sequence
  Synthetic polypeptide
WSIVTSHPESVSQSLTPQQQPQYNLPERDKQLLFSEYNFEDLSASFRSLYKSVFEQSLSQQGLMNIPSESSQQSHTSCTYQHSPSSTVSTHPHSNQSSLSNSHGSGLNTTGSNSVAQVSLSHPQMHTQPSPHPPHRPHGLPQHPQRSPHPAPHPQQHSQLQSPHPQ

SEQ ID NO: 12065 - protein, 25 aa, Artificial Sequence
  Synthetic polypeptide
WSIVTSHPESVSQSLTPQQQPQYNL

SEQ ID NO: 12066 - protein, 38 aa, Artificial Sequence
  Synthetic polypeptide
RLLFDATKCQKIMEHCDKPSRISLSIINSSAATTVQPS

SEQ ID NO: 12067 - protein, 26 aa, Artificial Sequence
  Synthetic polypeptide
LEFRSSRPAWATYKEEDKFARGPTGQ

SEQ ID NO: 12068 - protein, 65 aa, Artificial Sequence
  Synthetic polypeptide
FQCFGRLRQEDSLSSGVQDQPGQHTKKKTNLPGVLLGNRHQSEGRCAAYSAKEEGTICRTGLNSI

SEQ ID NO: 12069 - protein, 493 aa, Artificial Sequence
  Synthetic polypeptide
VQEFKTSLGNIQRRRQICQGSYWAIDTNPKEDVLPTRPKKRARSVERASTPYSIDSDSLGMECIISGSASPTLAINTVTNKVTLYNTDQDGSDSPRSSLNNSLSDQSLASVNLNSVGSVHSYTPVTSHPESVSQSLTPQQQPQYNLPERDKQLLFSEYNFEDLSASFRSLYKSVFEQSLSQQGLMNIPSESSQQSHTSCTYQHSPSSTVSTHPHSNQSSLSNSHGSGLNTTGSNSVAQVSLSHPQMHTQPSPHPPHRPHGLPQHPQRSPHPAPHPQQHSQLQSPHPQHPSPHQHIQHHPNHQHQTLTHQAPPPPQQVSCNSGVSNDWYATLDMLKESCRIASSVNWSDVDLSQFQGLMESMRQADLKNWSLDQVQFADLCSSLNQFFTQTGLIHSQSNVQQNVCHGAMHPTKPSQHIGTGNLYIDSRQNLPPSVMPPPGYPHIPQALSTPGTTMAGHHRAMNQQHMMPSQAFQMRRSLPPDDIQDDFDWDSIV

SEQ ID NO: 12070 - protein, 64 aa, Artificial Sequence
  Synthetic polypeptide
FQCFGRLRQEDSLSSGVQDQPGQHTKKKTNLPGVLLGNRHQSEGRCAAYSAKEEGTICRTGNIV

SEQ ID NO: 12071 - protein, 459 aa, Artificial Sequence
  Synthetic polypeptide
VQEFKTSLGNIQRRRQICQGSYWAIDTNPKEDVLPTRPKKRARSVERVTLYNTDQDGSDSPRSSLNNSLSDQSLASVNLNSVGSVHSYTPVTSHPESVSQSLTPQQQPQYNLPERDKQLLFSEYNFEDLSASFRSLYKSVFEQSLSQQGLMNIPSESSQQSHTSCTYQHSPSSTVSTHPHSNQSSLSNSHGSGLNTTGSNSVAQVSLSHPQMHTQPSPHPPHRPHGLPQHPQRSPHPAPHPQQHSQLQSPHPQHPSPHQHIQHHPNHQHQTLTHQAPPPPQQVSCNSGVSNDWYATLDMLKESCRIASSVNWSDVDLSQFQGLMESMRQADLKNWSLDQVQFADLCSSLNQFFTQTGLIHSQSNVQQNVCHGAMHPTKPSQHIGTGNLYIDSRQNLPPSVMPPPGYPHIPQALSTPGTTMAGHHRAMNQQHMMPSQAFQMRRSLPPDDIQDDFDWDSIV

SEQ ID NO: 12072 - protein, 253 aa, Artificial Sequence
  Synthetic polypeptide
VQEFKTSLGNIQRRRQICQGSYWAIDTNPKEDVLPTRPKKRARSVERVTLYNTDQDGSDSPRSSLNNSLSDQSLASVNLNSVGSVHSYTPVTSHPESVSQSLTPQQQPQYNLPERDKQLLFSEYNFEDLSASFRSLYKSVFEQSLSQQGLMNIPSESSQQSHTSCTYQHSPSSTVSTHPHSNQSSLSNSHGSGLNTTGSNSVAQVSLSHPQMHTQPSPHPPHRPHGLPQHPQRSPHPAPHPQQHSQLQSPHPQ

SEQ ID NO: 12073 - protein, 292 aa, Artificial Sequence
  Synthetic polypeptide
GLPSHVELNYNEKHHQQKVKLQKVKYRLTNEVELRDKRINQFEDEIGILQHKIEKEKAIQDQITAQNDTLLLEKRKLQEQVIEQEQLIHSNKWTISSIQSRVLYMDKENKQLQENSLRLTQQIGFLERIIRSIHIRRGENLKEFPVPKWWHRGKLASLPPTKKQKEIYSTEVFTSNNAELQHEDESVPEATEKWKHSEQMETTISDILESEVVNEILPLSNSSFSGKGLVESFASLQETEEIKSKEAMASSKSPEKSPENLVCSQNSEAGYINVASLKETHGIQEQDQKSEL

SEQ ID NO: 12074 - protein, 20 aa, Artificial Sequence
  Synthetic polypeptide
EVPFTPVMILRPPQPCGAKL

SEQ ID NO: 12075 - protein, 292 aa, Artificial Sequence; identical to SEQ ID NO: 12073
  Synthetic polypeptide

SEQ ID NO: 12076 - protein, 41 aa, Artificial Sequence
  Synthetic polypeptide
WVYQRLLLLPLPHFLLPLPCKKCFSPPTMILRPPQPCGTKL

SEQ ID NO: 12077 - protein, 162 aa, Artificial Sequence
  Synthetic polypeptide
IHENEIRQKLQTKQAAMERSEKAKQLRALRKYGKKVQTEVLQKRQQEKAHMMNAIKKYQKGFSDKLDFLEGDQKPLAQRKKAGAKGQQMRKGPSAKRRYKNQKFGFGGKKKGSKWNTRESYDDVSSFRAKTAHGRGLKRPGKKGSNKRPGKRTREKMKNRTH

SEQ ID NO: 12078 - protein, 89 aa, Artificial Sequence
  Synthetic polypeptide
PWVQHLWIQPTLDQKYWGKKFENIAKGKLNFPCAENYIESMRMRFDRSCRLNRLPWRGLKKLSNCEHLGNTGRRCKRRFFRRGSRRKPI

SEQ ID NO: 12079 - protein, 56 aa, Artificial Sequence
  Synthetic polypeptide
VHVLCRDVDEAGNHHSQQTIARTENETPHILTHRSFERYRRLMSPTPPLSSRILDA

SEQ ID NO: 12080 - protein, 119 aa, Artificial Sequence
  Synthetic polypeptide
FLKDLELEIPFDPAIPLLSIYPKDYKLCCYKDTCTRMFIVALFTIAKTWNQPKSMIDWIKKMWRIYTMEYYAAIKKDEFMSFVGTWMKLETIILSKLSQGQKTKHRIFSLIDPSRDIGV

SEQ ID NO: 12081 - protein, 38 aa, Artificial Sequence
  Synthetic polypeptide
GRVRWLTPVIPALWEAEETEACPVALTSRPAPGPRPVP

SEQ ID NO: 12082 - protein, 121 aa, Artificial Sequence
  Synthetic polypeptide
SQHFGRPRRLRHALWPSLPDLHRVLGQYLRDTAALSPPKATVSDTCEEVEPSLLEILPKSSERTPLPLCSSQAQMDYRRLQPSCLGTMPLSVCPPMAESGSCCTTHIANHSYLPLSYWQQP

SEQ ID NO: 12083 - protein, 18 aa, Artificial Sequence
  Synthetic polypeptide
PGAVAHACNPSTLGGRGD

SEQ ID NO: 12084 - protein, 24 aa, Artificial Sequence
  Synthetic polypeptide
GRVRWLTPVIPALWEAEVGRSQGD

SEQ ID NO: 12085 - protein, 34 aa, Artificial Sequence
  Synthetic polypeptide
SQHFGRPRWADHKETEACPVALTSRPAPGPRPVP

SEQ ID NO: 12086 - protein, 135 aa, Artificial Sequence
  Synthetic polypeptide
PGAVAHACNPSTLGGRGGQITRRLRHALWPSLPDLHRVLGQYLRDTAALSPPKATVSDTCEEVEPSLLEILPKSSERTPLPLCSSQAQMDYRRLQPSCLGTMPLSVCPPMAESGSCCTTHIANHSYLPLSYWQQP

SEQ ID NO: 12087 - protein, 1696 aa, Artificial Sequence
  Synthetic polypeptide
TLGKSLNLFLPQQWGCQHLLYQEFRRLHLPGHVLLEDPDSGFFFVAAGQQPGGSHGEPSSAAWAWHSHEDRAEGIEGETLTASPQAPGSPEDSEGVPLISLPRVPQGGSQPGPSRGLSLMSSQGSVDSDHLGYDGGSSGSDSEGPNDTLGEKAPFTLRTPPGPAPPQPSLSGLPGPCLPDFWLIVRVLQDRVEVYAHARSLIREDGGPGTECRHLQQLLVRRVGEICREVNQRLLLQDLHDSHVCNSLLVAESEEDLWRSETPFHSRQRAPLPSDDYAADESCAPRGYLAATMQFVPGHFSCDVVWGTVIRVHSRLKMGPSMGVSRAIQALRSVLNAFSVVNRKNMFVYQERATKAVYYLRLLETSCSDRPWKGDALPPSLALSRSQEPIYSEEASGPRSPLDMVSSRSSDAARPVGQVDRHIQLLVHGVGQAGPEITDELVRVLCRRLDEATLDVITVMLVRNCKLTPADVEFIQPPGSLPSEVLHLALPTSCRPWLPALAWYLRQNLLIFLHSPKYTDSNSRNHFQHPLPPQGGLPDLDIYLYNKPGGQGTGGKGVACITLAFVDEGGAPLSLALWPPSSPGPPDPLREEEFEQLTQVIRCPVVVDSSSAQNGAPRLRLDVWEKGNISIVQLEEKLRGAARQALADAIIELQLLPASLCTEDTPTGSLRNGSLETKSSAGRASTFPPAPVPGEPVTPPSKAGRRSFWDMLSKTECGDLGSPKTTDDIVLDRPEDTRGRRRHKTESVRTPGGAERAPGSDSGAQRQKRRTTQLEEGEVGTLHPVFARVAQRWMEFMVQIGCASVSRSSAHMVSRFLLPSILSEFTALVTSMAGDTSVRIFEQHLGSEPEIFGPCSPGQLGPSPRPAAERHLLLLGRNFLQWRRPTQQAAKAMQRFEPGGDGSSGRNAPRQRLLLLEVVDKKLQLLTYNWAPDLGAALGRALVRLVQWQNARAHLIFCLLSQKLGLFHHYGQLDFPVRDEKEPNPFLLPTMEVETLIRSASPPLSREQGRLSGSSRGGGPLPLDTFPFDEALRDITAARPSSVLGPVPRPPDPVTYHGQQFLEIKMAERRELERQMKMENLFVTWQQRSTPATMPISAGELETLKQSSRLVHYCATAMLFDPAAWLHGPPETSGPPDGQRRHRPESGSGSREAPTSCESLDVSPPGAREEPWLKELSLAFLQQYVQYLQSIGFVLVPLRPPSPARSTSRPRAMAILGTEGRGSFSCPKTKTDGSPKSTSSPVTTYHLQRALPGGIILMELAFQGCYFCVKQFALECSRIPMGQAVNSQLSMLFTEECDKVRDLMHVHSFSYDFHLRLVHQHVLGAHLVLRHGYHLTTFLRHFLAHHPDGPHFGRNHIYQGTLELPTPLIAAHQLYNYVADHASSYHMKPLRMARPGGPEHNEYALVSAWHSSGSYLDSEGLRHQDDFDVSLLVCHCAAPFEEQGEAERHVLRLQFFVVLTSQRELFPRLTADMRRFRKPPRLPPEPEAPGSSAGSPGEASGLILAPGPAPLFPPLAAEVGMARARLAQLVRLAGGHCRRDTLWKRLFLLEPPGPDRLRLGGRLALAELEELLEAVHAKSIGDIDPQLDCFLSMTVSWYQSLIKVLLSRFPQSCRHFQSPDLGTQYLVVLNQKFTDCFVLVFLDSHLGKTSLTVVFREPFPVQPQDSESPPAQLVSTYHHLESVINTACFTLWTRLL

SEQ ID NO: 12088 - protein, 73 aa, Artificial Sequence
  Synthetic polypeptide
IFSYLSSGDASICFTRSSAASISLAMFFLKTLTVASSLWQLANSQVGPMGSLLQRPGLGTVMRTGLKASKGRP

SEQ ID NO: 12089 - protein, 43 aa, Artificial Sequence
  Synthetic polypeptide
PTWSLLLLNLRQVTESFLTSAVGMPASALPGVPPPPSPWPCSS

SEQ ID NO: 12090 - protein, 282 aa, Artificial Sequence
  Synthetic polypeptide
GLPSHAELFSKPAPMFLDDSFRKWARIREFVPPFGIKGQDNLIKAILSVTKEYRLTPALDSLRCRRCIIVGNGGVLANKSLGSRIDDYDIVVRLNSAPVKGFEKDVGSKTTLRITYPEGAMQRPEQYERDSLFVLAGFKWQDFKWLKYIVYKERVSASDGFWKSVATRVPKEPPEIRILNPYFIQEAAFTLIGLPFNNGLMGRGNIPTLGSVAVTMALHGCDEVAVAGFGYDMSTPNAPLHYYETVRMAAIKESWTHNIQREKEFLRKLVKARVITDLSSGI

SEQ ID NO: 12091 - protein, 93 aa, Artificial Sequence
  Synthetic polypeptide
LDHGGFPPCCSHDSEWFYKHLAFPLLVLTLSCHLVKKVPAPVSPSAMIVFPEASPAMQNCSPSQHPCSWMTPFASGLESGSSCRLLGSKVKTI

SEQ ID NO: 12092 - protein, 22 aa, Artificial Sequence
  Synthetic polypeptide
LCFLRPPQPCRTVLQASTHVPG

SEQ ID NO: 12093 - protein, 62 aa, Artificial Sequence
  Synthetic polypeptide
GLPSHAELFSKPAPMFLDDSFRKWARIREFVPPFGIKGQVLDAQYPARERVSAEAGESSRHH

SEQ ID NO: 12094 - protein, 114 aa, Artificial Sequence
  Synthetic polypeptide
LDHGGFPPCCSHDSEWFYKHLAFPLLVLTLSCHLVKKVPAPVSPSAMIVFPEASPAMQNCSPSQHPCSWMTPFASGLESGSSCRLLGSKVKSWTHNIQREKEFLRKLVKARVIT

SEQ ID NO: 12095 - protein, 151 aa, Artificial Sequence
  Synthetic polypeptide
GLPSHAELFSKPAPMFLDDSFRKWARIREFVPPFGIKGQDNLIKAILSVTKEYRLTPALDSLRCRRCIIVGNGGVLANKSLGSRIDDYDIVVRVHRMASGNLWPLECPRSPLRFESSTHISSRRPPSPSLACPSTMASWAGGTSLPLAVWQ

SEQ ID NO: 12096 - protein, 184 aa, Artificial Sequence
  Synthetic polypeptide
GLPSHAELFSKPAPMFLDDSFRKWARIREFVPPFGIKGQDNLIKAILSVTKEYRLTPALDSLRCRRCIIVGNGGVLANKSLGSRIDDYDIVVRLNSAPVKGFEKDVGSKTTLRITYPEGAMQRPEQYERDSLFVLAGFKWQDFKWLKYIVYKERVSWTHNIQREKEFLRKLVKARVITDLSSGI

SEQ ID NO: 12097 - protein, 58 aa, Artificial Sequence
  Synthetic polypeptide
GLPSHAELFSKPAPMFLDDSFRKWARIREFVPPFGIKGQECIGWLLEICGHSSAQGAP

SEQ ID NO: 12098 - protein, 110 aa, Artificial Sequence
  Synthetic polypeptide
LDHGGFPPCCSHDSEWFYKHLAFPLLVLTLSCHLVKKVPAPVSPSAMIVFPEASPAMQNCSPSQHPCSWMTPFASGLESGSSCRLLGSKVKSASDGFWKSVATRVPKEPP

SEQ ID NO: 12099 - protein, 93 aa, Artificial Sequence
  Synthetic polypeptide
GLPSHAELFSKPAPMFLDDSFRKWARIREFVPPFGIKGQDNLIKAILSVTKEYRLTPALDSLRCRRCIIVGNGGVLANKSLGSRIDDYDIVVR

SEQ ID NO: 12100 - protein, 109 aa, Artificial Sequence
  Synthetic polypeptide
GLPSHAELFSKPAPMFLDDSFRKWARIREFVPPFGIKGQDNLIKAILSVTKEYRLTPALDSLRCRRCIIVGNGGVLANKSLGSRIDDYDIVVSPGRTISSERKSFCGSW

SEQ ID NO: 12101 - protein, 252 aa, Artificial Sequence
  Synthetic polypeptide
GLPSHAELFSKPAPMFLDDSFRKWARIREFVPPFGIKGQDNLIKAILSVTKEYRLTPALDSLRCRRCIIVGNGGVLANKSLGSRIDDYDIVVRLNSAPVKGFEKDVGSKTTLRITYPEGAMQRPEQYERDSLFVLAGFKWQDFKWLKYIVYKERVEAAFTLIGLPFNNGLMGRGNIPTLGSVAVTMALHGCDEVAVAGFGYDMSTPNAPLHYYETVRMAAIKESWTHNIQREKEFLRKLVKARVITDLSSGI

SEQ ID NO: 12102 - protein, 96 aa, Artificial Sequence
  Synthetic polypeptide
GLPSHAELFSKPAPMFLDDSFRKWARIREFVPPFGIKGQDNLIKAILSVTKEYRLTPALDSLRCRRCIIVGNGGVLANKSLGSRIDDYDIVVRPRL

SEQ ID NO: 12103 - protein, 42 aa, Artificial Sequence
  Synthetic polypeptide
GLPSHAELFSKPAPMFLDDSFRKWARIREFVPPFGIKGQDNL

SEQ ID NO: 12104 - protein, 61 aa, Artificial Sequence
  Synthetic polypeptide
WLMPVIPALWEAEAGGWLEARSLRSAWAIQGDPIFTKSEKKNSQRSQRSQHHQGPTERVQH

SEQ ID NO: 12105 - protein, 187 aa, Artificial Sequence
  Synthetic polypeptide
DQPGQYRETPSLQKVKKKIVSGHRDLSIIKDQLNVSNIDQVARHLRGLLEEECHTLEREILILQRCLEEEYLRPCHPSEAALEPTLAELKEQKKAMEQELQASVGPSCVSPNHRQRPLGSSTQGLRPPLPLCGVAPLQCCLPAPPLEPYLRPRGQSATHRWGRQLQCSPREGPASTPMSSAAPQAPA

SEQ ID NO: 12106 - protein, 13 aa, Artificial Sequence
  Synthetic polypeptide
SAVTEISASSRTN

SEQ ID NO: 12107 - protein, 38 aa, Artificial Sequence
  Synthetic polypeptide
DQPGQYRETPSLQKVKKKIVSGHRDLSIIKDQLNVSNI

SEQ ID NO: 12108 - protein, 170 aa, Artificial Sequence
  Synthetic polypeptide
DQPGQYRETPSLQKVKKKIVSGHRDLSIIKDQLNVSNIDQVARHLRGLLEEECHTLEREILILQRCLEEEYLRPCHPSEAALEPTLAELKEQKKAMEQELQASVGPSCVSPNHSGPWGPPHRASDPRFPSAGLHLSSAACLHLLWSPTFDLEASRLPTAGDGSFSAAPGK

SEQ ID NO: 12109 - protein, 383 aa, Artificial Sequence
  Synthetic polypeptide
RDLHLGATWKIGQHHFDSCGWDNENSAPILNMSSSSGSSGVHTSWNQGLPSIQHFPHSAEMLGSPLVSVEAPGQNVNEGGPQFSMPLPERGMSYCPQATLTPSRMIYCQRMSPPQQEMTIFSGPQLMPVGEPNIPRVARPFGGNLRMPPNGLPVSASTGIPIMSHTGNPPVPYPGLSTVPSDETLLGPTVPSTEAQAVLPSMAQMLPPQDAHDLGMPPAESQSLLVLGSQDSLVSQPDSQEGPFLPEQPGPAPQTVEKNSRPQEGTGRRGSSEARPYCCNYENCGKAYTKRSHLVSHQRKHTGERPYSCNWESCSWSFFRSDELRRHMRVHTRYRPYKCDQCSREFMRSDHLKQHQKTHRPGPSDPQANNNNGEQDSPPAAGP

SEQ ID NO: 12110 - protein, 67 aa, Artificial Sequence
  Synthetic polypeptide
VAILLLPHVGSGRLVGYQSSRGTLPPWQLSTSKLGDPEETFTWVPRGRLASTILTPVDGITRTQRPS

SEQ ID NO: 12111 - protein, 5 aa, Artificial Sequence
  Synthetic polypeptide
LLWMG

SEQ ID NO: 12112 - protein, 34 aa, Artificial Sequence
  Synthetic polypeptide
RDLHLGATWKIGQHHFDSCGWVSVLPTPTPITSG

SEQ ID NO: 12113 - protein, 364 aa, Artificial Sequence
  Synthetic polypeptide
HQDNENSAPILNMSSSSGSSGVHTSWNQGLPSIQHFPHSAEMLGSPLVSVEAPGQNVNEGGPQFSMPLPERGMSYCPQATLTPSRMIYCQRMSPPQQEMTIFSGPQLMPVGEPNIPRVARPFGGNLRMPPNGLPVSASTGIPIMSHTGNPPVPYPGLSTVPSDETLLGPTVPSTEAQAVLPSMAQMLPPQDAHDLGMPPAESQSLLVLGSQDSLVSQPDSQEGPFLPEQPGPAPQTVEKNSRPQEGTGRRGSSEARPYCCNYENCGKAYTKRSHLVSHQRKHTGERPYSCNWESCSWSFFRSDELRRHMRVHTRYRPYKCDQCSREFMRSDHLKQHQKTHRPGPSDPQANNNNGEQDSPPAAGP

SEQ ID NO: 12114 - protein, 25 aa, Artificial Sequence
  Synthetic polypeptide
LLWMGECFAHPHPNNIRITRTQRPS

SEQ ID NO: 12115 - protein, 402 aa, Artificial Sequence
  Synthetic polypeptide
SLSSILQQFQVKTILAQGFQLDPPTDLENESVLPRGPSDQDNENSAPILNMSSSSGSSGVHTSWNQGLPSIQHFPHSAEMLGSPLVSVEAPGQNVNEGGPQFSMPLPERGMSYCPQATLTPSRMIYCQRMSPPQQEMTIFSGPQLMPVGEPNIPRVARPFGGNLRMPPNGLPVSASTGIPIMSHTGNPPVPYPGLSTVPSDETLLGPTVPSTEAQAVLPSMAQMLPPQDAHDLGMPPAESQSLLVLGSQDSLVSQPDSQEGPFLPEQPGPAPQTVEKNSRPQEGTGRRGSSEARPYCCNYENCGKAYTKRSHLVSHQRKHTGERPYSCNWESCSWSFFRSDELRRHMRVHTRYRPYKCDQCSREFMRSDHLKQHQKTHRPGPSDPQANNNNGEQDSPPAAGP

SEQ ID NO: 12116 - protein, 37 aa, Artificial Sequence
  Synthetic polypeptide
RQSLHKASNSTRLLTWRMKVSCLGAPQIRITRTQRPS

SEQ ID NO: 12117 - protein, 11 aa, Artificial Sequence
  Synthetic polypeptide
KCPASGPLRSG

SEQ ID NO: 12118 - protein, 72 aa, Artificial Sequence
  Synthetic polypeptide
YLFLNAPQVPYIRLCRCLCTRSRSTSFISTMMLGLRQKLTTSLTSAAALTCVLLLSMTGMTTSSSRSVLWKT

SEQ ID NO: 12119 - protein, 56 aa, Artificial Sequence
  Synthetic polypeptide
TLWLQLPSLQVTNPEQCFLRIQSFTNISFSMPHRYLTSDCAGACVLGAGVPALSPR

SEQ ID NO: 12120 - protein, 376 aa, Artificial Sequence
  Synthetic polypeptide
YEPCGFSYPLYKSPIQSSASFASSHLLISLSQCPTGTLHQTVQVPVYSEQEYQLYLHDDAWTKAETDHLFDLSRRFDLRFVVIHDRYDHQQFKKRSVEDLKERYYHICAKLANVRAVPGTDLKIPVFDAGHERRRKEQLERLYNRTPEQVAEEEYLLQELRKIEARKKEREKRSQDLQKLITAADTTAEQRRTERKAPKKKLPQKKEAEKPAVPETAGIKFPDFKSAGVTLRSQRMKLPSSVGQKKIKALEQMLLELGVELSPTPTEELVHMFNELRSDLVLLYELKQACANCEYELQMLRHRHEALARAGVLGGPATPASGPGPASAEPAVTEPGLGPDPKDTIIDVVGAPLTPNSRKRRESASSSSSVKKAKKP

SEQ ID NO: 12121 - protein, 211 aa, Artificial Sequence
  Synthetic polypeptide
YEPCGFSYPLYKSPIQSSASFASSHLLISLSQCPTGTLHQTVQVPVYSEQEYQLYLHDDAWTKAETDHLFDLSRRFDLRFVVIHDRYDHQQFKKRSVEDLKERYYHICAKLANVRAVPGTDLKIPVFDAGHERRRKEQLERLYNRTPEQVAEEEYLLQELRKIEARKKEREKRSQDLQKLITAADTTAEQRRTERKAPKKKLPQKKEAEKP

SEQ ID NO: 12122 - protein, 146 aa, Artificial Sequence
  Synthetic polypeptide
YEPCGFSYPLYKSPIQSSASFASSHLLISLSQCPTGTLHQTVQVPVYSEQEYQLYLHDDAWTKAETDHLFDLSRRFDLRFVVIHDRYDHQQFKKRSVEDLKERYYHICAKLANVRAVPGTDLKIPVFDAGHERRRKEQLERLYNRT

SEQ ID NO: 12123 - protein, 168 aa, Artificial Sequence
  Synthetic polypeptide
YEPCGFSYPLYKSPIQSSASFASSHLLISLSQCPTGTLHQTVQVPVYSEQEYQLYLHDDAWTKAETDHLFDLSRRFDLRFVVIHDRYDHQQFKKRSVEDLKERYYHICAKLANVRAVPGTDLKIPVFDAGHERRRKEQLERLYNRTPEQVAEEEYLLQELRKIEARKK

SEQ ID NO: 12124 - protein, 297 aa, Artificial Sequence
  Synthetic polypeptide
GRVQWLMPVISALWEAEAGRSRGQEIKTILANMTFLRVRANRQTRLNARIGKMKRRKQDEGQREGSCMAEDDAVDIEHENNNRFEEYEWCGQKRIRATTLLEGGFRGSGFIMCSGKENPDSDADLDVDGDDTLEYGKPQYTEADVIPCTGEEPGEAKEREALRGAVLNGGPPSTRITPEFSKWASDEMPSTSNGESSKQEAMQKTCKNSDIEKITEDSAVTTFEALKARVRELERQLSRGDRYKCLICMDSYSMPLTSIQCWHVHCEECWLRTLGAKKLCPQCNTITAPGDLRRIYL

SEQ ID NO: 12125 - protein, 58 aa, Artificial Sequence
  Synthetic polypeptide
PGAVAHACNLSTLGGRGRQITRSRDQDHPGQHDLSASTSQPADPTECSDWENETEEAR

SEQ ID NO: 12126 - protein, 323 aa, Artificial Sequence
  Synthetic polypeptide
GRVQWLMPVISALWEAEAGRSRGQEIKTILANMTFLRVRANRQTRLNARIGKMKRRKQDEGQVCPLCNRPLAGSEQEMSRHVEHCLSKREGSCMAEDDAVDIEHENNNRFEEYEWCGQKRIRATTLLEGGFRGSGFIMCSGKENPDSDADLDVDGDDTLEYGKPQYTEADVIPCTGEEPGEAKEREALRGAVLNGGPPSTRITPEFSKWASDEMPSTSNGESSKQEAMQKTCKNSDIEKITEDSAVTTFEALKARVRELERQLSRGDRYKCLICMDSYSMPLTSIQCWHVHCEECWLRTLGAKKLCPQCNTITAPGDLRRIYL

SEQ ID NO: 12127 - protein, 129 aa, Artificial Sequence
  Synthetic polypeptide
GRVQWLMPVISALWEAEAGRSRGQEIKTILANMTFLRVRANRQTRLNARIGKMKRRKQDEGQVCPLCNRPLAGSEQEMSRHVEHCLSKREGSCMAEDDAVDIEHENNNRFEEYEWCGQKRIRATTLLEG

SEQ ID NO: 12128 - protein, 275 aa, Artificial Sequence
  Synthetic polypeptide
GRVQWLMPVISALWEAEAGRSRGQEIKTILANMTFLRVRANRQTRLNARIGKMKRRKQDEGQVCPLCNRPLAGSEQEMSRHVEHCLSKREGSCMAEDDAVDIEHENNNRFEEYEWCGQKRIRATTLLEGGFRGSGFIMCSGKENPDSDADLDVDGDDTLEYGKPQYTEADVIPCTGEEPGEAKEREALRGAVLNGGPPSTRITPEFSKWASDEMPSTSNGESSKQEAMQKTCKNSDIEKITEDSAVTTFEALKARVRELERQLSRGDRYKCLICM

SEQ ID NO: 12129 - protein, 274 aa, Artificial Sequence
  Synthetic polypeptide
GRVQWLMPVISALWEAEAGRSRGQEIKTILANMTFLRVRANRQTRLNARIGKMKRRKQDEGQREGSCMAEDDAVDIEHENNNRFEEYEWCGQKRIRATTLLEGGFRGSGFIMCSGKENPDSDADLDVDGDDTLEYGKPQYTEADVIPCTGEEPGEAKEREALRGAVLNGGPPSTRITPEFSKWASDEMPSTSNGESSKQEAMQKTCKNSDIEKITEDSAVTTFEALKARVRELERQLSRGDRYKCLICMDSYSMPLTSIQCWHVHCEECWLRTL

SEQ ID NO: 12130 - protein, 59 aa, Artificial Sequence
  Synthetic polypeptide
GRVQWLMPVISALWEAEAGRSRGQEIKTILANMTFLRVRANRQTRLNARIGKMKRRKQD

SEQ ID NO: 12131 - protein, 214 aa, Artificial Sequence
  Synthetic polypeptide
EDRLSPGVQDQPGRQTIELIKDLVGYDVRQALLKGLVALLIPSVKEISKLQAKILSDPSVLQLTPSLPMFLQQAAAAKAIGVLARNDMSIAEELLYLRVVRGLMAAMGNTDHSNSQRLASLTLECFVQMFPLVAEHVRKCMGEELYQLFLSNAEDLYMKIDSIQADILAANTVNVTKALCLHGSSYSMNTLYGSRDSAQMAYLTHFEEDVESKE

SEQ ID NO: 12132 - protein, 14 aa, Artificial Sequence
  Synthetic polypeptide
AQEFKTSLDDRPSS

SEQ ID NO: 12133 - protein, 69 aa, Artificial Sequence
  Synthetic polypeptide
LTPVIPALKEAEVGGSLEPRSSRPAWTTDHRVDQRPGRLRCAPGAAQGPRGAADTVGQGDLQTAGQDPQ

SEQ ID NO: 12134 - protein, 71 aa, Artificial Sequence
  Synthetic polypeptide
EDRLSPGVQDQPGRQTIELIKDLVGYDVRQALLKGLVALLIPSVKEISKLQAKILSAHPQPADVFAAGRGR

SEQ ID NO: 12135 - protein, 84 aa, Artificial Sequence
  Synthetic polypeptide
LTPVIPALKEAEVGGSLEPRSSRPAWTTDHRVDQRPGRLRCAPGAAQGPRGAADTVGQGDLQTAGQDPQCSPPACRCFCSRPRP

SEQ ID NO: 12136 - protein, 112 aa, Artificial Sequence
  Synthetic polypeptide
GQEIETILANKGGDLPSVEEVEVPAPPLLLQWVKTDQALLMLFSDGTVQVNFYGDHTKLILSGWEPLLVTFVARNRSACTYLASHLRQLGCSPDLRQRLRYALRLLRDRSPA

SEQ ID NO: 12137 - protein, 33 aa, Artificial Sequence
  Synthetic polypeptide
SQHFGRPRRVDYEVRRSRPSWLTRVEICPVWKR

SEQ ID NO: 12138 - protein, 33 aa, Artificial Sequence
  Synthetic polypeptide
QGWRSAQCGRGRGTCSALAAAVGQDGSGSPHAV

SEQ ID NO: 12139 - protein, 16 aa, Artificial Sequence
  Synthetic polypeptide
AEIAPLHTPAWATEWP

SEQ ID NO: 12140 - protein, 94 aa, Artificial Sequence
  Synthetic polypeptide
PGVVACSQLLWRLRQENRLNPGGRGCSEPRLRHCTLQPGQQSGRNLWPGAAAGALRGFHRGPQPGGPPDPRLPGAVGGRAAAPAPQRQALRGRG

SEQ ID NO: 12141 - protein, 175 aa, Artificial Sequence
  Synthetic polypeptide
TREAEVAVSRDCATAHSSLGNRVAVTFGLGQLQERCVAFIEAHSQEALRTRGFLELSAAALLPLLRSDKLCVDEAELVRAARSWARVGAAVLERPVAEVAAPVVKELRLALLAPAELSALEEQNRQEPLIPVEQIVEAWKCHALRRGDEARGAPCRRRRGTLPREHHRFLDLSFK

SEQ ID NO: 12142 - protein, 44 aa, Artificial Sequence
  Synthetic polypeptide
PGVVACSQLLWRLRQENRLNPGGRGCSEPRLRHCTLQPGQQSGR

SEQ ID NO: 12143 - protein, 25 aa, Artificial Sequence
  Synthetic polypeptide
TREAEVAVSRDCATAHSSLGNRVAV

SEQ ID NO: 12144 - protein, 53 aa, Artificial Sequence
  Synthetic polypeptide
HLSNIQGSVICNNAVIEKGADIKDCLIGSGQRIEAKAKRVNEVIVGNDQLMEI

SEQ ID NO: 12145 - protein, 38 aa, Artificial Sequence
  Synthetic polypeptide
CAHCLTSKQYPRQCHLQQCCDREGCRHQGLLDWKWPED

SEQ ID NO: 12146 - protein, 37 aa, Artificial Sequence
  Synthetic polypeptide
RVHVLCRDMDETGNHHSQQTIARTKNQTPHVLTHRCP

SEQ ID NO: 12147 - protein, 911 aa, Artificial Sequence
  Synthetic polypeptide
EYYTAIKNEEFMSFVGTWMKLETIILSKLSQGQKTKHHMFSLIGAPDPTAGASIDDENCWHLDEEQVKEQVKLFLSQGGYCGSGKQLNSMFAKVREMLRMRDSNGARMLTLITEQFVADPRLTLWRQQGTNMTDKCRQLWDELGALWVCIILNPHCKLEEKSCWLQQLQKWSDLDVCPLEDGNYGHELPNITNALPQSAIHSPDSLSRPRRTVFTRAIEGRELHWQDSHLQRIISSDVYTAPACQRESERLLFNSQGQPLWLEHVPTACARVDALRSHGYPKEALRLTVAIINTLRLQQQRQLEIYKHQKKELLQRGTTTITNLEGWVGHPLDPIDCLFLTLTEACRLNDDGYLEMSDMNESRPPVYQHVPVAAGSPNSSESYLSLALEVALMGLGQQRLMPEGLYAQDKVCRNEEQLLSQLQELQLDDELVQTLQKQCILLLEGGPFSGLGEVIHRESVPMHTFAKYLFSALLPHDPDLSYKLALRAMRLPVLENSASAGDTSHPHHMVSVVPSRYPRWFTLGHLESQQCELASTMLTAAKGDTLRLRTILEAIQKHIHSSSLIFKLAQDAFKIATPTDSSTDSTLLNVALELGLQVMRMTLSTLNWRRREMVRWLVTCATEVGVRALVSILQSWYTLFTPTEATSIVAATAVSHTTILRLSLDYPQREELASCARTLALQCAMKDPQSCALSALTLCEKDHIAFEAAYQIAIDAAAGGMTHSQLFTIARYMELRGYPLRAFKLASLAMSHLNLAYNQDTHPAINDVLWACALSHSLGKNELAALIPLVVKSVHCATVLSDILRRCTVTAPGLAGIPGRRSSGKLMSTDKAPLRQLLDATINAYINTTHSRLTHISPRHYGEFIEFLSKARETFLLPQDGHLQFAQFIDNLKQIYKGKKKLMLLVRERFG

SEQ ID NO: 12148 - protein, 1006 aa, Artificial Sequence
  Synthetic polypeptide
FLPLPSPASVAVLSQMLIPSFHLSGTVTELATASEPAVTYKVAISFDRCKITSVTCGCGNKDIFYCAHVVALSLYRIRKPDQVKLRLPISETLFQMNRDQLQKFIQYLITAHHTEVLPTAQKLADEILSSNSEINQVNGAPDPTAGASIDDENCWHLDEEQVKEQVKLFLSQGGYCGSGKQLNSMFAKVREMLRMRDSNGARMLTLITEQFVADPRLTLWRQQGTNMTDKCRQLWDELGALWVCIILNPHCKLEEKSCWLQQLQKWSDLDVCPLEDGNYGHELPNITNALPQSAIHSPDSLSRPRRTVFTRAIEGRELHWQDSHLQRIISSDVYTAPACQRESERLLFNSQGQPLWLEHVPTACARVDALRSHGYPKEALRLTVAIINTLRLQQQRQLEIYKHQKKELLQRGTTTITNLEGWVGHPLDPIDCLFLTLTEACRLNDDGYLEMSDMNESRPPVYQHVPVAAGSPNSSESYLSLALEVALMGLGQQRLMPEGLYAQDKVCRNEEQLLSQLQELQLDDELVQTLQKQCILLLEGGPFSGLGEVIHRESVPMHTFAKYLFSALLPHDPDLSYKLALRAMRLPVLENSASAGDTSHPHHMVSVVPSRYPRWFTLGHLESQQCELASTMLTAAKGDTLRLRTILEAIQKHIHSSSLIFKLAQDAFKIATPTDSSTDSTLLNVALELGLQVMRMTLSTLNWRRREMVRWLVTCATEVGVRALVSILQSWYTLFTPTEATSIVAATAVSHTTILRLSLDYPQREELASCARTLALQCAMKDPQSCALSALTLCEKDHIAFEAAYQIAIDAAAGGMTHSQLFTIARYMELRGYPLRAFKLASLAMSHLNLAYNQDTHPAINDVLWACALSHSLGKNELAALIPLVVKSVHCATVLSDILRRCTVTAPGLAGIPGRRSSGKLMSTDKAPLRQLLDATINAYINTTHSRLTHISPRHYGEFIEFLSKARETFLLPQDGHLQFAQFIDNLKQIYKGKKKLMLLVRERFG

SEQ ID NO: 12149 - protein, 5 aa, Artificial Sequence
  Synthetic polypeptide
SLAFI

SEQ ID NO: 12150 - protein, 28 aa, Artificial Sequence
  Synthetic polypeptide
PGSWVYVFIKDNCMHLQSISTPGTWNSC

SEQ ID NO: 12151 - protein, 33 aa, Artificial Sequence
  Synthetic polypeptide
KISQVHGCMCSSRTIACTYRVYQLREPGTVARQ

SEQ ID NO: 12152 - protein, 452 aa, Artificial Sequence
  Synthetic polypeptide
GQEFESSLDNIRKPHLYKKIKKLARFMGVCVHQGQLHALTEYINSGNLEQLLDSNLHLPWTVRVKLAYDIAVGLSYLHFKGIFHRDLTSKNCLIKRDENGYSAVVADFGLAEKIPDVSMGSEKLAVVGSPFWMAPEVLRDEPYNEKADVFSYGIILCEIIARIQADPDYLPRTEMDPKLRPSFVEIGKTLEEILSRLQEEEQERDRKLQPTARGLLEKAPGVKRLSSLDDKIPHKSPCPRRTIWLSRSQSDIFSRKPPRTVSVLDPYYRPRDGAARTPKVNPFSARQDLMGGKIKFFDLPSKSVISLVFDLDAPGPGTMPLADWQEPLAPPIRRWRSLPGSPEFLHQEACPFVGREESLSDGPPPRLSSLKYRVKEIPPFRASALPAAQAHEAMDCSILQEENGFGSRPQGTSPCPAGASEEMEVEERPAGSTPATFSTSGIGLQTQGKQDG

SEQ ID NO: 12153 - protein, 481 aa, Artificial Sequence
  Synthetic polypeptide
GQEFESSLDNIRKPHLYKKIKKLARFMGVCVHQGQLHALTEYINSGNLEQLLDSNLHLPWTVRVKLAYDIAVGLSYLHFKGIFHRDLTSKNCLIKRDENGYSAVVADFGLAEKIPDVSMGSEKLAVVGSPFWMAPEVLRDEPYNEKADVFSYGIILCEIIARIQADPDYLPRTENFGLDYDAFQHMVGDCPPDFLQLTFNCCNMDPKLRPSFVEIGKTLEEILSRLQEEEQERDRKLQPTARGLLEKAPGVKRLSSLDDKIPHKSPCPRRTIWLSRSQSDIFSRKPPRTVSVLDPYYRPRDGAARTPKVNPFSARQDLMGGKIKFFDLPSKSVISLVFDLDAPGPGTMPLADWQEPLAPPIRRWRSLPGSPEFLHQEACPFVGREESLSDGPPPRLSSLKYRVKEIPPFRASALPAAQAHEAMDCSILQEENGFGSRPQGTSPCPAGASEEMEVEERPAGSTPATFSTSGIGLQTQGKQDG

SEQ ID NO: 12154 - protein, 34 aa, Artificial Sequence
  Synthetic polypeptide
GRARWLTPVIPALWEAEAGGSRGQEIETILANTV

SEQ ID NO: 12155 - protein, 24 aa, Artificial Sequence
  Synthetic polypeptide
SQHFGRPRRADHEVRRSRPSWLTR

SEQ ID NO: 12156 - protein, 30 aa, Artificial Sequence
  Synthetic polypeptide
PGAVAHACNPSTLGGRGGRITRSGDRDHPG

SEQ ID NO: 12157 - protein, 10 aa, Artificial Sequence
  Synthetic polypeptide
SQHFGRPSLP

SEQ ID NO: 12158 - protein, 44 aa, Artificial Sequence
  Synthetic polypeptide
MGTVAHACNLSTLGGQAFLESRSWQTASAMQTYWDTFWSMGKPA

SEQ ID NO: 12159 - protein, 331 aa, Artificial Sequence
  Synthetic polypeptide
WAQWLMPVISALWEAKPSLNPEAGKQHQPCRPIGTPSGVWENPPSAKQPSKMLVIKKVSKEDPAAAFSAAFTSPGSHHANGNKLSSVVPSVYKNLVPKPVPPPSKPNAWKANRMEHKSGSLSSSRESAFTSPISVTKPVVLASGAALSSPKESPSSTTPPIEISSSRLTKLTRRTTDRKSEFLKTLKDDRNGDFSENRDCDKLEDLEDNSTPEPKENGEEGCHQNGLALPVVEEGEVLSHSLEAEHRLLKAMGWQEYPENDENCLPLTEDELKEFHMKTEQLRRNGFGKNGFLQSRSSSLFSPWRSTCKAEFEDSDTETSSSETSDDDAWK

SEQ ID NO: 12160 - protein, 19 aa, Artificial Sequence
  Synthetic polypeptide
PGLPASHRCEDPAAAGDLE

SEQ ID NO: 12161 - protein, 174 aa, Artificial Sequence
  Synthetic polypeptide
QAYLRAIDVKILQQLVTLNEGIEAVRWLLEERGTLTSHCSSLTSSQYSLTGGSPGRSRRGSWDSLPDTSTTDRLDSVSIGSFLDTVAPSELDEQGPPGAPRSEMDWAKVIAGGERARTEVDVAATRLGSLRAVWKPPGERLQGGPPESPEDESAKLGFEAHWFWEQCQDDVTFL

SEQ ID NO: 12162 - protein, 459 aa, Artificial Sequence
  Synthetic polypeptide
KAEMGGSLEGHRLKNSENQTYQALDSLNTSRRVLISGTPIQNDLLEYFSLVHFVNSGILGTAHEFKKHFELPILKGRDAAASEADRQLGEERLRELTSIVNRCLIRRTSDILSKYLPVKIEQVVCCRLTPLQTELYKRFLRQAKPAEELLEGKMSVSSLSSITSLKKLCNHPALIYDKCVEEEDGFVGALDLFPPGYSSKALEPQLSGKMLVLDYILAVTRSRSSDKVVLVSNYTQTLDLFEKLCRARRYLYVRLDGTMSIKKRAKVVERFNSPSSPDFVFMLSSKAGGCGLNLIGANRLVMFDPDWNPANDEQAMARVWRDGQKKTCYIYRLLSAGTIEEKIFQRQSHKKALSSCVVDEEQDVERHFSLGELKELFILDEASLSDTHDRLHCRRCVNSRQIRPPPDGSDCTSDLAGWNHCTDKWGLRDEVLQAAWDAASTAITFVFHQRSHEEQRGLR

SEQ ID NO: 12163 - protein, 31 aa, Artificial Sequence
  Synthetic polypeptide
SQDFERLRWADHLRDTGSRTLRIRLTKPWTA

SEQ ID NO: 12164 - protein, 30 aa, Artificial Sequence
  Synthetic polypeptide
GRAWWLTPIIPPLWEAEASGSLEMPDTEDF

SEQ ID NO: 12165 - protein, 371 aa, Artificial Sequence
  Synthetic polypeptide
SHHFGKLRRVDHLRCLIRRTSDILSKYLPVKIEQVVCCRLTPLQTELYKRFLRQAKPAEELLEGKMSVSSLSSITSLKKLCNHPALIYDKCVEEEDGFVGALDLFPPGYSSKALEPQLSGKMLVLDYILAVTRSRSSDKVVLVSNYTQTLDLFEKLCRARRYLYVRLDGTMSIKKRAKVVERFNSPSSPDFVFMLSSKAGGCGLNLIGANRLVMFDPDWNPANDEQAMARVWRDGQKKTCYIYRLLSAGTIEEKIFQRQSHKKALSSCVVDEEQDVERHFSLGELKELFILDEASLSDTHDRLHCRRCVNSRQIRPPPDGSDCTSDLAGWNHCTDKWGLRDEVLQAAWDAASTAITFVFHQRSHEEQRGLR

SEQ ID NO: 12166 - protein, 334 aa, Artificial Sequence
  Synthetic polypeptide
SHHFGKLRRVDHLRCLIRRTSDILSKYLPVKIEQVVCCRLTPLQTELYKRFLRQAKPAEELLEGKMSVSSLSSITSLKKLCNRKMLVLDYILAVTRSRSSDKVVLVSNYTQTLDLFEKLCRARRYLYVRLDGTMSIKKRAKVVERFNSPSSPDFVFMLSSKAGGCGLNLIGANRLVMFDPDWNPANDEQAMARVWRDGQKKTCYIYRLLSAGTIEEKIFQRQSHKKALSSCVVDEEQDVERHFSLGELKELFILDEASLSDTHDRLHCRRCVNSRQIRPPPDGSDCTSDLAGWNHCTDKWGLRDEVLQAAWDAASTAITFVFHQRSHEEQRGLR

SEQ ID NO: 12167 - protein, 35 aa, Artificial Sequence
  Synthetic polypeptide
SLNPELMKQANSRECDMLASQVYGGLFFPCSTWDH

SEQ ID NO: 12168 - protein, 699 aa, Artificial Sequence
  Synthetic polypeptide
NKLILESVTCWRAKFMEAFFSHVLRGTIDVSSDRRLCDQRFSPLLHSSRHVRQLTICNMLQGATELVAEPNRRVLETLASSLHTLKFRHLLFSDVAAQQSLRQLLHQLIHHGAVSQVSLYSWPVPESALFILILTMSAGFWQPGPGGPPCRLCGEASRGRAPSRDEGSLLLGSRRPRRDAAERCAAALMASRRKSEAKQMPRAAPATRVTRRSTQESLTAGGTDLKRELHPPATSHEAPGTKRSPSAPAATSSASSSTSSYKRAPASSAPQPKPLKRFKRAAGKKGARTRQGPGAESEDLYDFVFIVAGEKEDGEEMEIGEVACGALDGSDPSCLGLPALEASQRFRSISTLELFTVPLSTEAALTLCHLLSSWVSLESLTLSYNGLGSNIFRLLDSLRALSGQAGCRLRALHLSDLFSPLPILELTRAIVRALPLLRVLSIRVDHPSQRDNPGVPGNAGPPSHIIGDEEIPENCLEQLEMGFPRGAQPAPLLCSVLKASGSLQQLSLDSATFASPQDFGLVLQTLKEYNLALKRLSFHDMNLADCQSEVLFLLQNLTLQEITFSFCRLFEKRPAQFLPEMVAAMKGNSTLKGLRLPGNRLGNAGLLALADVFSEDSSSSLCQLDISSNCIKPDGLLEFAKRLERWGRGAFGHLRLFQNWLDQDAVTAREAIRRLRATCHVVSDSWDSSQAFADYVSTM

SEQ ID NO: 12169 - protein, 37 aa, Artificial Sequence
  Synthetic polypeptide
TPGRNWHLESGHLKLECDMLASQVYGGLFFPCSTWDH

SEQ ID NO: 12170 - protein, 695 aa, Artificial Sequence
  Synthetic polypeptide
NLSVTCWRAKFMEAFFSHVLRGTIDVSSDRRLCDQRFSPLLHSSRHVRQLTICNMLQGATELVAEPNRRVLETLASSLHTLKFRHLLFSDVAAQQSLRQLLHQLIHHGAVSQVSLYSWPVPESALFILILTMSAGFWQPGPGGPPCRLCGEASRGRAPSRDEGSLLLGSRRPRRDAAERCAAALMASRRKSEAKQMPRAAPATRVTRRSTQESLTAGGTDLKRELHPPATSHEAPGTKRSPSAPAATSSASSSTSSYKRAPASSAPQPKPLKRFKRAAGKKGARTRQGPGAESEDLYDFVFIVAGEKEDGEEMEIGEVACGALDGSDPSCLGLPALEASQRFRSISTLELFTVPLSTEAALTLCHLLSSWVSLESLTLSYNGLGSNIFRLLDSLRALSGQAGCRLRALHLSDLFSPLPILELTRAIVRALPLLRVLSIRVDHPSQRDNPGVPGNAGPPSHIIGDEEIPENCLEQLEMGFPRGAQPAPLLCSVLKASGSLQQLSLDSATFASPQDFGLVLQTLKEYNLALKRLSFHDMNLADCQSEVLFLLQNLTLQEITFSFCRLFEKRPAQFLPEMVAAMKGNSTLKGLRLPGNRLGNAGLLALADVFSEDSSSSLCQLDISSNCIKPDGLLEFAKRLERWGRGAFGHLRLFQNWLDQDAVTAREAIRRLRATCHVVSDSWDSSQAFADYVSTM

SEQ ID NO: 12171 - protein, 24 aa, Artificial Sequence
  Synthetic polypeptide
SLCDARLPQSPNSLLFDWLCRILT

SEQ ID NO: 12172 - protein, 32 aa, Artificial Sequence
  Synthetic polypeptide
TSDSKHGGASHCVTLGCHRAQIPCCSTGFAEF

SEQ ID NO: 12173 - protein, 15 aa, Artificial Sequence
  Synthetic polypeptide
RPGPKSWPHPLLVPS

SEQ ID NO: 12174 - protein, 33 aa, Artificial Sequence
  Synthetic polypeptide
HRLGGLTDALGLSPGLTPYWFHLSPHPEAKALQ

SEQ ID NO: 12175 - protein, 21 aa, Artificial Sequence
  Synthetic polypeptide
VLASPLTGSILAHIQKQKHFN

SEQ ID NO: 12176 - protein, 343 aa, Artificial Sequence
  Synthetic polypeptide
VLASPLTGSILAHIQKQKHFNEREASRVVRDVAAALDFLHTKDKVSLCHLGWSAMAPSGLTAAPTSLGSSDPPTSASQVAGTTGIAHRDLKPENILCESPEKVSPVKICDFDLGSGMKLNNSCTPITTPELTTPCGSAEYMAPEVVEVFTDQATFYDKRCDLWSLGVVLYIMLSGYPPFVGHCGADCGWDRGEVCRVCQNKLFESIQEGKYEFPDKDWAHISSEAKDLISKLLVRDAKQRLSAAQVLQHPWVQGQAPEKGLPTPQVLQRNSSTMDLTLFAAEAIALNRQLSQHEENELAEEPEALADGLCSMKLSPPCKSRLARRRALAQAGRGEDRSPPTAL

SEQ ID NO: 12177 - protein, 302 aa, Artificial Sequence
  Synthetic polypeptide
VLASPLTGSILAHIQKQKHFNEREASRVVRDVAAALDFLHTKGIAHRDLKPENILCESPEKVSPVKICDFDLGSGMKLNNSCTPITTPELTTPCGSAEYMAPEVVEVFTDQATFYDKRCDLWSLGVVLYIMLSGYPPFVGHCGADCGWDRGEVCRVCQNKLFESIQEGKYEFPDKDWAHISSEAKDLISKLLVRDAKQRLSAAQVLQHPWVQGQAPEKGLPTPQVLQRNSSTMDLTLFAAEAIALNRQLSQHEENELAEEPEALADGLCSMKLSPPCKSRLARRRALAQAGRGEDRSPPTAL

SEQ ID NO: 12178 - protein, 225 aa, Artificial Sequence
  Synthetic polypeptide
VLASPLTGSILAHIQKQKHFNEREASRVVRDVAAALDFLHTKGIAHRDLKPENILCESPEKVSPVKICDFDLGSGMKLNNSCTPITTPELTTPCGSAEYMAPEVVEVFTDQATFYDKRCDLWSLGVVLYIMLSGYPPFVGHCGADCGWDRGEVCRVCQNKLFESIQEGKYEFPDKDWAHISSEAKDLISKLLVRDAKQRLSAAQVLQHPWVQGEQQHNGPDALRS

SEQ ID NO: 12179 - protein, 61 aa, Artificial Sequence
  Synthetic polypeptide
VLASPLTGSILAHIQKQKHFNEREASRVVRDVAAALDFLHTKGIAHRDLKPENILCESPEK

SEQ ID NO: 12180 - protein, 56 aa, Artificial Sequence
  Synthetic polypeptide
VLASPLTGSILAHIQKQKHFNEREASRVVRDVAAALDFLHTKGIAHRDLKPENILC

SEQ ID NO: 12181 - protein, 27 aa, Artificial Sequence
  Synthetic polypeptide
VLASPLTGSILAHIQKQKHFNEREASR

SEQ ID NO: 12182 - protein, 13 aa, Artificial Sequence
  Synthetic polypeptide
EFKTSLHNIMKKV

SEQ ID NO: 12183 - protein, 1200 aa, Artificial Sequence
  Synthetic polypeptide
HNEEGVTLTVDRFDPGREVPECLEITPTASLPGDFLIPCKVHTQELCSREMIVHSVDDFSSALKALQCHICSKDSLDCGKLLSLRVHITSRESLDSVEFDLHWAAVTLANNFKCTPVKPIPIIPTALARNLSSNLNISQVQGTYKYGYLTMDETRKLLLLLESDPKVYSLPLVGIWLSGITHIYSPQVWACCLRYIFNSSVQERVFSESGNFIIVLYSMTHKEPEFYECFPCDGKIPDFRFQLLTSKETLHLFKNVEPPDKNPIRCELSAESQNAETEFFSKASKNFSIKRSSQKLSSGKMPIHDHDSGVEDEDFSPRPIPSPHPVSQKISKIQPSVPELSLVLDGNFIESNPLPTPLEMVNNENPPLINHLEHLKPLQPQLYDEKHSPEVEAGEPSLRGIPNQLNQDKPALLRHCKVRQPPAYKKGNPHTRNSIKPSSHNGPSHDIFEKLQTVSAGNVQNEEYPIRPSTLNSRQSSLAPQSQPHDFVFSPHNSGRPMELQIPTPPLPSYCSTNVCRCCQHHSHIQYSPLNSWQGANTVGSIQDVQSEALQKHSLFHPSGCPALYCNAFCSSSSPIALRPQGDMGSCSPHSNIEPSPVARPPSHMDLCNPQPCTVCMHTPKTESDNGMMGLSPDAYRFLTEQDRQLRLLQAQIQRLLEAQSLMPCSPKTTAVEDTVQAGRQMELVSVEAQSSPGLHMRKGVSIAVSTGASLFWNAAGEDQEPDSQMKQDDTKISSEDMNFSVDINNEVTSLPGSASSLKAVDIPSFEESNIAVEEEFNQPLSVSNSSLVVRKEPDVPVFFPSGQLAESVSMCLQTGPTGGASNNSETSEEPKIEHVMQPLLHQPSDNQKIYQDLLGQVNHLLNSSSKETEQPSTKAVIISHECTRTQNVYHTKKKTHHSRLVDKDCVLNATLKQLRSLGVKIDSPTKVKKNAHNVDHASVLACISPEAVISGLNCMSFANVGMSGLSPNGVDLSMEANAIALKYLNENQLSQLSVTRSNQNNCDPFSLLHINTDRSTVGLSLISPNNMSFATKKYMKRYGLLQSSDNSEDEEEPPDNADSKSEYLLNQNLRSIPEQLGGQKEPSKNDHEIINCSNCESVGTNADTPVLRNITNEVLQTKAKQQLTEKPAFLVKNLKPSPAVNLRTGKAEFTQHPEKENEGDITIFPESLQPSETLKQMNSMNSVGTFLDVKRLRQLPKLF

SEQ ID NO: 12184 - protein, 1201 aa, Artificial Sequence
  Synthetic polypeptide
HNEEGVTLTVDRFDPGREVPECLEITPTASLPGDFLIPCKVHTQELCSREMIVHSVDDFSSALKALQCHICSKDSLDCGKLLSLRVHITSRESLDSVEFDLHWAAVTLANNFKCTPVKPIPIIPTALARNLSSNLNISQVQGTYKYGYLTMDETRKLLLLLESDPKVYSLPLVGIWLSGITHIYSPQVWACCLRYIFNSSVQERVFSESGNFIIVLYSMTHKEPEFYECFPCDGKIPDFRFQLLTSKETLHLFKNVEPPDKNPIRCELSAESQNAETEFFSKASKNFSIKRSSQKLSSGKMPIHDHDSGVEDEDFSPRPIPSPHPVSQKISKIQPSVPELSLVLDGNFIESNPLPTPLEMVNNENPPLINHLEHLKPLQPQLYDEKHSPEVEAGEPSLRGIPNQLNQDKPALLRHCKVRQPPAYKKGNPHTRNSIKPSSHNGPSHDIFEKLQTVSAGNVQNEEYPIRPSTLNSRQSSLAPQSQPHDFVFSPHNSGRPMELQIPTPPLPSYCSTNVCRCCQHHSHIQYSPLNSWQGANTVGSIQDVQSEALQKHSLFHPSGCPALYCNAFCSSSSPIALRPQGDMGSCSPHSNIEPSPVARPPSHMDLCNPQPCTVCMHTPKTESDNGMMGLSPDAYRFLTEQDRQLRLLQAQIQRLLEAQSLMPCSPKTTAVEDTVQAGRQMELVSVEAQSSPGLHMRKGVSIAVSTGASLFWNAAGEDQEPDSQMKQDDTKISSEDMNFSVDINNEVTSLPGSASSLKAVDIPSFEESNIAVEEEFNQPLSVSNSSSLVVRKEPDVPVFFPSGQLAESVSMCLQTGPTGGASNNSETSEEPKIEHVMQPLLHQPSDNQKIYQDLLGQVNHLLNSSSKETEQPSTKAVIISHECTRTQNVYHTKKKTHHSRLVDKDCVLNATLKQLRSLGVKIDSPTKVKKNAHNVDHASVLACISPEAVISGLNCMSFANVGMSGLSPNGVDLSMEANAIALKYLNENQLSQLSVTRSNQNNCDPFSLLHINTDRSTVGLSLISPNNMSFATKKYMKRYGLLQSSDNSEDEEEPPDNADSKSEYLLNQNLRSIPEQLGGQKEPSKNDHEIINCSNCESVGTNADTPVLRNITNEVLQTKAKQQLTEKPAFLVKNLKPSPAVNLRTGKAEFTQHPEKENEGDITIFPESLQPSETLKQMNSMNSVGTFLDVKRLRQLPKLF

SEQ ID NO: 12185 - protein, 1183 aa, Artificial Sequence
  Synthetic polypeptide
HNEEGVTLTVDRFDPGREVPECLEITPTASLPGDFLIPCKVHTQELCSREMIVHSVDDFSSALKALQCHICSKDSLDCGKLLSLRVHITSRESLDSVEFDLHWAAVTLANNFKCTPVKPIPIIPTALARNLSSNLNISQVQGTYKYGYLTMDETRKLLLLLESDPKVYSLPLVGIWLSGITHIYSPQVWACCLRYIFNSSVQERVFSESGNFIIVLYSMTHKEPEFYECFPCDGKIPDFRFQLLTSKETLHLFKNVEPPDKNPIRCELSAESQNAETEFFSKASKNFSIKRSSQKLSSGKMPIHDHDSGVEDEDFSPRPIPSPHPVSQKISKIQPSVPELSLVLDGNFIESNPLPTPLEMVNNENPPLINHLEHLKPLQPQLYDEKHSPEVEAGEPSLRGIPNQLNQDKPALLRHCKVRQPPAYKKGNPHTRNSIKPSSHNGPSHDIFEKLQTVSAGNVQNEEYPIRPSTLNSRQSSLAPQSQPHDFVFSPHNSGRPMELQIPTPPLPSYCSTNVCRCCQHHSHIQYSPLNSWQGANTVGSIQDVQSEALQKHSLFHPSGCPALYCNAFCSSSSPIALRPQGDMGSCSPHSNIEPSPVARPPSHMDLCNPQPCTVCMHTPKTESDNGMMGLSPDAYRFLTEQDRQLRLLQAQIQRLLEAQSLMPCSPKTTAVEDTVQAGRQMELVSVEAQSSPGLHMRKGVSIAVSTGASLFWNAAGEDQEPDSQMKQDDTKISSEDMNFSVDINNEVTSLPGSASSLKAVDIPSFEESNIAVEEEFNQPLSVSNGQLAESVSMCLQTGPTGGASNNSETSEEPKIEHVMQPLLHQPSDNQKIYQDLLGQVNHLLNSSSKETEQPSTKAVIISHECTRTQNVYHTKKKTHHSRLVDKDCVLNATLKQLRSLGVKIDSPTKVKKNAHNVDHASVLACISPEAVISGLNCMSFANVGMSGLSPNGVDLSMEANAIALKYLNENQLSQLSVTRSNQNNCDPFSLLHINTDRSTVGLSLISPNNMSFATKKYMKRYGLLQSSDNSEDEEEPPDNADSKSEYLLNQNLRSIPEQLGGQKEPSKNDHEIINCSNCESVGTNADTPVLRNITNEVLQTKAKQQLTEKPAFLVKNLKPSPAVNLRTGKAEFTQHPEKENEGDITIFPESLQPSETLKQMNSMNSVGTFLDVKRLRQLPKLF

SEQ ID NO: 12186 - protein, 831 aa, Artificial Sequence
  Synthetic polypeptide
HNEEGVTLTVDRFDPGREVPECLEITPTASLPGDFLIPCKVHTQELCSREMIVHSVDDFSSALKALQCHICSKDSLDCALARNLSSNLNISQVQGTYKYGYLTMDETRKLLLLLESDPKVYSLPLVGIWLSGITHIYSPQVWACCLRYIFNSSVQERVFSESGNFIIVLYSMTHKEPEFYECFPCDGKIPDFRFQLLTSKETLHLFKNVEPPDKNPIRCELSAESQNAETEFFSKASKNFSIKRSSQKLSSGKMPIHDHDSGVEDEDFSPRPIPSPHPVSQKISKIQPSVPELSLVLDGNFIESNPLPTPLEMVNNENPPLINHLEHLKPLQPQLYDEKHSPEVEAGEPSLRGIPNQLNQDKPALLRHCKVRQPPAYKKGNPHTRNSIKPSSHNGPSHDIFEKLQTVSAGNVQNEEYPIRPSTLNSRQSSLAPQSQPHDFVFSPHNSGRPMELQIPTPPLPSYCSTNVCRCCQHHSHIQYSPLNSWQGANTVGSIQDVQSEALQKHSLFHPSGCPALYCNAFCSSSSPIALRPQGDMGSCSPHSNIEPSPVARPPSHMDLCNPQPCTVCMHTPKTESDNGMMGLSPDAYRFLTEQDRQLRLLQAQIQRLLEAQSLMPCSPKTTAVEDTVQAGRQMELVSVEAQSSPGLHMRKGVSIAVSTGASLFWNAAGEDQEPDSQMKQDDTKISSEDMNFSVDINNEVTSLPGSASSLKAVDIPSFEESNIAVEEEFNQPLSVSNGQLAESVSMCLQTGPTGGASNNSETSEEPKIEHVMQPLLHQPSDNQKIYQDLLGQVNHLLNSSSKETEQPSTKAVIISHECTRTQNVYHTKKK

SEQ ID NO: 12187 - protein, 98 aa, Artificial Sequence
  Synthetic polypeptide
QRWLGWTLDWQPEHRVQAPALHMISKCLWCSWLSSASSGSPSSKAPTVGSSSTTSRLSPVTWPHPSPLSSCWPSSARGSQSPELSGASCLAWEWGFCV

SEQ ID NO: 12188 - protein, 127 aa, Artificial Sequence
  Synthetic polypeptide
FQSVCGVPGCHQHPLDPHHPKLQQWAALRLHPGCHQLPGPTHHRSLPAGHLLQEGHRARSFLGPRVWPGSGASAYDPGVLIPSASLWGGGPEASSAEGLPLPVLCNPPLRAHCHRHCHCQPLYNSHP

SEQ ID NO: 12189 - protein, 275 aa, Artificial Sequence
  Synthetic polypeptide
EVAGLDPGLAARAPGSSSSSPHDFKVFVVFLVVISILWIPIIQSSNSGQLFDYIQAVTSYLAPPITALFLLAIFCKRVTEPGAFWGLVFGLGVGLLRMILEFSYPAPACGEVDRRPAVLKDFHYLYFAILLCGLTAIVIVIVSLCTTPIPEEQLTRLTWWTRNCPLSELEKEAHESTPEISERPAGECPAGGGAAENSSLGQEQPEAPSRSWGKLLWSWFCGLSGTPEQALSPAEKAALEQKLTSIEEEPLWRHVCNINAVLLLAINIFLWGYFA

SEQ ID NO: 12190 - protein, 58 aa, Artificial Sequence
  Synthetic polypeptide
DIVWLCVPTQISSRIVIPTCQEMDNSHLSRERGDWIMKAISPLLFHDSYQDTPWERLR

SEQ ID NO: 12191 - protein, 195 aa, Artificial Sequence
  Synthetic polypeptide
RQFPPCCFMIVIRTPHGRDFDDSLEKCEEYLSPRSCSKPRHSARTLLVHSAPSTMPKHSPSPVLNRASLRERFHSDWCSPSNCDEIHDRVKNVLKSHQAHQRHLYDERDLEKDDELELKRSLLCRDSAYDSDPEYSSCQQPRGTFHLDDGEYWSNRAASYKGKSHRPIFENSMDKMYRNLYKKACSSASHTQESF

SEQ ID NO: 12192 - protein, 179 aa, Artificial Sequence
  Synthetic polypeptide
RQFPPCCFMIVIRTPHGRDFDDSLEKCEEYLSPRSCSKPRHSARTLLVHSAPSTMPKHSPSPVLNRASLRERFHSDWCSPSNCDEIHDRDERDLEKDDELELKRSLLCRDSAYDSDPEYSSCQQPRGTFHLDDGEYWSNRAASYKGKSHRPIFENSMDKMYRNLYKKACSSASHTQESF

SEQ ID NO: 12193 - protein, 115 aa, Artificial Sequence
  Synthetic polypeptide
RQFPPCCFMIVIRTPHGRDFDDSLEKCEEYLSPRSCSKPRHSARTLLVHSAPSTMPKHSPSPVLNRASLRERFHSDWCSPSNCDEIHDRDERDLEKDDELELKRSLLCRDSAYDS

SEQ ID NO: 12194 - protein, 52 aa, Artificial Sequence
  Synthetic polypeptide
GEGLSLLMAAHKVWKSKSPMFIWLVIAMEMTLKMLQNLGWMMEKYLAWRHLP

SEQ ID NO: 12195 - protein, 16 aa, Artificial Sequence
  Synthetic polypeptide
WQPIKSGRANHRCSYG

SEQ ID NO: 12196 - protein, 374 aa, Artificial Sequence
  Synthetic polypeptide
SLEEQITDVHMVSDSDGDDFEDATEFGVDDGEVFGMASSALRKSPMMPENAENEGDALLQFTAEFSSRYGDCHPVFFIGSLEAAFQEAFYVKARDRKLLAIYLHHDESVLTNVFCSQMLCAESIVSYLSQNFITWAWDLTKDSNRARFLTMCNRHFGSVVAQTIRTQKTDQFPLFLIIMGKRSSNEVLNVIQGNTTVDELMMRLMAAMEIFTAQQQEDIKDEDEREARENVKREQDEAYRLSLEADRAKREAHEREMAEQFRLEQIRKEQEEEREAIRLSLEQALPPEPKEENAEPVSKLRIRTPSGEFLERRFLASNKLQIVFDFVASKGFPWDEYKLLSTFPRRDVTQLDPNKSLLEVKLFPQETLFLEAKE

SEQ ID NO: 12197 - protein, 382 aa, Artificial Sequence
  Synthetic polypeptide
SLEEQITDVHMVSDSDGDDFEDATEFGVDDGEVFGMASSALRKSPMMPENAENEGDALLQFTAEFSSRYGDCHPVFFIGSLEAAFQEAFYVKARDRKLLAIYLHHDESVLTNVFCSQMLCAESIVSYLSQNFITWAWDLTKDSNRARFLTMCNRHFGSVVAQTIRTQKTDQFPLFLIIMGKRSSNEVLNVIQGNTTVDELMMRLMAAMEIFTAQQQEDIKDEDEREARENVKREQDEAYRLSLEADRAKREAHEREMAEQFRLEQIRKEQEEEREAIRLSLEQALPPEPKEENAEPVSKLRIRTPSGEFLERRFLASNKLQIVFDFVASKGFPWDEYKLLSTFPRRDIPGLSRMGKHACSRSLYIHFMFFILILKTWIISCF

SEQ ID NO: 12198 - protein, 414 aa, Artificial Sequence
  Synthetic polypeptide
LTPVIPALWEAKMCLAESGLSYPCHRLTVGRRSSPAQTREQSEEQITDVHMVSDSDGDDFEDATEFGVDDGEVFGMASSALRKSPMMPENAENEGDALLQFTAEFSSRYGDCHPVFFIGSLEAAFQEAFYVKARDRKLLAIYLHHDESVLTNVFCSQMLCAESIVSYLSQNFITWAWDLTKDSNRARFLTMCNRHFGSVVAQTIRTQKTDQFPLFLIIMGKRSSNEVLNVIQGNTTVDELMMRLMAAMEIFTAQQQEDIKDEDEREARENVKREQDEAYRLSLEADRAKREAHEREMAEQFRLEQIRKEQEEEREAIRLSLEQALPPEPKEENAEPVSKLRIRTPSGEFLERRFLASNKLQIVFDFVASKGFPWDEYKLLSTFPRRDVTQLDPNKSLLEVKLFPQETLFLEAKE

SEQ ID NO: 12199 - protein, 76 aa, Artificial Sequence
  Synthetic polypeptide
SQHFGKLRCVLLNQGSLIPAIDLQWEEDLHLHRPGNSRKNKSPMFIWLVIAMEMTLKMLQNLGWMMEKYLAWRHLP

SEQ ID NO: 12200 - protein, 422 aa, Artificial Sequence
  Synthetic polypeptide
LTPVIPALWEAKMCLAESGLSYPCHRLTVGRRSSPAQTREQSEEQITDVHMVSDSDGDDFEDATEFGVDDGEVFGMASSALRKSPMMPENAENEGDALLQFTAEFSSRYGDCHPVFFIGSLEAAFQEAFYVKARDRKLLAIYLHHDESVLTNVFCSQMLCAESIVSYLSQNFITWAWDLTKDSNRARFLTMCNRHFGSVVAQTIRTQKTDQFPLFLIIMGKRSSNEVLNVIQGNTTVDELMMRLMAAMEIFTAQQQEDIKDEDEREARENVKREQDEAYRLSLEADRAKREAHEREMAEQFRLEQIRKEQEEEREAIRLSLEQALPPEPKEENAEPVSKLRIRTPSGEFLERRFLASNKLQIVFDFVASKGFPWDEYKLLSTFPRRDIPGLSRMGKHACSRSLYIHFMFFILILKTWIISCF

SEQ ID NO: 12201 - protein, 33 aa, Artificial Sequence
  Synthetic polypeptide
KTRTEEKTQVIHIGNERSAYVHYMDYKERLNRF

SEQ ID NO: 12202 - protein, 31 aa, Artificial Sequence
  Synthetic polypeptide
CEKQEQKRKHKLFILGMKEAPTYITWTIRRD

SEQ ID NO: 12203 - protein, 681 aa, Artificial Sequence
  Synthetic polypeptide
ISLLRSDRFIRDFCFCFFLIFLSLPPCKKCLSPPVMILRLPQLCGTACTGIENIDEAITLLEQNNWDLVAAINGVIPQENGILQSEYGGETIPGPAFNPASHPASAPTSSSSSAFRPVMPSRQIVERQPRMLDFRVEYRDRNVDVVLEDTCTVGEIKQILENELQIPVSKMLLKGWKTGDVEDSTVLKSLHLPKNNSLYVLTPDLPPPSSSSHAGALQESLNQNFMLIITHREVQREYNLNFSGSSTIQEVKRNVYDLTSIPVRHQLWEGWPTSATDDSMCLAESGLSYPCHRLTVGRRSSPAQTREQSEEQITDVHMVSDSDGDDFEDATEFGVDDGEVFGMASSALRKSPMMPENAENEGDALLQFTAEFSSRYGDCHPVFFIGSLEAAFQEAFYVKARDRKLLAIYLHHDESVLTNVFCSQMLCAESIVSYLSQNFITWAWDLTKDSNRARFLTMCNRHFGSVVAQTIRTQKTDQFPLFLIIMGKRSSNEVLNVIQGNTTVDELMMRLMAAMEIFTAQQQEDIKDEDEREARENVKREQDEAYRLSLEADRAKREAHEREMAEQFRLEQIRKEQEEEREAIRLSLEQALPPEPKEENAEPVSKLRIRTPSGEFLERRFLASNKLQIVFDFVASKGFPWDEYKLLSTFPRRDVTQLDPNKSLLEVKLFPQETLFLEAKE

SEQ ID NO: 12204 - protein, 29 aa, Artificial Sequence
  Synthetic polypeptide
GFPSYVELHVLALKTLTKLLHCLNKIIGT

SEQ ID NO: 12205 - protein, 23 aa, Artificial Sequence
  Synthetic polypeptide
EVPFTSCHDSEASPAMWNCMYWH

SEQ ID NO: 12206 - protein, 644 aa, Artificial Sequence
  Synthetic polypeptide
RTLKISYIWACTGIENIDEAITLLEQNNWDLVAAINGVIPQENGILQSEYGGETIPGPAFNPASHPASAPTSSSSSAFRPVMPSRQIVERQPRMLDFRVEYRDRNVDVVLEDTCTVGEIKQILENELQIPVSKMLLKGWKTGDVEDSTVLKSLHLPKNNSLYVLTPDLPPPSSSSHAGALQESLNQNFMLIITHREVQREYNLNFSGSSTIQEVKRNVYDLTSIPVRHQLWEGWPTSATDDSMCLAESGLSYPCHRLTVGRRSSPAQTREQSEEQITDVHMVSDSDGDDFEDATEFGVDDGEVFGMASSALRKSPMMPENAENEGDALLQFTAEFSSRYGDCHPVFFIGSLEAAFQEAFYVKARDRKLLAIYLHHDESVLTNVFCSQMLCAESIVSYLSQNFITWAWDLTKDSNRARFLTMCNRHFGSVVAQTIRTQKTDQFPLFLIIMGKRSSNEVLNVIQGNTTVDELMMRLMAAMEIFTAQQQEDIKDEDEREARENVKREQDEAYRLSLEADRAKREAHEREMAEQFRLEQIRKEQEEEREAIRLSLEQALPPEPKEENAEPVSKLRIRTPSGEFLERRFLASNKLQIVFDFVASKGFPWDEYKLLSTFPRRDVTQLDPNKSLLEVKLFPQETLFLEAKE

SEQ ID NO: 12207 - protein, 27 aa, Artificial Sequence
  Synthetic polypeptide
KFHIYGHVLALKTLTKLLHCLNKIIGT

SEQ ID NO: 12208 - protein, 28 aa, Artificial Sequence
  Synthetic polypeptide
RNGIRWKYGSTEDMKNTENFIYMGMYWH

SEQ ID NO: 12209 - protein, 601 aa, Artificial Sequence
  Synthetic polypeptide
DGRTPESSLHEALDQCMTALDLFLTNQFSEALSYLKPRTKESMYHSLTYATILEMQAMMTFDPQDILLAGNMMKEAQMLCQRHRRKSSVTDSFSSLVNRPTLGQFTEEEIHAEVCYAECLLQRAALTFLQGSSHGGAVRPRALHDPSHACSCPPGPGRQHLFLLQDENMVSFIKGGIKVRNSYQTYKELDSLVQSSQYCKGENHPHFEGGVKLGVGAFNLTLSMLPTRILRLLEFVGFSGNKDYGLLQLEEGASGHSFRSVLCVMLLLCYHTFLTFVLGTGNVNIEEAEKLLKPYLNRYPKGAIFLFFAGRIEVIKGNIDAAIRRFEECCEAQQHWKQFHHMCYWELMWCFTYKGQWKMSYFYADLLSKENCWSKATYIYMKAAYLSMFGKEDHKPFGDDEVELFRAVPGLKLKIAGKSLPTEKFAIRKSRRYFSSNPISLPVPALEMMYIWNGYAVIGKQPKLTDGILEIITKAEEMLEKGPENEYSVDDECLVKLLKGLCLKYLGRVQEAEENFRSISANEKKIKYDHYLIPNALLELALLLMEQDRNEEAIKLLESAKQNYKNYSMESRTHFRIQAATLQAKSSLENSSRSMVSSVSL

SEQ ID NO: 12210 - protein, 25 aa, Artificial Sequence
  Synthetic polypeptide
PSLYFLICRMGGLLRAASMRPWTSA

SEQ ID NO: 12211 - protein, 13 aa, Artificial Sequence
  Synthetic polypeptide
QASIFSSVGWEDS

SEQ ID NO: 12212 - protein, 566 aa, Artificial Sequence
  Synthetic polypeptide
DGRTPESSLHEALDQCMTALDLFLTNQFSEALSYLKPRTKESMYHSLTYATILEMQAMMTFDPQDILLAGNMMKEAQMLCQRHRRKSSVTDSFSSLVNRPTLGQFTEEEIHAEVCYAECLLQRAALTFLQDENMVSFIKGGIKVRNSYQTYKELDSLVQSSQYCKGENHPHFEGGVKLGVGAFNLTLSMLPTRILRLLEFVGFSGNKDYGLLQLEEGASGHSFRSVLCVMLLLCYHTFLTFVLGTGNVNIEEAEKLLKPYLNRYPKGAIFLFFAGRIEVIKGNIDAAIRRFEECCEAQQHWKQFHHMCYWELMWCFTYKGQWKMSYFYADLLSKENCWSKATYIYMKAAYLSMFGKEDHKPFGDDEVELFRAVPGLKLKIAGKSLPTEKFAIRKSRRYFSSNPISLPVPALEMMYIWNGYAVIGKQPKLTDGILEIITKAEEMLEKGPENEYSVDDECLVKLLKGLCLKYLGRVQEAEENFRSISANEKKIKYDHYLIPNALLELALLLMEQDRNEEAIKLLESAKQNYKNYSMESRTHFRIQAATLQAKSSLENSSRSMVSSVSL

SEQ ID NO: 12213 - protein, 415 aa, Artificial Sequence
  Synthetic polypeptide
DGRTPESSLHEALDQCMTALDLFLTNQFSEALSYLKPRTKESMYHSLTYATILEMQAMMTFDPQDILLAGNMMKEAQMLCQRHRRKSSVTDSFSSLVNRPTLGQFTEEEIHAEVCYAECLLQRAALTFLQGSSHGGAVRPRALHDPSHACSCPPGPGRQHLFLLQDENMVSFIKGGIKVRNSYQTYKELDSLVQSSQYCKGENHPHFEGGVKLGVGAFNLTLSMLPTRILRLLEFVGFSGNKDYGLLQLEEGASGHSFRSVLCVMLLLCYHTFLTFVLGTGNVNIEEAEKLLKPYLNRYPKGAIFLFFAGRIEVIKGNIDAAIRRFEECCEAQQHWKQFHHMCYWELMWCFTYKGQWKMSYFYADLLSKENCWSKATYIYMKAAYLSMFGKEDHKPFGDDEVELFRWVPHRAPTV

SEQ ID NO: 12214 - protein, 412 aa, Artificial Sequence
  Synthetic polypeptide
DGRTPESSLHEALDQCMTALDLFLTNQFSEALSYLKPRTKESMYHSLTYATILEMQAMMTFDPQDILLAGNMMKEAQMLCQRHRRKSSVTDSFSSLVNRPTLGQFTEEEIHAEVCYAECLLQRAALTFLQGSSHGGAVRPRALHDPSHACSCPPGPGRQHLFLLQDENMVSFIKGGIKVRNSYQTYKELDSLVQSSQYCKGENHPHFEGGVKLGVGAFNLTLSMLPTRILRLLEFVGFSGNKDYGLLQLEEGASGHSFRSVLCVMLLLCYHTFLTFVLGTGNVNIEEAEKLLKPYLNRYPKGAIFLFFAGRIEVIKGNIDAVSDGGPGRGWGSLGVSQTSRKSGTCDILRDRIDWGRGGGQERTNQRAGAGEALLAEQPGKTREEEAFVVPGILTGRYRTAALQWREVEGGA

SEQ ID NO: 12215 - protein, 286 aa, Artificial Sequence
  Synthetic polypeptide
DGRTPESSLHEALDQCMTALDLFLTNQFSEALSYLKPRTKESMYHSLTYATILEMQAMMTFDPQDILLAGNMMKEAQMLCQRHRRKSSVTDSFSSLVNRPTLGQFTEEEIHAEVCYAECLLQRAALTFLQDENMVSFIKGGIKVRNSYQTYKELDSLVQSSQYCKGENHPHFEGGVKLGVGAFNLTLSMLPTRILRLLEFVGFSGNKDYGLLQLEEGASGHSFRSVLCVMLLLCYHTFLTFVLGTGNVNIEEAEKLLKPYLNRYPKGAIFLFFAGRIEVIKGNIDA

SEQ ID NO: 12216 - protein, 143 aa, Artificial Sequence
  Synthetic polypeptide
DGRTPESSLHEALDQCMTALDLFLTNQFSEALSYLKPRTKESMYHSLTYATILEMQAMMTFDPQDILLAGNMMKEAQMLCQRHRRKSSVTDSFSSLVNRPTLGQFTEEEIHAEVCYAECLLQRAALTFLQGSSHGGAVRPRAL

SEQ ID NO: 12217 - protein, 129 aa, Artificial Sequence
  Synthetic polypeptide
DGRTPESSLHEALDQCMTALDLFLTNQFSEALSYLKPRTKESMYHSLTYATILEMQAMMTFDPQDILLAGNMMKEAQMLCQRHRRKSSVTDSFSSLVNRPTLGQFTEEEIHAEVCYAECLLQRAALTFL

SEQ ID NO: 12218 - protein, 27 aa, Artificial Sequence
  Synthetic polypeptide
GNGSLEAGSSRPALPTWPNSVSTKRCK

SEQ ID NO: 12219 - protein, 52 aa, Artificial Sequence
  Synthetic polypeptide
WWPMPVIPALWEAEAMDHLRPGVRDQPCQHGQTLFLLKDANETDGNERFGKS

SEQ ID NO: 12220 - protein, 406 aa, Artificial Sequence
  Synthetic polypeptide
KMQMKLMEMKDLENHNSQLNWCSSPHSILVNGATDYCSLSTSSSETANLNEHVEGQSNLESEPIHQESPARSSPELLPSGVTDENEVTTAVTEKVCSELDNNRHSKEEDPFNVDSSSLTGPVADTNLDFFQSDPFVGSDPFKDDPFGKIDPFGGDPFKGSDPFASDCFFRQSTDPFATSSTDPFSAANNSSITSVETLKHNDPFAPGGTVVAASDSATDPFASVFGNESFGGGFADFSTLSKVNNEDPFRSATSSSVSNVVITKNVFEETSVKSEDEPPALPPKIGTPTRPCPLPPGKRSINKLDSPDPFKLNDPFQPFPGNDSPKEKDPEIFCDPFTSATTTTNKEADPSNFANFSAYPSEEDMIEWAKRESEREEEQRLARLNQQEQEDLELAIALSKSEISEA

SEQ ID NO: 12221 - protein, 504 aa, Artificial Sequence
  Synthetic polypeptide
SQHFGRPRSLCDTKDCGKLSKDQFALAFHLISQKLIKGIDPPHVLTPEMIPPSDRASLQKNIIGSSPVADFSAIKELDTLNNEIVDLQREKNNVEQDLKEKEDTIKQRTSEVQDLQDEVQRENTNLQKLQAQKQQVQELLDELDEQKAQLEEQLKEVRKKCAEEAQLARSSPELLPSGVTDENEVTTAVTEKVCSELDNNRHSKEEDPFNVDSSSLTGPVADTNLDFFQSDPFVGSDPFKDDPFGKIDPFGGDPFKGSDPFASDCFFRQSTDPFATSSTDPFSAANNSSITSVETLKHNDPFAPGGTVVAASDSATDPFASVFGNESFGGGFADFSTLSKVNNEDPFRSATSSSVSNVVITKNVFEETSVKSEDEPPALPPKIGTPTRPCPLPPGKRSINKLDSPDPFKLNDPFQPFPGNDSPKEKDPEIFCDPFTSATTTTNKEADPSNFANFSAYPSEEDMIEWAKRESEREEEQRLARLNQQEQEDLELAIALSKSEISEA

SEQ ID NO: 12222 - protein, 38 aa, Artificial Sequence
  Synthetic polypeptide
MGMVAHACNPSTLGGRGHYATQRTVGSFQRISLPWLFT

SEQ ID NO: 12223 - protein, 47 aa, Artificial Sequence
  Synthetic polypeptide
WAWWLTPVIPALWEAEVIMRHKGLWEAFKGSVCLGFSLNQSEVNQGH

SEQ ID NO: 12224 - protein, 638 aa, Artificial Sequence
  Synthetic polypeptide
SQHFGRPRSLCDTKDCGKLSKDQFALAFHLISQKLIKGIDPPHVLTPEMIPPSDRASLQKNIIGSSPVADFSAIKELDTLNNEIVDLQREKNNVEQDLKEKEDTIKQRTSEVQDLQDEVQRENTNLQKLQAQKQQVQELLDELDEQKAQLEEQLKEVRKKCAEEAQLISSLKAELTSQESQISTYEEELAKAREELSRLQQETAELEESVESGKAQLEPLQQHLQDSQQEISSMQMKLMEMKDLENHNSQLNWCSSPHSILVNGATDYCSLSTSSSETANLNEHVEGQSNLESEPIHQESPARSSPELLPSGVTDENEVTTAVTEKVCSELDNNRHSKEEDPFNVDSSSLTGPVADTNLDFFQSDPFVGSDPFKDDPFGKIDPFGGDPFKGSDPFASDCFFRQSTDPFATSSTDPFSAANNSSITSVETLKHNDPFAPGGTVVAASDSATDPFASVFGNESFGGGFADFSTLSKVNNEDPFRSATSSSVSNVVITKNVFEETSVKSEDEPPALPPKIGTPTRPCPLPPGKRSINKLDSPDPFKLNDPFQPFPGNDSPKEKDPEIFCDPFTSATTTTNKEADPSNFANFSAYPSEEDMIEWAKRESEREEEQRLARLNQQEQEDLELAIALSKSEISEA

SEQ ID NO: 12225 - protein, 22 aa, Artificial Sequence
  Synthetic polypeptide
AQEFETRLGNIMLGSCTVWWKW

SEQ ID NO: 12226 - protein, 695 aa, Artificial Sequence
  Synthetic polypeptide
FQHLGGRGGGLLEPRSSRPDWATLCWALALFGGNGETGFEQNSTYSVFSISITLTDEGYEHFYEVAYTVFQYLKMLQKLGPEKRIFEEIRKIEDNEFHYQEQTDPVEYVENMCENMQLYPLQDILTGDQLLFEYKPEVIGEALNQLVPQKANLVLLSGANEGKCDLKEKWFGTQYSIEDIENSWAELWNSNFELNPDLHLPAENKYIATDFTLKAFDCPETEYPVKIVNTPQGCLWYKKDNKFKIPKAYIRFHLISPLIQKSAANVVLFDIFVNILTHNLAEPAYEADVAQLEYKLVAGEHGLIIRVKGFNHKLPLLFQLIIDYLAEFNSTPAVFTMITEQLKKTYFNILIKPETLAKDVRLLILEYARWSMIDKYQALMDGLSLESLLSFVKEFKSQLFVEGLVQGNVTSTESMDFLKYVVDKLNFKPLEQEMPVQFQVVELPSGHHLCKVKALNKGDANSEVTVYYQSGTRSLREYTLMELLVMHMEEPCFDFLRTKQTLGYHVYPTCRNTSGILGFSVTVGTQATKYNSEVVDKKIEEFLSSFEEKIENLTEEAFNTQVTALIKLKECEDTHLGEEVDRNWNEVVTQQYLFDRLAHEIEALKSFSKSDLVNWFKAHRGPGSKMLSVHVVGYGKYELEEDGTPSSEDSNSSCEVMQLTYLPTSPLLADCIIPITDIRAFTTTLNLLPYHKIVK

SEQ ID NO: 12227 - protein, 62 aa, Artificial Sequence
  Synthetic polypeptide
PGAVAHACNSSTWEAEVEDCLSPGVRDQTGQHYAGLLHCLVEMVRQDLSKILLIQCSAFLLH

SEQ ID NO: 12228 - protein, 423 aa, Artificial Sequence
  Synthetic polypeptide
FQHLGGRGGGLLEPRSSRPDWATLCWALALFGGNGETGFEQNSTYSVFSISITLTDEGYEHFYEVAYTVFQYLKMLQKLGPEKRIFEEIRKIEDNEFHYQEQTDPVEYVENMCENMQLYPLQDILTGDQLLFEYKPEVIGEALNQLVPQKANLVLLSGANEGKCDLKEKWFGTQYSIEDIENSWAELWNSNFELNPDLHLPAENKYIATDFTLKAFDCPETEYPVKIVNTPQGCLWYKKDNKFKIPKAYIRFHLISPLIQKSAANVVLFDIFVNILTHNLAEPAYEADVAQLEYKLVAGEHGLIIRVKGFNHKLPLLFQLIIDYLAEFNSTPAVFTMITEQLKKTYFNILIKPETLAKDVRLLILEYARWSMIDKYQALMDGLSLESLLSFVKEFKSQLFVEGLVQGNVTSTVLCQWAQDSET

SEQ ID NO: 12229 - protein, 1082 aa, Artificial Sequence
  Synthetic polypeptide
MRWLMPVVPALCGAKMGGLLEPRSSRPAWVTWQNPVSKKIQKLARYIKLQNGLQALLISDLSNMEGKTGNTTDDEEEEEVEEEEEDDDEDSGAEIEDDDEEGFDDEDEFDDEHDDDLDTEDNELEELEERAEARKKTTEKQSAAALCVGVGSFADPDDLPGLAHFLEHMVFMGSLKYPDENGFDAFLKKHGGSDNASTDCERTVFQFDVQRKYFKEALDRWAQFFIHPLMIRDAIDREVEAVDSEYQLARPSDANRKEMLFGSLARPGHPMGKFFWGNAETLKHEPRKNNIDTHARLREFWMRYYSSHYMTLVVQSKETLDTLEKWVTEIFSQIPNNGLPRPNFGHLTDPFDTPAFNKLYRVVPIRKIHALTITWALPPQQQHYRVKPLHYISWLVGHEGKGSILSFLRKKCWALALFGGNGETGFEQNSTYSVFSISITLTDEGYEHFYEVAYTVFQYLKMLQKLGPEKRIFEEIRKIEDNEFHYQEQTDPVEYVENMCENMQLYPLQDILTGDQLLFEYKPEVIGEALNQLVPQKANLVLLSGANEGKCDLKEKWFGTQYSIEDIENSWAELWNSNFELNPDLHLPAENKYIATDFTLKAFDCPETEYPVKIVNTPQGCLWYKKDNKFKIPKAYIRFHLISPLIQKSAANVVLFDIFVNILTHNLAEPAYEADVAQLEYKLVAGEHGLIIRVKGFNHKLPLLFQLIIDYLAEFNSTPAVFTMITEQLKKTYFNILIKPETLAKDVRLLILEYARWSMIDKYQALMDGLSLESLLSFVKEFKSQLFVEGLVQGNVTSTESMDFLKYVVDKLNFKPLEQEMPVQFQVVELPSGHHLCKVKALNKGDANSEVTVYYQSGTRSLREYTLMELLVMHMEEPCFDFLRTKQTLGYHVYPTCRNTSGILGFSVTVGTQATKYNSEVVDKKIEEFLSSFEEKIENLTEEAFNTQVTALIKLKECEDTHLGEEVDRNWNEVVTQQYLFDRLAHEIEALKSFSKSDLVNWFKAHRGPGSKMLSVHVVGYGKYELEEDGTPSSEDSNSSCEVMQLTYLPTSPLLADCIIPITDIRAFTTTLNLLPYHKIVK

SEQ ID NO: 12230 - protein, 13 aa, Artificial Sequence
  Synthetic polypeptide
PDTSNYRMACRHF

SEQ ID NO: 12231 - protein, 24 aa, Artificial Sequence
  Synthetic polypeptide
KNTKISQIHQITEWLAGTSDFRPK

SEQ ID NO: 12232 - protein, 1150 aa, Artificial Sequence
  Synthetic polypeptide
MRWLMPVVPALCGAKMGGLLEPRSSRPAWVTWQNPVSKKIQKLARYIKLQNGLQALLISDLSNMEGKTGNTTDDEEEEEVEEEEEDDDEDSGAEIEDDDEEGFDDEDEFDDEHDDDLDTEDNELEELEERAEARKKTTEKQQLQSLFLLWSKLTDRLWFKSTYSKMSSTLLVETRNLYGVVGAESRSAPVQHLAGWQAEEQQGETDTVLSAAALCVGVGSFADPDDLPGLAHFLEHMVFMGSLKYPDENGFDAFLKKHGGSDNASTDCERTVFQFDVQRKYFKEALDRWAQFFIHPLMIRDAIDREVEAVDSEYQLARPSDANRKEMLFGSLARPGHPMGKFFWGNAETLKHEPRKNNIDTHARLREFWMRYYSSHYMTLVVQSKETLDTLEKWVTEIFSQIPNNGLPRPNFGHLTDPFDTPAFNKLYRVVPIRKIHALTITWALPPQQQHYRVKPLHYISWLVGHEGKGSILSFLRKKCWALALFGGNGETGFEQNSTYSVFSISITLTDEGYEHFYEVAYTVFQYLKMLQKLGPEKRIFEEIRKIEDNEFHYQEQTDPVEYVENMCENMQLYPLQDILTGDQLLFEYKPEVIGEALNQLVPQKANLVLLSGANEGKCDLKEKWFGTQYSIEDIENSWAELWNSNFELNPDLHLPAENKYIATDFTLKAFDCPETEYPVKIVNTPQGCLWYKKDNKFKIPKAYIRFHLISPLIQKSAANVVLFDIFVNILTHNLAEPAYEADVAQLEYKLVAGEHGLIIRVKGFNHKLPLLFQLIIDYLAEFNSTPAVFTMITEQLKKTYFNILIKPETLAKDVRLLILEYARWSMIDKYQALMDGLSLESLLSFVKEFKSQLFVEGLVQGNVTSTESMDFLKYVVDKLNFKPLEQEMPVQFQVVELPSGHHLCKVKALNKGDANSEVTVYYQSGTRSLREYTLMELLVMHMEEPCFDFLRTKQTLGYHVYPTCRNTSGILGFSVTVGTQATKYNSEVVDKKIEEFLSSFEEKIENLTEEAFNTQVTALIKLKECEDTHLGEEVDRNWNEVVTQQYLFDRLAHEIEALKSFSKSDLVNWFKAHRGPGSKMLSVHVVGYGKYELEEDGTPSSEDSNSSCEVMQLTYLPTSPLLADCIIPITDIRAFTTTLNLLPYHKIVK

SEQ ID NO: 12233 - protein, 46 aa, Artificial Sequence
  Synthetic polypeptide
MRWLMPVVPALCGAKMGGLLEPRSSRPAWIHQITEWLAGTSDFRPK

SEQ ID NO: 12234 - protein, 1059 aa, Artificial Sequence
  Synthetic polypeptide
SQHFVGPRWVDCLSPGVQDQLGYIKLQNGLQALLISDLSNMEGKTGNTTDDEEEEEVEEEEEDDDEDSGAEIEDDDEEGFDDEDEFDDEHDDDLDTEDNELEELEERAEARKKTTEKQSAAALCVGVGSFADPDDLPGLAHFLEHMVFMGSLKYPDENGFDAFLKKHGGSDNASTDCERTVFQFDVQRKYFKEALDRWAQFFIHPLMIRDAIDREVEAVDSEYQLARPSDANRKEMLFGSLARPGHPMGKFFWGNAETLKHEPRKNNIDTHARLREFWMRYYSSHYMTLVVQSKETLDTLEKWVTEIFSQIPNNGLPRPNFGHLTDPFDTPAFNKLYRVVPIRKIHALTITWALPPQQQHYRVKPLHYISWLVGHEGKGSILSFLRKKCWALALFGGNGETGFEQNSTYSVFSISITLTDEGYEHFYEVAYTVFQYLKMLQKLGPEKRIFEEIRKIEDNEFHYQEQTDPVEYVENMCENMQLYPLQDILTGDQLLFEYKPEVIGEALNQLVPQKANLVLLSGANEGKCDLKEKWFGTQYSIEDIENSWAELWNSNFELNPDLHLPAENKYIATDFTLKAFDCPETEYPVKIVNTPQGCLWYKKDNKFKIPKAYIRFHLISPLIQKSAANVVLFDIFVNILTHNLAEPAYEADVAQLEYKLVAGEHGLIIRVKGFNHKLPLLFQLIIDYLAEFNSTPAVFTMITEQLKKTYFNILIKPETLAKDVRLLILEYARWSMIDKYQALMDGLSLESLLSFVKEFKSQLFVEGLVQGNVTSTESMDFLKYVVDKLNFKPLEQEMPVQFQVVELPSGHHLCKVKALNKGDANSEVTVYYQSGTRSLREYTLMELLVMHMEEPCFDFLRTKQTLGYHVYPTCRNTSGILGFSVTVGTQATKYNSEVVDKKIEEFLSSFEEKIENLTEEAFNTQVTALIKLKECEDTHLGEEVDRNWNEVVTQQYLFDRLAHEIEALKSFSKSDLVNWFKAHRGPGSKMLSVHVVGYGKYELEEDGTPSSEDSNSSCEVMQLTYLPTSPLLADCIIPITDIRAFTTTLNLLPYHKIVK

SEQ ID NO: 12235 - protein, 20 aa, Artificial Sequence
  Synthetic polypeptide
AQEFKTSLDTSNYRMACRHF

SEQ ID NO: 12236 - protein, 1127 aa, Artificial Sequence
  Synthetic polypeptide
SQHFVGPRWVDCLSPGVQDQLGYIKLQNGLQALLISDLSNMEGKTGNTTDDEEEEEVEEEEEDDDEDSGAEIEDDDEEGFDDEDEFDDEHDDDLDTEDNELEELEERAEARKKTTEKQQLQSLFLLWSKLTDRLWFKSTYSKMSSTLLVETRNLYGVVGAESRSAPVQHLAGWQAEEQQGETDTVLSAAALCVGVGSFADPDDLPGLAHFLEHMVFMGSLKYPDENGFDAFLKKHGGSDNASTDCERTVFQFDVQRKYFKEALDRWAQFFIHPLMIRDAIDREVEAVDSEYQLARPSDANRKEMLFGSLARPGHPMGKFFWGNAETLKHEPRKNNIDTHARLREFWMRYYSSHYMTLVVQSKETLDTLEKWVTEIFSQIPNNGLPRPNFGHLTDPFDTPAFNKLYRVVPIRKIHALTITWALPPQQQHYRVKPLHYISWLVGHEGKGSILSFLRKKCWALALFGGNGETGFEQNSTYSVFSISITLTDEGYEHFYEVAYTVFQYLKMLQKLGPEKRIFEEIRKIEDNEFHYQEQTDPVEYVENMCENMQLYPLQDILTGDQLLFEYKPEVIGEALNQLVPQKANLVLLSGANEGKCDLKEKWFGTQYSIEDIENSWAELWNSNFELNPDLHLPAENKYIATDFTLKAFDCPETEYPVKIVNTPQGCLWYKKDNKFKIPKAYIRFHLISPLIQKSAANVVLFDIFVNILTHNLAEPAYEADVAQLEYKLVAGEHGLIIRVKGFNHKLPLLFQLIIDYLAEFNSTPAVFTMITEQLKKTYFNILIKPETLAKDVRLLILEYARWSMIDKYQALMDGLSLESLLSFVKEFKSQLFVEGLVQGNVTSTESMDFLKYVVDKLNFKPLEQEMPVQFQVVELPSGHHLCKVKALNKGDANSEVTVYYQSGTRSLREYTLMELLVMHMEEPCFDFLRTKQTLGYHVYPTCRNTSGILGFSVTVGTQATKYNSEVVDKKIEEFLSSFEEKIENLTEEAFNTQVTALIKLKECEDTHLGEEVDRNWNEVVTQQYLFDRLAHEIEALKSFSKSDLVNWFKAHRGPGSKMLSVHVVGYGKYELEEDGTPSSEDSNSSCEVMQLTYLPTSPLLADCIIPITDIRAFTTTLNLLPYHKIVK

SEQ ID NO: 12237 - protein, 10 aa, Artificial Sequence
  Synthetic polypeptide
DQPGQQMDCP

SEQ ID NO: 12238 - protein, 17 aa, Artificial Sequence
  Synthetic polypeptide
IETSLGNKWTAPDGDYS

SEQ ID NO: 12239 - protein, 139 aa, Artificial Sequence
  Synthetic polypeptide
ESEAGGLIEPSRLRPAWATNGLPLMVIIHKSWCGACKALKPKFAESTEISELSHNFVMVNLEDEEEPKDEDFSPDGGYIPRILFLDPSGKVHPEIINENGNPSYKYFYVSAEQVVQGMKEAQERLTGDAFRKKHLEDEL

SEQ ID NO: 12240 - protein, 7 aa, Artificial Sequence
  Synthetic polypeptide
DQPSLGQ

SEQ ID NO: 12241 - protein, 43 aa, Artificial Sequence
  Synthetic polypeptide
GQEFETSLVLDSKAPKPEDIDEEDDDVPDLVENFDEASKNEAN

SEQ ID NO: 12242 - protein, 31 aa, Artificial Sequence
  Synthetic polypeptide
GQEFETSLVLDSKAPKPEDIDEEDDDVPDLV

SEQ ID NO: 12243 - protein, 30 aa, Artificial Sequence
  Synthetic polypeptide
GQEFETSLVLDSKAPKPEDIDEEDDDVPGK

SEQ ID NO: 12244 - protein, 40 aa, Artificial Sequence
  Synthetic polypeptide
AVKILRLPLICLCIQHPAQIPGTYEVLNKCLLMSFLCFLL

SEQ ID NO: 12245 - protein, 13 aa, Artificial Sequence
  Synthetic polypeptide
MFVNEFSVLPAVA

SEQ ID NO: 12246 - protein, 21 aa, Artificial Sequence
  Synthetic polypeptide
QAHCRDSFSLALKEQTVMKTT

SEQ ID NO: 12247 - protein, 190 aa, Artificial Sequence
  Synthetic polypeptide
GLFLSGPEGANSHENNIAEVRELSSKLVTEDVLKHINSLLCSREMEVSYFAAGIIAHLTSDRQLWISRDFQRRTLLQDLHATIQNWPSSSCKMTALVTYRSFKTFFPLLGNFSQPEVQLWALWAMYHVCSKNPSKYCKMLVEEEGLQLLCDIQEHSEATPKAQQIAASILDDFRMHFMNYQRPTLCQMPF

SEQ ID NO: 12248 - protein, 21 aa, Artificial Sequence
  Synthetic polypeptide
LTPVIPALWEAEAGGSRGLCT

SEQ ID NO: 12249 - protein, 110 aa, Artificial Sequence
  Synthetic polypeptide
SQHFGRPRRADHEAYVHKSVMEELKRIIDDSEITKEDDALWPPPDRVGRQELEIVIGDEHISFTTSKIGSLIDVNQSKDPEGLRVFYYLVQDLKCLVFSLIGLHFKIKPI

SEQ ID NO: 12250 - protein, 28 aa, Artificial Sequence
  Synthetic polypeptide
PGAVTHTCNPSTLGGRGGRITRLMYIKA

SEQ ID NO: 12251 - protein, 177 aa, Artificial Sequence
  Synthetic polypeptide
ERKAPNCAPRTSSSAATARAWPPCSCATATTTVVTAAMSAAVQTRPAGPASSAAAAMAAAPASRSAGSATASLTARTARTRQPSSAAVRAPGPRPRPPPAPPPPSSPAAAASACTWAGAATATATAKTNRTRPTAHWAPAVGTSSSVGMGHVSLQSSTATRSRTVQMGVMKLAAYRG

SEQ ID NO: 12252 - protein, 43 aa, Artificial Sequence
  Synthetic polypeptide
RKAKRRSQSRKEKPQIVRPARVPVRQPLVPGRRVRVRRRRRLW

SEQ ID NO: 12253 - protein, 813 aa, Artificial Sequence
  Synthetic polypeptide
EKPRGGVRVGKKSPKLCAPHEFQCGNRSCLAAVFVCDGDDDCGDGSDERGCADPACGPREFRCGGDGGGACIPERWVCDRQFDCEDRSDEAAELCGRPGPGATSAPAACATASQFACRSGECVHLGWRCDGDRDCKDKSDEADCPLGTCRGDEFQCGDGTCVLAIKHCNQEQDCPDGSDEAGCLQGLNECLHNNGGCSHICTDLKIGFECTCPAGFQLLDQKTCGDIDECKDPDACSQICVNYKGYFKCECYPGYEMDLLTKNCKAAAGKSPSLIFTNRHEVRRIDLVKRNYSRLIPMLKNVVALDVEVATNRIYWCDLSYRKIYSAYMDKASDPKEQEVLIDEQLHSPEGLAVDWVHKHIYWTDSGNKTISVATVDGGRRRTLFSRNLSEPRAIAVDPLRGFMYWSDWGDQAKIEKSGLNGVDRQTLVSDNIEWPNGITLDLLSQRLYWVDSKLHQLSSIDFSGGNRKTLISSTDFLSHPFGIAVFEDKVFWTDLENEAIFSANRLNGLEISILAENLNNPHDIVIFHELKQPRAPDACELSVQPNGGCEYLCLPAPQISSHSPKYTCACPDTMWLGPDMKRCYRAPQSTSTTTLASTMTRTVPATTRAPGTTVHRSTYQNHSTETPSLTAAVPSSVSVPRAPSISPSTLSPATSNHSQHYANEDSKMGSTVTAAVIGIIVPIVVIALLCMSGYLIWRNWKRKNTKSMNFDNPVYRKTTEEEDEDELHIGRTAQIGHVYPAAISSFDRPLWAEPCLGETREPEDPAPALKELFVLPGEPRSQLHQLPKNPLSELPVVKSKRVALSLEDDGLP

SEQ ID NO: 12254 - protein, 754 aa, Artificial Sequence
  Synthetic polypeptide
EKPRGGVRVGKKSPKLCAPHEFQCGNRSCLAAVFVCDGDDDCGDGSDERGCADPACGPREFRCGGDGGGACIPERWVCDRQFDCEDRSDEAAELCGRPGPGATSAPAACATASQFACRSGECVHLGWRCDGDRDCKDKSDEADCPLGTCRGDEFQCGDGTCVLAIKHCNQEQDCPDGSDEAGCLQGLNECLHNNGGCSHICTDLKIGFECTCPAGFQLLDQKTCGDIDECKDPDACSQICVNYKGYFKCECYPGYEMDLLTKNCKAAAGKSPSLIFTNRHEVRRIDLVKRNYSRLIPMLKNVVALDVEVATNRIYWCDLSYRKIYSAYMDKASDPKEQEVLIDEQLHSPEGLAVDWVHKHIYWTDSGNKTISVATVDGGRRRTLFSRNLSEPRAIAVDPLRGFMYWSDWGDQAKIEKSGLNGVDRQTLVSDNIEWPNGITLDLLSQRLYWVDSKLHQLSSIDFSGGNRKTLISSTDFLSHPFGIAVFEDKVFWTDLENEAIFSANRLNGLEISILAENLNNPHDIVIFHELKQPRAPDACELSVQPNGGCEYLCLPAPQISSHSPKYTCACPDTMWLGPDMKRCYRAPQSTSTTTLASTMTRTVPATTRAPGTTVHRSTYQNHSTETPSLTAAVPSSVSVPRAPSISPSTLSPATSNHSQHYANEDSKMGSTVTAAVIGIIVPIVVIALLCMSGYLIWRNWKRKNTKSMNFDNPVYRKTTEEEDEDELHIGRTAQIGHVYPARVALSLEDDGLP

SEQ ID NO: 12255 - protein, 213 aa, Artificial Sequence
  Synthetic polypeptide
ERKAPNCAPRTSSSAATARAWPPCSCATATTTVVTAAMSAAVQTRPAGPASSAAAAMAAAPASRSAGSATASLTARTARTRQPSSAAVRAPGPRPRPPPAPPPPSSPAAAASACTWAGAATATATAKTNRTRPTAHWAPAVGTSSSVGMGHVSLQSSTATRSRTVQMGVMKLAAYRSHPVRVPADFSVRVASAWTAGKCVMCRGTAGTGRMSF

SEQ ID NO: 12256 - protein, 242 aa, Artificial Sequence
  Synthetic polypeptide
EKPRGGVRVGKKSPKLCAPHEFQCGNRSCLAAVFVCDGDDDCGDGSDERGCADPACGPREFRCGGDGGGACIPERWVCDRQFDCEDRSDEAAELCGRPGPGATSAPAACATASQFACRSGECVHLGWRCDGDRDCKDKSDEADCPLGTCRGDEFQCGDGTCVLAIKHCNQEQDCPDGSDEAGCLQESPCEGPRRFQCKSGKRVDGGKVCDVQRDCRDWSDELLKVWAERVSAQQWRLLTHLH

SEQ ID NO: 12257 - protein, 918 aa, Artificial Sequence
  Synthetic polypeptide
ASGPFACRPLAWKAPSLLVRPHLTSGVTISRVLPPLAKKTCADSDFTCDNGHCIHERWKCDGEEECPDGSDESEATCTKQVCPAEKLSCGPTSHKCVPASWRCDGEKDCEGGADEAGCATLCAPHEFQCGNRSCLAAVFVCDGDDDCGDGSDERGCADPACGPREFRCGGDGGGACIPERWVCDRQFDCEDRSDEAAELCGRPGPGATSAPAACATASQFACRSGECVHLGWRCDGDRDCKDKSDEADCPLGTCRGDEFQCGDGTCVLAIKHCNQEQDCPDGSDEAGCLQGLNECLHNNGGCSHICTDLKIGFECTCPAGFQLLDQKTCGDIDECKDPDACSQICVNYKGYFKCECYPGYEMDLLTKNCKAAAGKSPSLIFTNRHEVRRIDLVKRNYSRLIPMLKNVVALDVEVATNRIYWCDLSYRKIYSAYMDKASDPKEQEVLIDEQLHSPEGLAVDWVHKHIYWTDSGNKTISVATVDGGRRRTLFSRNLSEPRAIAVDPLRGFMYWSDWGDQAKIEKSGLNGVDRQTLVSDNIEWPNGITLDLLSQRLYWVDSKLHQLSSIDFSGGNRKTLISSTDFLSHPFGIAVFEDKVFWTDLENEAIFSANRLNGLEISILAENLNNPHDIVIFHELKQPRAPDACELSVQPNGGCEYLCLPAPQISSHSPKYTCACPDTMWLGPDMKRCYRAPQSTSTTTLASTMTRTVPATTRAPGTTVHRSTYQNHSTETPSLTAAVPSSVSVPRAPSISPSTLSPATSNHSQHYANEDSKMGSTVTAAVIGIIVPIVVIALLCMSGYLIWRNWKRKNTKSMNFDNPVYRKTTEEEDEDELHIGRTAQIGHVYPAAISSFDRPLWAEPCLGETREPEDPAPALKELFVLPGEPRSQLHQLPKNPLSELPVVKSKRVALSLEDDGLP

SEQ ID NO: 12258 - protein, 43 aa, Artificial Sequence
  Synthetic polypeptide
LRPFCMQAPSLEGSISACPASPDLWSHHFQGASSPSQEDLCRQ

SEQ ID NO: 12259 - protein, 859 aa, Artificial Sequence
  Synthetic polypeptide
ASGPFACRPLAWKAPSLLVRPHLTSGVTISRVLPPLAKKTCADSDFTCDNGHCIHERWKCDGEEECPDGSDESEATCTKQVCPAEKLSCGPTSHKCVPASWRCDGEKDCEGGADEAGCATLCAPHEFQCGNRSCLAAVFVCDGDDDCGDGSDERGCADPACGPREFRCGGDGGGACIPERWVCDRQFDCEDRSDEAAELCGRPGPGATSAPAACATASQFACRSGECVHLGWRCDGDRDCKDKSDEADCPLGTCRGDEFQCGDGTCVLAIKHCNQEQDCPDGSDEAGCLQGLNECLHNNGGCSHICTDLKIGFECTCPAGFQLLDQKTCGDIDECKDPDACSQICVNYKGYFKCECYPGYEMDLLTKNCKAAAGKSPSLIFTNRHEVRRIDLVKRNYSRLIPMLKNVVALDVEVATNRIYWCDLSYRKIYSAYMDKASDPKEQEVLIDEQLHSPEGLAVDWVHKHIYWTDSGNKTISVATVDGGRRRTLFSRNLSEPRAIAVDPLRGFMYWSDWGDQAKIEKSGLNGVDRQTLVSDNIEWPNGITLDLLSQRLYWVDSKLHQLSSIDFSGGNRKTLISSTDFLSHPFGIAVFEDKVFWTDLENEAIFSANRLNGLEISILAENLNNPHDIVIFHELKQPRAPDACELSVQPNGGCEYLCLPAPQISSHSPKYTCACPDTMWLGPDMKRCYRAPQSTSTTTLASTMTRTVPATTRAPGTTVHRSTYQNHSTETPSLTAAVPSSVSVPRAPSISPSTLSPATSNHSQHYANEDSKMGSTVTAAVIGIIVPIVVIALLCMSGYLIWRNWKRKNTKSMNFDNPVYRKTTEEEDEDELHIGRTAQIGHVYPARVALSLEDDGLP

SEQ ID NO: 12260 - protein, 655 aa, Artificial Sequence
  Synthetic polypeptide
ASGPFACRPLAWKAPSLLVRPHLTSGVTISRVLPPLAKKTCADSDFTCDNGHCIHERWKCDGEEECPDGSDESEATCTKQVCPAEKLSCGPTSHKCVPASWRCDGEKDCEGGADEAGCATSLGTCRGDEFQCGDGTCVLAIKHCNQEQDCPDGSDEAGCLQGLNECLHNNGGCSHICTDLKIGFECTCPAGFQLLDQKTCGDIDECKDPDACSQICVNYKGYFKCECYPGYEMDLLTKNCKAAAGKSPSLIFTNRHEVRRIDLVKRNYSRLIPMLKNVVALDVEVATNRIYWCDLSYRKIYSAYMDKASDPKEQEVLIDEQLHSPEGLAVDWVHKHIYWTDSGNKTISVATVDGGRRRTLFSRNLSEPRAIAVDPLRGFMYWSDWGDQAKIEKSGLNGVDRQTLVSDNIEWPNGITLDLLSQRLYWVDSKLHQLSSIDFSGGNRKTLISSTDFLSHPFGIAVFEDKVFWTDLENEAIFSANRLNGLEISILAENLNNPHDIVIFHELKQPRAPDACELSVQPNGGCEYLCLPAPQISSHSPKYTCACPDTMWLGPDMKRCYRDANEDSKMGSTVTAAVIGIIVPIVVIALLCMSGYLIWRNWKRKNTKSMNFDNPVYRKTTEEEDEDELHIGRTAQIGHVYPARVALSLEDDGLP

SEQ ID NO: 12261 - protein, 347 aa, Artificial Sequence
  Synthetic polypeptide
ASGPFACRPLAWKAPSLLVRPHLTSGVTISRVLPPLAKKTCADSDFTCDNGHCIHERWKCDGEEECPDGSDESEATCTKQVCPAEKLSCGPTSHKCVPASWRCDGEKDCEGGADEAGCATLCAPHEFQCGNRSCLAAVFVCDGDDDCGDGSDERGCADPACGPREFRCGGDGGGACIPERWVCDRQFDCEDRSDEAAELCGRPGPGATSAPAACATASQFACRSGECVHLGWRCDGDRDCKDKSDEADCPLGTCRGDEFQCGDGTCVLAIKHCNQEQDCPDGSDEAGCLQESPCEGPRRFQCKSGKRVDGGKVCDVQRDCRDWSDELLKVWAERVSAQQWRLLTHLH

SEQ ID NO: 12262 - protein, 748 aa, Artificial Sequence
  Synthetic polypeptide
ASGPFACRPLAWKAPSLLVRPHLTSGVTISRVLPPLAKKTCADSDFTCDNGHCIHERWKCDGEEECPDGSDESEATCTKQVCPAEKLSCGPTSHKCVPASWRCDGEKDCEGGADEAGCATWLNECLHNNGGCSHICTDLKIGFECTCPAGFQLLDQKTCGDIDECKDPDACSQICVNYKGYFKCECYPGYEMDLLTKNCKAAAGKSPSLIFTNRHEVRRIDLVKRNYSRLIPMLKNVVALDVEVATNRIYWCDLSYRKIYSAYMDKASDPKEQEVLIDEQLHSPEGLAVDWVHKHIYWTDSGNKTISVATVDGGRRRTLFSRNLSEPRAIAVDPLRGFMYWSDWGDQAKIEKSGLNGVDRQTLVSDNIEWPNGITLDLLSQRLYWVDSKLHQLSSIDFSGGNRKTLISSTDFLSHPFGIAVFEDKVFWTDLENEAIFSANRLNGLEISILAENLNNPHDIVIFHELKQPRAPDACELSVQPNGGCEYLCLPAPQISSHSPKYTCACPDTMWLGPDMKRCYRAPQSTSTTTLASTMTRTVPATTRAPGTTVHRSTYQNHSTETPSLTAAVPSSVSVPRAPSISPSTLSPATSNHSQHYANEDSKMGSTVTAAVIGIIVPIVVIALLCMSGYLIWRNWKRKNTKSMNFDNPVYRKTTEEEDEDELHIGRTAQIGHVYPAAISSFDRPLWAEPCLGETREPEDPAPALKELFVLPGEPRSQLHQLPKNPLSELPVVKSKRVALSLEDDGLP

SEQ ID NO: 12263 - protein, 21 aa, Artificial Sequence
  Synthetic polypeptide
NNTQRPPFRLFFQMPKCIFGH

SEQ ID NO: 12264 - protein, 42 aa, Artificial Sequence
  Synthetic polypeptide
DITILSEITPRGLHSGCFFRCPNAYLGIRRSVALSSSIIYRG

SEQ ID NO: 12265 - protein, 441 aa, Artificial Sequence
  Synthetic polypeptide
DGYIPKAWISTAMNLHIDEQVHRPLDTVSGLLNLSLLYHVWLCGVFLLTTWYVSWILFKIYATEAHVFPVQPPFAEGSDECLPKVLNSNPPPIIKYLALQDLMLLSQYSPSRRQEVFSLSQPGGHPHNWTAISRECLNLLNGMTQKLILYQEAAATNGRVSSSYPVEPKKLNSPEETAFQTPKSSQMPRPSVPPLVKTSLFSSKLSTPDVVSPFGTPFGSSVMNRMAGIFDVNTCYGSPQSPQLIRRGPRLWTSASDQQMTEFSNPSPSTSISAEGKTMRQPSVIYSWIQNKREQIKNFLSKRVLIMYFFSKHPEASIQAVFSDAQMHIWALEGLSHLVAASFTEDRFGVVQTTLPAILNTLLTLQEAVDKYFKLPHASSKPPRISGSLVDTSYKTLRFAFRASLKTAIYRITTTFGEHLNAVQASAEHQKRLQQFLEFKE

SEQ ID NO: 12266 - protein, 13 aa, Artificial Sequence
  Synthetic polypeptide
KMAIFPKLGLALL

SEQ ID NO: 12267 - protein, 9 aa, Artificial Sequence
  Synthetic polypeptide
RWLYSQSLD

SEQ ID NO: 12268 - protein, 309 aa, Artificial Sequence
  Synthetic polypeptide
DGYIPKAWISTAMNLHIDEQVHRPLDTVSGLLNLSLLYHVWLCGVFLLTTWYVSWILFKIYATEAHVFPVQPPFAEGSDECLPKVLNSNPPPIIKYLALQDLMLLSQYSPSRRQEVFSLSQPGGHPHNWTAISRECLNLLNGMTQKLILYQEAAATNGRVSSSYPVEPKKLNSPEETAFQTPKSSQMPRPSVPPLVKTSLFSSKLSTPDVVSPFGTPFGSSVMNRMAGIFDVNTCYGSPQSPQLIRRGPRLWTSASDQQMTEFSNPSPSTSISAEAPRGLHSGCFFRCPNAYLGIRRSVALSSSIIYRG

SEQ ID NO: 12269 - protein, 95 aa, Artificial Sequence
  Synthetic polypeptide
TLPVLSPSASPSPSPYHVHLLFPKHDPDCPTPDHTTPDVQSPLCTPAPIPSEFHLAHLSRSNSNASSPRKPSSIPSMEVAAAFSVLPDGADVPVC

SEQ ID NO: 12270 - protein, 254 aa, Artificial Sequence
  Synthetic polypeptide
PFQSCLPVLRPHPHPTMFTCYSQNMTQIVLPLTILHLMSRVLSAPLLPSPVNSILPIFQGPTQMLPPPGSHPRSHPWKWLQPSQCYQMGLMSRYVESWRVGDTAFWRGPFGDFFYKPNQYGELLLLAAGTGLAPMVPILQSITDNENDETFVTLVGCFKTFESIYLKTFLQEQARFWNVRTFFVLSQESSSEQLPWSYQEKTHFGHLGQDLIKELVSCCRRKPFALVCGSAEFTKDIARCLLCAGLTEDSYFLF

SEQ ID NO: 12271 - protein, 38 aa, Artificial Sequence
  Synthetic polypeptide
IPSCPSFKVQLKCFLPQEAILDPIHGSGCSLLSATRWG

SEQ ID NO: 12272 - protein, 186 aa, Artificial Sequence
  Synthetic polypeptide
PFQSCLPVLRPHPHPTMFTCYSQNMTQIVLPLTILHLMSRVLSAPLLPSPVNSILPIFQGPTQMLPPPGSHPRSHPWKWLQPSQCYQMGLMSRYVESWRVGDTAFWRGPFGDFFYKPNQESSSEQLPWSYQEKTHFGHLGQDLIKELVSCCRRKPFALVCGSAEFTKDIARCLLCAGLTEDSYFLF

SEQ ID NO: 12273 - protein, 201 aa, Artificial Sequence
  Synthetic polypeptide
PFQSCLPVLRPHPHPTMFTCYSQNMTQIVLPLTILHLMSRVLSAPLLPSPVNSILPIFQGPTQMLPPPGSHPRSHPWKWLQPSQCYQMGLMSRYVESWRVGDTAFWRGPFGDFFYKPNQYGELLLLAAGTGLAPMVPILQSITDNENDETFVTLVGCFKTFESIYLKTFLQEQARFWNVRTFFVLSQLVESTNVEPMDTEG

SEQ ID NO: 12274 - protein, 3 aa, Artificial Sequence
  Synthetic polypeptide
NSV

SEQ ID NO: 12275 - protein, 38 aa, Artificial Sequence
  Synthetic polypeptide
PAPTPTLCGFGQDIETLCKAGPLAHQDQVNRRPSRESA

SEQ ID NO: 12276 - protein, 334 aa, Artificial Sequence
  Synthetic polypeptide
TGGKGPCSSNQHRPRPSVALGKTLKLCVKQALWLTKTKLIEGLPEKVLSLVDDPRNHIENQDECVLNVISHARLWQTTEEIPKRETYCPVIVDNLIQLCKSQILKHPSLARRICVQNSTFSATWNRESLLLQVRGSGGARLSTKDPLPTIASREEIEATKNHVLETFYPISPIIDLHECNIYDVKNDTGFQEGYPYPYPHTLYLLDKANLRPHRLQPDQLRAKMILFAFGSALAQARLLYGNDAKVLEQPVVVQSVGTDGRVFHFLVFQLNTTDLDCNEGVKNLAWVDSDQLLYQHFWCLPVIKKRVVVEPVGPVGFKPETFRKFLALYLHGAA

SEQ ID NO: 12277 - protein, 394 aa, Artificial Sequence
  Synthetic polypeptide
TGGKGPCSSNQHRPRPSVALGKTLKLCVKQALWLTKTKLIEGLPEKVLSLVDDPRNHIENQDECVLNVISHARLWQTTEEIPKRETYCPVIVDNLIQLCKSQILKHPSLARRICVQNSTFSATWNRESLLLQVRGSGGARLSTKDPLPTIASREEIEATKNHVLETFYPISPIIDLHECNIYDVKNDTGFQEGYPYPYPHTLYLLDKANLRPHRLQPDQLRAKMILFAFGSALAQARLLYGNDAKVLEQPVVVQSVGTDGRVFHFLVFQLNTTDLDCNEGVKNLAWVDSDQLLYQHFWCLPVIKKRVVVKNKRHSSGPKCVCKTRNGKWLLDGPQIFKVRWIPSLPTHLPPRPSRLHKNTEFAGPGKEGRRLKHKTSCYAPGTKTVPKKSPCIL

SEQ ID NO: 12278 - protein, 599 aa, Artificial Sequence
  Synthetic polypeptide
ELKGPQERDLAYSRYMGLASVFSNRTSRKSALRAGNDSAMADGEGYRNPTEVQMSQLVLPCHTNQRGELSVGQLLKWIDTTACLSAERHAGCPCVTASMDDIYFEHTISVGQVVNIKAKVNRAFNSSMEVGIQVASEDLCSEKQWNVCKALATFVARREITKVKLKQITPRTEEEKMEHSVAAERRRMRLVYADTIKDLLANCAIQGDLESRDCSRMVPAEKTRVESVELVLPPHANHQGNTFGGQIMAWMENVATIAASRLCRAHPTLKAIEMFHFRGPSQVGDRLVLKAIVNNAFKHSMEVGVCVEAYRQEAETHRRHINSAFMTFVVLDADDQPQLLPWIRPQPGDGERRYREASARKKIRLDRKYIVSCKQTEVPLSVPWDPSNQVYLSYNNVSSLKMLVAKDNWVLSSEISQVRLYTLEDDKFLSFHMEMVVHVDAAQAFLLLSDLRQRPEWDKHYRSVELVQQVDEDDAIYHVTSPALGGHTKPQDFVILASRRKPCDNGDPYVIALRSVTLPTHRETPEYRRGETLCSGFCLWREGDQLTKVSYYNQATPGVLNYVTTNVAGLSSEFYTTFKACEQFLLDNRNDLAPSLQTL

SEQ ID NO: 12279 - protein, 51 aa, Artificial Sequence
  Synthetic polypeptide
RAPKNETWHTVGTWAWPLCSPTAHPGSQPYVRGTTVPWQTARDTGTPRRCR

SEQ ID NO: 12280 - protein, 53 aa, Artificial Sequence
  Synthetic polypeptide
VHGLGLCVLQPHIPEVSLTCGERQCHGRRRGIPEPHGGADEPAGAALPHQPTW

SEQ ID NO: 12281 - protein, 612 aa, Artificial Sequence
  Synthetic polypeptide
ELKGPQERDLAYSRYMGLASVFSNRTSRKSALRAGNDSAMADGEGYRNPTEVQMSQLVLPCHTNQRGELSVGQLLKWIDTTACLSAERHAGCPCVTASMDDIYFEHTISVGQVVNIKAKVNRAFNSSMEVGIQVASEDLCSEKQWNVCKALATFVARREITKVKLKQITPRTEEEKMEHSVAAERRRMRLVYADTIKDLLANCAIQGDLESRDCSRMVPAEKTRVESVELVLPPHANHQGNTFGGQIMAWMENVATIAASRLCRAHPTLKAIEMFHFRGPSQVGDRLVLKAIVNNAFKHSMEVGVCVEAYRQEAETHRRHINSAFMTFVVLDADDQPQLLPWIRPQPGDGERRYREASARKKIRLDRKYIVSCKQTEVPLSVPWDPSNQVYLSYNNVSSLKMLVAKDNWVLSSEISQVRLYTLEDDKFLSFHMEMVVHVDAAQAFLLLSDLRQRPEWDKHYRSVELVQQVDEDDAIYHVTSPALGGHTKPQDFVILASRRKPCDNGDPYVIALRSVTLPTHRETPEYRRGETLCSGFCLWREGDQLTKCCWVRVSLTELVSASGFYSWGLESRSKGRRSDGWNGKLAGGHLSTLKAIPVAKINSRFGYLQDT

SEQ ID NO: 12282 - protein, 16 aa, Artificial Sequence
  Synthetic polypeptide
VYHGGGRVRGGLSPGG

SEQ ID NO: 12283 - protein, 301 aa, Artificial Sequence
  Synthetic polypeptide
CIMEVGVCVEAYRQEAETHRRHINSAFMTFVVLDADDQPQLLPWIRPQPGDGERRYREASARKKIRLDRKYIVSCKQTEVPLSVPWDPSNQVYLSYNNVSSLKMLVAKDNWVLSSEISQVRLYTLEDDKFLSFHMEMVVHVDAAQAFLLLSDLRQRPEWDKHYRSVELVQQVDEDDAIYHVTSPALGGHTKPQDFVILASRRKPCDNGDPYVIALRSVTLPTHRETPEYRRGETLCSGFCLWREGDQLTKVSYYNQATPGVLNYVTTNVAGLSSEFYTTFKACEQFLLDNRNDLAPSLQTL

SEQ ID NO: 12284 - protein, 27 aa, Artificial Sequence
  Synthetic polypeptide
VSWRWACAWRPIARRLRPTGATSTVPL

SEQ ID NO: 12285 - protein, 314 aa, Artificial Sequence
  Synthetic polypeptide
CIMEVGVCVEAYRQEAETHRRHINSAFMTFVVLDADDQPQLLPWIRPQPGDGERRYREASARKKIRLDRKYIVSCKQTEVPLSVPWDPSNQVYLSYNNVSSLKMLVAKDNWVLSSEISQVRLYTLEDDKFLSFHMEMVVHVDAAQAFLLLSDLRQRPEWDKHYRSVELVQQVDEDDAIYHVTSPALGGHTKPQDFVILASRRKPCDNGDPYVIALRSVTLPTHRETPEYRRGETLCSGFCLWREGDQLTKCCWVRVSLTELVSASGFYSWGLESRSKGRRSDGWNGKLAGGHLSTLKAIPVAKINSRFGYLQDT

SEQ ID NO: 12286 - protein, 22 aa, Artificial Sequence
  Synthetic polypeptide
NISYLIGLLYSLDGLTELNRGM

SEQ ID NO: 12287 - protein, 194 aa, Artificial Sequence
  Synthetic polypeptide
FRWFNRIEQRDVRKANLKEKKERNQNEALLQAIKARNIRLSEAACEDEDSASEGLGELFLDGLSTENPHGARLSLDGQGRLSWPVLFLYPEYAQSDFISAFHEDSRFIDHLMVMFGETPSWDLEQKYCPDNLEVYFEDEDRAELYRVPAKSTLLQVLQHQRYFVKALTPAFLVCVGSSPFCKNFLRGRKVYQIR

SEQ ID NO: 12288 - protein, 16 aa, Artificial Sequence
  Synthetic polypeptide
KSPQNGRQYCELNRGM

SEQ ID NO: 12289 - protein, 15 aa, Artificial Sequence
  Synthetic polypeptide
KKSEKAHRMEDNIAN

SEQ ID NO: 12290 - protein, 202 aa, Artificial Sequence
  Synthetic polypeptide
KKVKKPTEWKTILRIEQRDVRKANLKEKKERNQNEALLQAIKARNIRLSEAACEDEDSASEGLGELFLDGLSTENPHGARLSLDGQGRLSWPVLFLYPEYAQSDFISAFHEDSRFIDHLMVMFGETPSWDLEQKYCPDNLEVYFEDEDRAELYRVPAKSTLLQVLQHQRYFVKALTPAFLVCVGSSPFCKNFLRGRKVYQIR

SEQ ID NO: 12291 - protein, 662 aa, Artificial Sequence
  Synthetic polypeptide
WDYQGFLLLYPFYFLLLLPCKKCFSPPAVILRPAQPCGTDPWRLPGTYVVVLKEETHLSQSERTARRLQAQAARRGYLTKILHVFHGLLPGFLVKMSGDLLELALKLPHVDYIEEDSSVFAQSIPWNLERITPPRYRADEYQPPDGGSLVEVYLLDTSIQSDHREIEGRVMVTDFENVPEEDGTRFHRQASKCDSHGTHLAGVVSGRDAGVAKGASMRSLRVLNCQGKGTVSGTLIGLEFIRKSQLVQPVGPLVVLLPLAGGYSRVLNAACQRLARAGVVLVTAAGNFRDDACLYSPASAPEVITVGATNAQDQPVTLGTLGTNFGRCVDLFAPGEDIIGASSDCSTCFVSQSGTSQAAAHVAGIAAMMLSAEPELTLAELRQRLIHFSAKDVINEAWFPEDQRVLTPNLVAALPPSTHGAGWQLFCRTVWSAHSGPTRMATAVARCAPDEELLSCSSFSRSGKRRGERMEAQGGKLVCRAHNAFGGEGVYAIARCCLLPQANCSVHTAPPAEASMGTRVHCHQQGHVLTGCSSHWEVEDLGTHKPPVLRPRGQPNQCVGHREASIHASCCHAPGLECKVKEHGIPAPQEQVTVACEEGWTLTGCSALPGTSHVLGAYAVDNTCVVRSRDVSTTGSTSEGAVTAVAICCRSRHLAQASQELQ

SEQ ID NO: 12292 - protein, 20 aa, Artificial Sequence
  Synthetic polypeptide
GLPSHVELIRGGCLAPTWWC

SEQ ID NO: 12293 - protein, 175 aa, Artificial Sequence
  Synthetic polypeptide
WDYQGFLLLYPFYFLLLLPCKKCFSPPAVILRPAQPCGTDPWRLPGTYVVVLKEETHLSQSERTARRLQAQAARRGYLTKILHVFHGLLPGFLVKMSGDLLELALKLPHVDYIEEDSSVFAQSIPWNLERITPPRYRADEYQPPAYLEDHCGGHRGAVQMALQKTQETLGQEQFD

SEQ ID NO: 12294 - protein, 536 aa, Artificial Sequence
  Synthetic polypeptide
EVLFASCRDSEACPAMWNYGGSLVEVYLLDTSIQSDHREIEGRVMVTDFENVPEEDGTRFHRQASKCDSHGTHLAGVVSGRDAGVAKGASMRSLRVLNCQGKGTVSGTLIGLEFIRKSQLVQPVGPLVVLLPLAGGYSRVLNAACQRLARAGVVLVTAAGNFRDDACLYSPASAPEVITVGATNAQDQPVTLGTLGTNFGRCVDLFAPGEDIIGASSDCSTCFVSQSGTSQAAAHVAGIAAMMLSAEPELTLAELRQRLIHFSAKDVINEAWFPEDQRVLTPNLVAALPPSTHGAGWQLFCRTVWSAHSGPTRMATAVARCAPDEELLSCSSFSRSGKRRGERMEAQGGKLVCRAHNAFGGEGVYAIARCCLLPQANCSVHTAPPAEASMGTRVHCHQQGHVLTGCSSHWEVEDLGTHKPPVLRPRGQPNQCVGHREASIHASCCHAPGLECKVKEHGIPAPQEQVTVACEEGWTLTGCSALPGTSHVLGAYAVDNTCVVRSRDVSTTGSTSEGAVTAVAICCRSRHLAQASQELQ

SEQ ID NO: 12295 - protein, 49 aa, Artificial Sequence
  Synthetic polypeptide
WDYQGFLLLYPFYFLLLLPCKKCFSPPAVILRPAQPCGTTEAAWWRCIS

SEQ ID NO: 12296 - protein, 24 aa, Artificial Sequence
  Synthetic polypeptide
GLPSHVELRRQPGGGVSPRHQHTE

SEQ ID NO: 12297 - protein, 19 aa, Artificial Sequence
  Synthetic polypeptide
MPQATDSEAPSRINLENIN

SEQ ID NO: 12298 - protein, 536 aa, Artificial Sequence
  Synthetic polypeptide
LNASSHRFRSPQQNKFGEHQLTGHKVAVKILNRQKIRSLDVVGKIKREIQNLKLFRHPHIIKLYQVISTPTDFFMVMEYVSGGELFDYICKHGRVEEMEARRLFQQILSAVDYCHRHMVVHRDLKPENVLLDAHMNAKIADFGLSNMMSDGEFLRTSCGSPNYAAPEVISGRLYAGPEVDIWSCGVILYALLCGTLPFDDEHVPTLFKKIRGGVFYIPEYLNRSVATLLMHMLQVDPLKRATIKDIREHEWFKQDLPSYLFPEDPSYDANVIDDEAVKEVCEKFECTESEVMNSLYSGDPQDQLAVAYHLIIDNRRIMNQASEFYLASSPPSGSFMDDSAMHIPPGLKPHPERMPPLIADSPKARCPLDALNTTKPKSLAVKKAKWHLGIRSQSKPYDIMAEVYRAMKQLDFEWKVVNAYHLRVRRKNPVTGNYVKMSLQLYLVDNRSYLLDFKSIDDEVVEQRSGSSTPQRSCSAAGLHRPRSSFDSTTAESHSLSGSLTGSLTGSTLSSVSPRLGSHTMDFFEMCASLITTLAR

SEQ ID NO: 12299 - protein, 34 aa, Artificial Sequence
  Synthetic polypeptide
MPQATDSEAPSRINIPGDQHSNRFFYGNGICVWR

SEQ ID NO: 12300 - protein, 18 aa, Artificial Sequence
  Synthetic polypeptide
LNASSHRFRSPQQNKYTR

SEQ ID NO: 12301 - protein, 65 aa, Artificial Sequence
  Synthetic polypeptide
RLLSSSPYEGTVRRQLSMNQESVVTLILELPASRTQLMKLELKNSKSLGRIFPIQNLVLNMKIKK

SEQ ID NO: 12302 - protein, 11 aa, Artificial Sequence
  Synthetic polypeptide
SWNFQPPELNL

SEQ ID NO: 12303 - protein, 400 aa, Artificial Sequence
  Synthetic polypeptide
GHSEKTAVYEPGICCHFDLGTSSLQNSTYEVGIEELQKPGKNFPYPEPSAKHEDKKMKEKQPCELKPKNTEKEPYSNHVFKVDACEGTPEKIQMTNVHTGRRNMLAGKQEAMIDIIQTNPCPEGPKLARHSQGHCGHLEVLESTKETPDLGVSKTSSISEEIYDDVEYSRKEVPKLNYSSSLASSSEENRELYEDVYKTKNNYPKIDLDGKEALKRLQQFFKKEKDRFKIKKTKSKENLSAFSILLPDLELKSQEVIIYDDVDLSEKESKDEDKLKMWKPKFLTPKEKKEKNGAEESESFSPRNFFKTKKQNLEKNRMKREEKLFRERFKYDKEIIVINTAVACSNNSRNGIFDLPISPGEELEVIDTTEQNLVICRNSKGKYGYVLIEHLDFKHQSWSP

SEQ ID NO: 12304 - protein, 54 aa, Artificial Sequence
  Synthetic polypeptide
VTLIMPAFPVSRSTSATPGTARPTLLFLLSLLSVKIRMETFMMIHFHLMNSSQN

SEQ ID NO: 12305 - protein, 70 aa, Artificial Sequence
  Synthetic polypeptide
IALKIREMCNCPPLSNPDPRLLFKLSTKHFLEESEKEDLNITKKQKMDTLPIQKQEQIPLTYIVEKRTGS

SEQ ID NO: 12306 - protein, 815 aa, Artificial Sequence
  Synthetic polypeptide
NKSGYGRDLRSGENTASVLQKDHYLDSSWRTENGLIPWTLDNTISEENRAVIEKMLLEEEYYLSKKSQPEKVWLDQKEDDKKYMKSLQKTAKIMVHSPTKPASYSVKWTIEEKELFEQGLAKFGRRWTKISKLIGSRTVLQVKSYARQYFKNKVKCGLDKETPNQKTGHNLQVKNEDKGTKAWTPSCLRGRADPNLNAVKIEKLSDDEEVDITDEVDELSSQTPQKNSSSDLLLDFPNSKMHETNQGEFITSDSQEALFSKSSRGCLQNEKQDETLSSSEITLWTEKQSNGDKKSIELNDQKFNELIKNCNKHDGRGIIVDARQLPSPEPCEIQKNLNDNEMLFHSCQMVEESHEEEELKPPEQEIEIDRNIIQEEEKQAIPEFFEGRQAKTPERYLKIRNYILDQWEICKPKYLNKTSVRPGLKNCGDVNCIGRIHTYLELIGAINFGCEQAVYNRPQTVDKVRIRDRKDAVEAYQLAQRLQSMRTRRRRVRDPWGNWCDAKDLEGQTFEHLSAEELAKRREEEKGRPVKSLKVPRPTKSSFDPFQLIPCNFFSEEKQEPFQVKVASEALLIMDLHAHVSMAEVIGLLGGRYSEVDKVVEVCAAEPCNSLSTGLQCEMDPVSQTQASETLAVRGFSVIGWYHSHPAFDPNPSLRDIDTQAKYQSYFSRGGAKFIGMIVSPYNRNNPLPYSQITCLVISEEISPDGSYRLPYKFEVQQMLEEPQWGLVFEKTRWIIEKYRLSHSSVPMDKIFRRDSDLTCLQKLLECMRKTLSKVTNCFMAEEFLTEIENLFLSNYKSNQENGVTEENCTKELLM

SEQ ID NO: 12307 - protein, 13 aa, Artificial Sequence
  Synthetic polypeptide
LEQERLRTRPEKW

SEQ ID NO: 12308 - protein, 9 aa, Artificial Sequence
  Synthetic polypeptide
QRKLYKGLI

SEQ ID NO: 12309 - protein, 7 aa, Artificial Sequence
  Synthetic polypeptide
RESCTRD

SEQ ID NO: 12310 - protein, 118 aa, Artificial Sequence
  Synthetic polypeptide
EKVVQGIDLNQIRGLGFDATCSLVVLDKQFHPLPVNQEGDSHRNVIMWLDHRAVSQVNRINETKHSVLQYVGGVMSVEMQAPKLLWLKENLREICWDKAGHFFDLPDFLSWKATGVTA

SEQ ID NO: 12311 - protein, 509 aa, Artificial Sequence
  Synthetic polypeptide
EKVVQGIDLNQIRGLGFDATCSLVVLDKQFHPLPVNQEGDSHRNVIMWLDHRAVSQVNRINETKHSVLQYVGGVMSVEMQAPKLLWLKENLREICWDKAGHFFDLPDFLSWKATGVTARSLCSLVCKWTYSAEKGWDDSFWKMIGLEDFVADNYSKIGNQVLPPGASLGNGLTPEAARDLGLLPGIAVAASLIDAHAGGLGVIGADVRGHGLICEGQPVTSRLAVICGTSSCHMGISKDPIFVPGVWGPYFSAMVPGFWLNEGGQSVTGKLIDHMVQGHAAFPELQVKATARCQSIYAYLNSHLDLIKKAQPVGFLTVDLHVWPDFHGNRSPLADLTLKGMRTTGYLYIPALAALHSPSSLLSPQVTGLKLSQDLDDLAILYLATVQAIALGTRFIIEAMEAAGHSISTLFLCGGLSKNPLFVQMHADITGMPVVLSQEVESVLVGAAVLGACASGDFASVQEAMAKMSKVGKVVFPRLQDKKYYDKKYQVFLKLVEHQKEYLAIMNDD

SEQ ID NO: 12312 - protein, 485 aa, Artificial Sequence
  Synthetic polypeptide
EKVVQGIDLNQIRGLGFDATCSLVVLDKQFHPLPVNQEGDSHRNVIMWLDHRAVSQVNRINETKHSVLQYVGGVMSVEMQAPKLLWLKENLREICWDKAGHFFDLPDFLSWKATGVTARSLCSLVCKWTYSAEKGWDDSFWKMIGLEDFVADNYSKIGNQVLPPGASLGNGLTPEAARDLGLLPGIAVAASLIDAHAGGLGVIGADVRGHGLICEGQPVTSRLAVICGTSSCHMGISKDPIFVPGVWGPYFSAMVPGFWLNEGGQSVTGKLIDHMVQGHAAFPELQVKATARCQSIYAYLNSHLDLIKKAQPVGFLTVDLHVWPDFHGNRSPLADLTLKGMVTGLKLSQDLDDLAILYLATVQAIALGTRFIIEAMEAAGHSISTLFLCGGLSKNPLFVQMHADITGMPVVLSQEVESVLVGAAVLGACASGDFASVQEAMAKMSKVGKVVFPRLQDKKYYDKKYQVFLKLVEHQKEYLAIMNDD

SEQ ID NO: 12313 - protein, 441 aa, Artificial Sequence
  Synthetic polypeptide
EKVVQGIDLNQIRGLGFDATCSLVVLDKQFHPLPVNQEGDSHRNVIMWLDHRAVSQVNRINETKHSVLQYVGGVMSVEMQAPKLLWLKENLREICWDKAGHFFDLPDFLSWKATGVTARSLCSLVCKWTYSAEKGWDDSFWKMIGLEDFVADNYSKIGNQVLPPGASLGNGLTPEAARDLGLLPGIAVAASLIDAHAGGLGVIGADVRGHGLICEGQPVTSRLAVICGTSSCHMGISKDPIFVPGVWGPYFSAMVPGFWLNEGGQSVTGKLIDHMVQGHAAFPELQVKATARCQSIYAYLNSHLDLIKKAQPVGFLTVDLHVWPDFHGNRSPLADLTLKGMVTGLKLSQDLDDLAILYLATVQAIALGTRFIIEAMEAAGHSISTLFLCGGLSKNPLFVQMHADITGMPVVLSQEVESVLVGAAVLGACASGDFASVQWGK

SEQ ID NO: 12314 - protein, 13 aa, Artificial Sequence
  Synthetic polypeptide
GQFSPCCSRGSET

SEQ ID NO: 12315 - protein, 23 aa, Artificial Sequence
  Synthetic polypeptide
LNHEGSFPHAVLVVVKLERDLLG

SEQ ID NO: 12316 - protein, 402 aa, Artificial Sequence
  Synthetic polypeptide
SDKRDLHPQSSRSLCSLVCKWTYSAEKGWDDSFWKMIGLEDFVADNYSKIGNQVLPPGASLGNGLTPEAARDLGLLPGIAVAASLIDAHAGGLGVIGADVRGHGLICEGQPVTSRLAVICGTSSCHMGISKDPIFVPGVWGPYFSAMVPGFWLNEGGQSVTGKLIDHMVQGHAAFPELQVKATARCQSIYAYLNSHLDLIKKAQPVGFLTVDLHVWPDFHGNRSPLADLTLKGMRTTGYLYIPALAALHSPSSLLSPQVTGLKLSQDLDDLAILYLATVQAIALGTRFIIEAMEAAGHSISTLFLCGGLSKNPLFVQMHADITGMPVVLSQEVESVLVGAAVLGACASGDFASVQEAMAKMSKVGKVVFPRLQDKKYYDKKYQVFLKLVEHQKEYLAIMNDD

SEQ ID NO: 12317 - protein, 35 aa, Artificial Sequence
  Synthetic polypeptide
QIKGTYILKAQGLSAPWCVSGHIQQRKAGTTVSGK

SEQ ID NO: 12318 - protein, 16 aa, Artificial Sequence
  Synthetic polypeptide
KGPTSSKLKVSLLPGV

SEQ ID NO: 12319 - protein, 378 aa, Artificial Sequence
  Synthetic polypeptide
SDKRDLHPQSSRSLCSLVCKWTYSAEKGWDDSFWKMIGLEDFVADNYSKIGNQVLPPGASLGNGLTPEAARDLGLLPGIAVAASLIDAHAGGLGVIGADVRGHGLICEGQPVTSRLAVICGTSSCHMGISKDPIFVPGVWGPYFSAMVPGFWLNEGGQSVTGKLIDHMVQGHAAFPELQVKATARCQSIYAYLNSHLDLIKKAQPVGFLTVDLHVWPDFHGNRSPLADLTLKGMVTGLKLSQDLDDLAILYLATVQAIALGTRFIIEAMEAAGHSISTLFLCGGLSKNPLFVQMHADITGMPVVLSQEVESVLVGAAVLGACASGDFASVQEAMAKMSKVGKVVFPRLQDKKYYDKKYQVFLKLVEHQKEYLAIMNDD

SEQ ID NO: 12320 - protein, 334 aa, Artificial Sequence
  Synthetic polypeptide
SDKRDLHPQSSRSLCSLVCKWTYSAEKGWDDSFWKMIGLEDFVADNYSKIGNQVLPPGASLGNGLTPEAARDLGLLPGIAVAASLIDAHAGGLGVIGADVRGHGLICEGQPVTSRLAVICGTSSCHMGISKDPIFVPGVWGPYFSAMVPGFWLNEGGQSVTGKLIDHMVQGHAAFPELQVKATARCQSIYAYLNSHLDLIKKAQPVGFLTVDLHVWPDFHGNRSPLADLTLKGMVTGLKLSQDLDDLAILYLATVQAIALGTRFIIEAMEAAGHSISTLFLCGGLSKNPLFVQMHADITGMPVVLSQEVESVLVGAAVLGACASGDFASVQWGK

SEQ ID NO: 12321 - protein, 48 aa, Artificial Sequence
  Synthetic polypeptide
CRNRKPHTAYSHWKPSATSWSFSWKWAHTRGSKRPWPSPWDCGRSFTH

SEQ ID NO: 12322 - protein, 384 aa, Artificial Sequence
  Synthetic polypeptide
DFVLCSNMNGAGGHYPKQTNAGTENHILHILTGNQVLPPGASLGNGLTPEAARDLGLLPGIAVAASLIDAHAGGLGVIGADVRGHGLICEGQPVTSRLAVICGTSSCHMGISKDPIFVPGVWGPYFSAMVPGFWLNEGGQSVTGKLIDHMVQGHAAFPELQVKATARCQSIYAYLNSHLDLIKKAQPVGFLTVDLHVWPDFHGNRSPLADLTLKGMRTTGYLYIPALAALHSPSSLLSPQVTGLKLSQDLDDLAILYLATVQAIALGTRFIIEAMEAAGHSISTLFLCGGLSKNPLFVQMHADITGMPVVLSQEVESVLVGAAVLGACASGDFASVQEAMAKMSKVGKVVFPRLQDKKYYDKKYQVFLKLVEHQKEYLAIMNDD

SEQ ID NO: 12323 - protein, 66 aa, Artificial Sequence
  Synthetic polypeptide
MELEAIILSKLMQEQKTTYCIFSLETKCYLLELLLEMGSHQRQQETLAFSLGLRSQLHSLMPMQED

SEQ ID NO: 12324 - protein, 360 aa, Artificial Sequence
  Synthetic polypeptide
DFVLCSNMNGAGGHYPKQTNAGTENHILHILTGNQVLPPGASLGNGLTPEAARDLGLLPGIAVAASLIDAHAGGLGVIGADVRGHGLICEGQPVTSRLAVICGTSSCHMGISKDPIFVPGVWGPYFSAMVPGFWLNEGGQSVTGKLIDHMVQGHAAFPELQVKATARCQSIYAYLNSHLDLIKKAQPVGFLTVDLHVWPDFHGNRSPLADLTLKGMVTGLKLSQDLDDLAILYLATVQAIALGTRFIIEAMEAAGHSISTLFLCGGLSKNPLFVQMHADITGMPVVLSQEVESVLVGAAVLGACASGDFASVQEAMAKMSKVGKVVFPRLQDKKYYDKKYQVFLKLVEHQKEYLAIMNDD

SEQ ID NO: 12325 - protein, 316 aa, Artificial Sequence
  Synthetic polypeptide
DFVLCSNMNGAGGHYPKQTNAGTENHILHILTGNQVLPPGASLGNGLTPEAARDLGLLPGIAVAASLIDAHAGGLGVIGADVRGHGLICEGQPVTSRLAVICGTSSCHMGISKDPIFVPGVWGPYFSAMVPGFWLNEGGQSVTGKLIDHMVQGHAAFPELQVKATARCQSIYAYLNSHLDLIKKAQPVGFLTVDLHVWPDFHGNRSPLADLTLKGMVTGLKLSQDLDDLAILYLATVQAIALGTRFIIEAMEAAGHSISTLFLCGGLSKNPLFVQMHADITGMPVVLSQEVESVLVGAAVLGACASGDFASVQWGK

SEQ ID NO: 12326 - protein, 346 aa, Artificial Sequence
  Synthetic polypeptide
LITVYQHWLINSNKLPHKCKIVIIGETESEKRRLIEQRDTLKETNEELRCSQVQQDHLNQTDASATKSYENLAAEIMPVEYREVFIRLQHENKMLRLQQEGSENERIEELQEQLEQKHRKMNELETEQRLSKERIRELQQQIEDLQKSLQEQGSKSEGESSSKLKQKLEAHMEKLTEVHEELQKKQELIEDLQPDINQNVQKINELEAALQKKDEDMKAMEERYKMYLEKARNVIKTLDPKLNPASAEIMLLRKQLAEKERRIEILESECKVAKFRDYEEKLIVSAWYNKSLAFQKLGMESRLVSGGGACSDTGACTPARSFLAQQRHITNTRRNLSVKVPATTSD

SEQ ID NO: 12327 - protein, 9 aa, Artificial Sequence
  Synthetic polypeptide
GRLRVRRGD

SEQ ID NO: 12328 - protein, 5 aa, Artificial Sequence
  Synthetic polypeptide
EEETN

SEQ ID NO: 12329 - protein, 34 aa, Artificial Sequence
  Synthetic polypeptide
PGAVAHAWNPSTLGGHSGRITRDEEFETSLANIG

SEQ ID NO: 12330 - protein, 35 aa, Artificial Sequence
  Synthetic polypeptide
GVRDQPGQHRLKWYWETSLRRKDGGRGERGQDRPE

SEQ ID NO: 12331 - protein, 51 aa, Artificial Sequence
  Synthetic polypeptide
GVRDQPGQHRLKWYWETSLRRKDGGGPASSSPPRSSGAERRRRSGACPGST

SEQ ID NO: 12332 - protein, 35 aa, Artificial Sequence
  Synthetic polypeptide
GVRDQPGQHRLKWYWETSLRRKDGASRERGQDRPE

SEQ ID NO: 12333 - protein, 24 aa, Artificial Sequence
  Synthetic polypeptide
GVRDQPGQHRLKWYWETSLRRKDG

SEQ ID NO: 12334 - protein, 40 aa, Artificial Sequence
  Synthetic polypeptide
GVRDQPGQHRLKWYWETSLRRKDGGSSRRLSLSGAHCSHL

SEQ ID NO: 12335 - protein, 245 aa, Artificial Sequence
  Synthetic polypeptide
SPVAEHRPQTSLGFNPGLKASLERLQLEYVDVVFANRPDPNTPMEETVRAMTHVINQGMAMYWGTSRWSSMEIMEAYSVARQFNLTPPICEQAEYHMFQREKVEVQLPELFHKIGVGAMTWSPLACGIVSGKYDSGIPPYSRASLKGYQWLKDKILSEEGRRQQAKLKELQAIAERLGCTLPQLAIAWCLRNEGVSSVLLGASNADQLMENIGAIQVLPKLSSSIIHEIDSILGNKPYSKKDYRS

SEQ ID NO: 12336 - protein, 17 aa, Artificial Sequence
  Synthetic polypeptide
ARWLSTDHRPAWVSIQV

SEQ ID NO: 12337 - protein, 88 aa, Artificial Sequence
  Synthetic polypeptide
AQTTDQPGFQSRSESFPGATAAGVRGCGVCQPPGPQHPDGRDRPRHDPRHQPGDGHVLGHVTLELHGDHGGLLRGPAVQPDPAHLRAG

SEQ ID NO: 12338 - protein, 131 aa, Artificial Sequence
  Synthetic polypeptide
SPVAEHRPQTSLGFNPGLKASLERLQLEYVDVVFANRPDPNTPMEETVRAMTHVINQGMAMYWGTSRWSSMEIMEAYSVARQFNLTPPICEQAEYHMFQREKVEVQLPELFHKIGVGAMTWSPLACGIVSG

SEQ ID NO: 12339 - protein, 146 aa, Artificial Sequence
  Synthetic polypeptide
SPVAEHRPQTSLGFNPGLKASLERLQLEYVDVVFANRPDPNTPMEETVRAMTHVINQGMAMYWGTSRWSSMEIMEAYSVARQFNLTPPICEQAEYHMFQREKVEVQLPELFHKIGVGAMTWSPLACGIVSGKYDSGIPPYSRASLK

SEQ ID NO: 12340 - protein, 273 aa, Artificial Sequence
  Synthetic polypeptide
SPVAEHRPQTSLGFNPGLKASLERLQLEYVDVVFANRPDPNTPMEETVRAMTHVINQGMAMYWGTSRWSSMEIMEAYSVARQFNLTPPICEQAEYHMFQREKVEVQLPELFHKIGVGAMTWSPLACGIVSGKYDSGIPPYSRASLKGYQWLKDKILSEEGRRQQAKLKELQAIAERLGCTLPQLAIAWCLRNEGVSSVLLGASNADQLMENIGAIQVRVRGPAGQRAHPSPSPVQCILPGSSCVPGSVLGTQDAPVNHQSCAPGELAFQQEQT

SEQ ID NO: 12341 - protein, 260 aa, Artificial Sequence
  Synthetic polypeptide
SPVAEHRPQTSLGFNPGLKASLERLQLEYVDVVFANRPDPNTPMEGDPFSSSKSRTFIIEETVRAMTHVINQGMAMYWGTSRWSSMEIMEAYSVARQFNLTPPICEQAEYHMFQREKVEVQLPELFHKIGVGAMTWSPLACGIVSGKYDSGIPPYSRASLKGYQWLKDKILSEEGRRQQAKLKELQAIAERLGCTLPQLAIAWCLRNEGVSSVLLGASNADQLMENIGAIQVLPKLSSSIIHEIDSILGNKPYSKKDYRS

SEQ ID NO: 12342 - protein, 44 aa, Artificial Sequence
  Synthetic polypeptide
AQTTDQPGFQSRSESFPGATAAGVRGCGVCQPPGPQHPDGRGPI

SEQ ID NO: 12343 - protein, 99 aa, Artificial Sequence
  Synthetic polypeptide
SQQLRRPRNGYSYKVAVALSLFLGWLGADRFYLGYPALGLLKFCTVGFCGIGSLIDFILISMQIVGPSDGSSYIIDYYGTRLTRLSITNETFRKTQLYP

SEQ ID NO: 12344 - protein, 36 aa, Artificial Sequence
  Synthetic polypeptide
GGQEMAIPTKWQSHCLFFLDGWEQIDFTLDTLLWVC

SEQ ID NO: 12345 - protein, 63 aa, Artificial Sequence
  Synthetic polypeptide
WMWWLVPVIPAVEEAKKWLFLQSGSRIVSFSWMVGSRSILPWIPCFGFVKVLHCRVLWNWEPN

SEQ ID NO: 12346 - protein, 78 aa, Artificial Sequence
  Synthetic polypeptide
SQQLRRPRNGYSYKVAVALSLFLGWLGADRFYLGYPALGKETVTREVKGFTESRGFPLFCDIFVVIIFVLWIGKLSRD

SEQ ID NO: 12347 - protein, 67 aa, Artificial Sequence
  Synthetic polypeptide
GGQEMAIPTKWQSHCLFFLDGWEQIDFTLDTLLWVRKLSPERLRDLLSLEAFLYSVTYLLLSSLFYG

SEQ ID NO: 12348 - protein, 47 aa, Artificial Sequence
  Synthetic polypeptide
WMWWLVPVIPAVEEAKKWLFLQSGSRIVSFSWMVGSRSILPWIPCFG

SEQ ID NO: 12349 - protein, 12 aa, Artificial Sequence
  Synthetic polypeptide
LSFLFSSTQHNL

SEQ ID NO: 12350 - protein, 29 aa, Artificial Sequence
  Synthetic polypeptide
EHRSEIWQTSISFRLSHLVIKFPVFQHPT

SEQ ID NO: 12351 - protein, 58 aa, Artificial Sequence
  Synthetic polypeptide
GRKHRFGVRKATFGLNCHRSMACSFMENLAEKQSPFLKKCHPLLLWFAVGGCLMMKLL

SEQ ID NO: 12352 - protein, 21 aa, Artificial Sequence
  Synthetic polypeptide
IATGQWHAALWKISPRSSLLS

SEQ ID NO: 12353 - protein, 998 aa, Artificial Sequence
  Synthetic polypeptide
LGIRKEAQIWSQKSHFWSELPQVNGMQLYGKSRREAVSFLKEVPPPFTLVCCRRLFDDEASVDEPRRTETSLPETEVDHNMDVNTEEDDDGELALWSPEVKIVELVKDCKGLGFSILDYQDPLDPTRSVIVIRSLVADGVAERSGGLLPGDRLVSVNEYCLDNTSLAEAVEILKAVPPGLVHLGICKPLVEDNEEESCYILHSSSNEDKTEFSGTIHDINSSLILEAPKGFRDEPYFKEELVDEPFLDLGKSFHSQQKEIEQSKEAWEMHEFLTPRLQEMDEEREILVDEEYELYQDPSPSMELYPLSHIQEATPVPSVNELHFGTQWLHDNEPSESQEARTGRTVYSQEAQPYGYCPENVMKENFVMESLPSVPSTEGNSQQGRFDDLENLNSLAKTSLDLGMIPNDVQGPSLLIDLPVVAQRREQEDLPLYQHQATRVISKASAYTGMLSSRYATDTCELPEREEGEGEETPNFSHWGPPRIVEIFREPNVSLGISIVGGQTVIKRLKNGEELKGIFIKQVLEDSPAGKTNALKTGDKILEVSGVDLQNASHSEAVEAIKNAGNPVVFIVQSLSSTPRVIPNVHNKANKITGNQNQDTQEKKEKRQGTAPPPMKLPPPYKALTDDSDENEEEDAFTDQKIRQRYADLPGELHIIELEKDKNGLGLSLAGNKDRSRMSIFVVGINPEGPAAADGRMRIGDELLEINNQILYGRSHQNASAIIKTAPSKVKLVFIRNEDAVNQMAVTPFPVPSSSPSSIEDQSGTEPISSEEDGSVEVGIKQLPESESFKLAVSQMKQQKYPTKVSFSSQEIPLAPASSYHSTDADFTGYGGFQAPLSVDPATCPIVPGQEMIIEISKGRSGLGLSIVGGKDTPLFWRLGSPRAWSQHLVRAFMLHHPVTEVEGQNAIVIHEVYEEGAAARDGRLWAGDQILEVNGVDLRNSSHEEAITALRQTPQKVRLVVYRDEAHYRDEENLEIFPVDLQKKAGRGLGLSIVGKR

SEQ ID NO: 12354 - protein, 1217 aa, Artificial Sequence
  Synthetic polypeptide
LGIRKEAQIWSQKSHFWSELPQVNGMQLYGKSRREAVSFLKEVPPPFTLVCCRRLFDDEASVDEPRRTETSLPETEVDHNMDVNTEEDDDGELALWSPEVKIVELVKDCKGLGFSILDYQDPLDPTRSVIVIRSLVADGVAERSGGLLPGDRLVSVNEYCLDNTSLAEAVEILKAVPPGLVHLGICKPLVEDNEEESCYILHSSSNEDKTEFSGTIHDINSSLILEAPKGFRDEPYFKEELVDEPFLDLGKSFHSQQKEIEQSKEAWEMHEFLTPRLQEMDEEREILVDEEYELYQDPSPSMELYPLSHIQEATPVPSVNELHFGTQWLHDNEPSESQEARTGRTVYSQEAQPYGYCPENVMKENFVMESLPSVPSTEGNSQQGRFDDLENLNSLAKTSLDLGMIPNDVQGPSLLIDLPVVAQRREQEDLPLYQHQATRVISKASAYTGMLSSRYATDTCELPEREEGEGEETPNFSHWGPPRIVEIFREPNVSLGISIVGGQTVIKRLKNGEELKGIFIKQVLEDSPAGKTNALKTGDKILEVSGVDLQNASHSEAVEAIKNAGNPVVFIVQSLSSTPRVIPNVHNKANKITGNQNQDTQEKKEKRQGTAPPPMKLPPPYKALTDDSDENEEEDAFTDQKIRQRYADLPGELHIIELEKDKNGLGLSLAGNKDRSRMSIFVVGINPEGPAAADGRMRIGDELLEINNQILYGRSHQNASAIIKTAPSKVKLVFIRNEDAVNQMAVTPFPVPSSSPSSIEDQSGTEPISSEEDGSVEVGIKQLPESESFKLAVSQMKQQKYPTKVSFSSQEIPLAPASSYHSTDADFTGYGGFQAPLSVDPATCPIVPGQEMIIEISKGRSGLGLSIVGGKDTPLNAIVIHEVYEEGAAARDGRLWAGDQILEVNGVDLRNSSHEEAITALRQTPQKVRLVVYRDEAHYRDEENLEIFPVDLQKKAGRGLGLSIVGKRNGSGVFISDIVKGGAADLDGRLIQGDQILSVNGEDMRNASQETVATILKCAQGLVQLEIGRLRAGSWTSARTTSQNSQGSQQSAHSSCHPSFAPVITGLQNLVGTKRVSDPSQKNSGTDMEPRTVEINRELSDALGISIAGGRGSPLGDIPVFIAMIQASGVAARTQKLKVGDRIVSINGQPLDGLSHADVVNLLKNAYGRIILQVVADTNISAIAAQLENMSTGYHLGSPTAEHHPEDTEEQLQMTAD

SEQ ID NO: 12355 - protein, 1091 aa, Artificial Sequence
  Synthetic polypeptide
LGIRKEAQIWSQKSHFWSELPQVNGMQLYGKSRREAVSFLKEVPPPFTLVCCRRLFDDEASVDEPRRTETSLPETEVDHNMDVNTEEDDDGELALWSPEVKIVELVKDCKGLGFSILDYQDPLDPTRSVIVIRSLVADGVAERSGGLLPGDRLVSVNEYCLDNTSLAEAVEILKAVPPGLVHLGICKPLVEDNEEESCYILHSSSNEDKTEFSGTIHDINSSLILEAPKGFRDEPYFKEELVDEPFLDLGKSFHSQQKEIEQSKEAWEMHEFLTPRLQEMDEEREILVDEEYELYQDPSPSMELYPLSHIQEATPVPSVNELHFGTQWLHDNEPSESQEARTGRTVYSQEAQPYGYCPENVMKENFVMESLPSVPSTEGNSQQGRFDDLENLNSLAKTSLDLGMIPNDVQGPSLLIDLPVVAQRREQEDLPLYQHQATRVISKASAYTGMLSSRYATDTCELPEREEGEGEETPNFSHWGPPRIVEIFREPNVSLGISIVGGQTVIKRLKNGEELKGIFIKQVLEDSPAGKTNALKTGDKILEVSGVDLQNASHSEAVEAIKNAGNPVVFIVQSLSSTPRVIPNVHNKANKITGNQNQDTQEKKEKRQGTAPPPMKLPPPYKALTDDSDENEEEDAFTDQKIRQRYADLPGELHIIELEKDKNGLGLSLAGNKDRSRMSIFVVGINPEGPAAADGRMRIGDELLEINNQILYGRSHQNASAIIKTAPSKVKLVFIRNEDAVNQMAVTPFPVPSSSPSSIEDQSGTEPISSEEDGSVEVGIKQLPESESFKLAVSQMKQQKYPTKVSFSSQEIPLAPASSYHSTDADFTGYGGFQAPLSVDPATCPIVPGQEMIIEISKGRSGLGLSIVGGKDTPLNAIVIHEVYEEGAAARDGRLWAGDQILEVNGVDLRNSSHEEAITALRQTPQKVRLVVYRDEAHYRDEENLEIFPVDLQKKAGRGLGLSIVGKRNGSGVFISDIVKGGAADLDGRLIQGDQILSVNGEDMRNASQETVATILKCAQGLVQLEIGRLRAGSWTSARTTSQNSQSAECTQQLSSLLRSCHHWPAKPGWHKKSFRSFPEKFRHRYGTKDC

SEQ ID NO: 12356 - protein, 42 aa, Artificial Sequence
  Synthetic polypeptide
GRARWLTPVIPTLWEAEAGGSLEVESLRPAWPTWHRYGTKDC

SEQ ID NO: 12357 - protein, 139 aa, Artificial Sequence
  Synthetic polypeptide
DQPGQHGTDMEPRTVEINRELSDALGISIAGGRGSPLGDIPVFIAMIQASGVAARTQKLKVGDRIVSINGQPLDGLSHADVVNLLKNAYGRIILQVVADTNISAIAAQLENMSTGYHLGSPTAEHHPEDTEEQLQMTAD

SEQ ID NO: 12358 - protein, 21 aa, Artificial Sequence
  Synthetic polypeptide
GREFETSLANMAQIWNQGLLR

SEQ ID NO: 12359 - protein, 15 aa, Artificial Sequence
  Synthetic polypeptide
DQPGQHGTDMEPRTV

SEQ ID NO: 12360 - protein, 20 aa, Artificial Sequence
  Synthetic polypeptide
GREFETSLANMAQIWNQGLL

SEQ ID NO: 12361 - protein, 41 aa, Artificial Sequence
  Synthetic polypeptide
EMQNFRPLRPLELESAFSRSPGEKACGEGGQKKEASSEVHS

SEQ ID NO: 12362 - protein, 138 aa, Artificial Sequence
  Synthetic polypeptide
DRWNWNLHFPDLLVKKLVVKGGKKKKQVLKFTLDCTHPVEDGIMDAANFEQFLQERIKVNGKAGNLGGGVVTIERSKSKITVTSEVPFSKRYLKYLTKKYLKKNNLRDWLRVVANSKESYELRYFQINQDEEEEEDED

SEQ ID NO: 12363 - protein, 126 aa, Artificial Sequence
  Synthetic polypeptide
ELKKLVVKGGKKKKQVLKFTLDCTHPVEDGIMDAANFEQFLQERIKVNGKAGNLGGGVVTIERSKSKITVTSEVPFSKRYLKYLTKKYLKKNNLRDWLRVVANSKESYELRYFQINQDEEEEEDED

SEQ ID NO: 12364 - protein, 23 aa, Artificial Sequence
  Synthetic polypeptide
FASPHAVHGLAASASSESLKSLW

SEQ ID NO: 12365 - protein, 64 aa, Artificial Sequence
  Synthetic polypeptide
HHIHSGFRHPWMSSQRVYRTRTTTAGTTRPQPGIIQEVSRKRERRHQSLKETAGLRTASQKSLY

SEQ ID NO: 12366 - protein, 76 aa, Artificial Sequence
  Synthetic polypeptide
DPIMTQTPSSRSSTVLTRAPDSSPTAPFLGSPTWMSTGTASSAVARMLDVLPQTCYSHLPISVNSTTFTQVSGTRG

SEQ ID NO: 12367 - protein, 90 aa, Artificial Sequence
  Synthetic polypeptide
IAPHSLRFQAPVDEQSESLQNTHDDSRNNAASARNNPGSVPEKREKTSEPKGNSWAPNGLSEEPLLKNMDHHRSKQKNGGDVPTWREHPT

SEQ ID NO: 12368 - protein, 15 aa, Artificial Sequence
  Synthetic polypeptide
QFILKEKKIESPQFN

SEQ ID NO: 12369 - protein, 21 aa, Artificial Sequence
  Synthetic polypeptide
IKVCSCSSSPFLTVHLKREKN

SEQ ID NO: 12370 - protein, 9 aa, Artificial Sequence
  Synthetic polypeptide
TTRTHGHII

SEQ ID NO: 12371 - protein, 172 aa, Artificial Sequence
  Synthetic polypeptide
VGIEQREHMDTSFDPSKITRKKSVITYSPTTGTCQMSLFASPTSSEEQKHRNGLSNEKRKKLNHPSLTESKESTTKDNDEFMMLLSKVEKLSEEIMEIMQNLSSIQALEGSRELENLIGISCASHFLKREMQKTKELMTKVNKQKLFEKSTGLPHKASRHLDSYEFLKAILN

SEQ ID NO: 12372 - protein, 48 aa, Artificial Sequence
  Synthetic polypeptide
SWKPSFSANIARTKNQTPRVLTRRWELNNENTWTHHLILQKSQGRKVL

SEQ ID NO: 12373 - protein, 165 aa, Artificial Sequence
  Synthetic polypeptide
VGIEQREHMDTSFDPSKITRKKSVITYSPTTGTCQMSLFASPTSSEEQKHRNGLSNEKRKKLNHPSLTESKESTTKDNDEFMMLLSKVEKLSEEIMEIMQNLSSIQALEGSRELENLIGISCASHFLKREMQKTKELMTKVNKQKLFEKSTGLPHKGQPQMSQPL

SEQ ID NO: 12374 - protein, 388 aa, Artificial Sequence
  Synthetic polypeptide
VFHKELLSLRGNADIFTMSYWEIRDLLQNNLAWGAGGSRDQRCPELTVLGLLDGDIGVHSLLPLLLIMRPDDANVAGNVHGGTILKMIEEAGAIISTRHCNSQNGERCVAALARVERTDFLSPMCIGEVAHVSAEITYTSKHSVEVQVNVMSENILTGAKKLTNKATLWYVPLSLKNVDKVLEVPPVVYSRQEQEEEGRKRYEAQKLERMETKWRNGDIVQPVLNPEPNTVSYSQSSLIHLVGPSDCTLHGFVHGGVTMKLMDEVAGIVAARHCKTNIVTASVDAINFHDKIRKGCVITISGRMTFTSNKSMEIEVLVDADPVVDSSQKRYRAASAFFTYVSLSQEGRSLPVPQLVPETEDEKKRFEEGKGRYLQMKAKRQGHAEPQP

SEQ ID NO: 12375 - protein, 18 aa, Artificial Sequence
  Synthetic polypeptide
WGHRGSLPPPSTLDHAAR

SEQ ID NO: 12376 - protein, 333 aa, Artificial Sequence
  Synthetic polypeptide
VFHKELLSLRGNADIFTMSYWEIRDLLQNNLAWGAGGSRDQRCPELTVLGLLDGDIGVHSLLPLLLIMRPDDANVAGNVHGGTILKMIEEAGAIISTRHCNSQNGERCVAALARVERTDFLSPMCIGEVAHVSAEITYTSKHSVEVQVNVMSENILTGAKKLTNKATLWYVPLSLKNVDKVLEVPPVVYSRQEQEEEGRKRYEAQKLERMETKWRNGDIVQPVLNPEPNTVSYSQSSLIHLVGPSDCTLHGFVHGGVTMKLMDEVAGIVAARHCKTNIVTASVDAINFHDKIRKAHVMPAGADHTAPSSSPSTGTKCSLLRHHHLGTHDLHEQ

SEQ ID NO: 12377 - protein, 296 aa, Artificial Sequence
  Synthetic polypeptide
VFHKELLSLRGNADIFTMSYWEIRDLLQNNLAWGAGGSRDQRCPELTVLGLLDGDIGVHSLLPLLLIMRPDDANVAGNVHGGTILKMIEEAGAIISTRHCNSQNGERCVAALARVERTDFLSPMCIGEVAHVSAEITYTSKHSVEVQVNVMSENILTGAKKLTNKATLWYVPLSLKNVDKVLEVPPVVYSRQEQEEEGRKRYEAQKLERMETKWRNGDIVQPVLNPEPNTVSYSQSSLIHLVGPSDCTLHGFVHGGVTMKLMDEVAGIVAARHCKTNIVTASVDAINFHDKIRKAP

SEQ ID NO: 12378 - protein, 261 aa, Artificial Sequence
  Synthetic polypeptide
VFHKELLSLRGNADIFTMSYWEIRDLLQNNLAWGAGGSRDQRCPELTVLGLLDGDIGVHSLLPLLLIMRPDDANVAGNVHGGTILKMIEEAGAIISTRHCNSQNGERCVAALARVERTDFLSPMCIGEVAHVSAEITYTSKHSVEVQVNVMSENILTGAKKLTNKATLWYVPLSLKNVDKVLEVPPVVYSRQEQEEEGRKRYEAQKLERMETKWRNGDIVQPVLNPEPNTVSYSQSSLIHLVGPSDCTLHGFVHGGGVDFH

SEQ ID NO: 12379 - protein, 54 aa, Artificial Sequence
  Synthetic polypeptide
VFHKELLSLRGNADIFTMSYWEIRDLLQNNLAWGAGSCGQMMPTWPAMSTGGPS

SEQ ID NO: 12380 - protein, 31 aa, Artificial Sequence
  Synthetic polypeptide
EEMQTYLRCRTGKSGICCRITWHGEQDHAAR

SEQ ID NO: 12381 - protein, 328 aa, Artificial Sequence
  Synthetic polypeptide
PGMGSRIMRPDDANVAGNVHGGTILKMIEEAGAIISTRHCNSQNGERCVAALARVERTDFLSPMCIGEVAHVSAEITYTSKHSVEVQVNVMSENILTGAKKLTNKATLWYVPLSLKNVDKVLEVPPVVYSRQEQEEEGRKRYEAQKLERMETKWRNGDIVQPVLNPEPNTVSYSQSSLIHLVGPSDCTLHGFVHGGVTMKLMDEVAGIVAARHCKTNIVTASVDAINFHDKIRKGCVITISGRMTFTSNKSMEIEVLVDADPVVDSSQKRYRAASAFFTYVSLSQEGRSLPVPQLVPETEDEKKRFEEGKGRYLQMKAKRQGHAEPQP

SEQ ID NO: 12382 - protein, 273 aa, Artificial Sequence
  Synthetic polypeptide
PGMGSRIMRPDDANVAGNVHGGTILKMIEEAGAIISTRHCNSQNGERCVAALARVERTDFLSPMCIGEVAHVSAEITYTSKHSVEVQVNVMSENILTGAKKLTNKATLWYVPLSLKNVDKVLEVPPVVYSRQEQEEEGRKRYEAQKLERMETKWRNGDIVQPVLNPEPNTVSYSQSSLIHLVGPSDCTLHGFVHGGVTMKLMDEVAGIVAARHCKTNIVTASVDAINFHDKIRKAHVMPAGADHTAPSSSPSTGTKCSLLRHHHLGTHDLHEQ

SEQ ID NO: 12383 - protein, 236 aa, Artificial Sequence
  Synthetic polypeptide
PGMGSRIMRPDDANVAGNVHGGTILKMIEEAGAIISTRHCNSQNGERCVAALARVERTDFLSPMCIGEVAHVSAEITYTSKHSVEVQVNVMSENILTGAKKLTNKATLWYVPLSLKNVDKVLEVPPVVYSRQEQEEEGRKRYEAQKLERMETKWRNGDIVQPVLNPEPNTVSYSQSSLIHLVGPSDCTLHGFVHGGVTMKLMDEVAGIVAARHCKTNIVTASVDAINFHDKIRKAP

SEQ ID NO: 12384 - protein, 201 aa, Artificial Sequence
  Synthetic polypeptide
PGMGSRIMRPDDANVAGNVHGGTILKMIEEAGAIISTRHCNSQNGERCVAALARVERTDFLSPMCIGEVAHVSAEITYTSKHSVEVQVNVMSENILTGAKKLTNKATLWYVPLSLKNVDKVLEVPPVVYSRQEQEEEGRKRYEAQKLERMETKWRNGDIVQPVLNPEPNTVSYSQSSLIHLVGPSDCTLHGFVHGGGVDFH

SEQ ID NO: 12385 - protein, 373 aa, Artificial Sequence
  Synthetic polypeptide
RTLRQIPGLTETELSVSAELVPTSSWNISSELNKDSYLTLDEPMNNITTSLGQTAELHCKVSGNPPPTIRWFKNDAPVVQEPRRLSFRSTIYGSRLRIRNLDTTDTGYFQCVATNGKEVVSSTGVLFVKFGPPPTASPGYSDEYEEDGFCQPYRGIACARFIGNRTVYMESLHMQGEIENQITAAFTMIGTSSHLSDKCSQFAIPSLCHYAFPYCDETSSVPKPRDLCRDECEILENVLCQTEYIFARSNPMILMRLKLPNCEDLPQPESPEAANCIRIGIPMADPINKNHKCYNSTGVDYRGTVSVTKSGRQCQPWNSQYPHTHTFTALRFPELNGGHSYCRNPGNQKEAPWCFTLDENFKSDLCDIPACGK

SEQ ID NO: 12386 - protein, 10 aa, Artificial Sequence
  Synthetic polypeptide
QKQSCQSVLN

SEQ ID NO: 12387 - protein, 26 aa, Artificial Sequence
  Synthetic polypeptide
WLPRALCLKDSTTDPRLNRNRAVSQC

SEQ ID NO: 12388 - protein, 917 aa, Artificial Sequence
  Synthetic polypeptide
RTLRQIPGLTETELSVSAELVPTSSWNISSELNKDSYLTLDEPMNNITTSLGQTAELHCKVSGNPPPTIRWFKNDAPVVQEPRRLSFRSTIYGSRLRIRNLDTTDTGYFQCVATNGKEVVSSTGVLFVKFGPPPTASPGYSDEYEEDGFCQPYRGIACARFIGNRTVYMESLHMQGEIENQITAAFTMIGTSSHLSDKCSQFAIPSLCHYAFPYCDETSSVPKPRDLCRDECEILENVLCQTEYIFARSNPMILMRLKLPNCEDLPQPESPEAANCIRIGIPMADPINKNHKCYNSTGVDYRGTVSVTKSGRQCQPWNSQYPHTHTFTALRFPELNGGHSYCRNPGNQKEAPWCFTLDENFKSDLCDIPACDSKDSKEKNKMEILYILVPSVAIPLAIALLFFFICVCRNNQKSSSAPVQRQPKHVRGQNVEMSMLNAYKPKSKAKELPLSAVRFMEELGECAFGKIYKGHLYLPGMDHAQLVAIKTLKDYNNPQQWTEFQQEASLMAELHHPNIVCLLGAVTQEQPVCMLFEYINQGDLHEFLIMRSPHSDVGCSSDEDGTVKSSLDHGDFLHIAIQIAAGMEYLSSHFFVHKDLAARNILIGEQLHVKISDLGLSREIYSADYYRVQSKSLLPIRWMPPEAIMYGKFSSDSDIWSFGVVLWEIFSFGLQPYYGFSNQEVIEMVRKRQLLPCSEDCPPRMYSLMTECWNEIPSRRPRFKDIHVRLRSWEGLSSHTSSTTPSGGNATTQTTSLSASPVSNLSNPRYPNYMFPSQGITPQGQIAGFIGPPIPQNQRFIPINGYPIPPGYAAFPAAHYQPTGPPRVIQHCPPPKSRSPSSASGSTSTGHVTSLPSSGSNQEANIPLLPHMSIPNHPGGMGITVFGNKSQKPYKIDSKQASLLGDANIHGHTESMISAEL

SEQ ID NO: 12389 - protein, 46 aa, Artificial Sequence
  Synthetic polypeptide
GWAWQLTPVIPALRETEDASGWHTWLPLHAQNCFLLYIQAPEQPPA

SEQ ID NO: 12390 - protein, 37 aa, Artificial Sequence
  Synthetic polypeptide
SQHFGRLRMLLAGTPGFPSMLRTASYSTSRLLSSPQL

SEQ ID NO: 12391 - protein, 59 aa, Artificial Sequence
  Synthetic polypeptide
GQARWLTPVIPALWEAEALCWPGTCPPGHARRAPAPQWTWRRRRRRALWMAKGTGRAQA

SEQ ID NO: 12392 - protein, 63 aa, Artificial Sequence
  Synthetic polypeptide
SQPFGRLRLCAGPERVHPVMPAAHQPRSGLGGGGGGELCGWQRGPEEHRPETLQEESKEETHG

SEQ ID NO: 12393 - protein, 52 aa, Artificial Sequence
  Synthetic polypeptide
NPVSTKNTNTRLWWCVLLVQATREAEARGSRMSPRRLPAAAPPGAPQPLRGL

SEQ ID NO: 12394 - protein, 1047 aa, Artificial Sequence
  Synthetic polypeptide
SKLLGRLRLEDHVCHHADCQQLHRRGPLNLCEACDSKFHSTMHYDGHVRFDLPPQGSVLARNVSTRSCPPRTSPAVDLEEEEEESSVDGKGDRKSTGLKLSKKKARRRHTDDPSKECFTLKFDLNVDIETEIVPAMKKKSLGEVLLPVFERKGIALGKVDIYLDQSNTPLSLTFEAYRFGGHYLRVKAPAKPGDEGKVEQGMKDSKSLSLPILRPAGTGPPALERVDAQSRRESLDILAPGRRRKNMSEFLGEASIPGQEPPTPSSCSLPSGSSGSTNTGDSWKNRAASRFSGFFSSGPSTSAFGREVDKMEQLEGKLHTYSLFGLPRLPRGLRFDHDSWEEEYDEDEDEDNACLRLEDSWRELIDGHEKLTRRQCHQQEAVWELLHTEASYIRKLRVIINLFLCCLLNLQESGLLCEVEAERLFSNIPEIAQLHRRLWASVMAPVLEKARRTRALLQPGDFLKGFKMFGSLFKPYIRYCMEEEGCMEYMRGLLRDNDLFRAYITWAEKHPQCQRLKLSDMLAKPHQRLTKYPLLLKSVLRKTEEPRAKEAVVAMIGSVERFIHHVNACMRQRQERQRLAAVVSRIDAYEVVESSSDEVDKLLKEFLHLDLTAPIPGASPEETRQLLLEGSLRMKEGKDSKMDVYCFLFTDLLLVTKAVKKAERTRVIRPPLLVDKIVCRELRDPGSFLLIYLNEFHSAVGAYTFQASGQALCRGWVDTIYNAQNQLQQLRAQEPPGSQQPLQSLEEEEDEQEEEEEEEEEEEEGEDSGTSAASSPTIMRKSSGSPDSQHCASDGSTETLAMVVVEPGDTLSSPEFDSGPFSSQSDETSLSTTASSATPTSELLPLGPVDGRSCSMDSAYGTLSPTSLQDFVAPGPMAELVPRAPESPRVPSPPPSPRLRRRTPVQLLSCPPHLLKSKSEASLLQLLAGAGTHGTPSAPSRSLSELCLAVPAPGIRTQGSPQEAGPSWDCRGAPSPGSGPGLVGCLAGEPAGSHRKRCGDLPSGASPRVQPEPPPGVSAQHRKLTLAQLYRIRTTLLLNSTLTASEV

SEQ ID NO: 12395 - protein, 90 aa, Artificial Sequence
  Synthetic polypeptide
GSRITYVTTPTASSCTAGGPSTSARPVTASSTAPCIMMGMSASTFPHKALCWPGTCPPGHARRAPAPQWTWRRRRRRALWMAKGTGRAQA

SEQ ID NO: 12396 - protein, 816 aa, Artificial Sequence
  Synthetic polypeptide
SKLLGRLRLEDHVCHHADCQQLHRRGPLNLCEACDSKFHSTMHYDGHVRFDLPPQGSVLARNVSTRSCPPRTSPAVDLEEEEEESSVDGKGDRKSTGLKLSKKKARRRHTDDPSKECFTLKFDLNVDIETEIVPAMKKKSLGEVLLPVFERKGIALGKVDIYLDQSNTPLSLTFEAYRFGGHYLRVKAPAKPGDEGKVEQGMKDSKSLSLPILRPAGTGPPALERVDAQSRRESLDILAPGRRRKNMSEFLGEASIPGQEPPTPSSCSLPSGSSGSTNTGDSWKNRAASRFSGFFSSGPSTSAFGREVDKMEQLEGKLHTYSLFGLPRLPRGLRFDHDSWEEEYDEDEDEDNACLRLEDSWRELIDGHEKLTRRQCHQQEAVWELLHTEASYIRKLRVIINLFLCCLLNLQESGLLCEVEAERLFSNIPEIAQLHRRLWASVMAPVLEKARRTRALLQPGDFLKGFKMFGSLFKPYIRYCMEEEGCMEYMRGLLRDNDLFRAYITWAEKHPQCQRLKLSDMLAKPHQRLTKYPLLLKSVLRKTEEPRAKEAVVAMIGSVERFIHHVNACMRQRQERQRLAAVVSRIDAYEVVESSSDEVDKLLKEFLHLDLTAPIPGASPEETRQLLLEGSLRMKEGKDSKMDVYCFLFTDLLLVTKAVKKAERTRVIRPPLLVDKIVCRELRDPGSFLLIYLNEFHSAVGAYTFQASGQALCRGWVDTIYNAQNQLQQLRAQEPPGSQQPLQSLEEEEDEQEEEEEEEEEEEEGEDSGTSAASSPTIMRKSSGSPDSQHWKLTLAQLYRIRTTLLLNSTLTASEV

SEQ ID NO: 12397 - protein, 114 aa, Artificial Sequence
  Synthetic polypeptide
CLRQSWMDGRHHQFWLVLCSFSVISTLLLAQPFDCYMQSDQELDFHHPIGDTWAICVTYWQTSPTALTSSLSQLSRSLSVQYPFSTNRGMDVALTVMYSLEKPKYIRLAQILNE

SEQ ID NO: 12398 - protein, 20 aa, Artificial Sequence
  Synthetic polypeptide
DKAGWTGGIINSGWCYVHFL

SEQ ID NO: 12399 - protein, 347 aa, Artificial Sequence
  Synthetic polypeptide
LLYSVFFIRGNKCQTRKNVTMMFKTKLDGRAASSILVGAMFIFCNLYSTPGPAIRLLYAKRPGIGLSPSHRRYLGYMCDLLADKPYRPHFKPLTIKSITVSPIPFFNKQRNGCRPYCDVLIGETKIYSTCTDFERMKEYRVQDGKIFIPLNITVQGDVVVSMYHLRSTIGSRLQAKVTNTQIFQLQFHTGFIPLDTTVLKFTKPELDACDVPEKYPQLFQVTLDVELQPHDKVIDLTPPWEHYCTKDVNPSILFSSHQEHQDTLALGGQAPIDIPPDNPRHYGQSGFFASLCWQDQKSEKSFCEEDHAALVNQESEQSDDELLTLSSPHGNANGDKPHGVKKPSKKQ

SEQ ID NO: 12400 - protein, 775 aa, Artificial Sequence
  Synthetic polypeptide
LLYSVFFIRGNKCQTRKNVTMMFKTKLDGRAASSILVGAMFIFCNLYSTPGPAIRLLYAKRPGIGLSPSHRRYLGYMCDLLADKPYRPHFKPLTIKSITVSPIPFFNKQRNGCRPYCDVLIGETKIYSTCTDFERMKEYRVQDGKIFIPLNITVQGDVVVSMYHLRSTIGSRLQAKVTNTQIFQLQFHTGFIPLDTTVLKFTKPELDACDVPEKYPQLFQVTLDVELQPHDKVIDLTPPWEHYCTKDVNPSILFSSHQEHQDTLALGGQAPIDIPPDNPRHYGQSGFFASLCWQDQKSEKSFCEEDHAALVNQESEQSDDELLTLSSPHGNANGDKPHGVKKPSKKQQEPAAPPPPEDVDLLGLEGSAMSNSFSPPAAPPTNSELLSDLFGGGGAAGPTQAGQSGVEDVFHPSGPASTQSTPRRSATSTSASPTLRVGEGATFDPFGAPSKPSGQDLLGSFLNTSSASSDPFLQPTRSPSPTVHASSTPAVNIQPDVSGGWDWHAKPGGFGMGSKSAATSPTGSSHGTPTHQSKPQTLDPFADLGTLGSSSFASKPTTPTGLGGGFPPLSSPQKASPQPMGGGWQQGGAYNWQQPQPKPQPSMPHSSPQNRPNYNVSFSAMPGGQNERGKGSSNLEGKQKAADFEDLLSGQGFNAHKDKKGPRTIAEMRKEEMAKEMDPEKLKILEWIEGKERNIRALLSTMHTVLWAGETKWKPVGMADLVTPEQVKKVYRKAVLVVHPDKATGQPYEQYAKMIFMELNDAWSEFENQGQKPLY

SEQ ID NO: 12401 - protein, 868 aa, Artificial Sequence
  Synthetic polypeptide
CQNLEATMMSLVGLKKRTRKAFGIRKKEKDTDSTGSPDRDGIQGKKKTQKTQLLLTSCFWLRALSLTLSQKKSNGAPNGFYAEIDWERYNSPELDEEGYSIRPEEPGSTKGKHFYSSSESEEEEESHKKFNIKIKPLQSKDILKNAATVDELKASIGNIALSPSPVRKSPRRSPGAIKRNLSSEEVARPRRSTPTPELISKKPPDDTTALAPLFGPPLESAFDEQKTEVLLDQPEIWGSGQPINPSMESPKLTRPFPTGTPPPLPPKNVPATPPRTGSPLTIGPGNDQSATEVKIEKLPSINDLDSIFGPVLSPKSVAVNAEEKWVHFSDTSPEHVTPELTPREKVVSPPATPDNPADSPAPGPLGPPGPTGPPGPPGPPRNVLSPLNLEEVQKKVAEQTFIKDDYLETISSPKDFGLGQRATPPPPPPPTYRTVVSSPGPGSGPGPGTTSDGKTEAQRYQVICPSLQAGGNELDSYSGASSPARPATPLVPCRSTTPPPPPPRPPSRPKLPPGKPGVGDVSRPFSPPIHSSSPPPIAPLARAESTSSISSTNSLSAATTPTVENEQPSLVWFDRGKFYLTFEGSSRGPSPLTMGAQDTLPVAAAFTETVNAYFKGADPSKCIVKITGEMVLSFPAGITRHFANNPSPAALTFRVINFSRLEHVLPNPQLLCCDNTQNDANTKEFWVNMPNLMTHLKKVSEQKPQATYYNVDMLKYQVSAQGIQSTPLNLAVNWRCEPSSTDLRIDYKYNTDAMTTAVALNNVQFLVPIDGGVTKLQAVLPPAVWNAEQQRILWKIPDISQKSENGGVGSLLARFQLSEGPSKPSPLVVQFTSEGSTLSGCDIELVGAGYRFSLIKKRFAAGKYLADN

SEQ ID NO: 12402 - protein, 30 aa, Artificial Sequence
  Synthetic polypeptide
PKLGSNHDVLSRIEKTYKEGLWNTEERKGH

SEQ ID NO: 12403 - protein, 640 aa, Artificial Sequence
  Synthetic polypeptide
CQNLEATMMSLVGLKKRTRKAFGIRKKEKDTDSTGSPDRDGIKKSNGAPNGFYAEIDWERYNSPELDEEGYSIRPEEPGSTKGKHFYSSSESEEEEESHKKFNIKIKPLQSKDILKNAATVDELKASIGNIALSPSPVGAIKRNLSSEEVARPRRSTPTPELISKKPPDDTTALAPLFGPPLESAFDEQKTEVLLDQPEIWGSGQPINPSMESPKLTRPFPTGTPPPLPPKNVPATPPRTGSPLTIGPGASSPARPATPLVPCRSTTPPPPPPRPPSRPKLPPGKPGVGDVSRPFSPPIHSSSPPPIAPLARAESTSSISSTNSLSAATTPTVVSEDDVFYDKLPSFERRCETPAGSSRGPSPLTMGAQDTLPVAAAFTETVNAYFKGADPSKCIVKITGEMVLSFPAGITRHFANNPSPAALTFRVINFSRLEHVLPNPQLLCCDNTQNDANTKEFWVNMPNLMTHLKKVSEQKPQATYYNVDMLKYQVSAQGIQSTPLNLAVNWRCEPSSTDLRIDYKYNTDAMTTAVALNNVQFLVPIDGGVTKLQAVLPPAVWNAEQQRILWKIPDISQKSENGGVGSLLARFQLSEGPSKPSPLVVQFTSEGSTLSGCDIELVGAGYRFSLIKKRFAAGKYLADN

SEQ ID NO: 12404 - protein, 269 aa, Artificial Sequence
  Synthetic polypeptide
CQNLEATMMSLVGLKKRTRKAFGIRKKEKDTDSTGSPDRDGIQPSPHEPPYNSKAECAREGGKKVSKKSNGAPNGFYAEIDWERYNSPELDEEGYSIRPEEPGSTKGKHFYSSSESEEEEESHKKFNIKIKPLQSKDILKNAATVDELKASIGNIALSPSPVGAIKRNLSSEEVARPRRSTPTPELISKKPPDDTTALAPLFGPPLESAFDEQKTEVLLDQPEIWGSGQPINPSMESPKLTRPFPTGTPPPLPPKNVPATPPRTGSPLT

SEQ ID NO: 12405 - protein, 627 aa, Artificial Sequence
  Synthetic polypeptide
CQNLEATMMSLVGLKKRTRKAFGIRKKEKDTDSTGSPDRDGINSPELDEEGYSIRPEEPGSTKGKHFYSSSESEEEEESHKKFNIKIKPLQSKDILKNAATVDELKASIGNIALSPSPVRKSPRRSPGAIKRNLSSEEVARPRRSTPTPELISKKPPDDTTALAPLFGPPLESAFDEQKTEVLLDQPEIWGSGQPINPSMESPKLTRPFPTGTPPPLPPKNVPATPPRTGSPLTIGPGASSPARPATPLVPCRSTTPPPPPPRPPSRPKLPPGKPGVGDVSRPFSPPIHSSSPPPIAPLARAESTSSISSTNSLSAATTPTVENEQPSLVWFDRGKFYLTFEGSSRGPSPLTMGAQDTLPVAAAFTETVNAYFKGADPSKCIVKITGEMVLSFPAGITRHFANNPSPAALTFRVINFSRLEHVLPNPQLLCCDNTQNDANTKEFWVNMPNLMTHLKKVSEQKPQATYYNVDMLKYQVSAQGIQSTPLNLAVNWRCEPSSTDLRIDYKYNTDAMTTAVALNNVQFLVPIDGGVTKLQAVLPPAVWNAEQQRILWKIPDISQKSENGGVGSLLARFQLSEGPSKPSPLVVQFTSEGSTLSGCDIELVGAGYRFSLIKKRFAAGKYLADN

SEQ ID NO: 12406 - protein, 837 aa, Artificial Sequence
  Synthetic polypeptide
CQNLEATMMSLVGLKKRTRKAFGIRKKEKDTDSTGSPDRDGIQPSPHEPPYNSKAECAREGGKKVSKKSNGAPNGFYAEIDWERYNSPELDEEGYSIRPEEPGSTKGKHFYSSSESEEEEESHKKFNIKIKPLQSKDILKNAATVDELKASIGNIALSPSPVRKSPRRSPGAIKRNLSSEEVARPRRSTPTPELISKKPPDDTTALAPLFGPPLESAFDEQKTEVLLDQPEIWGSGQPINPSMESPKLTRPFPTGTPPPLPPKNVPATPPRTGSPLTIGPGNDQSATEVKIEKLPSINDLDSIFGPVLSPKSVAVNAEEKWVHFSDTSPEHVTPELTPREKVVSPPATPDNPADSPAPGPLGPPGPTGPPGPPGPPRNVLSPLNLEEVQKKVAEQTFIKDDYLETISSPKDFGLGQRATPPPPPPPTYRTVVSSPGPGSGPGPGTTSGASSPARPATPLVPCRSTTPPPPPPRPPSRPKLPPGKPGVGDVSRPFSPPIHSSSPPPIAPLARAESTSSISSTNSLSAATTPTVENEQPSLVWFDRGKFYLTFEGSSRGPSPLTMGAQDTLPVAAAFTETVNAYFKGADPSKCIVKITGEMVLSFPAGITRHFANNPSPAALTFRVINFSRLEHVLPNPQLLCCDNTQNDANTKEFWVNMPNLMTHLKKVSEQKPQATYYNVDMLKYQVSAQGIQSTPLNLAVNWRCEPSSTDLRIDYKYNTDAMTTAVALNNVQFLVPIDGGVTKLQAVLPPAVWNAEQQRILWKIPDISQKSENGGVGSLLARFQLSEGPSKPSPLVVQFTSEGSTLSGCDIELVGAGYRFSLIKKRFAAGKYLADN

SEQ ID NO: 12407 - protein, 435 aa, Artificial Sequence
  Synthetic polypeptide
RISCTWHLLQQKRSTMPKPEPEEPEDVLESAKHEEVEEESKKEEEEEIHAEESTIPANLERLWSFSCDLTKGLNVSSLAWNKTNPDLLAVGYGHFGFKEQKRGLACCWSIKNPMWPERIYQSPYGVTAVDFSIGAPNLLAVGYHNGTIAIYNVRSNSNVPVLDSSESPQKHLGPVWQLQWIEQDRGTTGDGKREILVSISADGRISKWVIRKGLDCYDLMRLKRTTAASNKKGGEKEKKDEALISRQAPGMCFAFHPKDTNIYLAGTEEGHIHKCSCSYNEQYLDTYRGHKGPVYKVTWNPFCHDVFLSCSADWGVIIWQQENVKPSLSFYPATSVVYDVAWSPKSSYIFAAANENRVEIWDLHISTLDPLIVNTANPGIKFTTILFAKQTDCLLVGDSDGQVSVYELRNMPTVLETGRGDIMDTLLGSKSNQSA

SEQ ID NO: 12408 - protein, 25 aa, Artificial Sequence
  Synthetic polypeptide
VVPGTFYNRKEAQCLNLNLKSLKMF

SEQ ID NO: 12409 - protein, 402 aa, Artificial Sequence
  Synthetic polypeptide
RISCTWHLLQQKRSTMPKPEPEEPEDVLESAKHEEVEEESKKEEEEEIHAEESTIPANLERLWSFSCDLTKGLNVSSLAWNKTNPDLLAVGYGHFGFKEQKRGLACCWSIKNPMWPERIYQSPYGVTAVDFSIGAPNLLAVGYHNGTIAIYNVRSNSNVPVLDSSESPQKHLGPVWQLQWIEQDRGTTGDGKREILVSISADGRISKWVIRKGLDCYDLMRLKRTTAASNKKGGEKEKKDEALISRQAPGMCFAFHPKGPVYKVTWNPFCHDVFLSCSADWGVIIWQQENVKPSLSFYPATSVVYDVAWSPKSSYIFAAANENRVEIWDLHISTLDPLIVNTANPGIKFTTILFAKQTDCLLVGDSDGQVSVYELRNMPTVLETGRGDIMDTLLGSKSNQSA

SEQ ID NO: 12410 - protein, 132 aa, Artificial Sequence
  Synthetic polypeptide
RISCTWHLLQQKRSTMPKPEPEEPEDVLESAKHEEVEEESKKEEEEEIHAEESTIPANLERLWSFSCDLTKGLNVSSLAWNKTNPDLLAVGYGHFGFKEQKRGLACCWSIKNPMVTQTRIRSIFIWLLTKFS

SEQ ID NO: 12411 - protein, 48 aa, Artificial Sequence
  Synthetic polypeptide
SEIAPLHSSLATDIAGSLVYSYITFTEEQLSKQSEANNKLDIKGKGAV

SEQ ID NO: 12412 - protein, 51 aa, Artificial Sequence
  Synthetic polypeptide
SQLLGRLRQENRLNPGGGGCSDPRLRRCTPAWQQTLLGAWYIPISLSLKSS

SEQ ID NO: 12413 - protein, 34 aa, Artificial Sequence
  Synthetic polypeptide
TQEAEVAVIRDCAAALQPGNRHCWEPGIFLYHFH

SEQ ID NO: 12414 - protein, 20 aa, Artificial Sequence
  Synthetic polypeptide
CWLCDVSGMKLPHLFEQECL

SEQ ID NO: 12415 - protein, 8 aa, Artificial Sequence
  Synthetic polypeptide
AGYVTLVE

SEQ ID NO: 12416 - protein, 13 aa, Artificial Sequence
  Synthetic polypeptide
SCECTPACATEDH

SEQ ID NO: 12417 - protein, 24 aa, Artificial Sequence
  Synthetic polypeptide
AQEVEAAVSCDRASAPQPVQQKIM

SEQ ID NO: 12418 - protein, 15 aa, Artificial Sequence
  Synthetic polypeptide
AVIVRVHPSLCNRRS

SEQ ID NO: 12419 - protein, 54 aa, Artificial Sequence
  Synthetic polypeptide
GQDHGLWSQAALVRIPPRPLASGLTTANHPTSLCLSFPLFKLGMIIVPTKGSWS

SEQ ID NO: 12420 - protein, 12 aa, Artificial Sequence
  Synthetic polypeptide
YPLKDPGLKILV

SEQ ID NO: 12421 - protein, 8 aa, Artificial Sequence
  Synthetic polypeptide
RILVLKFW

SEQ ID NO: 12422 - protein, 76 aa, Artificial Sequence
  Synthetic polypeptide
GQDHGLWSQAALVRIPPRPLASGLTTANHPTSLCLSFPLFKLGMIIVPTKGSWLSPHTCSWAQQRRGIHRAGAMRA

SEQ ID NO: 12423 - protein, 27 aa, Artificial Sequence
  Synthetic polypeptide
YPLKDPGSHHTLVHGRSKEEGSTELEP

SEQ ID NO: 12424 - protein, 26 aa, Artificial Sequence
  Synthetic polypeptide
RILALTTHLFMGAAKKRDPQSWSHEG

SEQ ID NO: 12425 - protein, 221 aa, Artificial Sequence
  Synthetic polypeptide
EKPQWMENLIRGRNPPQYQRSPCKEVRAALRKRPEEELQCLEMTTKRKIIGRLVPCRCFRGEEEIISVLDYSHCSLQQVPKEVFNFERTLEELYLDANQIEELPKQLFNCQALRKLSIPDNDLSNLPTTIASLVNLKELDISKNGVQEFPENIKCCKCLTIIEASVNPISKLPDGFTQLLNLTQLYLNDAFLEFLPANFGRLVKLRILELRENHLKTLPNI

SEQ ID NO: 12426 - protein, 22 aa, Artificial Sequence
  Synthetic polypeptide
TSKKEGKCLETKIKRSHNGWRT

SEQ ID NO: 12427 - protein, 59 aa, Artificial Sequence
  Synthetic polypeptide
DKTPGNAGEKITNYIFYCFVNSELPKKKGNVWRPKLREATMDGEPNKGKESPAIPEKSL

SEQ ID NO: 12428 - protein, 12 aa, Artificial Sequence
  Synthetic polypeptide
WKFWPAQSGWRT

SEQ ID NO: 12429 - protein, 37 aa, Artificial Sequence
  Synthetic polypeptide
DALSHHSFQHSGSSGQHNQDGEPNKGKESPAIPEKSL

SEQ ID NO: 12430 - protein, 235 aa, Artificial Sequence
  Synthetic polypeptide
MPSLTTPFNIVEVLASTIRMENLIRGRNPPQYQRSPCKEVRAALRKRPEEELQCLEMTTKRKIIGRLVPCRCFRGEEEIISVLDYSHCSLQQVPKEVFNFERTLEELYLDANQIEELPKQLFNCQALRKLSIPDNDLSNLPTTIASLVNLKELDISKNGVQEFPENIKCCKCLTIIEASVNPISKLPDGFTQLLNLTQLYLNDAFLEFLPANFGRLVKLRILELRENHLKTLPNI

SEQ ID NO: 12431 - protein, 50 aa, Artificial Sequence
  Synthetic polypeptide
EFTLFPQLLEMLLAALQPSSEIASRKENIFIHGHNPIPRDLHPMISQCSL

SEQ ID NO: 12432 - protein, 25 aa, Artificial Sequence
  Synthetic polypeptide
SVNAVYREVKDVGIPGYVKKQNRNS

SEQ ID NO: 12433 - protein, 1280 aa, Artificial Sequence
  Synthetic polypeptide
PHSQRPPSNDQSMQSIGKLKMLVYLDMSKNRIETVDMDISGCEALEDLLLSSNMLQQLPDSIGLLKKLTTLKVDDNQLTMLPNTIGNLSLLEEFDCSCNELESLPSTIGYLHSLRTLAVDENFLPELPREIGSCKNVTVMSLRSNKLEFLPEEIGQMQKLRVLNLSDNRLKNLPFSFTKLKELAALWLSDNQSKALIPLQTEAHPETKQRVLTNYMFPQQPRGDEDFQSDSDSFNPTLWEEQRQQRMTVAFEFEDKKEDDENAGKVKDLSCQAPWERGQRGITLQPARLSGDCCTPWARCDQQIQDMPVPQNDPQLAWGCISGLQQERSMCTPLPVAAQSTTLPSLSGRQVEINLKRYPTPYPEDLKNMVKSVQNLVGKPSHGVRVENSNPTANTEQTVKEKYEHKWPVAPKEITVEDSFVHPANEMRIGELHPSLAETPLYPPKLVLLGKDKKESTDESEVDKTHCLNNSVSSGTYSDYSPSQASSGSSNTRVKVGSLQTTAKDAVHNSLWGNRIAPSFPQPLDSKPLLSQREAVPPGNIPQRPDRLPMSDTFTDNWTDGSHYDNTGFVAEETTAENANSNPLLSSKSRSTSSHGRRPLIRQDRIVGVPLELEQSTHRHTPETEVPPSNPWQNWTRTPSPFEDRTAFPSKLETTPTTSPLPERKEHIKESTEIPSPFSPGVPWEYHDSNPNRSLSNVFSQIHCRPESSKGVISISKSTERLSPLMKDIKSNKFKKSQSIDEIDIGTYKVYNIPLENYASGSDHLGSHERPDKMLGPEHGMSSMSRSQSVPMLDDEMLTYGSSKGPQQQKASMTKKVYQFDQSFNPQGSVEVKAEKRIPPPFQHNPEYVQQASKNIAKDLISPRAYRGYPPMEQMFSFSQPSVNEDAVVNAQFASQGARAGFLRRADSLVSATEMAMFRRVNEPHELPPTDRYGRPPYRGGLDRQSSVTVTESQFLKRNGRYEDEHPSYQEVKAQAGSFPVKNLTQRRPLSARSYSTESYGASQTRPVSARPTMAALLEKIPSDYNLGNYGDKPSDNSDLKTRPTPVKGEESCGKMPADWRQQLLRHIEARRLDRTPSQQSNILDNGQEDVSPSGQWNPYPLGRRDVPPDTITKKAGSHIQTLMGSQSLQHRSREQQPYEGNINKVTIQQFQSPLPIQIPSSQATRGPQPGRCLIQTKGQRSMDGYPEQFCVRIEKNPGLGFSISGGISGQGNPFKPSDKGIFVTRVQPDGPASNLLQPGDKILQANGHSFVHMEHEKAVLLLKSFQNTVDLVIQRELTV

SEQ ID NO: 12434 - protein, 1327 aa, Artificial Sequence
  Synthetic polypeptide
PHSQRPPSNDQSMQSIGKLKMLVYLDMSKNRIETVDMDISGCEALEDLLLSSNMLQQLPDSIGLLKKLTTLKVDDNQLTMLPNTIGNLSLLEEFDCSCNELESLPSTIGYLHSLRTLAVDENFLPELPREIGSCKNVTVMSLRSNKLEFLPEEIGQMQKLRVLNLSDNRLKNLPFSFTKLKELAALWLSDNQSKALIPLQTEAHPETKQRVLTNYMFPQQPRGDEDFQSDSDSFNPTLWEEQRQQRMTVAFEFEDKKEDDENAGKVKDLSCQAPWERGQRGITLQPARLSGDCCTPWARCDQQIQDMPVPQNDPQLAWGCISGLQQERSMCTPLPVAAQSTTLPSLSGRQVEINLKRYPTPYPEDLKNMVKSVQNLVGKPSHGVRVENSNPTANTEQTVKEKYEHKWPVAPKEITVEDSFVHPANEMRIGELHPSLAETPLYPPKLVLLGKDKKESTDESEVDKTHCLNNSVSSGTYSDYSPSQASSGSSNTRVKVGSLQTTAKDAVHNSLWGNRIAPSFPQPLDSKPLLSQREAVPPGNIPQRPDRLPMSDTFTDNWTDGSHYDNTGFVAEETTAENANSNPLLSSKSRSTSSHGRRPLIRQDRIVGVPLELEQSTHRHTPETEVPPSNPWQNWTRTPSPFEDRTAFPSKLETTPTTSPLPERKEHIKESTEIPSPFSPGVPWEYHDSNPNRSLSNVFSQIHCRPESSKGVISISKSTERLSPLMKDIKSNKFKKSQSIDEIDIGTYKVYNIPLENYASGSDHLGSHERPDKMLGPEHGMSSMSRSQSVPMLDDEMLTYGSSKGPQQQKASMTKKVYQFDQSFNPQGSVEVKAEKRIPPPFQHNPEYVQQASKNIAKDLISPRAYRGYPPMEQMFSFSQPSVNEDAVVNAQFASQGARAGFLRRADSLVSATEMAMFRRVNEPHELPPTDRYGRPPYRGGLDRQSSVTVTESQFLKRNGRYEDEHPSYQEVKAQAGSFPVKNLTQRRPLSARSYSTESYGASQTRPVSARPTMAALLEKIPSDYNLGNYGDKPSDNSDLKTRPTPVKGEESCGKMPADWRQQLLRHIEARRLDRNAAYKHNTVNLGMLPYGGISAMHAGRSMTLNLQTKSKFDHQELPLQKTPSQQSNILDNGQEDVSPSGQWNPYPLGRRDVPPDTITKKAGSHIQTLMGSQSLQHRSREQQPYEGNINKVTIQQFQSPLPIQIPSSQATRGPQPGRCLIQTKGQRSMDGYPEQFCVRIEKNPGLGFSISGGISGQGNPFKPSDKGIFVTRVQPDGPASNLLQPGDKILQANGHSFVHMEHEKAVLLLKSFQNTVDLVIQRELTV

SEQ ID NO: 12435 - protein, 34 aa, Artificial Sequence
  Synthetic polypeptide
ITWLSTFHKNITTGWKSIPSSSSSHINERNSCYT

SEQ ID NO: 12436 - protein, 63 aa, Artificial Sequence
  Synthetic polypeptide
WYLHHRIVEKIGLLRVTEYKLLGSVPFTKTLLLDGNPFRVPRAAILMKGTAAILEYLRDRIPT

SEQ ID NO: 12437 - protein, 29 aa, Artificial Sequence
  Synthetic polypeptide
LNINYLAQYLSQKHYYWMEIHSEFLEQPY

SEQ ID NO: 12438 - protein, 44 aa, Artificial Sequence
  Synthetic polypeptide
LYICCSLSIRTLLLDGNPFRVPRAAILMKGTAAILEYLRDRIPT

SEQ ID NO: 12439 - protein, 26 aa, Artificial Sequence
  Synthetic polypeptide
FTSAVPSASEHYYWMEIHSEFLEQPY

SEQ ID NO: 12440 - protein, 34 aa, Artificial Sequence
  Synthetic polypeptide
LHLLFPQHQNITTGWKSIPSSSSSHINERNSCYT

SEQ ID NO: 12441 - protein, 423 aa, Artificial Sequence
  Synthetic polypeptide
SMQEDVHSDSPLPVSSRVCFVKFHDPDSAVVAQHLTNTVFVDRALIVVPYAEGVIPDEAKALSLLAPANAVAGLLPGGGLLPTPNPLTQIGAVPLAALGAPTLDPALAALGLPGANLNSQSLAADQLLKLMSTVDPKLNHVAAGLVSPSLKSDTSSKEIEEAMKRVREAQSLISAAIEPDKKEEKRRHSRSRSRSRRRRTPSSSRHRRSRSRSRRRSHSKSRSRRRSKSPRRRRSHSRERGRRSRSTSKTRDKKKEDKEKKRSKTPPKSYSTARRSRSASRERRRRRSRSGTRSPKKPRSPKRKLSRSPSPRRHKKEKKKDKDKERSRDERERSTSKKKKSKDKEKDRERKSESDKDVKVTRDYDEEEQGYDSEKEKKEEKKPIETGSPKTKECSVEKGTGDSLRESKVNGDDHHEEDMDMSD

SEQ ID NO: 12442 - protein, 40 aa, Artificial Sequence
  Synthetic polypeptide
VITRFKVCKRMCTVIRLCQSHLVSALLSSMIQTQQLWHSI

SEQ ID NO: 12443 - protein, 424 aa, Artificial Sequence
  Synthetic polypeptide
SMQEDVHSDSPLPVSSRVCFVKFHDPDSAVVAQHLTNTVFVDRALIVVPYAEGVIPDEAKALSLLAPANAVAGLLPGGGLLPTPNPLTQIGAVPLAALGAPTLDPALAALGLPGANLNSQSLAADQLLKLMSTVDPKLNHVAAGLVSPSLKSDTSSKEIEEAMKRVREAQSLISAAIEPDKKEEKRRHSRSRSRSRRRRTPSSSRHRRSRSRSRRRSHSKSRSRRRSKSPRRRRSHSRERGRRSRSTSKTRDKKKEDKEKKRSKTPPKSYSTARRSRSASRERRRRRSRSGTRSPKKPRSPKRKLSRSPSPRRHKKEKKKDKDKERSRDERERSTSKKKKSKDKEKDRERKSESDKDVKQVTRDYDEEEQGYDSEKEKKEEKKPIETGSPKTKECSVEKGTGDSLRESKVNGDDHHEEDMDMSD

SEQ ID NO: 12444 - protein, 71 aa, Artificial Sequence
  Synthetic polypeptide
SMQEDVHSDSPLPVSSRVCFVKFHDPDSAVVAQHLTNTVFVDRALIVVPYAEVFHGSIKAAVKKILLTHEN

SEQ ID NO: 12445 - protein, 68 aa, Artificial Sequence
  Synthetic polypeptide
SMQEDVHSDSPLPVSSRVCFVKFHDPDSAVVAQHLTNTVFVDRALIVVPYAEVKQPTRVVVHKTAFES

SEQ ID NO: 12446 - protein, 329 aa, Artificial Sequence
  Synthetic polypeptide
SMQEDVHSDSPLPVSSRVCFVKFHDPDSAVVAQHLTNTVFVDRALIVVPYAEGVIPDEAKALSLLAPANAVAGLLPGGGLLPTPNPLTQIGAVPLAALGAPTLDPALAALGLPGANLNSQSLAADQLLKLMSTVDPKLNHVAAGLVSPSLKSDTSSKEIEEAMKRVREAQSLISAAIEPDKKEEKRRHSRSRSRSRRRRTPSSSRHRRSRSRSRRRSHSKSRSRRRSKSPRRRRSHSRERGRRSRSTSKTRDKKKEDKEKKRSKTPPKSYSTARRSRSASSLHICDSRERRRRRSRSGTRSPKKPRSPKRKLSRSPSPRRHKKEKKKDK

SEQ ID NO: 12447 - protein, 3 aa, Artificial Sequence
  Synthetic polypeptide
PKS

SEQ ID NO: 12448 - protein, 6 aa, Artificial Sequence
  Synthetic polypeptide
PDQKAR

SEQ ID NO: 12449 - protein, 331 aa, Artificial Sequence
  Synthetic polypeptide
GQEFETSLTKKLGDFYLELHWDFQSWVPLLSRILPSDACKIYKQGINIRLDTTLIDFTDMKCQRGDLSFIFNGDAAPSESFVVLDNEQKVYQRIHHEESEMETEEEVDILMSSDIYSATLSTKSISFTRAQTGWLFREDKTERVGNFLADFYLVNGLVLESRKRREHLSEEDILRNKAIMESLSKGGNIMEQNFEPIRRQSLTPPPQNTITWEEYISAENGKAPHLGRELVCKESKKTFKATIAMSQEFPLGIELLLNVLEVVAPFKHFNKLREFVQMKLPPGFPVKLDIPVFPTITATVTFQEFRYDEFDGSIFTIPDDYKEDPSRFPDL

SEQ ID NO: 12450 - protein, 20 aa, Artificial Sequence
  Synthetic polypeptide
RLISAPFWKYSFTPCCDVRK

SEQ ID NO: 12451 - protein, 410 aa, Artificial Sequence
  Synthetic polypeptide
GATLEDLSLHLSGNTPLHLAVMLGNKECAHLLLAHNAPVKVKNAQGWSPLAEAISYGDRQMITALLRKLKQQSRESVEEKRPRLLKALKELGDFYLELHWDFQSWVPLLSRILPSDACKIYKQGINIRLDTTLIDFTDMKCQRGDLSFIFNGDAAPSESFVVLDNEQKVYQRIHHEESEMETEEEVDILMSSDIYSATLSTKSISFTRAQTGWLFREDKTERVGNFLADFYLVNGLVLESRKRREHLSEEDILRNKAIMESLSKGGNIMEQNFEPIRRQSLTPPPQNTITWEEYISAENGKAPHLGRELVCKESKKTFKATIAMSQEFPLGIELLLNVLEVVAPFKHFNKLREFVQMKLPPGFPVKLDIPVFPTITATVTFQEFRYDEFDGSIFTIPDDYKEDPSRFPDL

SEQ ID NO: 12452 - protein, 55 aa, Artificial Sequence
  Synthetic polypeptide
AGSYLVFLKEAGLRRTPHTERNTERFTEKLTWDPEGPLLKTYLCTFLEILLYTLL

SEQ ID NO: 12453 - protein, 375 aa, Artificial Sequence
  Synthetic polypeptide
GATLEDLSLHLSGNTPLHLAVMLGNKVTALLRKLKQQSRESVEEKRPRLLKALKELGDFYLELHWDFQSWVPLLSRILPSDACKIYKQGINIRLDTTLIDFTDMKCQRGDLSFIFNGDAAPSESFVVLDNEQKVYQRIHHEESEMETEEEVDILMSSDIYSATLSTKSISFTRAQTGWLFREDKTERVGNFLADFYLVNGLVLESRKRREHLSEEDILRNKAIMESLSKGGNIMEQNFEPIRRQSLTPPPQNTITWEEYISAENGKAPHLGRELVCKESKKTFKATIAMSQEFPLGIELLLNVLEVVAPFKHFNKLREFVQMKLPPGFPVKLDIPVFPTITATVTFQEFRYDEFDGSIFTIPDDYKEDPSRFPDL

SEQ ID NO: 12454 - protein, 43 aa, Artificial Sequence
  Synthetic polypeptide
IGVLNIAVLEIPLGIALKKQWQHWMGLSTVQTGTSGKWHLNLD

SEQ ID NO: 12455 - protein, 46 aa, Artificial Sequence
  Synthetic polypeptide
LRSGDLPWEINPLSSCSLLYEKDPPTTSGTQTNQPKEHLTNFKLGF

SEQ ID NO: 12456 - protein, 365 aa, Artificial Sequence
  Synthetic polypeptide
WCRDSDQGTSLGRSIRCPPALCSMRKIHLRPLVLRPTSPKNISPILNWGFEYSRSGNPTRNCLEKAVAALDGAKYCTNRYFRQVASEFGLKISFVDCSKIKLLEAAITPETKLVWIETPTNPTQKVIDIEGCAHIVHKHGDIILVVDNTFMSPYFQRPLALGADISMYSATKYMNGHSDVVMGLVSVNCESLHNRLRFLQNSLGAVPSPIDCYLCNRGLKTLHVRMEKHFKNGMAVAQFLESNPWVEKVIYPGLPSHPQHELVKRQCTGCTGMVTFYIKGTLQHAEIFLKNLKLFTLAESLGGFESLAELPAIMTHASVLKNDRDVLGISDTLIRLSVGLEDEEDLLEDLDQALKAAHPPSGSHS

SEQ ID NO: 12457 - protein, 36 aa, Artificial Sequence
  Synthetic polypeptide
IGVLNIAVLEIPLGIALKKQWQHWMGLSTVWPLLQV

SEQ ID NO: 12458 - protein, 397 aa, Artificial Sequence
  Synthetic polypeptide
WCRDSDQGTSLGRSIRCPPALCSMRKIHLRPLVLRPTSPKNISPILNWGFEYSRSGNPTRNCLEKAVAALDGAKYCLAFASGLAATVTITHLLKAGDQIICMDDVYGGTNRYFRQVASEFGLKISFVDCSKIKLLEAAITPETKLVWIETPTNPTQKVIDIEGCAHIVHKHGDIILVVDNTFMSPYFQRPLALGADISMYSATKYMNGHSDVVMGLVSVNCESLHNRLRFLQNSLGAVPSPIDCYLCNRGLKTLHVRMEKHFKNGMAVAQFLESNPWVEKVIYPGLPSHPQHELVKRQCTGCTGMVTFYIKGTLQHAEIFLKNLKLFTLAESLGGFESLAELPAIMTHASVLKNDRDVLGISDTLIRLSVGLEDEEDLLEDLDQALKAAHPPSGSHS

SEQ ID NO: 12459 - protein, 353 aa, Artificial Sequence
  Synthetic polypeptide
WCRDSDQGTSLGRSIRCPPALCSMRKIHLRPLVLRPTSPKNISPILNWGFEYSRSGNPTRNCLEKAVAALDGAKYCLAFASGLAATVTITHLLKAGDQIICMDDVYGGTNRYFRQVASEFGLKISFVDCSKIKLLEAAITPETKRPLALGADISMYSATKYMNGHSDVVMGLVSVNCESLHNRLRFLQNSLGAVPSPIDCYLCNRGLKTLHVRMEKHFKNGMAVAQFLESNPWVEKVIYPGLPSHPQHELVKRQCTGCTGMVTFYIKGTLQHAEIFLKNLKLFTLAESLGGFESLAELPAIMTHASVLKNDRDVLGISDTLIRLSVGLEDEEDLLEDLDQALKAAHPPSGSHS

SEQ ID NO: 12460 - protein, 88 aa, Artificial Sequence
  Synthetic polypeptide
SGHWAKQCPQPGFPPKPCPICVGPHWKLDCPTPLAATPRAPGTLAQGSLTDSFPDLLGLAAETDAAQSPRKPPGPSQMLLVTLTVEGF

SEQ ID NO: 12461 - protein, 322 aa, Artificial Sequence
  Synthetic polypeptide
LLQWRGFEYSRSGNPTRNCLEKAVAALDGAKYCTNRYFRQVASEFGLKISFVDCSKIKLLEAAITPETKLVWIETPTNPTQKVIDIEGCAHIVHKHGDIILVVDNTFMSPYFQRPLALGADISMYSATKYMNGHSDVVMGLVSVNCESLHNRLRFLQNSLGAVPSPIDCYLCNRGLKTLHVRMEKHFKNGMAVAQFLESNPWVEKVIYPGLPSHPQHELVKRQCTGCTGMVTFYIKGTLQHAEIFLKNLKLFTLAESLGGFESLAELPAIMTHASVLKNDRDVLGISDTLIRLSVGLEDEEDLLEDLDQALKAAHPPSGSHS

SEQ ID NO: 12462 - protein, 64 aa, Artificial Sequence
  Synthetic polypeptide
CCPITSEASWTITDAFGNSYSGGVLNIAVLEIPLGIALKKQWQHWMGLSTVQTGTSGKWHLNLD

SEQ ID NO: 12463 - protein, 354 aa, Artificial Sequence
  Synthetic polypeptide
LLQWRGFEYSRSGNPTRNCLEKAVAALDGAKYCLAFASGLAATVTITHLLKAGDQIICMDDVYGGTNRYFRQVASEFGLKISFVDCSKIKLLEAAITPETKLVWIETPTNPTQKVIDIEGCAHIVHKHGDIILVVDNTFMSPYFQRPLALGADISMYSATKYMNGHSDVVMGLVSVNCESLHNRLRFLQNSLGAVPSPIDCYLCNRGLKTLHVRMEKHFKNGMAVAQFLESNPWVEKVIYPGLPSHPQHELVKRQCTGCTGMVTFYIKGTLQHAEIFLKNLKLFTLAESLGGFESLAELPAIMTHASVLKNDRDVLGISDTLIRLSVGLEDEEDLLEDLDQALKAAHPPSGSHS

SEQ ID NO: 12464 - protein, 57 aa, Artificial Sequence
  Synthetic polypeptide
CCPITSEASWTITDAFGNSYSGGVLNIAVLEIPLGIALKKQWQHWMGLSTVWPLLQV

SEQ ID NO: 12465 - protein, 310 aa, Artificial Sequence
  Synthetic polypeptide
LLQWRGFEYSRSGNPTRNCLEKAVAALDGAKYCLAFASGLAATVTITHLLKAGDQIICMDDVYGGTNRYFRQVASEFGLKISFVDCSKIKLLEAAITPETKRPLALGADISMYSATKYMNGHSDVVMGLVSVNCESLHNRLRFLQNSLGAVPSPIDCYLCNRGLKTLHVRMEKHFKNGMAVAQFLESNPWVEKVIYPGLPSHPQHELVKRQCTGCTGMVTFYIKGTLQHAEIFLKNLKLFTLAESLGGFESLAELPAIMTHASVLKNDRDVLGISDTLIRLSVGLEDEEDLLEDLDQALKAAHPPSGSHS

SEQ ID NO: 12466 - protein, 191 aa, Artificial Sequence
  Synthetic polypeptide
LLFYLIMAPKYGSNDAGDLDLPTGINGFEVQKQNCCWLLVTHKLCVKDDVHSMAIDSGFRNSGITVGKRGKTMLAVRSTHGLEVPLSHKGKLMVTEEYIDFLLNVANQKMEENKKRIERFYNCLQHALERETMTNLHPKIKEKNNSSYIHKKKRNPEKTRAQCITKESDEELENDDDDDLGINVTIFPEDY

SEQ ID NO: 12467 - protein, 18 aa, Artificial Sequence
  Synthetic polypeptide
WPQSTGVMMLAIWICQQV

SEQ ID NO: 12468 - protein, 13 aa, Artificial Sequence
  Synthetic polypeptide
CWRFGSANRYKWF

SEQ ID NO: 12469 - protein, 224 aa, Artificial Sequence
  Synthetic polypeptide
LLFYLIMAPKYGSNDAGDLDLPTGINGFEVQKQNCCWLLVTHKLCVKDDVIVALKKANGDATLKFEPFVLHVQCRQLQDAQILHSMAIDSGFRNSGITVGKRGKTMLAVRSTHGLEVPLSHKGKLMVTEEYIDFLLNVANQKMEENKKRIERFYNCLQHALERETMTNLHPKIKEKNNSSYIHKKKRNPEKTRAQCITKESDEELENDDDDDLGINVTIFPEDY

SEQ ID NO: 12470 - protein, 62 aa, Artificial Sequence
  Synthetic polypeptide
WCISLTRSDGFKNGSRPAQVLFTCLLPCETCLSPSTMIVRPSQPHGTVLQLPTACFGKGNDD

SEQ ID NO: 12471 - protein, 80 aa, Artificial Sequence
  Synthetic polypeptide
GLPSHMELFYNCLQHALERETMTNLHPKIKEKNNSSYIHKKKRNPEKTRAQCITKESDEELENDDDDDLGINVTIFPEDY

SEQ ID NO: 12472 - protein, 32 aa, Artificial Sequence
  Synthetic polypeptide
DMPFTFHHDCEAFPATWNCFTTAYSMLWKGKR

SEQ ID NO: 12473 - protein, 23 aa, Artificial Sequence
  Synthetic polypeptide
VVDSHFWVLPDCTWVLQRLCNVC

SEQ ID NO: 12474 - protein, 68 aa, Artificial Sequence
  Synthetic polypeptide
SIIDWIKKMWYKYTMEYYTVVRKNEIMSFAATWMELEAVILSKLKQEEKTKCCMFSLISCRQSFLGLT

SEQ ID NO: 12475 - protein, 693 aa, Artificial Sequence
  Synthetic polypeptide
HLPQYPAQNRSCTDVLCCMIFLLCIIGYIVLGLVAWVHGDPRRAAYPTDSQGHFCGQKGTPNENKTILFYFNLLRCTSPSVLLNLQCPTTQICVSKCPEKFLTYVEMQLLYTKDKSYWEDYRQFCKTTAKPVKSLTQLLLDDDCPTAIFPSKPFLQRCFPDFSTKNGTLTIGSKMMFQDGNGGTRSVVELGIAANGINKLLDAKSLGLKVFEDYARTWYWILIGLTIAMVLSWIFLILLRFIAGCLFWVFMIGVIGIIGYGIWHCYQQYTNLQERPSSVLTIYDIGIQTNISMYFELQQTWFTFMIILCIIEVIVILMLIFLRNRIRVAIILLKEGSKAIGYVPSTLVYPALTFILLSICICYWVVTAVFLATSGVPVYKVIAPGGHCIHENQTCDPEIFNTTEIAKACPGALCNFAFYGGKSLYHQYIPTFHVYNLFVFLWLINFVIALGQCALAGAFATYYWAMKKPDDIPRYPLFTAFGRAIRYHTGSLAFGSLIIALIQMFKIVLEYLDHRLKRTQNTLSKFLQCCLRCCFWCLENAIKFLNRNAYIMIAIYGRNFCRSAKDAFNLLMRNVLKVAVTDEVTYFVLFLGKLLVAGSIGVLAFLFFTQRLPVIAQGPASLNYYWVPLLTVIFGSYLIAHGFFSVYAMCVETIFICFLEDLERNDGSTARPYYVSQPLLKIFQEENPQTRKQ

SEQ ID NO: 12476 - protein, 32 aa, Artificial Sequence
  Synthetic polypeptide
EKASHLCGSPTFHSICHSIRHKIGVVQMFCAV

SEQ ID NO: 12477 - protein, 695 aa, Artificial Sequence
  Synthetic polypeptide
HLPQYPAQNRSCTDVLCCMIFLLCIIGYIVLGLVAWVHGDPRRAAYPTDSQGHFCGQKGTPNENKTILFYFNLLRCTSPSVLLNLQCPTTQICVSKCPEKFLTYVEMQLLYTKDKSYWEDYRQFCKTTAKPVKSLTQLLLDDDCPTAIFPSKPFLQRCFPDFSTKNGTLTIGSKMMFQDGNGGTRSVVELGIAANGINKLLDAKSLGLKVFEDYARTWYWILIGLTIAMVLSWIFLILLRFIAGCLFWVFMIGVIGIIGYGIWHCYQQYTNLQERPSSVLTIYDIGIQTNISMYFELQQTWFTFMIILCIIEVIVILMLIFLRNRIRVAIILLKEGSKAIGYVPSTLVYPALTFILLSICICYWVVTAVFLATSGVPVYKVIAPGGHCIHENQTCDPEIFNTTEIAKACPGALCNFAFYGGKSLYHQYIPTFHVYNLFVFLWLINFVIALGQCALAGAFATYYWAMKKPDDIPRYPLFTAFGRAIRYHTGSLAFGSLIIALIQMFKIVLEYLDHRLKRTQNTLSKFLQCCLRCCFWCLENAIKFLNRNAYIMIAIYGRNFCRSAKDAFNLLMRNVLKVAVTDEVTYFVLFLGKLLVAGSIGVLAFLFFTQRLPVIAQGPASLNYYWVPLLTVIFGSYLIAHGFFSVYAMCVETIFICFCEDLERNDGSTEKPYFVTPNLHGILIKKQLVPQKQKE

SEQ ID NO: 12478 - protein, 39 aa, Artificial Sequence
  Synthetic polypeptide
ADASSMIPVQPAIMVIQGHMTQISRGLLPTGVVQMFCAV

SEQ ID NO: 12479 - protein, 753 aa, Artificial Sequence
  Synthetic polypeptide
KCVATSPYSLLLLLWPCDVPVAPSPSTMVLSFLRPPQKLSRCQQHDSCTACNNGDPRTYDPDFKGPVANRSCTDVLCCMIFLLCIIGYIVLGLVAWVHGDPRRAAYPTDSQGHFCGQKGTPNENKTILFYFNLLRCTSPSVLLNLQCPTTQICVSKCPEKFLTYVEMQLLYTKDKSYWEDYRQFCKTTAKPVKSLTQLLLDDDCPTAIFPSKPFLQRCFPDFSTKNGTLTIGSKMMFQDGNGGTRSVVELGIAANGINKLLDAKSLGLKVFEDYARTWYWILIGLTIAMVLSWIFLILLRFIAGCLFWVFMIGVIGIIGYGIWHCYQQYTNLQERPSSVLTIYDIGIQTNISMYFELQQTWFTFMIILCIIEVIVILMLIFLRNRIRVAIILLKEGSKAIGYVPSTLVYPALTFILLSICICYWVVTAVFLATSGVPVYKVIAPGGHCIHENQTCDPEIFNTTEIAKACPGALCNFAFYGGKSLYHQYIPTFHVYNLFVFLWLINFVIALGQCALAGAFATYYWAMKKPDDIPRYPLFTAFGRAIRYHTGSLAFGSLIIALIQMFKIVLEYLDHRLKRTQNTLSKFLQCCLRCCFWCLENAIKFLNRNAYIMIAIYGRNFCRSAKDAFNLLMRNVLKVAVTDEVTYFVLFLGKLLVAGSIGVLAFLFFTQRLPVIAQGPASLNYYWVPLLTVIFGSYLIAHGFFSVYAMCVETIFICFLEDLERNDGSTARPYYVSQPLLKIFQEENPQTRKQ

SEQ ID NO: 12480 - protein, 755 aa, Artificial Sequence
  Synthetic polypeptide
KCVATSPYSLLLLLWPCDVPVAPSPSTMVLSFLRPPQKLSRCQQHDSCTACNNGDPRTYDPDFKGPVANRSCTDVLCCMIFLLCIIGYIVLGLVAWVHGDPRRAAYPTDSQGHFCGQKGTPNENKTILFYFNLLRCTSPSVLLNLQCPTTQICVSKCPEKFLTYVEMQLLYTKDKSYWEDYRQFCKTTAKPVKSLTQLLLDDDCPTAIFPSKPFLQRCFPDFSTKNGTLTIGSKMMFQDGNGGTRSVVELGIAANGINKLLDAKSLGLKVFEDYARTWYWILIGLTIAMVLSWIFLILLRFIAGCLFWVFMIGVIGIIGYGIWHCYQQYTNLQERPSSVLTIYDIGIQTNISMYFELQQTWFTFMIILCIIEVIVILMLIFLRNRIRVAIILLKEGSKAIGYVPSTLVYPALTFILLSICICYWVVTAVFLATSGVPVYKVIAPGGHCIHENQTCDPEIFNTTEIAKACPGALCNFAFYGGKSLYHQYIPTFHVYNLFVFLWLINFVIALGQCALAGAFATYYWAMKKPDDIPRYPLFTAFGRAIRYHTGSLAFGSLIIALIQMFKIVLEYLDHRLKRTQNTLSKFLQCCLRCCFWCLENAIKFLNRNAYIMIAIYGRNFCRSAKDAFNLLMRNVLKVAVTDEVTYFVLFLGKLLVAGSIGVLAFLFFTQRLPVIAQGPASLNYYWVPLLTVIFGSYLIAHGFFSVYAMCVETIFICFCEDLERNDGSTEKPYFVTPNLHGILIKKQLVPQKQKE

SEQ ID NO: 12481 - protein, 19 aa, Artificial Sequence
  Synthetic polypeptide
NEVSGMSQKSVCVYSWTSH

SEQ ID NO: 12482 - protein, 129 aa, Artificial Sequence
  Synthetic polypeptide
GLRMKFQVCPKSLCVSTPGHRTDLFQRDPKNVLITDFFGSVRKVEITTETIKLQQDSEIMESSYKEDQMDEKLMEPLKYAEQLPVAQIIHQKPKLKDWHPPGGFILGLWALIIMVFFKTYGIKHMKFIF

SEQ ID NO: 12483 - protein, 66 aa, Artificial Sequence
  Synthetic polypeptide
GLRMKFQVCPKSLCVSTPGHRTDLFQRDPKNVLITDFFGSVRKVEITTETIKLQQDSEIMESRYSS

SEQ ID NO: 12484 - protein, 46 aa, Artificial Sequence
  Synthetic polypeptide
ANSSEHPRAVKLDHIGPLLNRFDEMITSSGCPSWNDWSRWRGGWPR

SEQ ID NO: 12485 - protein, 703 aa, Artificial Sequence
  Synthetic polypeptide
NDNQFRMSILERLEQMERRMAEMTGSQQHKQASGGGSSGGGSGSGNGGSQAQCASGTGALGSCFESRVVVVCEKMMSRACWAKSKHLIHSKTFRGMTLLHLAAAQGYATLIQTLIKWRTKHADSIDLELEVDPLNVDHFSCTPLMWACALGHLEAAVVLYKWDRRAISIPDSLGRLPLGIARSRGHVKLAECLEHLQRDEQAQLGQNPRIHCPASEEPSTESWMAQWHSEAISSPEIPKGVTVIASTNPELRRPRSEPSNYYSSESHKDYPAPKKHKLNPEYFQTRQEKLLPTALSLEEPNIRKQSPSSKQSVPETLSPSEGVRDFSRELSPPTPETAAFQASGSQPVGKWNSKDLYIGVSTVQVTGNPKGTSVGKEAAPSQVRPREPMSVLMMANREVVNTELGSYRDSAENEECGQPMDDIQVNMMTLAEHIIEATPDRIKQENFVPMESSGLERTDPATISSTMSWLASYLADADCLPSAAQIRSAYNEPLTPSSNTSLSPVGSPVSEIAFEKPNLPSAADWSEFLSASTSEKVENEFAQLTLSDHEQRELYEAARLVQTAFRKYKGRPLREQQEVAAAVIQRCYRKYKQYALYKKMTQAAILIQSKFRSYYEQKKFQQSRRAAVLIQKYYRSYKKCGKRRQARRTAVIVQQKLRSSLLTKKQDQAARKIMRFLRRCRHSPLVDHRLYKRSERIEKGQGT

SEQ ID NO: 12486 - protein, 689 aa, Artificial Sequence
  Synthetic polypeptide
NDNQFRMSILERLEQMERRMAEMTGSQQHKQASGGGSSGGGSGSGNGGSQAQCASGTGALGSCFESRVVVVCEKMMSRACWAKSKHLIHSKTFRGMTLLHLAAAQGYATLIQTLIKWRTKHADSIDLELEVDPLNVDHFSCTPLMWACALGHLEAAVVLYKWDRRAISIPDSLGRLPLGIARSRGHVKLAECLEHLQRDEQAQLGQNPRIHCPASEEPSTESWMAQWHSEAISSPEIPKGVTVIASTNPELRRPRSEPSNYYSSESHKDYPAPKKHKLNPEYFQTRQEKLLPTALSLEEPNIRKQSPSSKQSVPETLSPSEGVRDFSRELSPPTPETAAFQASGSQPVGKWNSKDLYIGVSTVQVTGNPKGTSVGKEAAPSQVRPREPMSVLMMANREVVNTELGSYRDSAENEECGQPMDDIQVNMMTLAEHIIEATPDRIKQENFVPMESSGLERTDPATISSTMSWLASYLADADCLPSAAQIRLSPVGSPVSEIAFEKPNLPSAADWSEFLSASTSEKVENEFAQLTLSDHEQRELYEAARLVQTAFRKYKGRPLREQQEVAAAVIQRCYRKYKQYALYKKMTQAAILIQSKFRSYYEQKKFQQSRRAAVLIQKYYRSYKKCGKRRQARRTAVIVQQKLRSSLLTKKQDQAARKIMRFLRRCRHRVKELKKAKELEDIQQHPLAM

SEQ ID NO: 12487 - protein, 53 aa, Artificial Sequence
  Synthetic polypeptide
SVTVSYHPQMRSSSCRKTSLGLPLILHYVIRDYYRRLLYSRLSVLKQSKTLKV

SEQ ID NO: 12488 - protein, 26 aa, Artificial Sequence
  Synthetic polypeptide
FYIMLSETITDDCCTRGSAFSSSPRP

SEQ ID NO: 12489 - protein, 416 aa, Artificial Sequence
  Synthetic polypeptide
LQENKLRAPTDSTLCYQRLLQTIAVLEAQRSQAVQDLESLGRHQREALKNPIGFVEKLQKKADIGLPYPQRVVQLPEIVWDQYTHSLGNFEREFKNRKRHTRRVKLVFDKVGLPARPKSPLDPKKDGESLSYSMLPLSDGPEGSSSRPQMIRGRLCDDTKPETFNQLWTVEEQKKLEQLLIKYPPEEVESRRWQKIADELGNRTAKQVASRVQKYFIKLTKAGIPVPGRTPNLYIYSKKSSTSRRQHPLNKHLFKPSTFMTSHEPPVYMDEDDDRSCFHSHMNTAVEDASDDESIPIMYRNLPEYKELLQFKKLKKQKLQQMQAESGFVQHVGFKCDNCGIEPIQGVRWHCQDCPPEMSLDFCDSCSDCLHETDIHKEDHQLEPIYRSETFLDRDYCVSQGTSYNYLDPNYFPANR

SEQ ID NO: 12490 - protein, 32 aa, Artificial Sequence
  Synthetic polypeptide
VYGRATLNTPDLVSSQKLSRVGPEEEPCQKKQ

SEQ ID NO: 12491 - protein, 15 aa, Artificial Sequence
  Synthetic polypeptide
AGSGLKRSHVRRNSK

SEQ ID NO: 12492 - protein, 33 aa, Artificial Sequence
  Synthetic polypeptide
GRARWLMPVIPALWEAEVDGSLEVYRSNCCHWQ

SEQ ID NO: 12493 - protein, 113 aa, Artificial Sequence
  Synthetic polypeptide
SQHFGRPRWTDHLRSTGPTAATGSNRRLQQTQNQVDEVVDIMRVNVDKVLERDQKLSELDDRADALQAGASQFETSAAKLKRKYWWKNCKMWAIGITVLVIFIIIIIVWVVSS

SEQ ID NO: 12494 - protein, 102 aa, Artificial Sequence
  Synthetic polypeptide
PTWSTGPTAATGSNRRLQQTQNQVDEVVDIMRVNVDKVLERDQKLSELDDRADALQAGASQFETSAAKLKRKYWWKNCKMWAIGITVLVIFIIIIIVWVVSS

SEQ ID NO: 12495 - protein, 45 aa, Artificial Sequence
  Synthetic polypeptide
SQHFGRPRWTDHLRSGVRDQLDQHGLQVQLLPLAVIEDFSRHKIK

SEQ ID NO: 12496 - protein, 21 aa, Artificial Sequence
  Synthetic polypeptide
GQEFETSLTNMVYRSNCCHWQ

SEQ ID NO: 12497 - protein, 45 aa, Artificial Sequence
  Synthetic polypeptide
NEDNGPSKSFRATCTPWAPWCPRPPWTSWASRAWNSNGTIQPCTL

SEQ ID NO: 12498 - protein, 243 aa, Artificial Sequence
  Synthetic polypeptide
SGCLSSEFCESFTGSVTLEKLLRLFCALVSSCKMKIMGPVNPLGPPVPHGPHGVPGPHGPPGPPGPGTPMGPYNPAPYNPGPPGPAPHGPPAPYAPQGWGNAYPHWQQQAPPDPAKAGTDPNSAAWAAYYAHYYQQQAQPPPAAPAGAPTTTQTNGQGDQQNPAPAGQVDYTKAWEEYYKKMGQAVPAPTGAPPGGQPDYSAAWAEYYRQQAAYYAQTSPQGMPQHPPAPQCRFDPASIELAL

SEQ ID NO: 12499 - protein, 233 aa, Artificial Sequence
  Synthetic polypeptide
SGCLSSEFCESFTGSVTLEKLLRLFCALVSSCKMKIMGPVNPLGPPVPHGPHGVPGPHGPPGPPGPGTPMGPYNPAPYNPGPPGPAPHGPPAPYAPQGWGNAYPHWQQQAPPDPAKAGTDPNSAAWAAYYAHYYQQQAQPPPAAPAGAPTTTQTNGQGDQQNPAPAGQVDYTKAWEEYYKKMGQAVPAPTGAPPGGQPDYSAAWAEYYRQQAAYYAQTSPQGMPQHPPAPQGQ

SEQ ID NO: 12500 - protein, 244 aa, Artificial Sequence
  Synthetic polypeptide
SGCLSSEFCESFTGSVTLEKLLRLFCALVSSCKMKIMGPVNPLGPPVPHGPHGVPGPHGPPGPPGPGTPMGPYNPAPYNPGPPGPAPHGPPAPYAPQGWGNAYPHWQQQAPPDPAKAGTDPNSAAWAAYYAHYYQQQAQPPPAAPAGAPTTTQTNGQGDQQNPAPAGQVDYTKAWEEYYKKMGQAVPAPTGAPPGGQPDYSAAWAEYYRQQAAYYAQTSPQGMPQHPPAPQGFANHARSHHHLY

SEQ ID NO: 12501 - protein, 623 aa, Artificial Sequence
  Synthetic polypeptide
TIQQLCTLYQIAAKIGGDAGTSLNSNDYGYGGQKRPLEDGDQPDAKKVAPQNDSFGTQLPPMHQQQRSVMTEEYKVPDGMVGFIIGRGGEQISRIQQESGCKIQIAPDSGGLPERSCMLTGTPESVQSAKRLLDQIVEKGRPAPGFHHGDGPGNAVQEIMIPASKAGLVIGKGGETIKQLQERAGVKMVMIQDGPQNTGADKPLRITGDPYKVQQAKEMVLELIRDQGGFREVRNEYGSRIGGNEGIDVPIPRFAVGIVIGRNGEMIKKIQNDAGVRIQFKPDDGTTPERIAQITGPPDRCQHAAEIITDLLRSVQAGNPGGPGPGGRGRGRGQGNWNMGPPGGLQEFNFIVPTGKTGLIIGKGGETIKSISQQSGARIELQRNPPPNADPNMKLFTIRGTPQQIDYARQLIEEKIGGPVNPLGPPVPHGPHGVPGPHGPPGPPGPGTPMGPYNPAPYNPGPPGPAPHGPPAPYAPQGWGNAYPHWQQQAPPDPAKAGTDPNSAAWAAYYAHYYQQQAQPPPAAPAGAPTTTQTNGQGDQQNPAPAGQVDYTKAWEEYYKKMGQAVPAPTGAPPGGQPDYSAAWAEYYRQQAAYYAQTSPQGMPQHPPAPQCRFDPASIELAL

SEQ ID NO: 12502 - protein, 22 aa, Artificial Sequence
  Synthetic polypeptide
QYNNYVHCIRLQQKLEVMQGHH

SEQ ID NO: 12503 - protein, 16 aa, Artificial Sequence
  Synthetic polypeptide
NTTTMYIVSDCSKNWR

SEQ ID NO: 12504 - protein, 614 aa, Artificial Sequence
  Synthetic polypeptide
TIQQLCTLYQIAAKIGGDAGTSLNSNDYGYGGQKRPLEDGDQPDAKKVAPQNDSFGTQLPPMHQQQSRSVMTEEYKVPDGMVGFIIGRGGEQISRIQQESGCKIQIAPDSGGLPERSCMLTGTPESVQSAKRLLDQIVEKGRPAPGFHHGDGPGNAVQEIMIPASKAGLVIGKGGETIKQLQERAGVKMVMIQDGPQNTGADKPLRITGDPYKVQQAKEMVLELIRDQGGFREVRNEYGSRIGGNEGIDVPIPRFAVGIVIGRNGEMIKKIQNDAGVRIQFKPDDGTTPERIAQITGPPDRCQHAAEIITDLLRSVQAGNPGGPGPGGRGRGRGQGNWNMGPPGGLQEFNFIVPTGKTGLIIGKGGETIKSISQQSGARIELQRNPPPNADPNMKLFTIRGTPQQIDYARQLIEEKIGGPVNPLGPPVPHGPHGVPGPHGPPGPPGPGTPMGPYNPAPYNPGPPGPAPHGPPAPYAPQGWGNAYPHWQQQAPPDPAKAGTDPNSAAWAAYYAHYYQQQAQPPPAAPAGAPTTTQTNGQGDQQNPAPAGQVDYTKAWEEYYKKMGQAVPAPTGAPPGGQPDYSAAWAEYYRQQAAYYAQTSPQGMPQHPPAPQGQ

SEQ ID NO: 12505 - protein, 625 aa, Artificial Sequence
  Synthetic polypeptide
TIQQLCTLYQIAAKIGGDAGTSLNSNDYGYGGQKRPLEDGDQPDAKKVAPQNDSFGTQLPPMHQQQSRSVMTEEYKVPDGMVGFIIGRGGEQISRIQQESGCKIQIAPDSGGLPERSCMLTGTPESVQSAKRLLDQIVEKGRPAPGFHHGDGPGNAVQEIMIPASKAGLVIGKGGETIKQLQERAGVKMVMIQDGPQNTGADKPLRITGDPYKVQQAKEMVLELIRDQGGFREVRNEYGSRIGGNEGIDVPIPRFAVGIVIGRNGEMIKKIQNDAGVRIQFKPDDGTTPERIAQITGPPDRCQHAAEIITDLLRSVQAGNPGGPGPGGRGRGRGQGNWNMGPPGGLQEFNFIVPTGKTGLIIGKGGETIKSISQQSGARIELQRNPPPNADPNMKLFTIRGTPQQIDYARQLIEEKIGGPVNPLGPPVPHGPHGVPGPHGPPGPPGPGTPMGPYNPAPYNPGPPGPAPHGPPAPYAPQGWGNAYPHWQQQAPPDPAKAGTDPNSAAWAAYYAHYYQQQAQPPPAAPAGAPTTTQTNGQGDQQNPAPAGQVDYTKAWEEYYKKMGQAVPAPTGAPPGGQPDYSAAWAEYYRQQAAYYAQTSPQGMPQHPPAPQGFANHARSHHHLY

SEQ ID NO: 12506 - protein, 635 aa, Artificial Sequence
  Synthetic polypeptide
TIQQLCTLYQIAAKIGGDAGTSLNSNDYGYGGQKRPLEDGDGSWTSPSSTTHWEGMPSPFKDQPDAKKVAPQNDSFGTQLPPMHQQQSRSVMTEEYKVPDGMVGFIIGRGGEQISRIQQESGCKIQIAPDSGGLPERSCMLTGTPESVQSAKRLLDQIVEKGRPAPGFHHGDGPGNAVQEIMIPASKAGLVIGKGGETIKQLQERAGVKMVMIQDGPQNTGADKPLRITGDPYKVQQAKEMVLELIRDQGGFREVRNEYGSRIGGNEGIDVPIPRFAVGIVIGRNGEMIKKIQNDAGVRIQFKPDDGTTPERIAQITGPPDRCQHAAEIITDLLRSVQAGNPGGPGPGGRGRGRGQGNWNMGPPGGLQEFNFIVPTGKTGLIIGKGGETIKSISQQSGARIELQRNPPPNADPNMKLFTIRGTPQQIDYARQLIEEKIGGPVNPLGPPVPHGPHGVPGPHGPPGPPGPGTPMGPYNPAPYNPGPPGPAPHGPPAPYAPQGWGNAYPHWQQQAPPDPAKAGTDPNSAAWAAYYAHYYQQQAQPPPAAPAGAPTTTQTNGQGDQQNPAPAGQVDYTKAWEEYYKKMGQAVPAPTGAPPGGQPDYSAAWAEYYRQQAAYYAQTSPQGMPQHPPAPQGQ

SEQ ID NO: 12507 - protein, 202 aa, Artificial Sequence
  Synthetic polypeptide
TIQQLCTLYQIAAKIGGDAGTSLNSNDYGYGGQKRPLEDGDGSWTSPSSTTHWEGMPSPFKDQPDAKKVAPQNDSFGTQLPPMHQQQRSVMTEEYKVPDGMVGFIIGRGGEQISRIQQESGCKIQIAPDSGGLPERSCMLTGTPESVQSAKRLLDQIVEKGRPAPGFHHGDGPGNAVQEIMIPASKAGLVIGKGGETIKQLQ

SEQ ID NO: 12508 - protein, 60 aa, Artificial Sequence
  Synthetic polypeptide
SQLLPQYLSKTTTMFEAGKDKVNPDEFAVALDETLGDFAFPDEFVFDVWGVIGDAKRRGL

SEQ ID NO: 12509 - protein, 47 aa, Artificial Sequence
  Synthetic polypeptide
VIGIFLLFLQDQVFFEGRYHILLSFNPSSYHSTSPRPPQCLKLERTK

SEQ ID NO: 12510 - protein, 39 aa, Artificial Sequence
  Synthetic polypeptide
LAFFCCFYKIRYFLKADTISCSVLIPALTTVPLQDHHNV

SEQ ID NO: 12511 - protein, 48 aa, Artificial Sequence
  Synthetic polypeptide
ITMTRLLTIRKATQSRREGTPWCWIGANSFSVDSCPFCLIYRGMDRHG

SEQ ID NO: 12512 - protein, 711 aa, Artificial Sequence
  Synthetic polypeptide
YTEGWIDTGECKTFTSFHQTLKNNSVYTEPCEDLRNDEHSPSYQQINCIDSVIRYLKSYNIPALKRKCISCTNTTSSSSEEDKQNHKADDVQALQAGLQIPAIPKSEMPTNGRSIDTGGGAPQILSTAMLSLGSGISQCGYSSTIVHVPPPETARDATLFCEPWTLNMQPAPLTSEEFKHVGLTAAVLSAHTQKEEQNYVDKFREKILSSPYSSYLQQESRSKAKYSYFQGDSTSKQTRSAGCRKGKHKRKKLPEPPDSSSSNTGSGPRRGAHQNAQPCCPSAASSPHTSSPTFPPAAMVPSQAPYLVPAFPLPAATSPGREYAAPGTAPEGLHGLPLSEGLQPYPAFPFPYLDTFMTVFLPDPPVCPLLSPSFLPCPFLGATASSAISPSMSSAMSPTLDPPPSVTSQRREEEKWEAQSEGHPFITSRSSSPLQLNLLQEEMPRPSESPDQMRRNTCPQTEYQCVTGNNGSESSPATTGALSTGSPPRENPSHPTASALSTGSPPMKNPSHPTASALSTGSPPMKNPSHPTASTLSMGLPPSRTPSHPTATVLSTGSPPSESPSRTGSAASGSSDSSIYLTSSVYSSKISQNGQQSQDVQKKETFPNVAEEPIWRMIRQTPERILMTYQVPERVKEVVLKEDLEKLESMRQQQPQFSHGQKEELAKVYNWIQSQTVTQEIDIQACVTCENEDSADGAATSCGQVLVEDSC

SEQ ID NO: 12513 - protein, 14 aa, Artificial Sequence
  Synthetic polypeptide
TRVNVRPLLPSTKH

SEQ ID NO: 12514 - protein, 710 aa, Artificial Sequence
  Synthetic polypeptide
YTEGWIDTGECKTFTSFHQTLKNNSVYTEPCEDLRNDEHSPSYQQINCIDSVIRYLKSYNIPALKRKCISCTNTTSSSSEEDKQNHKADDVQALQAGLQIPAIPKSEMPTNGRSIDTGGGAPQILSTAMLSLGSGISQCGYSSTIVHVPPPETARDATLFCEPWTLNMQPAPLTSEEFKHVGLTAAVLSAHTQKEEQNYVDKFREKILSSPYSSYLQQESRSKAKYSYFQGDSTSKQTRSAGCRKGKHKRKKLPEPPDSSSSNTGSGPRRGAHQNAQPCCPSAASSPHTSSPTFPPAAMVPSQAPYLVPAFPLPAATSPGREYAAPGTAPEGLHGLPLSEGLQPYPAFPFPYLDTFMTVFLPDPPVCPLLSPSFLPCPFLGATASSAISPSMSSAMSPTLDPPPSVTSQRREEEKWEAQSEGHPFITSRSSSPLQLNLLQEEMPRPSESPDQMRRNTCPQTEYCVTGNNGSESSPATTGALSTGSPPRENPSHPTASALSTGSPPMKNPSHPTASALSTGSPPMKNPSHPTASTLSMGLPPSRTPSHPTATVLSTGSPPSESPSRTGSAASGSSDSSIYLTSSVYSSKISQNGQQSQDVQKKETFPNVAEEPIWRMIRQTPERILMTYQVPERVKEVVLKEDLEKLESMRQQQPQFSHGQKEELAKVYNWIQSQTVTQEIDIQACVTCENEDSADGAATSCGQVLVEDSC

SEQ ID NO: 12515 - protein, 35 aa, Artificial Sequence
  Synthetic polypeptide
PAAVIVSFLRPLPDTDASAMLPVQPAKRLQWPTLE

SEQ ID NO: 12516 - protein, 40 aa, Artificial Sequence
  Synthetic polypeptide
LLVFLGLYQTQMPAPCFLYSLQNGYNGQHWNKWKSFSGNL

SEQ ID NO: 12517 - protein, 111 aa, Artificial Sequence
  Synthetic polypeptide
AFTRHRCQRHASCTACKTVTMANIGINGNHSLETCETTLFALRMATWNQILDPWVYILLRKAVLKNLYKLASQCCGVHVISLHIWELSSIKNSLKVAAISESPVAEKSAST

SEQ ID NO: 12518 - protein, 31 aa, Artificial Sequence
  Synthetic polypeptide
LLVFLGLYQTQMPAPCFLYSLQNGYNGQHWN

SEQ ID NO: 12519 - protein, 26 aa, Artificial Sequence
  Synthetic polypeptide
AFTRHRCQRHASCTACKTVTMANIGI

SEQ ID NO: 12520 - protein, 43 aa, Artificial Sequence
  Synthetic polypeptide
TFRRVCSCGSHFDNCLMKNSEAENQTGFLTQRNCETINELRIT

SEQ ID NO: 12521 - protein, 10 aa, Artificial Sequence
  Synthetic polypeptide
HEGATIEHSV

SEQ ID NO: 12522 - protein, 19 aa, Artificial Sequence
  Synthetic polypeptide
MKVQQSNTVYSSYWVRCVS

SEQ ID NO: 12523 - protein, 21 aa, Artificial Sequence
  Synthetic polypeptide
GLNELIYVKVLRTVLGTWFWT

SEQ ID NO: 12524 - protein, 29 aa, Artificial Sequence
  Synthetic polypeptide
KCLEQCLAHGFGHSENKYSYSSSTHLEGA

SEQ ID NO: 12525 - protein, 157 aa, Artificial Sequence
  Synthetic polypeptide
NSAWHMVLDIVKTSIRTVLPRIWKVPDVEEVNLYRIFNRVFNRLLWSRGQGLWNCFCDSGSSWESIFNKSPEVVTPLQLQCCQRLVELCKQCLLVVYKYATDKRGSLSGIGPDWGNSRYLLPGSTQFFLRTPTYNLKYNSPGMTRSNVLFTSRYGHL

SEQ ID NO: 12526 - protein, 62 aa, Artificial Sequence
  Synthetic polypeptide
NSAWHMVLDIVKTSIRTVLPRIWKVPDVEEVNLYRIFNRVFNRLLWSRGQGLWNCFCDSGYV

SEQ ID NO: 12527 - protein, 12 aa, Artificial Sequence
  Synthetic polypeptide
EGVLALMTNLSS

SEQ ID NO: 12528 - protein, 24 aa, Artificial Sequence
  Synthetic polypeptide
GRSCTHDEFILLKIKHYLKSMKIC

SEQ ID NO: 12529 - protein, 50 aa, Artificial Sequence
  Synthetic polypeptide
CSSCCFCLEFSFFTSTSGEICPYFRHPLSERVSSQSQRRLFEKMGESNSE

SEQ ID NO: 12530 - protein, 364 aa, Artificial Sequence
  Synthetic polypeptide
VQVAASVWNSLSSLLPVVRFAHTLGILSVKEFLAKAKEDFLKKWENPTQNNAGLEDFERKKTLGTGSFGRVMLVKHKATEQYYAMKILDKQKVVKLKQIEHTLNEKRILQAVNFPFLVRLEYAFKDNSNLYMVMEYVPGGEMFSHLRRIGRFSEPHARFYAAQIVLTFEYLHSLDLIYRDLKPENLLIDHQGYIQVTDFGFAKRVKGRTWTLCGTPEYLAPEIILSKGYNKAVDWWALGVLIYEMAAGYPPFFADQPIQIYEKIVSGKVRFPSHFSSDLKDLLRNLLQVDLTKRFGNLKNGVSDIKTHKWFATTDWIAIYQRKVEAPFIPKFRGSGDTSNFDDYEEEDIRVSITEKCAKEFGEF

SEQ ID NO: 12531 - protein, 270 aa, Artificial Sequence
  Synthetic polypeptide
VQVAASVWNSLSSLLPVVRFAHTLGILSVKEFLAKAKEDFLKKWENPTQNNAGLEDFERKKTLGTGSFGRVMLVKHKATEQYYAMKILDKQKVVKLKQIEHTLNEKRILQAVNFPFLVRLEYAFKDNSNLYMVMEYVPGGEMFSHLRRIGRFSEPHARFYAAQIVLTFEYLHSLDLIYRDLKPENLLIDHQGYIQVTDFGFAKRVKGRTWTLCGTPEYLAPEIILSKGYNKAVDWWALGVLIYEMAAGYPPFFADQPIQIYEKIVSGKNF

SEQ ID NO: 12532 - protein, 181 aa, Artificial Sequence
  Synthetic polypeptide
VQVAASVWNSLSSLLPVVRFAHTLGILSVKEFLAKAKEDFLKKWENPTQNNAGLEDFERKKTLGTGSFGRVMLVKHKATEQYYAMKILDKQKVVKLKQIEHTLNEKRILQAVNFPFLVRLEYAFKDNSNLYMVMEYVPGGEMFSHLRRIGRFSEPHARFYAAQIVLTFEYLHSLDLIYRDL

SEQ ID NO: 12533 - protein, 195 aa, Artificial Sequence
  Synthetic polypeptide
VQVAASVWNSLSSLLPVVRFAHTLGILSVKEFLAKAKEDFLKKWENPTQNNAGLEDFERKKTLGTGSFGRVMLVKHKATEQYYAMKILDKQKVVKLKQIEHTLNEKRILQAVNFPFLVRLEYAFKDNSNLYMVMEYVPGGEMFSHLRRIGRFSEPHARFYAAQIVLTFEYLHSLDLIYRDLKPENLLIDHQGYIQ

SEQ ID NO: 12534 - protein, 231 aa, Artificial Sequence
  Synthetic polypeptide
VQVAASVWNSLSSLLPVVRFAHTLGILSVKEFLAKAKEDFLKKWENPTQNNAGLEDFERKKTLGTGSFGRVMLVKHKATEQYYAMKILDKQKVVKLKQIEHTLNEKRILQAVNFPFLVRLEYAFKDNSNLYMVMEYVPGGEMFSHLRRIGRFSEPHARFYAAQIVLTFEYLHSLDLIYRDLKPENLLIDHQGYIQVTDFGFAKRVKGRTWTLCGTPEYLAPEIILSKGYNK

SEQ ID NO: 12535 - protein, 216 aa, Artificial Sequence
  Synthetic polypeptide
VQVAASVWNSLSSLLPVVRFAHTLGILSVKEFLAKAKEDFLKKWENPTQNNAGLEDFERKKTLGTGSFGRVMLVKHKATEQYYAMKILDKQKVVKLKQIEHTLNEKRILQAVNFPFLVRLEYAFKDNSNLYMVMEYVPGGEMFSHLRRIGRFSEPHARFYAAQIVLTFEYLHSLDLIYRDLKPENLLIDHQGYIQVTDFGFAKRVKGRTWTLCGTP

SEQ ID NO: 12536 - protein, 271 aa, Artificial Sequence
  Synthetic polypeptide
VQVAASVWNSLSSLLPVVRFAHTLGILSVKEFLAKAKEDFLKKWENPTQNNAGLEDFERKKTLGTGSFGRVMLVKHKATEQYYAMKILDKQKVVKLKQIEHTLNEKRILQAVNFPFLVRLEYAFKDNSNLYMVMEYVPGGEMFSHLRRIGRFSEPHARFYAAQIVLTFEYLHSLDLIYRDLKPENLLIDHQGYIQVTDFGFAKRVKGRTWTLCGTPEYLAPEIILSKGYNKAVDWWALGVLIYEMAAGYPPFFADQPIQIYEKIVSGKQNF

SEQ ID NO: 12537 - protein, 227 aa, Artificial Sequence
  Synthetic polypeptide
VQVAASVWNSLSSLLPVVRFAHTLGILSVKEFLAKAKEDFLKKWENPTQNNAGLEDFERKKTLGTGSFGRVMLVKHKATEQYYAMKILDKQKVVKLKQIEHTLNEKRILQAVNFPFLVRLEYAFKDNSNLYMVMEYVPGGEMFSHLRRIGRFSEPHARFYAAQIVLTFEYLHSLDLIYRDLKPENLLIDHQGYIQVTDFGFAKRVKGRTWTLCGTPEYLAPEIILSK

SEQ ID NO: 12538 - protein, 223 aa, Artificial Sequence
  Synthetic polypeptide
VQVAASVWNSLSSLLPVVRFAHTLGILSVKEFLAKAKEDFLKKWENPTQNNAGLEDFERKKTLGTGSFGRVMLVKHKATEQYYAMKILDKQKVVKLKQIEHTLNEKRILQAVNFPFLVRLEYAFKDNSNLYMVMEYVPGGEMFSHLRRIGRFSEPHARFYAAQIVLTFEYLHSLDLIYRDLKPENLLIDHQGYIQVTDFGFAKRVKGRTWTLCGTPEYLAPEI

SEQ ID NO: 12539 - protein, 331 aa, Artificial Sequence
  Synthetic polypeptide
VQVAASVWNSLSSLLPVVRFAHTLGILSVKEFLAKAKEDFLKKWENPTQNNAGLEDFERKKTLGTGSFGRVMLVKHKATEQYYAMKILDKQKDNSNLYMVMEYVPGGEMFSHLRRIGRFSEPHARFYAAQIVLTFEYLHSLDLIYRDLKPENLLIDHQGYIQVTDFGFAKRVKGRTWTLCGTPEYLAPEIILSKGYNKAVDWWALGVLIYEMAAGYPPFFADQPIQIYEKIVSGKVRFPSHFSSDLKDLLRNLLQVDLTKRFGNLKNGVSDIKTHKWFATTDWIAIYQRKVEAPFIPKFRGSGDTSNFDDYEEEDIRVSITEKCAKEFGEF

SEQ ID NO: 12540 - protein, 192 aa, Artificial Sequence
  Synthetic polypeptide
KTNLSLTSYDVCSILLGTSTMLVWLGVIRYLGFFAKYNLLILTLQAALPNVIRFCCCAAMIYLGYCFCGWIVLGPYHDKFRSLNMVSECLFSLINGDDMFATFAKMQQKSYLVWLFSRIYLYSFISLFIYMILSLFIALITDTYETIKQYQQDGFPETELRTFISECKDLPNSGKYRLEDDPPVSLFCCCKK

SEQ ID NO: 12541 - protein, 10 aa, Artificial Sequence
  Synthetic polypeptide
VTVKDKLESN

SEQ ID NO: 12542 - protein, 198 aa, Artificial Sequence
  Synthetic polypeptide
PCWCPDLGLSASRTVDMMKEALEKLQLNIVEMKDENATLDGGDVLFTGREFFVGLSKRTNQRGAEILADTFKDYAVSTVPVADGLHLKSFCSMAGPNLIAIGSSESAQKALKIMQQMSDHRYDKLTVPDDIAANCIYLNIPNKGHVLLHRTPEEYPESAKVYEKLKDHMLIPVSMSELEKVDGLLTCCSVLINKKVDS

SEQ ID NO: 12543 - protein, 27 aa, Artificial Sequence
  Synthetic polypeptide
KPGREPSPESDHAGALILDFQPPELLT

SEQ ID NO: 12544 - protein, 9 aa, Artificial Sequence
  Synthetic polypeptide
SWTFSLQNC

SEQ ID NO: 12545 - protein, 497 aa, Artificial Sequence
  Synthetic polypeptide
RSQDCQIRTAPVYSSQREQRRRQVISAFPSEGHVGVPGLRGATGQQGPPGEPGDQGEQGLKGERGSEGNKGKKGAPGPSGKPGIPGLQGLLGPKGIQGYHGADGISGNPGKIGPPGKQGLPGIRGGPGRTGLAGAPGPPGVKGSSGLPGSPGIQGPKGEQGLPGQPGIQGKRGHRGAQGDQGPCGDPGLKGQPGEYGVQGLTGFQGFPGPKGPEGDAGIVGISGPKGPIGHRGNTGPLGREGIIGPTGRTGPRGEKGFRGETKQMDINAAIQALIESNTALQMESYQNTEVTLIDHSEEIFKTLNYLSNLLHSIKNPLGTRDNPARICKDLLNCEQKVSDGKYWIDPNLGCPSDAIEVFCNFSAGGQTCLPPVSVTKLEFGVGKVQMNFLHLLSSEATHIITIHCLNTPRWTSTQTSGPGLPIGFKGWNGQIFKVNTLLEPKVLSDDCKIQDGSWHKATFLFHTQEPNQLPVIEVQKLPHLKTERKYYIDSSSVCFL

SEQ ID NO: 12546 - protein, 14 aa, Artificial Sequence
  Synthetic polypeptide
FLHFHLRAMWVYQD

SEQ ID NO: 12547 - protein, 518 aa, Artificial Sequence
  Synthetic polypeptide
RSQDCQIRTAPVYSSQREQRRRQVISAFPSEGHVGVPGLRGATGQQGPPGEPGDQGEQGLKGERGSEGNKGKKGAPGPSGKPGIPGLQGLLGPKGIQGYHGADGISGNPGKIGPPGKQGLPGIRGGPGRTGLAGAPGPPGVKGSSGLPGSPGIQGPKGEQGLPGQPGIQGKRGHRGAQGDQGPCGDPGLKGQPGEYGVQGLTGFQGFPGPKGPEGDAGIVGISGPKGPIGHRGNTGPLGREGIIGPTGRTGPRGEKGFRGETGPQGPRGQPGPPGPPGAPGPRKQMDINAAIQALIESNTALQMESYQNTEVTLIDHSEEIFKTLNYLSNLLHSIKNPLGTRDNPARICKDLLNCEQKVSDGKYWIDPNLGCPSDAIEVFCNFSAGGQTCLPPVSVTKLEFGVGKVQMNFLHLLSSEATHIITIHCLNTPRWTSTQTSGPGLPIGFKGWNGQIFKVNTLLEPKVLSDDCKIQDGSWHKATFLFHTQEPNQLPVIEVQKLPHLKTERKYYIDSSSVCFL

SEQ ID NO: 12548 - protein, 31 aa, Artificial Sequence
  Synthetic polypeptide
GRVWWRMPVIPALWEAEAGGSRGPEIEIILV

SEQ ID NO: 12549 - protein, 21 aa, Artificial Sequence
  Synthetic polypeptide
SQHFGRPRRADHEVRRSRSSW

SEQ ID NO: 12550 - protein, 30 aa, Artificial Sequence
  Synthetic polypeptide
PGVVAHACNPSTLGGRGGRITRSGDRDHPG

SEQ ID NO: 12551 - protein, 75 aa, Artificial Sequence
  Synthetic polypeptide
VLQWKKVIALKLKLCILTCAGSTWSSRYPRSVREERSTGHTRATWKSWFTWITWSKGPQRRSRIFPRSTCSWRKG

SEQ ID NO: 12552 - protein, 1199 aa, Artificial Sequence
  Synthetic polypeptide
PVQGPPGPAGIPGPSGKRGPRGIPGPHGNPGLPGLPGPKGPKGDPGFSPGQPVPGEKGDQGLSGLMGPPGMQGDKGLKGHPGLPGLPGEQGIPGFAGNIGSPGYPGRQGLAGPEGNPGPKGAQGFIGSPGEAGQLGPEGERGIPGIRGKKGFKGRQGFPGDFGDRGPAGLDGSPGLVGGTGPPGFPGLRGSVGPVGPIGPAGIPGPMGLSGNKGLPGIKGDKGEQGTAGELGEPGYPGDKGAVGLPGPPGMRGKSGPSGQTGDPGLQGPSGPPGPEGFPGDIGIPGQNGPEGPKGLLGNRGPPGPPGLKGTQGEEGPIGAFGELGPRGKPGQKGYAGEPGPEGLKGEVGDQGNIGKIGETGPVGLPGEVGMTGSIGEKGERGSPGPLGPQGEKGVMGYPGPPGVPGPIGPLGLPGHVGARGPPGSQGPKGQRGSRGPDGLLGEQGIQGAKGEKGDQGKRGPHGLIGKTGNPGERGFQGKPGLQGLPGSTGDRGLPGEPGLRGLQGDVGPPGEMGMEGPPGTEGESGLQGEPGAKGDVGTAGSVGGTGEPGLRGEPGAPGEEGLQGKDGLKGVPGGRGLPGEDGEKGEMGLPGIIGPLGRSGQTGLPGPEGIVGIPGQRGRPGKKGDKGQIGPTGEVGSRGPPGKIGKSGPKGARGTRGAVGHLGLMGPDGEPGIPGYRGHQGQPGPSGLPGPKGEKGYPGEDSTVLGPPGPRGEPGPVGDQGERGEPGAEGYKGHVGVPGLRGATGQQGPPGEPGDQGEQGLKGERGSEGNKGKKGAPGPSGKPGIPGLQGLLGPKGIQGYHGADGISGNPGKIGPPGKQGLPGIRGGPGRTGLAGAPGPPGVKGSSGLPGSPGIQGPKGEQGLPGQPGIQGKRGHRGAQGDQGPCGDPGLKGQPGEYGVQGLTGFQGFPGPKGPEGDAGIVGISGPKGPIGHRGNTGPLGREGIIGPTGRTGPRGEKGFRGETKQMDINAAIQALIESNTALQMESYQNTEVTLIDHSEEIFKTLNYLSNLLHSIKNPLGTRDNPARICKDLLNCEQKVSDGKYWIDPNLGCPSDAIEVFCNFSAGGQTCLPPVSVTKLEFGVGKVQMNFLHLLSSEATHIITIHCLNTPRWTSTQTSGPGLPIGFKGWNGQIFKVNTLLEPKVLSDDCKIQDGSWHKATFLFHTQEPNQLPVIEVQKLPHLKTERKYYIDSSSVCFL

SEQ ID NO: 12553 - protein, 71 aa, Artificial Sequence
  Synthetic polypeptide
TQTLYPDLCRVHLVQQVSQVRQGREVHGAYQGHMEILVYLDYLVQRAPKEIQDFPQVNLFLEKRVIKAFLD

SEQ ID NO: 12554 - protein, 1220 aa, Artificial Sequence
  Synthetic polypeptide
PVQGPPGPAGIPGPSGKRGPRGIPGPHGNPGLPGLPGPKGPKGDPGFSPGQPVPGEKGDQGLSGLMGPPGMQGDKGLKGHPGLPGLPGEQGIPGFAGNIGSPGYPGRQGLAGPEGNPGPKGAQGFIGSPGEAGQLGPEGERGIPGIRGKKGFKGRQGFPGDFGDRGPAGLDGSPGLVGGTGPPGFPGLRGSVGPVGPIGPAGIPGPMGLSGNKGLPGIKGDKGEQGTAGELGEPGYPGDKGAVGLPGPPGMRGKSGPSGQTGDPGLQGPSGPPGPEGFPGDIGIPGQNGPEGPKGLLGNRGPPGPPGLKGTQGEEGPIGAFGELGPRGKPGQKGYAGEPGPEGLKGEVGDQGNIGKIGETGPVGLPGEVGMTGSIGEKGERGSPGPLGPQGEKGVMGYPGPPGVPGPIGPLGLPGHVGARGPPGSQGPKGQRGSRGPDGLLGEQGIQGAKGEKGDQGKRGPHGLIGKTGNPGERGFQGKPGLQGLPGSTGDRGLPGEPGLRGLQGDVGPPGEMGMEGPPGTEGESGLQGEPGAKGDVGTAGSVGGTGEPGLRGEPGAPGEEGLQGKDGLKGVPGGRGLPGEDGEKGEMGLPGIIGPLGRSGQTGLPGPEGIVGIPGQRGRPGKKGDKGQIGPTGEVGSRGPPGKIGKSGPKGARGTRGAVGHLGLMGPDGEPGIPGYRGHQGQPGPSGLPGPKGEKGYPGEDSTVLGPPGPRGEPGPVGDQGERGEPGAEGYKGHVGVPGLRGATGQQGPPGEPGDQGEQGLKGERGSEGNKGKKGAPGPSGKPGIPGLQGLLGPKGIQGYHGADGISGNPGKIGPPGKQGLPGIRGGPGRTGLAGAPGPPGVKGSSGLPGSPGIQGPKGEQGLPGQPGIQGKRGHRGAQGDQGPCGDPGLKGQPGEYGVQGLTGFQGFPGPKGPEGDAGIVGISGPKGPIGHRGNTGPLGREGIIGPTGRTGPRGEKGFRGETGPQGPRGQPGPPGPPGAPGPRKQMDINAAIQALIESNTALQMESYQNTEVTLIDHSEEIFKTLNYLSNLLHSIKNPLGTRDNPARICKDLLNCEQKVSDGKYWIDPNLGCPSDAIEVFCNFSAGGQTCLPPVSVTKLEFGVGKVQMNFLHLLSSEATHIITIHCLNTPRWTSTQTSGPGLPIGFKGWNGQIFKVNTLLEPKVLSDDCKIQDGSWHKATFLFHTQEPNQLPVIEVQKLPHLKTERKYYIDSSSVCFL

SEQ ID NO: 12555 - protein, 396 aa, Artificial Sequence
  Synthetic polypeptide
PVQGPPGPAGIPGPSGKRGPRGIPGPHGNPGLPGLPGPKGPKGDPGFSPGQPVPGEKGDQGLSGLMGPPGMQGDKGLKGHPGLPGLPGEQGIPGFAGNIGSPGYPGRQGLAGPEGNPGPKGAQGFIGSPGEAGQLGPEGERGIPGIRGKKGFKGRQGFPGDFGDRGPAGLDGSPGLVGGTGPPGFPGLRGSVGPVGPIGPAGIPGPMGLSGNKGLPGIKGDKGEQGTAGELGEPGYPGDKGAVGLPGPPGMRGKSGPSGQTGDPGLQGPSGPPGPEGFPGDIGIPGQNGPEGPKGLLGNRGPPGPPGLKGTQGEEGPIGAFGELGPRGKPGQKGYAGEPGPEGLKGEVGDQGNIGKIGETMESCSVTQAGAQWHDLGSLHPLPPGFKRFSCLSLPG

SEQ ID NO: 12556 - protein, 452 aa, Artificial Sequence
  Synthetic polypeptide
RRSFLPLPSTMIVSFLRSSQPCGTSLETKIAKWNLQSRMNKNEAIVMKEASRQKTVALKKASKVYKQRLDHFTGAIEKLTSQIRDQEAKLSETISASNAWKSHYEKIVIEKTELEVQIETMKKQIINLLEDLKKMEDHGKNSCEEILRKVHSIEYENETLNLENTKLKLRFPCRITESKNMNILIVLDMLCYISSEKTTLAALKDEVVSVENELSELQEVEKKQKTLIEMYKTQVQKLQEAAEIVKSRCENLLHKNNQITKTKNKNVEKMRGQMESHLKELERVCDSLTAAERRLHECQESLQCCKGKCADQEHTIRELQGQVDGNHNLLTKLSLEEENCLIQLKCENLQQKLEQMDAENKELEKKLANQEECLKHSNLKFKEKSAEYTALARQLEAALEEGRQKVAEEIEKMSSRESALQIKILDLETELRKKNEEQNQLVCKMNSDPETP

SEQ ID NO: 12557 - protein, 9 aa, Artificial Sequence
  Synthetic polypeptide
DLPSRVELA

SEQ ID NO: 12558 - protein, 460 aa, Artificial Sequence
  Synthetic polypeptide
RRSFLPLPSTMIVSFLRSSQPCGTSLETKIAKWNLQSRMNKNEAIVMKEASRQKTVALKKASKVYKQRLDHFTGAIEKLTSQIRDQEAKLSETISASNAWKSHYEKIVIEKTELEVQIETMKKQIINLLEDLKKMEDHGKNSCEEILRKVHSIEYENETLNLENTKLKTTLAALKDEVVSVENELSELQEVEKKQKTLIEMYKTQVQKLQEAAEIVKSRCENLLHKNNQITKTKNKNVEKMRGQMESHLKELERVCDSLTAAERRLHECQESLQCCKGKCADQEHTIRELQGQVDGNHNLLTKLSLEEENCLIQLKCENLQQKLEQMDAENKELEKKLANQEECLKHSNLKFKEKSAEYTALARQLEAALEEGRQKVAEEIEKMSSRESALQIKILDLETELRKKNEEQNQLVCKMNSKAQHQEVCLKEVQNSLEKSENQNESIKNYLQFLKTSYVTMFE

SEQ ID NO: 12559 - protein, 489 aa, Artificial Sequence
  Synthetic polypeptide
RRSFLPLPSTMIVSFLRSSQPCGTSLETKIAKWNLQSRMNKNEAIVMKEASRQKTVALKKASKVYKQRLDHFTGAIEKLTSQIRDQEAKLSETISASNAWKSHYEKIVIEKTELEVQIETMKKQIINLLEDLKKMEDHGKNSCEEILRKVHSIEYENETLNLENTKLKLRFPCRITESKNMNILIVLDMLCYISSEKTTLAALKDEVVSVENELSELQEVEKKQKTLIEMYKTQVQKLQEAAEIVKSRCENLLHKNNQITKTKNKNVEKMRGQMESHLKELERVCDSLTAAERRLHECQESLQCCKGKCADQEHTIRELQGQVDGNHNLLTKLSLEEENCLIQLKCENLQQKLEQMDAENKELEKKLANQEECLKHSNLKFKEKSAEYTALARQLEAALEEGRQKVAEEIEKMSSRESALQIKILDLETELRKKNEEQNQLVCKMNSKAQHQEVCLKEVQNSLEKSENQNESIKNYLQFLKTSYVTMFE

SEQ ID NO: 12560 - protein, 407 aa, Artificial Sequence
  Synthetic polypeptide
RRSFLPLPSTMIVSFLRSSQPCGTSLETKIAKWNLQSRMNKNEAIVMKEASRQKTVALKKASKVYKQRLDHFTGAIEKLTSQIRDQEAKLSETISASNAWKSHYEKIVIEKTELEVQIETMKKQIINLLEDLKKMEDHGKNSCEEILRKVHSIEYENETLNLENTKLKTTLAALKDEVVSVENELSELQEVEKKQKTLIEMYKTQVQKLQEAAEIVKSRCENLLHKNNQITKTKNKNVEKVDGNHNLLTKLSLEEENCLIQLKCENLQQKLEQMDAENKELEKKLANQEECLKHSNLKFKEKSAEYTALARQLEAALEEGRQKVAEEIEKMSSRESALQIKILDLETELRKKNEEQNQLVCKMNSKAQHQEVCLKEVQNSLEKSENQNESIKNYLQFLKTSYVTMFE

SEQ ID NO: 12561 - protein, 436 aa, Artificial Sequence
  Synthetic polypeptide
RRSFLPLPSTMIVSFLRSSQPCGTSLETKIAKWNLQSRMNKNEAIVMKEASRQKTVALKKASKVYKQRLDHFTGAIEKLTSQIRDQEAKLSETISASNAWKSHYEKIVIEKTELEVQIETMKKQIINLLEDLKKMEDHGKNSCEEILRKVHSIEYENETLNLENTKLKTTLAALKDEVVSVENELSELQEVEKKQKTLIEMYKTQVQKLQEAAEIVKSRCENLLHKNNQITKTKNKNVEKMRGQMESHLKELERVCDSLTAAERRLHECQESLQCCKGKCADQEHTIRELQGQILKQWEEYSVLAWVDGNHNLLTKLSLEEENCLIQLKCENLQQKLEQMDAENKELEKKLANQEECLKHSNLKFKEKSAEYTALARQLEAALEEGRQKVAEEIEKMSSRESALQIKILDLETELRKKNEEQNQLVCKMNSDPETP

SEQ ID NO: 12562 - protein, 229 aa, Artificial Sequence
  Synthetic polypeptide
RRSFLPLPSTMIVSFLRSSQPCGTSLETKIAKWNLQSRMNKNEAIVMKEASRQKTVALKKASKVYKQRLDHFTGAIEKLTSQIRDQEAKLSETISASNAWKSHYEKIVIEKTELEVQIETMKKQIINLLEDLKKMEDHGKNSCEEILRKVHSIEYENETLNLENTKLKTTLAALKDEVVSVENELSELQEVEKKQKTLIEMYKTQVQKLQEAAEIVKSRCENLLHKNNQ

SEQ ID NO: 12563 - protein, 30 aa, Artificial Sequence
  Synthetic polypeptide
GRAQWIMPVIPALWEDEAGGSLEPEAGHSK

SEQ ID NO: 12564 - protein, 612 aa, Artificial Sequence
  Synthetic polypeptide
SQHFGRMRQVDHLSLKQDILNEKTELEATLKEAELVTHSVELLLPLFKDTIEKINFENANLSALNLKISEQKEILIKELDTFKSVKLALEHLLRKRDYKQTGDNLSSMLLENLTDNESENTNLKKKVFEKEAHIQELSCLFQSEKANTLKANRFSQSVKVVHERLQIQIHKREAENDKLKEYVKSLETKIAKWNLQSRMNKNEAIVMKEASRQKTVALKKASKVYKQRLDHFTGAIEKLTSQIRDQEAKLSETISASNAWKSHYEKIVIEKTELEVQIETMKKQIINLLEDLKKMEDHGKNSCEEILRKVHSIEYENETLNLENTKLKLRFPCRITESKNMNILIVLDMLCYISSEKTTLAALKDEVVSVENELSELQEVEKKQKTLIEMYKTQVQKLQEAAEIVKSRCENLLHKNNQITKTKNKNVEKMRGQMESHLKELERVCDSLTAAERRLHECQESLQCCKGKCADQEHTIRELQGQVDGNHNLLTKLSLEEENCLIQLKCENLQQKLEQMDAENKELEKKLANQEECLKHSNLKFKEKSAEYTALARQLEAALEEGRQKVAEEIEKMSSRESALQIKILDLETELRKKNEEQNQLVCKMNSDPETP

SEQ ID NO: 12565 - protein, 649 aa, Artificial Sequence
  Synthetic polypeptide
SQHFGRMRQVDHLSLKQDILNEKTELEATLKEAELVTHSVELLLPLFKDTIEKINFENANLSALNLKISEQKEILIKELDTFKSVKLALEHLLRKRDYKQTGDNLSSMLLENLTDNESENTNLKKKVFEKEAHIQELSCLFQSEKANTLKANRFSQSVKVVHERLQIQIHKREAENDKLKEYVKSLETKIAKWNLQSRMNKNEAIVMKEASRQKTVALKKASKVYKQRLDHFTGAIEKLTSQIRDQEAKLSETISASNAWKSHYEKIVIEKTELEVQIETMKKQIINLLEDLKKMEDHGKNSCEEILRKVHSIEYENETLNLENTKLKLRFPCRITESKNMNILIVLDMLCYISSEKTTLAALKDEVVSVENELSELQEVEKKQKTLIEMYKTQVQKLQEAAEIVKSRCENLLHKNNQITKTKNKNVEKMRGQMESHLKELERVCDSLTAAERRLHECQESLQCCKGKCADQEHTIRELQGQVDGNHNLLTKLSLEEENCLIQLKCENLQQKLEQMDAENKELEKKLANQEECLKHSNLKFKEKSAEYTALARQLEAALEEGRQKVAEEIEKMSSRESALQIKILDLETELRKKNEEQNQLVCKMNSKAQHQEVCLKEVQNSLEKSENQNESIKNYLQFLKTSYVTMFE

SEQ ID NO: 12566 - protein, 620 aa, Artificial Sequence
  Synthetic polypeptide
SQHFGRMRQVDHLSLKQDILNEKTELEATLKEAELVTHSVELLLPLFKDTIEKINFENANLSALNLKISEQKEILIKELDTFKSVKLALEHLLRKRDYKQTGDNLSSMLLENLTDNESENTNLKKKVFEKEAHIQELSCLFQSEKANTLKANRFSQSVKVVHERLQIQIHKREAENDKLKEYVKSLETKIAKWNLQSRMNKNEAIVMKEASRQKTVALKKASKVYKQRLDHFTGAIEKLTSQIRDQEAKLSETISASNAWKSHYEKIVIEKTELEVQIETMKKQIINLLEDLKKMEDHGKNSCEEILRKVHSIEYENETLNLENTKLKTTLAALKDEVVSVENELSELQEVEKKQKTLIEMYKTQVQKLQEAAEIVKSRCENLLHKNNQITKTKNKNVEKMRGQMESHLKELERVCDSLTAAERRLHECQESLQCCKGKCADQEHTIRELQGQVDGNHNLLTKLSLEEENCLIQLKCENLQQKLEQMDAENKELEKKLANQEECLKHSNLKFKEKSAEYTALARQLEAALEEGRQKVAEEIEKMSSRESALQIKILDLETELRKKNEEQNQLVCKMNSKAQHQEVCLKEVQNSLEKSENQNESIKNYLQFLKTSYVTMFE

SEQ ID NO: 12567 - protein, 567 aa, Artificial Sequence
  Synthetic polypeptide
SQHFGRMRQVDHLSLKQDILNEKTELEATLKEAELVTHSVELLLPLFKDTIEKINFENANLSALNLKISEQKEILIKELDTFKSVKLALEHLLRKRDYKQTGDNLSSMLLENLTDNESENTNLKKKVFEKEAHIQELSCLFQSEKANTLKANRFSQSVKVVHERLQIQIHKREAENDKLKEYVKSLETKIAKWNLQSRMNKNEAIVMKEASRQKTVALKKASKVYKQRLDHFTGAIEKLTSQIRDQEAKLSETISASNAWKSHYEKIVIEKTELEVQIETMKKQIINLLEDLKKMEDHGKNSCEEILRKVHSIEYENETLNLENTKLKTTLAALKDEVVSVENELSELQEVEKKQKTLIEMYKTQVQKLQEAAEIVKSRCENLLHKNNQITKTKNKNVEKVDGNHNLLTKLSLEEENCLIQLKCENLQQKLEQMDAENKELEKKLANQEECLKHSNLKFKEKSAEYTALARQLEAALEEGRQKVAEEIEKMSSRESALQIKILDLETELRKKNEEQNQLVCKMNSKAQHQEVCLKEVQNSLEKSENQNESIKNYLQFLKTSYVTMFE

SEQ ID NO: 12568 - protein, 596 aa, Artificial Sequence
  Synthetic polypeptide
SQHFGRMRQVDHLSLKQDILNEKTELEATLKEAELVTHSVELLLPLFKDTIEKINFENANLSALNLKISEQKEILIKELDTFKSVKLALEHLLRKRDYKQTGDNLSSMLLENLTDNESENTNLKKKVFEKEAHIQELSCLFQSEKANTLKANRFSQSVKVVHERLQIQIHKREAENDKLKEYVKSLETKIAKWNLQSRMNKNEAIVMKEASRQKTVALKKASKVYKQRLDHFTGAIEKLTSQIRDQEAKLSETISASNAWKSHYEKIVIEKTELEVQIETMKKQIINLLEDLKKMEDHGKNSCEEILRKVHSIEYENETLNLENTKLKTTLAALKDEVVSVENELSELQEVEKKQKTLIEMYKTQVQKLQEAAEIVKSRCENLLHKNNQITKTKNKNVEKMRGQMESHLKELERVCDSLTAAERRLHECQESLQCCKGKCADQEHTIRELQGQILKQWEEYSVLAWVDGNHNLLTKLSLEEENCLIQLKCENLQQKLEQMDAENKELEKKLANQEECLKHSNLKFKEKSAEYTALARQLEAALEEGRQKVAEEIEKMSSRESALQIKILDLETELRKKNEEQNQLVCKMNSDPETP

SEQ ID NO: 12569 - protein, 55 aa, Artificial Sequence
  Synthetic polypeptide
QWLTPIIPALWEAKAGGSQGQEIETILANMLLLGVINPNCSEDCKSSMSVVQTLY

SEQ ID NO: 12570 - protein, 26 aa, Artificial Sequence
  Synthetic polypeptide
SQHFGRPRQADHKVRRSRPSWLTCFC

SEQ ID NO: 12571 - protein, 61 aa, Artificial Sequence
  Synthetic polypeptide
HAFVRSDKPKLFRGLQIKYVRGSDPVLKLLDDNGNIAEELSILKWNTDSVEEFLSEKLERI

SEQ ID NO: 12572 - protein, 27 aa, Artificial Sequence
  Synthetic polypeptide
HAFVRSDKPKLFRGLQIKYVRGSDPVL

SEQ ID NO: 12573 - protein, 40 aa, Artificial Sequence
  Synthetic polypeptide
EVRSPSARQPPRLGSEERLRPAAALSGRELYAGAILEVCG

SEQ ID NO: 12574 - protein, 73 aa, Artificial Sequence
  Synthetic polypeptide
GAPPPGSHPVWEVRSVSAQQPPCPGGSCMQELFLKFVDENWEGSLKSKLLLGVINPNCSEDCKSSMSVVQTLY

SEQ ID NO: 12575 - protein, 20 aa, Artificial Sequence
  Synthetic polypeptide
GASPPSSRPVREGAVCRSYS

SEQ ID NO: 12576 - protein, 67 aa, Artificial Sequence
  Synthetic polypeptide
GAPPPGSHPVWEVRSVSAQQPPCPGGSCMQELFLKFVDENWEGSLKSKYVRGSDPVLKLLDDNGNIA

SEQ ID NO: 12577 - protein, 12 aa, Artificial Sequence
  Synthetic polypeptide
ELYAGAILEVCG

SEQ ID NO: 12578 - protein, 74 aa, Artificial Sequence
  Synthetic polypeptide
EGRRPSAWQPPRLRSEEPLRPAAAPSENCMQELFLKFVDENWEGSLKSKLLLGVINPNCSEDCKSSMSVVQTLY

SEQ ID NO: 12579 - protein, 21 aa, Artificial Sequence
  Synthetic polypeptide
EVRSPSARQPPRLRTVCRSYS

SEQ ID NO: 12580 - protein, 68 aa, Artificial Sequence
  Synthetic polypeptide
EGRRPSAWQPPRLRSEEPLRPAAAPSENCMQELFLKFVDENWEGSLKSKYVRGSDPVLKLLDDNGNIA

SEQ ID NO: 12581 - protein, 31 aa, Artificial Sequence
  Synthetic polypeptide
SSPSLSTVSVTHGQLWSKNRGIPEVFRFLRM

SEQ ID NO: 12582 - protein, 28 aa, Artificial Sequence
  Synthetic polypeptide
VVPPYPRFQLPMVNCGPKIGGFPKSSVF

SEQ ID NO: 12583 - protein, 60 aa, Artificial Sequence
  Synthetic polypeptide
LWSHYFIYIGCTPCNQWETSRGYLNPRKFCKRSLELFGCSSKSHMSKPSRCDFSGGLQSR

SEQ ID NO: 12584 - protein, 322 aa, Artificial Sequence
  Synthetic polypeptide
TPENSAKGVLSCLDALPRVTCPNHPDAILVEDYRAGDMICPECGLVVGDRVIDVGSEWRTFSNDKATKDPSRVGDSQNPLLSDGDLSTMIGKGTGAASFDEFGNSKYQNRRTMSSSDRAMMNAFKEITTMADRINLPRNIVDRTNNLFKQVYEQKSLKGRANDAIASACLYIACRQEGVPRTFKEICAVSRISKKEIGRCFKLILKALETSVDLITTGDFMSRFCSNLCLPKQVQMAATHIARKAVELDLVPGRSPISVAAAAIYMASQASAEKRTQKEIGDIAGVADVTIRQSYRLIYPRAPDLFPTDFKFDTPVDKLPQL

SEQ ID NO: 12585 - protein, 18 aa, Artificial Sequence
  Synthetic polypeptide
AVWMLFQESHVQTIQMRF

SEQ ID NO: 12586 - protein, 231 aa, Artificial Sequence
  Synthetic polypeptide
TPENSAKGVLSCLDALPRVTCPNHPDAILVEDYRAGDMICPECGLVVGDRVIDVGSEWRTFSNDKATKDPSRVGDSQNPLLSDGDLSTMIGKGTGAASFDEFGNSKYQNRRTMSSSDRAMMNAFKEITTMADRINLPRNIVDRTNNLFKQVYEQKSLKGRANDAIASACLYIACRQEGVPRTFKEICAVSRISKKEIGRCFKLILKALETSVDLITTGDFMSRNWRYCWCC

SEQ ID NO: 12587 - protein, 237 aa, Artificial Sequence
  Synthetic polypeptide
TPENSAKGVLSCLDALPRVTCPNHPDAILVEDYRAGDMICPECDRVIDVGSEWRTFSNDKATKDPSRVGDSQNPLLSDGDLSTMIGKGTGAASFDEFGNSKYQNRRTMSSSDRAMMNAFKEITTMADRINLPRNIVDRTNNLFKQVYEQKSLKGRANDAIASACLYIACRQEGVPRTFKEICAVSRISKKEIGRCFKLILKALETSVDLITTGDFMSRFCSNLCLPKQVQMAATHIA

SEQ ID NO: 12588 - protein, 32 aa, Artificial Sequence
  Synthetic polypeptide
SYLHMKPWLKLSGLTSSAWMTQNVTLILCQKS

SEQ ID NO: 12589 - protein, 140 aa, Artificial Sequence
  Synthetic polypeptide
LSAHEALAQAFWIDIKRMDDPECYFNSLPKELEVKRDRMVRLLESVGLKPIVPDGGYFIIADVSLLDPDLSDMKNNEPYDYKFVKWMTKHKKLSAIPVSAFCNSETKSQFEKFVRFCFIKKDSTLDAAEEIIKAWSVQKS

SEQ ID NO: 12590 - protein, 13 aa, Artificial Sequence
  Synthetic polypeptide
HMNMHCASPRRDD

SEQ ID NO: 12591 - protein, 100 aa, Artificial Sequence
  Synthetic polypeptide
ICIVLLQGEMIEMLPDGLFQCKKLQCLLLGKNSLMNLSPHVGELSNLTHLELIGNYLETLPPELEGCQSLKRNCLIVEENLLNTLPLPVTERLQTCLDKC

SEQ ID NO: 12592 - protein, 9 aa, Artificial Sequence
  Synthetic polypeptide
SWQEVHGCL

SEQ ID NO: 12593 - protein, 32 aa, Artificial Sequence
  Synthetic polypeptide
LNLNFTVFTTKTLGNYHSQMSSEAGRKCTAVY

SEQ ID NO: 12594 - protein, 19 aa, Artificial Sequence
  Synthetic polypeptide
EITIPRCLLKLAGSARLSI

SEQ ID NO: 12595 - protein, 27 aa, Artificial Sequence
  Synthetic polypeptide
PLGICSRETTLGCISHQTICRKCTAVY

SEQ ID NO: 12596 - protein, 16 aa, Artificial Sequence
  Synthetic polypeptide
DVLVIRRFAGSARLSI

SEQ ID NO: 12597 - protein, 12 aa, Artificial Sequence
  Synthetic polypeptide
SSDDLQEVHGCL

SEQ ID NO: 12598 - protein, 8 aa, Artificial Sequence
  Synthetic polypeptide
TKSKGEGA

SEQ ID NO: 12599 - protein, 662 aa, Artificial Sequence
  Synthetic polypeptide
KASPNTLGQPKDICQKQSEVIVSYCSWLRERRTAEANNRLKVKEKEHKNQDDLLKEKETLIQQLKEELQEKNVTLDVQIQHVVEGKRALSELTQGVTCYKAKIKELETILETQKVECSHSAKLEQDILEKESIILKLERNLKEFQEHLQDSVKNTKDLNVKELKLKEEITQLTNNLQDMKHLLQLKEEEEETNRQETEKLKEELSASSARTQNLKADLQRKEEDYADLKEKLTDAKKQIKQVQKEVSVMRDEDKLLRIKINELEKKKNQCSQELDMKQRTIQQLKEQLNNQKVEEAIQQYERACKDLNVKEKIIEDMRMTLEEQEQTQVEQDQVLEAKLEEVERLATELEKWKEKCNDLETKNNQRSNKEHENNTDVLGKLTNLQDELQESEQKYNADRKKWLEEKMMLITQAKEAENIRNKEMKKYAEDRERFFKQQNEMEILTAQLTEKDSDLQKWREERDQLVAALEIQLKALISSNVQKDNEIEQLKRIISETSKIETQIMDIKPKRISSADPDKLQTEPLSTSFEISRNKIEDGSVVLDSCEVSTENDQSTRFPKPELEIQFTPLQPNKMAVKHPGCTTPVTVKIPKARKRKSNEMEESASPPPKECSSSPAMEQSWKENDFDKLREEGFRRSNYSELQEEIQTKGKEVENFEKNLD

SEQ ID NO: 12600 - protein, 760 aa, Artificial Sequence
  Synthetic polypeptide
KASPNTLGQPKDICQKQSEVIVSYCSWLRERRTAEANNRLKVKEKEHKNQDDLLKEKETLIQQLKEELQEKNVTLDVQIQHVVEGKRALSELTQGVTCYKAKIKELETILETQKVECSHSAKLEQDILEKESIILKLERNLKEFQEHLQDSVKNTKDLNVKELKLKEEITQLTNNLQDMKHLLQLKEEEEETNRQETEKLKEELSASSARTQNLKADLQRKEEDYADLKEKLTDAKKQIKQVQKEVSVMRDEDKLLRIKINELEKKKNQCSQELDMKQRTIQQLKEQLNNQKVEEAIQQYERACKDLNVKEKIIEDMRMTLEEQEQTQVEQDQVLEAKLEEVERLATELEKWKEKCNDLETKNNQRSNKEHENNTDVLGKLTNLQDELQESEQKYNADRKKWLEEKMMLITQAKEAENIRNKEMKKYAEDRERFFKQQNEMEILTAQLTEKDSDLQKWREERDQLVAALEIQLKALISSNVQKDNEIEQLKRIISETSKIETQIMDIKPKRISSADPDKLQTEPLSTSFEISRNKIEDGSVVLDSCEVSTENDQSTRFPKPELEIQFTPLQPNKMAVKHPGCTTPVTVKIPKARKRKSNEMEEDLVKCENKKNATPRTNLKFPISDDRNSSVKKEQKVAIRPSSKKTYSLRSQASIIGVNLATKKKEGTLQKFGDFLQHSPSILQSKAKKIIETMSSSKLSNVEASKENVSQPKRAKRKLYTSEISSPIDISGQVILMDQKMKESDHQIIKRRLRTKTAK

SEQ ID NO: 12601 - protein, 65 aa, Artificial Sequence
  Synthetic polypeptide
QLTLEQHGFMGLNCASPLLCGYFSTSATLKIARPTPLLFLLLLSLLNVKTRIKTFMMIYFHLMNN

SEQ ID NO: 12602 - protein, 26 aa, Artificial Sequence
  Synthetic polypeptide
ITDPNSWHSETFSGRYGVYTVSRHPP

SEQ ID NO: 12603 - protein, 43 aa, Artificial Sequence
  Synthetic polypeptide
PLAPRHVEYAHSGDVLGPSGLPASPGAPGTCLHNPAGSNWGPG

SEQ ID NO: 12604 - protein, 799 aa, Artificial Sequence
  Synthetic polypeptide
LLDLWHPGMWNMLIVAMCLALLGCLQAQELQGHVSIILLGATGDLAKKYLWQGLFQLYLDEAGRGHSFSFHGAALTAPKQGQELMAKALESLSCPKDMAPSHCAEHKDQFLQLSQYRQLKTAEDYQALNKDIEAQLQHAGLREAGRIFYFSVPPFAYEDIARNINSSCRPGPGAWLRVVLEKPFGHDHFSAQQLATELGTFFQEEEMYRVDHYLGKQAVAQILPFRDQNRKALDGLWNRHHVERVEIIMKETVDAEGRTSFYEEYGVIRDVLQNHLTEVLTLVAMELPHNVSSAEAVLRHKLQVFQALRGLQRGSAVVGQYQSYSEQVRRELQKPDSFHSLTPTFAAVLVHIDNLRWEGVPFILMSGKALDERVGYARILFKNQACCVQSEKHWAAAQSQCLPRQLVFHIGHGDLGSPAVLVSRNLFRPSLPSSWKEMEGPPGLRLFGSPLSDYYAYSPVRERDAHSVLLSHIFHGRKNFFITTENLLASWNFWTPLLESLAHKAPRLYPGGAENGRLLDFEFSSGRLFFSQQQPEQLVPGPGPAPMPSDFQVLRAKYRESPLVSAWSEELISKLANDIEATAVRAVRRFGQFHLALSGGSSPVALFQQLATAHYGFPWAHTHLWLVDERCVPLSDPESNFQGLQAHLLQHVRIPYYNIHPMPVHLQQRLCAEEDQGAQIYAREISALVANSSFDLVLLGMGADGHTASLFPQSPTGLDGEQLVVLTTSPSQPHRRMSLSLPLINRAKKVAVLVMGRMKREITTLVSRVGHEPKKWPISGVLPHSGQLVWYMDYDAFLG

SEQ ID NO: 12605 - protein, 27 aa, Artificial Sequence
  Synthetic polypeptide
MGPDCLYSNPITSSCLTFGTQACGICS

SEQ ID NO: 12606 - protein, 32 aa, Artificial Sequence
  Synthetic polypeptide
GQVRWLSPVIPALWEAEGRYSTPMPLQPKCYS

SEQ ID NO: 12607 - protein, 335 aa, Artificial Sequence
  Synthetic polypeptide
SQHFGRPRVDIAHLCLYNLSVIHKKKYFDSELELMTYINENWDRLHPGELADTPKSERYEHVLEALNDYKTMFMSGKEIKKKKHLFGLRIRVPPVPPNVAFKAEKEPEGTSHEFKIKGRKASKPISDSREVSNGIEKKGKKKSVGRPPGPYTRKMIQKTAEPLLDKESISENPTLDLPCSIGRTEGTAHSSNTSDVDFTGASSAKETTSSSISRHYGLSDSRKRTRTGRSWPAAIPHLRRRRGRLPRRALQTQNSEIVKDDEGKEDYQFDELNTEILNNLADQELQLNHLKNSITSYFGAAGRIACGEKYRVLARRVTLDGKVQYLVEWEGATAS

SEQ ID NO: 12608 - protein, 17 aa, Artificial Sequence
  Synthetic polypeptide
PGAVAFACNPSTLGGRG

SEQ ID NO: 12609 - protein, 278 aa, Artificial Sequence
  Synthetic polypeptide
SQHFGRPRVDIAHLCLYNLSVIHKKKYFDSELELMTYINENWDRLHPGELADTPKSERYEHVLEALNDYKTMEVSNGIEKKGKKKSVGRPPGPYTRKMIQKTAEPLLDKESISENPTLDLPCSIGRTEGTAHSSNTSDVDFTGASSAKETTSSSISRHYGLSDSRKRTRTGRSWPAAIPHLRRRRGRLPRRALQTQNSEIVKDDEGKEDYQFDELNTEILNNLADQELQLNHLKNSITSYFGAAGRIACGEKYRVLARRVTLDGKVQYLVEWEGATAS

SEQ ID NO: 12610 - protein, 36 aa, Artificial Sequence
  Synthetic polypeptide
GQALRFTPIIPALSEAKVGGSRGQEIETILANMCRD

SEQ ID NO: 12611 - protein, 157 aa, Artificial Sequence
  Synthetic polypeptide
SQHFPRPRWVDHEVKKLRPSWPTCVETEVGDYMFCFDNTFSTISEKVIFFELILDNMGEQAQEQEDWKKYITGTDILDMKLEDILESINSIKSRLSKSGHIQTLLRAFEARDRNIQESNFDRVNFWSMVNLVVMVVVSAIQVYMLKSLFEDKRKSRT

SEQ ID NO: 12612 - protein, 7 aa, Artificial Sequence
  Synthetic polypeptide
DHPGQHV

SEQ ID NO: 12613 - protein, 34 aa, Artificial Sequence
  Synthetic polypeptide
GQALRFTPIIPALSEAKVGGSRGQEIETILANMC

SEQ ID NO: 12614 - protein, 25 aa, Artificial Sequence
  Synthetic polypeptide
SQHFPRPRWVDHEVKKLRPSWPTCV

SEQ ID NO: 12615 - protein, 121 aa, Artificial Sequence
  Synthetic polypeptide
SQHFPRPRWVDHEVKKLRPSWPTCVETEVGDYMFCFDNTFSTISEKVIFFELILDNMGEQAQEQEDWKKYITGTDILDMKLEDILDPIIKIASDVQIRLHLGIHQQHQVQTKQKWAHTNSA

SEQ ID NO: 12616 - protein, 90 aa, Artificial Sequence
  Synthetic polypeptide
SQHFPRPRWVDHEVKKLRPSWPTCVETEVGDYMFCFDNTFSTISEKVIFFELILDNMGEQAQEQEDWKKYITGTDILDMKLEDILVSMVF

SEQ ID NO: 12617 - protein, 33 aa, Artificial Sequence
  Synthetic polypeptide
RKFLMEKKYLRETWDLRNKGRTTKTVNICLKLN

SEQ ID NO: 12618 - protein, 3 aa, Artificial Sequence
  Synthetic polypeptide
IFA

SEQ ID NO: 12619 - protein, 811 aa, Artificial Sequence
  Synthetic polypeptide
RKNNKNSKYLLEAQLEKKDQQFKEQEKTMSMLQQDIICKQHHLESLDRLLTESKGEMKKENMKKDEALKALQNQVSEETIKVRQLDSALEICKEELVLHLNQLEGNKEKFEKQLKKKSEEVYCLQKELKIKNHSLQETSEQNVILQHTLQQQQQMLQQETIRNGELEDTQTKLEKQVSKLEQELQKQRESSAEKLRKMEEKCESAAHEADLKRQKVIELTGTARQVKIEMDQYKEELSKMEKEIMHLKRDGENKAMHLSQLDMILDQTKTELEKKTNAVKELEKLQHSTETELTEALQKREVLETELQNAHGELKSTLRQLQELRDVLQKAQLSLEEKYTTIKDLTAELRECKMEIEDKKQELLEMDQALKERNWELKQRAAQVTHLDMTIREHRGEMEQKIIKLEGTLEKSELELKECNKQIESLNDKLQNAKEQLREKEFIMLQNEQEISQLKKEIERTQQRMKEMESVMKEQEQYIATQYKEAIDLGQELRLTREQVQNSHTELAEARHQQVQAQREIERLSSELEDMKQLSKEKDAHGNHLAEELGASKVREAHLEARMQAEIKKLSAEVESLKEAYHMEMISHQENHAKWKISADSQKSSVQQLNEQLEKAKLELEEAQDTVSNLHQQVQDRNEVIEAANEALLTKESELTRLQAKISGHEKAEDIKFLPAPFTSPTEIMPDVQDPKFAKCFHTSFSKCTKLRRSISASDLTFKIHGDEDLSEELLQDLKKMQLEQPSTLEESHKNLTYTQPDSFKPLTYNLEADSSENNDFNTLSGMLRYINKEVRLLKKSSMQTGAGLNQGENV

SEQ ID NO: 12620 - protein, 655 aa, Artificial Sequence
  Synthetic polypeptide
RKNNKNSKYLLEAQLEKKDQQFKEQEKTMSMLQQDIICKQHHLESLDRLLTESKGEMKKENMKKDEALKALQNQVSEETIKVRQLDSALEICKEELVLHLNQLEGNKEKFEKQLKKKSEEVYCLQKELKIKNHSLQETSEQNVILQHTLQQQQQMLQQETIRNGELEDTQTKLEKQVSKLEQELQKQRESSAEKLRKMEEKCESAAHEADLKRQKVIELTGTARQVKIEMDQYKEELSKMEKEIMHLKRDGENKAMHLSQLDMILDQTKTELEKKTNAVKELEKLQHSTETELTEALQKREVLETELQNAHGELKSTLRQLQELRDVLQKAQLSLEEKYTTIKDLTAELRECKMEIEDKKQELLEMDQALKERNWELKQRAAQVTHLDMTIREHRGEMEQKIIKLEGTLEKSELELKECNKQIESLNDKLQNAKEQLREKEFIMLQNEQEISQLKKEIERTQQRMKEMESVMKEQEQYIATQYKEAIDLGQELRLTREQVQNSHTELAEARHQQVQAQREIERLSSELEDMKQLSKEKDAHGNHLAEELGASKVREAHLEARMQAEIKKLSAEVESLKEAYHMEMISHQENHAKWKISADSQKSSVQQLNEQLEKAKLELEEAQDTVSNLHQQVQDRNEVIEAANEALLTKGENV

SEQ ID NO: 12621 - protein, 404 aa, Artificial Sequence
  Synthetic polypeptide
RKNNKNSKYLLEAQLEKKDQQFKEQEKTMSMLQQDIICKQHHLESLDRLLTESKGEMKKENMKKDEALKALQNQVSEETIKVRQLDSALEICKEELVLHLNQLEGNKEKFEKQLKKKSEEVYCLQKELKIKNHSLQETSEQNVILQHTLQQQQQMLQQETIRNGELEDTQTKLEKQVSKLEQELQKQRESSAEKLRKMEEKCESAAHEADLKRQKVIELTGTARQVKIEMDQYKEELSKMEKEIMHLKRDGENKAMHLSQLDMILDQTKTELEKKTNAVKELEKLQHSTETELTEALQKREVLETELQNAHGELKSTLRQLQELRDVLQKAQLSLEEKYTTIKDLTAELRECKMEIEDKKQELLEMDQALKERNWELKQRAAQVTHLDMTIREHRGEMEQKIIK

SEQ ID NO: 12622 - protein, 401 aa, Artificial Sequence
  Synthetic polypeptide
RKNNKNSKYLLEAQLEKKDQQFKEQEKTMSMLQQDIICKQHHLESLDRLLTESKGEMKKENMKKDEALKALQNQVSEETIKVRQLDSALEICKEELVLHLNQLEGNKEKFEKQLKKKSEEVYCLQKELKIKNHSLQETSEQNVILQHTLQQQQQMLQQETIRNGELEDTQTKLEKQVSKLEQELQKQRESSAEKLRKMEEKCESAAHEADLKRQKVIELTGTARQVKIEMDQYKEELSKMEKEIMHLKRDGENKAMHLSQLDMILDQTKTELEKKTNAVKELEKLQHSTETELTEALQKREVLETELQNAHGELKSTLRQLQELRDVLQKAQLSLEEKYTTIKDLTAELRECKMEIEDKKQELLEMDQALKERNWELKQRAAQVTHLDMTIREHRGEMEQK

SEQ ID NO: 12623 - protein, 36 aa, Artificial Sequence
  Synthetic polypeptide
HGLTTGVHLESVKTDCIITLSLFMPDTTRNPRFPGK

SEQ ID NO: 12624 - protein, 26 aa, Artificial Sequence
  Synthetic polypeptide
RLTALSLYPCLCQIPQETLDFQASKD

SEQ ID NO: 12625 - protein, 590 aa, Artificial Sequence
  Synthetic polypeptide
ISRQVKIEMDQYKEELSKMEKEIMHLKRDGENKAMHLSQLDMILDQTKTELEKKTNAVKELEKLQHSTETELTEALQKREVLETELQNAHGELKSTLRQLQELRDVLQKAQLSLEEKYTTIKDLTAELRECKMEIEDKKQELLEMDQALKERNWELKQRAAQVTHLDMTIREHRGEMEQKIIKLEGTLEKSELELKECNKQIESLNDKLQNAKEQLREKEFIMLQNEQEISQLKKEIERTQQRMKEMESVMKEQEQYIATQYKEAIDLGQELRLTREQVQNSHTELAEARHQQVQAQREIERLSSELEDMKQLSKEKDAHGNHLAEELGASKVREAHLEARMQAEIKKLSAEVESLKEAYHMEMISHQENHAKWKISADSQKSSVQQLNEQLEKAKLELEEAQDTVSNLHQQVQDRNEVIEAANEALLTKESELTRLQAKISGHEKAEDIKFLPAPFTSPTEIMPDVQDPKFAKCFHTSFSKCTKLRRSISASDLTFKIHGDEDLSEELLQDLKKMQLEQPSTLEESHKNLTYTQPDSFKPLTYNLEADSSENNDFNTLSGMLRYINKEVRLLKKSSMQTGAGLNQGENV

SEQ ID NO: 12626 - protein, 434 aa, Artificial Sequence
  Synthetic polypeptide
ISRQVKIEMDQYKEELSKMEKEIMHLKRDGENKAMHLSQLDMILDQTKTELEKKTNAVKELEKLQHSTETELTEALQKREVLETELQNAHGELKSTLRQLQELRDVLQKAQLSLEEKYTTIKDLTAELRECKMEIEDKKQELLEMDQALKERNWELKQRAAQVTHLDMTIREHRGEMEQKIIKLEGTLEKSELELKECNKQIESLNDKLQNAKEQLREKEFIMLQNEQEISQLKKEIERTQQRMKEMESVMKEQEQYIATQYKEAIDLGQELRLTREQVQNSHTELAEARHQQVQAQREIERLSSELEDMKQLSKEKDAHGNHLAEELGASKVREAHLEARMQAEIKKLSAEVESLKEAYHMEMISHQENHAKWKISADSQKSSVQQLNEQLEKAKLELEEAQDTVSNLHQQVQDRNEVIEAANEALLTKGENV

SEQ ID NO: 12627 - protein, 123 aa, Artificial Sequence
  Synthetic polypeptide
ISRQVKIEMDQYKEELSKMEKEIMHLKRDGENKAMHLSQLDMILDQTKTELEKKTNAVKELEKLQHSTETELTEAKNGKYLRTTKCSWRIKKYFKTTPGIERCTTEGSIIIRGKIHYYKGSHS

SEQ ID NO: 12628 - protein, 183 aa, Artificial Sequence
  Synthetic polypeptide
ISRQVKIEMDQYKEELSKMEKEIMHLKRDGENKAMHLSQLDMILDQTKTELEKKTNAVKELEKLQHSTETELTEALQKREVLETELQNAHGELKSTLRQLQELRDVLQKAQLSLEEKYTTIKDLTAELRECKMEIEDKKQELLEMDQALKERNWELKQRAAQVTHLDMTIREHRGEMEQKIIK

SEQ ID NO: 12629 - protein, 180 aa, Artificial Sequence
  Synthetic polypeptide
ISRQVKIEMDQYKEELSKMEKEIMHLKRDGENKAMHLSQLDMILDQTKTELEKKTNAVKELEKLQHSTETELTEALQKREVLETELQNAHGELKSTLRQLQELRDVLQKAQLSLEEKYTTIKDLTAELRECKMEIEDKKQELLEMDQALKERNWELKQRAAQVTHLDMTIREHRGEMEQK

SEQ ID NO: 12630 - protein, 60 aa, Artificial Sequence
  Synthetic polypeptide
PWGSTSSGPNCGICEVLQGEAHHGQDPRETEEGAGGGAAPEQRGPAQPCLVPRPHPPTGV

SEQ ID NO: 12631 - protein, 724 aa, Artificial Sequence
  Synthetic polypeptide
LCDLGDPHLLDPTVEYVKFSKERHIMDRTPEKLKKELEEELLLSSEDLRSHAWYHGRIPRQVSENLVQRDGDFLVRDSLSSPGNFVLTCQWKNLAQHFKINRTVLRLSEAYSRVQYQFEMESFDSIPGLVRCYVGNRRPISQQSGAIIFQPINRTVPLRCLEEHYGTSPGQAREGSLTKGRPDVAKRLSLTMGGVQAREQNLPRGNLLRNKEKSGSQPACLDHMQDRRALSLKAHQSESYLPIGCKLPPQSSGVDTSPCPNSPVFRTGSEPALSPAVVRRVSSDARAGEALRGSDSQLCPKPPPKPCKVPFLKVPSSPSAWLNSEANYCELNPAFATGCGRGAKLPSCAQGSHTELLTAKQNEAPGPRNSGVNYLILDDDDRERPWEPAAAQMEKGQWDKGEFVTPLLETVSSFRPNEFESKFLPPENKPLETAMLKRAKELFTNNDPKVIAQHVLSMDCRVARILGVSEEMRRNMGVSSGLELITLPHGHQLRLDIIERHNTMAIGIAVDILGCTGTLEDRAATLSKIIQVAVELKDSMGDLYSFSALMKALEMPQITRLEKTWTALRHQYTQTAILYEKQLKPFSKLLHEGRESTCVPPNNVSVPLLMPLVTLMERQAVTFEGTDMWEKNDQSCEIMLNHLATARFMAEAADSYRMNAERILAGFQPDEEMNEICKTEFQMRLLWGSKGAQVNQTERYEKFNQILTALSRKLEPPPVKQAEL

SEQ ID NO: 12632 - protein, 19 aa, Artificial Sequence
  Synthetic polypeptide
LGSFVTLGIHIFWTQLWNM

SEQ ID NO: 12633 - protein, 61 aa, Artificial Sequence
  Synthetic polypeptide
YNVGLTKTLTSLSLSFLFYKMGMYLFLRLLCKLDEITKEALSTVFASNKTVHCRIKLFIIN

SEQ ID NO: 12634 - protein, 193 aa, Artificial Sequence
  Synthetic polypeptide
QKKHLAQCLPQTKLFIVESNSSSSTRSAVDMACSVLGVAQLDSVIIASPPIEDGVNLSLEHLQPYWEELENLVQSKKIVAIGTSDLDKTQLEQLYQWAQVKPNSNQVNLASCCVMPPDLTAFAKQFDIQLLTHNDPKELLSEASFQEALQESIPDIQAHEWVPLWLLRYSVIVKSRGIIKSKGYILQAKRRGS

SEQ ID NO: 12635 - protein, 11 aa, Artificial Sequence
  Synthetic polypeptide
HSVCLKQNCSL

SEQ ID NO: 12636 - protein, 65 aa, Artificial Sequence
  Synthetic polypeptide
PPSLHLCPVRDASCSRTSDSKFFSFETQIGSPCSSACRHPIVGPCDCETLIQNYRVLHLQYVFCC

SEQ ID NO: 12637 - protein, 75 aa, Artificial Sequence
  Synthetic polypeptide
SEWTPSNQLPANKSRQKNVKRRDWPSLPAYIFVPCGMLPALEHQTPSSSVLRLRLALLAPQLADILLWDPVIVRL

SEQ ID NO: 12638 - protein, 11 aa, Artificial Sequence
  Synthetic polypeptide
STFGQDPQGNS

SEQ ID NO: 12639 - protein, 619 aa, Artificial Sequence
  Synthetic polypeptide
NHNLHLDKIPKVTVNLFHMQHLQAASLADSLQSLCDSAKLYDPGQEYSEFVKATNSTEEEKVDGNVNKHLNSSQPSGFGPANSLEDVVRLPDSSNKIEEDRCSNSADITGPSFIRSWTFGMFSDSESTGGSSESRSLDSESISPGDFHRKLPRTPSSGTMSSADDLDEREPPSPSETGPNSLGTFKKTLMSKAALTHKFRKLRSPTKCRDCEGIVVFQGVECEECLLVCHRKCLENLVIICGHQKLPGKIHLFGAEFTQVAKKEPDGIPFILKICASEIENRALCLQGIYRVCGNKIKTEKLCQALENGMHLVDISEFSSHDICDVLKLYLRQLPEPFILFRLYKEFIDLAKEIQHVNEEQETKKNSLEDKKWPNMCIEINRILLKSKDLLRQLPASNFNSLHFLIVHLKRVVDHAEENKMNSKNLGVIFGPSLIRPRPTTAPITISSLAEYSNQARLVEFLITYSQKIFDGSLQPQDVMCSIGVVDQGCFPKPLLSPEERDIERSMKSLFFSSKEDIHTSESESKIFERATSFEESERKQNALGKCDACLSDKAQLLLDQEAESASQKIEDGKTPKPLSLKSDRSTNNVERHTPRTKIRPETLIQNYRVLHLQYVFCC

SEQ ID NO: 12640 - protein, 27 aa, Artificial Sequence
  Synthetic polypeptide
EPMRNAESWVSTQILRTIIYIWTRSPR

SEQ ID NO: 12641 - protein, 845 aa, Artificial Sequence
  Synthetic polypeptide
NHNLHLDKIPKVTVNLFHMQHLQAASLADSLQSLCDSAKLYDPGQEYSEFVKATNSTEEEKVDGNVNKHLNSSQPSGFGPANSLEDVVRLPDSSNKIEEDRCSNSADITGPSFIRSWTFGMFSDSESTGGSSESRSLDSESISPGDFHRKLPRTPSSGTMSSADDLDEREPPSPSETGPNSLGTFKKTLMSKAALTHKFRKLRSPTKCRDCEGIVVFQGVECEECLLVCHRKCLENLVIICGHQKLPGKIHLFGAEFTQVAKKEPDGIPFILKICASEIENRALCLQGIYRVCGNKIKTEKLCQALENGMHLVDISEFSSHDICDVLKLYLRQLPEPFILFRLYKEFIDLAKEIQHVNEEQETKKNSLEDKKWPNMCIEINRILLKSKDLLRQLPASNFNSLHFLIVHLKRVVDHAEENKMNSKNLGVIFGPSLIRPRPTTAPITISSLAEYSNQARLVEFLITYSQKIFDGSLQPQDVMCSIGVVDQGCFPKPLLSPEERDIERSMKSLFFSSKEDIHTSESESKIFERATSFEESERKQNALGKCDACLSDKAQLLLDQEAESASQKIEDGKTPKPLSLKSDRSTNNVERHTPRTKIRPVSLPVDRLLLASPPNERNGRNMGNVNLDKFCKNPAFEGVNRKDAATTVCSKFNGFDQQTLQKIQDKQYEQNSLTAKTTMIMPSALQEKGVTTSLQISGDHSINATQPSKPYAEPVRSVREASERRSSDSYPLAPVRAPRTLQPQHWTTFYKPHAPIISIRGNEEKPASPSAAVPPGTDHDPHGLVVKSMPDPDKASACPGQATGQPKEDSEELGLPDVNPMCQRPRLKRMQQFEDLEGEIPQFV

SEQ ID NO: 12642 - protein, 521 aa, Artificial Sequence
  Synthetic polypeptide
LGLLPGAISKKSGKPPLQNNEKEGKKERAVVDKVFFSRLIQILKIMVPRTFCKETGYLVLIAVMLVSRTYCDVWMIQNGTLIESGIIGRSRKDFKRYLLNFIAAMPLISLVNNFLKYGLNELKLCFRVRLTKYLYEEYLQAFTYYKMGNLDNRIANPDQLLTQDVEKFCNSVVDLYSNLSKPFLDIVLYIFKLTSAIGAQGPASMMAYLVVSGLFLTRLRRPIGKMTITEQKYEGEYRYVNSRLITNSFTARITELMQVLKDLNHGKYERTMVSQQEKGIEGVQVIPLIPGAGEIIIADNIIKFDHVPLATPNGDVLIRDLNFEVRSGANVLICGPNGCGKSSLFRVLGELWPLFGGRLTKPERGKLFYVPQRPYMTLGTLRDQVIYPDGREDQKRKGISDLVLKEYLDNVQLGHILEREGGWDSVQDWMDVLSGGEKQRMAMARLFYHKPQFAILDECTSAVSVDVEGYIYSHCRKVGITLFTVSHRKSLWKHHEYYLHMDGRGNYEFKQITEDTVEFGS

SEQ ID NO: 12643 - protein, 59 aa, Artificial Sequence
  Synthetic polypeptide
APVTFPSSYLFRSRSDNWDCYLELSVRKVENHHYRTMRKRGKRSELWWTRCFSQGSYRF

SEQ ID NO: 12644 - protein, 631 aa, Artificial Sequence
  Synthetic polypeptide
LGLLPGAISKKSGKPPLQNNEKEGKKERAVVDKVFFSRLIQILKIMVPRTFCKETGYLVLIAVMLVSRTYCDVWMIQNGTLIESGIIGRSRKDFKRYLLNFIAAMPLISLVNNFLKYGLNELKLCFRVRLTKYLYEEYLQAFTYYKMGNLDNRIANPDQLLTQDVEKFCNSVVDLYSNLSKPFLDIVLYIFKLTSAIGAQGPASMMAYLVVSGLFLTRLRRPIGKMTITEQKYEGEYRYVNSRLITNSEEIAFYNGNKREKQTVHSVFRKLVEHLHNFILFRFSMGFIDSIIAKYLATVVGYLVVSRPFLDLSHPRHLKSTHSELLEDYYQSGRMLLRMSQALGRIVLAGREMTRLAGFTARITELMQVLKDLNHGKYERTMVSQQEKGIEGVQVIPLIPGAGEIIIADNIIKFDHVPLATPNGDVLIRDLNFEVRSGANVLICGPNGCGKSSLFRVLGELWPLFGGRLTKPERGKLFYVPQRPYMTLGTLRDQVIYPDGREDQKRKGISDLVLKEYLDNVQLGHILEREGGWDSVQDWMDVLSGGEKQRMAMARLFYHKPQFAILDECTSAVSVDVEGYIYSHCRKVGITLFTVSHRKSLWKHHEYYLHMDGRGNYEFKQITEDTVEFGS

SEQ ID NO: 12645 - protein, 208 aa, Artificial Sequence
  Synthetic polypeptide
LGLLPGAISKKSGKPPLQNNEKEGKKERAVVDKVFFSRLIQILKIMVPRTFCKETGYLVLIAVMLVSRTYCDVWMIQNGTLIESGIIGRSRKDFKRYLLNFIAAMPLISLVNNFLKYGLNELKLCFRVRLTKYLYEEYLQAFTYYKMGNLDNRIANPDQLLTQDVEKFCNSVVDLYSNLSKPFLDIVLYIFKLTSAIGAQVLGKILWH

SEQ ID NO: 12646 - protein, 58 aa, Artificial Sequence
  Synthetic polypeptide
AIPIEHSHLLGDRSRSCHRWRNKNLRKAGQPVTMSNLMVPMIAVITIAVFHGNLEREK

SEQ ID NO: 12647 - protein, 650 aa, Artificial Sequence
  Synthetic polypeptide
LPLPYFMETWREKSDEVMGELTDHVTHCKKSGKPPLQNNEKEGKKERAVVDKVFFSRLIQILKIMVPRTFCKETGYLVLIAVMLVSRTYCDVWMIQNGTLIESGIIGRSRKDFKRYLLNFIAAMPLISLVNNFLKYGLNELKLCFRVRLTKYLYEEYLQAFTYYKMGNLDNRIANPDQLLTQDVEKFCNSVVDLYSNLSKPFLDIVLYIFKLTSAIGAQGPASMMAYLVVSGLFLTRLRRPIGKMTITEQKYEGEYRYVNSRLITNSEEIAFYNGNKREKQTVHSVFRKLVEHLHNFILFRFSMGFIDSIIAKYLATVVGYLVVSRPFLDLSHPRHLKSTHSELLEDYYQSGRMLLRMSQALGRIVLAGREMTRLAGFTARITELMQVLKDLNHGKYERTMVSQQEKGIEGVQVIPLIPGAGEIIIADNIIKFDHVPLATPNGDVLIRDLNFEVRSGANVLICGPNGCGKSSLFRVLGELWPLFGGRLTKPERGKLFYVPQRPYMTLGTLRDQVIYPDGREDQKRKGISDLVLKEYLDNVQLGHILEREGGWDSVQDWMDVLSGGEKQRMAMARLFYHKPQFAILDECTSAVSVDVEGYIYSHCRKVGITLFTVSHRKSLWKHHEYYLHMDGRGNYEFKQITEDTVEFGS

SEQ ID NO: 12648 - protein, 25 aa, Artificial Sequence
  Synthetic polypeptide
FDGTYDSSDYHCRISWKLGERKVMK

SEQ ID NO: 12649 - protein, 516 aa, Artificial Sequence
  Synthetic polypeptide
LPLPKKSGKPPLQNNEKEGKKERAVVDKVFFSRLIQILKIMVPRTFCKETGYLVLIAVMLVSRTYCDVWMIQNGTLIESGIIGRSRKDFKRYLLNFIAAMPLISLVNNFLKYGLNELKLCFRVRLTKYLYEEYLQAFTYYKMGNLDNRIANPDQLLTQDVEKFCNSVVDLYSNLSKPFLDIVLYIFKLTSAIGAQGPASMMAYLVVSGLFLTRLRRPIGKMTITEQKYEGEYRYVNSRLITNSFTARITELMQVLKDLNHGKYERTMVSQQEKGIEGVQVIPLIPGAGEIIIADNIIKFDHVPLATPNGDVLIRDLNFEVRSGANVLICGPNGCGKSSLFRVLGELWPLFGGRLTKPERGKLFYVPQRPYMTLGTLRDQVIYPDGREDQKRKGISDLVLKEYLDNVQLGHILEREGGWDSVQDWMDVLSGGEKQRMAMARLFYHKPQFAILDECTSAVSVDVEGYIYSHCRKVGITLFTVSHRKSLWKHHEYYLHMDGRGNYEFKQITEDTVEFGS

SEQ ID NO: 12650 - protein, 46 aa, Artificial Sequence
  Synthetic polypeptide
FDGTYDSSDYHCLRKVENHHYRTMRKRGKRSELWWTRCFSQGSYRF

SEQ ID NO: 12651 - protein, 626 aa, Artificial Sequence
  Synthetic polypeptide
LPLPKKSGKPPLQNNEKEGKKERAVVDKVFFSRLIQILKIMVPRTFCKETGYLVLIAVMLVSRTYCDVWMIQNGTLIESGIIGRSRKDFKRYLLNFIAAMPLISLVNNFLKYGLNELKLCFRVRLTKYLYEEYLQAFTYYKMGNLDNRIANPDQLLTQDVEKFCNSVVDLYSNLSKPFLDIVLYIFKLTSAIGAQGPASMMAYLVVSGLFLTRLRRPIGKMTITEQKYEGEYRYVNSRLITNSEEIAFYNGNKREKQTVHSVFRKLVEHLHNFILFRFSMGFIDSIIAKYLATVVGYLVVSRPFLDLSHPRHLKSTHSELLEDYYQSGRMLLRMSQALGRIVLAGREMTRLAGFTARITELMQVLKDLNHGKYERTMVSQQEKGIEGVQVIPLIPGAGEIIIADNIIKFDHVPLATPNGDVLIRDLNFEVRSGANVLICGPNGCGKSSLFRVLGELWPLFGGRLTKPERGKLFYVPQRPYMTLGTLRDQVIYPDGREDQKRKGISDLVLKEYLDNVQLGHILEREGGWDSVQDWMDVLSGGEKQRMAMARLFYHKPQFAILDECTSAVSVDVEGYIYSHCRKVGITLFTVSHRKSLWKHHEYYLHMDGRGNYEFKQITEDTVEFGS

SEQ ID NO: 12652 - protein, 203 aa, Artificial Sequence
  Synthetic polypeptide
LPLPKKSGKPPLQNNEKEGKKERAVVDKVFFSRLIQILKIMVPRTFCKETGYLVLIAVMLVSRTYCDVWMIQNGTLIESGIIGRSRKDFKRYLLNFIAAMPLISLVNNFLKYGLNELKLCFRVRLTKYLYEEYLQAFTYYKMGNLDNRIANPDQLLTQDVEKFCNSVVDLYSNLSKPFLDIVLYIFKLTSAIGAQVLGKILWH

SEQ ID NO: 12653 - protein, 69 aa, Artificial Sequence
  Synthetic polypeptide
SLHFGRPRQANHLRSGVWDQPGQHEIFYIIGAVVFVVIILVIILAISLHKCRKAGVGQSWKENSPLNVS

SEQ ID NO: 12654 - protein, 52 aa, Artificial Sequence
  Synthetic polypeptide
GQEFGTSLANMKYSTSLELWYLWSSSLSSSWLYLYTSVERQEWGRAGRRTPH

SEQ ID NO: 12655 - protein, 66 aa, Artificial Sequence
  Synthetic polypeptide
SLHFGRPRQANHLRSGVWDQPGQHEIFYIIGAVVFVVIILVIILAISLHKCRKAGVGQSWKENSPL

SEQ ID NO: 12656 - protein, 112 aa, Artificial Sequence
  Synthetic polypeptide
EMTAPCVLVALKTFQWDKMWRWKTVILMILMLCRPRVLCNGPGTCVPICVSALLLGILGIKKVIIVYVESICRVETLSMSGKILFHLSDYFIVQWPALKEKYPKSVYLGRIV

SEQ ID NO: 12657 - protein, 27 aa, Artificial Sequence
  Synthetic polypeptide
CCVGLGCCVTDQEHVFLSVYLPFSLGY

SEQ ID NO: 12658 - protein, 40 aa, Artificial Sequence
  Synthetic polypeptide
TPSKNIPNTTFTEFQEAGRFSSPGPPPFSPPCTPCGSPFP

SEQ ID NO: 12659 - protein, 73 aa, Artificial Sequence
  Synthetic polypeptide
EDGGCSELRSCHCTPAWMTRAKLRLKIYQILHSPNSKKPGGSAVLALHRFHHLALHVALLSPNSQGEARFGVV

SEQ ID NO: 12660 - protein, 121 aa, Artificial Sequence
  Synthetic polypeptide
KYTKYYIHRIPRSREVQQSWPSTVFTTLHSMWLSFPLIHRVKPDLVLCNGPGTCVPICVSALLLGILGIKKVIIVYVESICRVETLSMSGKILFHLSDYFIVQWPALKEKYPKSVYLGRIV

SEQ ID NO: 12661 - protein, 310 aa, Artificial Sequence
  Synthetic polypeptide
NCPPKINRCGGTVGAIFTCPLEVIKTRLQSSRLALRTVYYPQVHLGTISGAGMVRPTSVTPGLFQVLKSILEKEGPKSLFRGLGPNLVGVAPSRAVYFACYSKAKEQFNGIFVPNSNIVHIFSAGSAAFITNSLMNPIWMVKTRMQLEQKVRGSKQMNTLQCARYVYQTEGIRGFYRGLTASYAGISETIICFAIYESLKKYLKEAPLASSANGTEKNSTSFFGLMAAAALSKGCASCIAYPHEVIRTRLREEGTKYKSFVQTARLVFREEGYLAFYRGLFAQLIRQIPNTAIVLSTYELIVYLLEDRTQ

SEQ ID NO: 12662 - protein, 23 aa, Artificial Sequence
  Synthetic polypeptide
QSETVPQKSIGVEAQLVLFSLVH

SEQ ID NO: 12663 - protein, 534 aa, Artificial Sequence
  Synthetic polypeptide
GRWRGIVTEVAVGVKRGSDELLSGSVLSSPNSNMSSMVVTANGNDSKKFKGEDKMDGAPSRVLHIRKLPGEVTETEVIALGLPFGKVTNILMLKGKNQAFLELATEEAAITMVNYYSAVTPHLRNQPIYIQYSNHKELKTDNTLNQRAQAVLQAVTAVQTANTPLSGTTVSESAVTPAQSPVLRIIIDNMYYPVTLDVLHQIFSKFGAVLKIITFTKNNQFQALLQYGDPVNAQQAKLALDGQNIYNACCTLRIDFSKLVNLNVKYNNDKSRDYTRPDLPSGDGQPALDPAIAAAFAKETSLLAVPGALSPLAIPNAAAAAAAAAAGRVGMPGVSAGGNTVLLVSNLNEEMVTPQSLFTLFGVYGDVQRVKILYNKKDSALIQMADGNQSQLAMNHLNGQKMYGKIIRVTLSKHQTVQLPREGLDDQGLTKDFGNSPLHRFKKPGSKNFQNIFPPSATLHLSNIPPSVAEEDLRTLFANTGGTVKAFKFFQRDHKMALLQMATVEEAIQALIDLHNYNLGENHHLRVSFSKSTI

SEQ ID NO: 12664 - protein, 22 aa, Artificial Sequence
  Synthetic polypeptide
RAWRLGRHRGDGGESSLRLQLA

SEQ ID NO: 12665 - protein, 16 aa, Artificial Sequence
  Synthetic polypeptide
GLGGWGGIGAMAGNRH

SEQ ID NO: 12666 - protein, 539 aa, Artificial Sequence
  Synthetic polypeptide
GRWRGIVTEVAVGVKRGSDELLSGSVLSSPNSNMSSMVVTANGNDSKKFKGEDKMDGAPSRVLHIRKLPGEVTETEVIALGLPFGKVTNILMLKGKNQAFLELATEEAAITMVNYYSAVTPHLRNQPIYIQYSNHKELKTDNTLNQRAQAVLQAVTAVQTANTPLSGTTVSESAVTPAQSPVLRIIIDNMYYPVTLDVLHQIFSKFGAVLKIITFTKNNQFQALLQYGDPVNAQQAKLALDGQNIYNACCTLRIDFSKLVNLNVKYNNDKSRDYTRPDLPSGDGQPALDPAIAAAFAKETSLLGLPVAAVPGALSPLAIPNAAAAAAAAAAGRVGMPGVSAGGNTVLLVSNLNEEMVTPQSLFTLFGVYGDVQRVKILYNKKDSALIQMADGNQSQLAMNHLNGQKMYGKIIRVTLSKHQTVQLPREGLDDQGLTKDFGNSPLHRFKKPGSKNFQNIFPPSATLHLSNIPPSVAEEDLRTLFANTGGTVKAFKFFQRDHKMALLQMATVEEAIQALIDLHNYNLGENHHLRVSFSKSTI

SEQ ID NO: 12667 - protein, 538 aa, Artificial Sequence
  Synthetic polypeptide
GRWRGIVTEVAVGVKRGSDELLSGSVLSSPNSNMSSMVVTANGNDSKKFKGEDKMDGAPSRVLHIRKLPGEVTETEVIALGLPFGKVTNILMLKGKNQAFLELATEEAAITMVNYYSAVTPHLRNQPIYIQYSNHKELKTDNTLNQRAQAVLQAVTAVQTANTPLSGTTVSESAVTPAQSPVLRIIIDNMYYPVTLDVLHQIFSKFGAVLKIITFTKNNQFQALLQYGDPVNAQQAKLALDGQNIYNACCTLRIDFSKLVNLNVKYNNDKSRDYTRPDLPSGDGQPALDPAIAAAFAKETSLLGLPVAAVPGALSPLAIPNAAAAAAAAAAGRVGMPGVSAGGNTVLLVSNLNEEMVTPQSLFTLFGVYGDVQRVKILYNKKDSALIQMADGNQSQLAMNHLNGQKMYGKIIRVTLSKHQTVQLPREGLDDQGLTKDFGNSPLHRFKKPGSKNFQNIFPPSATLHLSNIPPSVAEEDLRTLFANTGGTVKAFKFFQDHKMALLQMATVEEAIQALIDLHNYNLGENHHLRVSFSKSTI

SEQ ID NO: 12668 - protein, 533 aa, Artificial Sequence
  Synthetic polypeptide
GRWRGIVTEVAVGVKRGSDELLSGSVLSSPNSNMSSMVVTANGNDSKKFKGEDKMDGAPSRVLHIRKLPGEVTETEVIALGLPFGKVTNILMLKGKNQAFLELATEEAAITMVNYYSAVTPHLRNQPIYIQYSNHKELKTDNTLNQRAQAVLQAVTAVQTANTPLSGTTVSESAVTPAQSPVLRIIIDNMYYPVTLDVLHQIFSKFGAVLKIITFTKNNQFQALLQYGDPVNAQQAKLALDGQNIYNACCTLRIDFSKLVNLNVKYNNDKSRDYTRPDLPSGDGQPALDPAIAAAFAKETSLLAVPGALSPLAIPNAAAAAAAAAAGRVGMPGVSAGGNTVLLVSNLNEEMVTPQSLFTLFGVYGDVQRVKILYNKKDSALIQMADGNQSQLAMNHLNGQKMYGKIIRVTLSKHQTVQLPREGLDDQGLTKDFGNSPLHRFKKPGSKNFQNIFPPSATLHLSNIPPSVAEEDLRTLFANTGGTVKAFKFFQDHKMALLQMATVEEAIQALIDLHNYNLGENHHLRVSFSKSTI

SEQ ID NO: 12669 - protein, 232 aa, Artificial Sequence
  Synthetic polypeptide
TREVEVTVSRDRAAALQPGDRVCSAIQNQDFTVIEDYCTGLKALLYLKSIEELQDWDGQSPATVSHQKGKPVPRIAELMDKKLPSFGPYLEQRKKIIAENKIRLKEQNVAFSPLKRNCFIPKRPIPTIKDVIGKALQYLGTFGELSNVEQVVAMIDEEMCINCGKCYMTCNDSGYQAIQFDPETHLPTITDTCTGCTLCLSVCPIVDCIKMVSRTTPYEPKRGVPLSVNPVC

SEQ ID NO: 12670 - protein, 24 aa, Artificial Sequence
  Synthetic polypeptide
AEIALLHSSLVTGYAVPFRIRISL

SEQ ID NO: 12671 - protein, 30 aa, Artificial Sequence
  Synthetic polypeptide
QGMQCHSESGFHCDRRLLHWPQSPALSEKH

SEQ ID NO: 12672 - protein, 34 aa, Artificial Sequence
  Synthetic polypeptide
GQAWWLMPVIPALWEAKVVGLQGLPHCLGQPHAV

SEQ ID NO: 12673 - protein, 702 aa, Artificial Sequence
  Synthetic polypeptide
SQHFGRPRWSAYKDCPIAWANLMLFDYKDQLKTGERCLYMWPSVPDEKGELLNPTGTVRSNPNTDSAAALLICLPEVAPHPVYYPALEKLPGGMLLASREWRPELLWMRLHAEDSAPSRMIGVAMPGLGVLPGLVQAPGDAECSRLLQILELGRHSECVHVTEEEQLQLREILERRGSGELYEHEKDLVWKLRHEVQEHFPEALARLLLVTKWNKHEDVAQMLYLLCSWPELPVLSALELLDFSFPDCHVGSFAIKSLRKLTDDELFQYLLQLVQVLKYESYLDCELTKFLLDRALANRKIGHFLFWHLRSEMHVPSVALRFGLILEAYCRGSTHHMKVLMKQGEALSKLKALNDFVKLSSQKTPKPQTKELMHLCMRQEAYLEALSHLQSPLDPSTLLAEVCVEQCTFMDSKMKPLWIMYSNEEAGSGGSVGIIFKNGDDLRQDMLTLQMIQLMDVLWKQEGLDLRMTPYGCLPTGDRTGLIEVVLRSDTIANIQLNKSNMAATAAFNKDALLNWLKSKNPGEALDRAIEEFTLSCAGYCVATYVLGIGDRHSDNIMIRESGQLFHIDFGHFLGNFKTKFGINRERVPFILTYDFVHVIQQGKTNNSEKFERFRGYCERAYTILRRHGLLFLHLFALMRAAGLPELSCSKDIQYLKDSLALGKTEEEALKHFRVKFNEALRESWKTKVNWLAHNVSKDNRQ

SEQ ID NO: 12674 - protein, 60 aa, Artificial Sequence
  Synthetic polypeptide
PGVVAHACNPSTLGGQGGRLTRTAPLPGPTSCCLTTRTSLRPGNAASTCGPPSQMRRASC

SEQ ID NO: 12675 - protein, 643 aa, Artificial Sequence
  Synthetic polypeptide
SQHFGRPRWSAYKDCPIAWANLMLFDYKDQLKTGERCLYMWPSVPDEKGELLNPTGTVRSNPNTDSAAALLICLPEVAPHPVYYPALEKILELGRHSECVHVTEEEQLQLREILERRGSGELYEHEKDLVWKLRHEVQEHFPEALARLLLVTKWNKHEDVAQMLYLLCSWPELPVLSALELLDFSFPDCHVGSFAIKSLRKLTDDELFQYLLQLVQVLKYESYLDCELTKFLLDRALANRKIGHFLFWHLRSEMHVPSVALRFGLILEAYCRGSTHHMKVLMKQGEALSKLKALNDFVKLSSQKTPKPQTKELMHLCMRQEAYLEALSHLQSPLDPSTLLAEVCVEQCTFMDSKMKPLWIMYSNEEAGSGGSVGIIFKNGDDLRQDMLTLQMIQLMDVLWKQEGLDLRMTPYGCLPTGDRTGLIEVVLRSDTIANIQLNKSNMAATAAFNKDALLNWLKSKNPGEALDRAIEEFTLSCAGYCVATYVLGIGDRHSDNIMIRESGQLFHIDFGHFLGNFKTKFGINRERVPFILTYDFVHVIQQGKTNNSEKFERFRGYCERAYTILRRHGLLFLHLFALMRAAGLPELSCSKDIQYLKDSLALGKTEEEALKHFRVKFNEALRESWKTKVNWLAHNVSKDNRQ

SEQ ID NO: 12676 - protein, 251 aa, Artificial Sequence
  Synthetic polypeptide
SQHFGRPRWSAYKDCPIAWANLMLFDYKDQLKTGERCLYMWPSVPDEKGELLNPTGTVRSNPNTDSAAALLICLPEVAPHPVYYPALEKILELGRHSECVHVTEEEQLQLREILERRGSGELYEHEKDLVWKLRHEVQEHFPEALARLLLVTKWNKHEDVAQMLYLLCSWPELPVLSALELLDFSFPDCHVGSFAIKSLRKLTDDELFQYLLQLVQVLKYESYLDCELTKFLLDRALANRKIGHFLFWHLR

SEQ ID NO: 12677 - protein, 22 aa, Artificial Sequence
  Synthetic polypeptide
EMPSLQNINSQSNCSYSGERRE

SEQ ID NO: 12678 - protein, 837 aa, Artificial Sequence
  Synthetic polypeptide
TARATVHIQVNDVNEYAPVFKEKSYKATVIEGKQYDSILRVEAVDADCSPQFSQICSYEIITPDVPFTVDKDGYIKNTEKLNYGKEHQYKLTVTAYDCGKKRATEDVLVKISIKPTCTPGWQGWNNRIEYEPGTGALAVFPNIHLETCDEPVASVQATVELETSHIGKGCDRDTYSEKSLHRLCGAAAGTAELLPSPSGSLNWTMGLPTDNGHDSDQVFEFNGTQAVRIPDGVVSVSPKEPFTISVWMRHGPFGRKKETILCSSDKTDMNRHHYSLYVHGCRLIFLFRQDPSEEKKYRPAEFHWKLNQVCDEEWHHYVLNVEFPSVTLYVDGTSHEPFSVTEDYPLHPSKIETQLVVGACWQEFSGVENDNETEPVTVASAGGDLHMTQFFRGNLAGLTLRSGKLADKKVIDCLYTCKEGLDLQVLEDSGRGVQIQAHPSQLVLTLEGEDLGELDKAMQHISYLNSRQFPTPGIRRLKITSTIKCFNEATCISVPPVDGYVMVLQPEEPKISLSGVHHFARAASEFESSEGVFLFPELRIISTITREVEPEGDGAEDPTVQESLVSEEIVHDLDTCEVTVEGEELNHEQESLEVDMARLQQKGIEVSSSELGMTFTGVDTMASYEEVLHLLRYRNWHARSLLDRKFKLICSELNGRYISNEFKVEVNVIHTANPMEHANHMAAQPQFVHPEHRSFVDLSGHNLANPHPFAVVPSTATVVIVVCVSFLVFMIILGVFRIRAAHRRTMRDQDTGKENEMDWDDSALTITVNPMETYEDQHSSEEEEEEEEEEESEDGEEEDDITSAESESSEEEEGEQGDPQNATRQQQLEWDDSTLSY

SEQ ID NO: 12679 - protein, 27 aa, Artificial Sequence
  Synthetic polypeptide
EFESSLDNVGDAISTKHKQPEQLFIFR

SEQ ID NO: 12680 - protein, 818 aa, Artificial Sequence
  Synthetic polypeptide
TARATVHIQVNDVNEYAPVFKEKSYKATVIEGKQYDSILRVEAVDADCSPQFSQICSYEIITPDVPFTVDKDGYIKNTEKLNYGKEHQYKLTVTAYDCGKKRATEDVLVKISIKPTCTPGWQGWNNRIEYEPGTGALAVFPNIHLETCDEPVASVQATVELETSHIGKGCDRDTYSEKSLHRLCGAAAGTAELLPSPSGSLNWTMGLPTDNGHDSDQVFEFNGTQAVRIPDGVVSVSPKEPFTISVWMRHGPFGRKKETILCSSDKTDMNRHHYSLYVHGCRLIFLFRQDPSEEKKYRPAEFHWKLNQVCDEEWHHYVLNVEFPSVTLYVDGTSHEPFSVTEDYPLHPSKIETQLVVGACWQGGDLHMTQFFRGNLAGLTLRSGKLADKKVIDCLYTCKEGLDLQVLEDSGRGVQIQAHPSQLVLTLEGEDLGELDKAMQHISYLNSRQFPTPGIRRLKITSTIKCFNEATCISVPPVDGYVMVLQPEEPKISLSGVHHFARAASEFESSEGVFLFPELRIISTITREVEPEGDGAEDPTVQESLVSEEIVHDLDTCEVTVEGEELNHEQESLEVDMARLQQKGIEVSSSELGMTFTGVDTMASYEEVLHLLRYRNWHARSLLDRKFKLICSELNGRYISNEFKVEVNVIHTANPMEHANHMAAQPQFVHPEHRSFVDLSGHNLANPHPFAVVPSTATVVIVVCVSFLVFMIILGVFRIRAAHRRTMRDQDTGKENEMDWDDSALTITVNPMETYEDQHSSEEEEEEEEEEESEDGEEEDDITSAESESSEEEEGEQGDPQNATRQQQLEWDDSTLSY

SEQ ID NO: 12681 - protein, 28 aa, Artificial Sequence
  Synthetic polypeptide
TRCLIDGHELLQPYDANIPFINDKPNQV

SEQ ID NO: 12682 - protein, 359 aa, Artificial Sequence
  Synthetic polypeptide
ALMYNGGETRHFCCVLPEFLHKPDASLMDMNSFSPMMPTSPLSMINQIKFEDEPDLKDLFITVDEPESHVTTIETFITYRIITKTSRGEFDSSEFEVRRRYQDFLWLKGKLEEAHPTLIIPELSSHKKQGPGLLSRMGQTVRAVASSMRGVKNRPEEFMEMNNFIELFSQKINLIDKISQRIYKEEREYFDEMKEYGPIHILWSASEEDLVDTLKDVASCIDRCCKATEKRMSGLSEALLPVVHEYVLYSEMLMGVMKRRDQIQAELDSKVEVLTYKKADTDLLPEEIGKLEDKVECANNALKADWERWKQNMQNDIKLAFTDMAEENIHYYEQCLATWESFLTSQTNLHLEEASEDKP

SEQ ID NO: 12683 - protein, 48 aa, Artificial Sequence
  Synthetic polypeptide
RCLYDFSLQHSCALSHQVFSVEPSCIMEERQDISAVCFLNSCINQMPH

SEQ ID NO: 12684 - protein, 414 aa, Artificial Sequence
  Synthetic polypeptide
ALMYNGGETRHFCCVLPEFLHKPDASLMDMNSFSPMMPTSPLSMINQIKFEDEPDLKDLFITVDEPESHVTTIETFITYRIITKTSRGEFDSSEFEVRRRYQDFLWLKGKLEEAHPTLIIPPLPEKFIVKGMVERFNDDFIETRRKALHKFLNRIADHPTLTFNEDFKIFLTAQAWELSSHKKQGPGLLSRMGQTVRAVASSMRGVKNRPEEFMEMNNFIELFSQKINLIDKISQRIYKEEREYFDEMKEYGPIHILWSASEEDLVDTLKDVASCIDRCCKATEKRMSGLSEALLPVVHEYVLYSEMLMGVMKRRDQIQAELDSKVEVLTYKKADTDLLPEEIGKLEDKVECANNALKADWERWKQNMQNDIKLAFTDMAEENIHYYEQCLATWESFLTSQTNLHLEEASEDKP

SEQ ID NO: 12685 - protein, 19 aa, Artificial Sequence
  Synthetic polypeptide
CSGILSKNSLLTRSKVLAC

SEQ ID NO: 12686 - protein, 31 aa, Artificial Sequence
  Synthetic polypeptide
ARTLFSQEARSWLAKQDGANRQSCCVLNERS

SEQ ID NO: 12687 - protein, 193 aa, Artificial Sequence
  Synthetic polypeptide
LWDLEQELSSHKKQGPGLLSRMGQTVRAVASSMRGVKNRPEEFMEMNNFIELFSQKINLIDKISQRIYKEEREYFDEMKEYGPIHILWSASEEDLVDTLKDVASCIDRCCKATEKRMSGLSEALLPVVHEYVLYSEMLMGVMKRRDQIQAELDSKVEVLTYKKADTDLCLATWESFLTSQTNLHLEEASEDKP

SEQ ID NO: 12688 - protein, 244 aa, Artificial Sequence
  Synthetic polypeptide
LWDLEQELSSHKKQGPGLLSRMGQTVRAVASSMRGVKNRPEEFMEMNNFIELFSQKINLIDKISQRIYKEEREYFDEMKEYGPIHILWSASEEDLVDTLKDVASCIDRCCKATEKRMSGLSEALLPVVHEYVLYSEMLMGVMKRRDQIQAELDSKVEVLTYKKADTDLLPEEIGKLEDKVECANNALKADWERWKQNMQNDIKLAFTDMAEENIHYYEQCLATWESFLTSQTNLHLEEASEDKP

SEQ ID NO: 12689 - protein, 4 aa, Artificial Sequence
  Synthetic polypeptide
PTCV

SEQ ID NO: 12690 - protein, 123 aa, Artificial Sequence
  Synthetic polypeptide
FQHFGRPRQADHPRSGVQDQPDQHVFDCIEVYAPGFKDSVVGRDILTPPDLERIFGLPGGNIFHCAMSLDQLYFARPVPLHSGYRCPLQGLYLCGSGAHPGGGVMGAAGRNAAHVAFRDLKSM

SEQ ID NO: 12691 - protein, 112 aa, Artificial Sequence
  Synthetic polypeptide
PGVGAHACNSSTSGGRGRRITRGQEFKTSLTNMCLIASRSMPLASRTLWLAETSSHHQIWRESSGFLEGTYSTAPCPWTSSTSPAPCPCILATAALSRACISVEVGLILEEV

SEQ ID NO: 12692 - protein, 8 aa, Artificial Sequence
  Synthetic polypeptide
ILLGNFPR

SEQ ID NO: 12693 - protein, 392 aa, Artificial Sequence
  Synthetic polypeptide
EIFPGSTIWLEGGTPPMDALQIAEDTLQTLVPHCPVPSGPRRIFLDANVKESYCPLVPHTMYCLPLWQGINLVLLTRSPSAPLALVLSQLMDGFSMLEKKLKEGPEPGASLRSQPLVGDLRQRMDKFVKNRGAQEIQSTWLEFKAKAFSKSEPGSSWELLQACGKLKRQLCAIYRLNFLTTAPSRGGPHLPQHLQDQVQRLMREKLTDWKDFLLVKSRRNITMVSYLEDFPGLVHFIYVDRTTGQMVAPSLNCSQKTSSELGKGPLAAFVKTKVWSLIQLARRYLQKGYTTLLFQEGDFYCSYFLWFENDMGYKLQMIEVPVLSDDSVPIGMLGGDYYRKLLRYYSKNRPTEAVRCYELLALHLSVIPTDLLVQQAGQLARRLWEASRIPLL

SEQ ID NO: 12694 - protein, 52 aa, Artificial Sequence
  Synthetic polypeptide
QPWHIGITRQLQPAQLSYSLWAWDPGVNTSRKFSQVAPSGWRGAPPPWMPFR

SEQ ID NO: 12695 - protein, 223 aa, Artificial Sequence
  Synthetic polypeptide
EIFPGSTIWLEGGTPPMDALQIAEDTLQTLVPHCPVPSGPRRIFLDANVKESYCPLVPHTMYCLPLWQGINLVLLTRSPSAPLALVLSQLMDGFSMLEKKLKEGPEPGASLRSQPLVGDLRQRMDKFVKNRGAQEIQSTWLEFKAKAFSKSEPGSSWELLQACGKLKRQLCAIYRLNFLTTAPSRGGPHLPQHLQDQVQRLMREKLTDWKDFLLVKSRRNITM

SEQ ID NO: 12696 - protein, 9 aa, Artificial Sequence
  Synthetic polypeptide
ASHGAPNSG

SEQ ID NO: 12697 - protein, 233 aa, Artificial Sequence
  Synthetic polypeptide
PPTVPQTVVNTYTPGKKIWLEGVVTTSAGGTNNLSDSYAAGFLWLNTLGMLANQGIDVVIRHSFFDHGYNHLVDQNFNPLPDYWLSLLYKRLIGPKVLAVHVAGLQRKPRPGRVIRDKLRIYAHCTNHHNHNYVRGSITLFIINLHRSRKKIKLAGTLRDKLVHQYLLQPYGQEGLKSKSVQLNGQPLVMVDDGTLPELKPRPLRAGRTLVIPPVTMGFYVVKNVNALACRYR

SEQ ID NO: 12698 - protein, 23 aa, Artificial Sequence
  Synthetic polypeptide
LPRCPKQWLIHTLQERRFGLKVW

SEQ ID NO: 12699 - protein, 189 aa, Artificial Sequence
  Synthetic polypeptide
PPTVPQTVVNTYTPGKKIWLEGVVTTSAGGTNNLSDSYAAGFLWLNTLGMLANQGIDVVIRHSFFDHGYNHLVDQNFNPLPDYWLSLLYKRLIGPKVLAVHVAGLQRKPRPGRVIRDKLRIYAHCTNHHNHNYVRGSITLFIINLHRSRKKIKLAGTLRDKLVHQYLLQPYGQEGLKSKTQRCQYCGII

SEQ ID NO: 12700 - protein, 21 aa, Artificial Sequence
  Synthetic polypeptide
PQLCWNKSIVAFQDPDAESTA

SEQ ID NO: 12701 - protein, 270 aa, Artificial Sequence
  Synthetic polypeptide
PSKTRMQSLQPDPAARYRNVLEALWRIIRTEGLWRPMRGLNVTATGAGPAHALYFACYEKLKKTLSDVIHPGGNSHIANGAAGCVATLLHDAAMNPAEVVKQRMQMYNSPYHRVTDCVRAVWQNEGAGAFYRSYTTQLTMNVPFQAIHFMTYEFLQEHFNPQRRYNPSSHVLSGACAGAVAAAATTPLDVCKTLLNTQESLALNSHITGHITGMASAFRTVYQVGGVTAYFRGVQARVIYQIPSTAIAWSVYEFFKYLITKRQEEWRAGK

SEQ ID NO: 12702 - protein, 31 aa, Artificial Sequence
  Synthetic polypeptide
VNCSLPRPGCRVYSLTQLPAIAMCWRPSGGL

SEQ ID NO: 12703 - protein, 11 aa, Artificial Sequence
  Synthetic polypeptide
TLTDPDAESTA

SEQ ID NO: 12704 - protein, 268 aa, Artificial Sequence
  Synthetic polypeptide
QTRMQSLQPDPAARYRNVLEALWRIIRTEGLWRPMRGLNVTATGAGPAHALYFACYEKLKKTLSDVIHPGGNSHIANGAAGCVATLLHDAAMNPAEVVKQRMQMYNSPYHRVTDCVRAVWQNEGAGAFYRSYTTQLTMNVPFQAIHFMTYEFLQEHFNPQRRYNPSSHVLSGACAGAVAAAATTPLDVCKTLLNTQESLALNSHITGHITGMASAFRTVYQVGGVTAYFRGVQARVIYQIPSTAIAWSVYEFFKYLITKRQEEWRAGK

SEQ ID NO: 12705 - protein, 27 aa, Artificial Sequence
  Synthetic polypeptide
LNRPGCRVYSLTQLPAIAMCWRPSGGL

SEQ ID NO: 12706 - protein, 90 aa, Artificial Sequence
  Synthetic polypeptide
GWVQWLTSLIPTLWEAKHKLTPEYLELKKYQAIASNSKIYFGSNIPNMFVDSSCALKYSDIRTGRESSLPSKEALEPSGENVIQNKESTG

SEQ ID NO: 12707 - protein, 10 aa, Artificial Sequence
  Synthetic polypeptide
FRHFGRPSTS

SEQ ID NO: 12708 - protein, 34 aa, Artificial Sequence
  Synthetic polypeptide
MGAVAHIFDSDTLGGQAQVDPGISGAQKVPGHCF

SEQ ID NO: 12709 - protein, 451 aa, Artificial Sequence
  Synthetic polypeptide
SPFLIPVFHLSLETNQKPWLQAAKNLKQNKTEQNNNNNKITQPPVQQLRDRLFHAQGSAVLGQQSPPFPFPRIVVGATLHSKETSSYRLGSQPSHQVPTPSPRPRVFTPQSSPAMPLAPSHPSPYQGPRTQNISDYRAPGPQAIQPLPLSPGVRPASSQPQLLGGQRVQVPNPVGFPGTWPLPGSPLPMACPGIMRPGSTSLPETPRLFPLLPLRPLGPGRMVSHTPAPPASFPVPYLPGDPGAPCSSVLPTTGILTPHPGPQDSWKEAPAPRGNLQRNKLPETFMPPAPITAPVMSLTPELQGILPSQPPVSSVSHAPPGVPGELSLQLQHLPPEKMERKELPPEHQSLKSSFEALLQRCSLSATDLKTKRKLEEAAQRLEYLYEKLCEGTLSPHVVAGLHEVARCVDAGSFEQGLAVHAQVAGCSSFSEVSSFMPILKAVLIIAHKLLV

SEQ ID NO: 12710 - protein, 7 aa, Artificial Sequence
  Synthetic polypeptide
HSHQFSS

SEQ ID NO: 12711 - protein, 57 aa, Artificial Sequence
  Synthetic polypeptide
KPKTKQNRTEQQQQQNNTATSSAAKRSAFSCSRFCCLGPTVSPFPLPPDCCGSYPPL

SEQ ID NO: 12712 - protein, 54 aa, Artificial Sequence
  Synthetic polypeptide
SQHFGRVRWVDHLRSEVQDQPGQHGETPSLQKYKKLAGRVETLCATLWGFGKAC

SEQ ID NO: 12713 - protein, 67 aa, Artificial Sequence
  Synthetic polypeptide
PGVLKHFVLLCGALEKHVKCDIREDARLFYRTKVKDLVARIHGKWQEIIQNCRPTQGQLHDFWVPDS

SEQ ID NO: 12714 - protein, 80 aa, Artificial Sequence
  Synthetic polypeptide
PGVLKHFVLLCGALEKHVKCDIREDARLFYRTKVKDLVARIHGKWQEIIQNCRPTQVSFCYTISCILNSFAEWHSSYCLK

SEQ ID NO: 12715 - protein, 563 aa, Artificial Sequence
  Synthetic polypeptide
HHASCTACRTNSSEREDCNNGEPPRKIIPEKNSLRQTYNSCARLCLNQETVCLASTAMKTENCVAKTKLANGTSSMIVPKQRKLSASYEKEKELCVKYFEQWSESDQVEFVEHLISQMCHYQHGHINSYLKPMLQRDFITALPARGLDHIAENILSYLDAKSLCAAELVCKEWYRVTSDGMLWKKLIERMVRTDSLWRGLAERRGWGQYLFKNKPPDGNAPPNSFYRALYPKIIQDIETIESNWRCGRHSLQRIHCRSETSKGVYCLQYDDQKIVSGLRDNTIKIWDKNTLECKRILTGHTGSVLCLQYDERVIITGSSDSTVRVWDVNTGEMLNTLIHHCEAVLHLRFNNGMMVTCSKDRSIAVWDMASPTDITLRRVLVGHRAAVNVVDFDDKYIVSASGDRTIKVWNTSTCEFVRTLNGHKRGIACLQYRDRLVVSGSSDNTIRLWDIECGACLRVLEGHEELVRCIRFDNKRIVSGAYDGKIKVWDLVAALDPRAPAGTLCLRTLVEHSGRVFRLQFDEFQIVSSSHDDTILIWDFLNDPAAQAEPPRSPSRTYTYISR

SEQ ID NO: 12716 - protein, 69 aa, Artificial Sequence
  Synthetic polypeptide
ESGTSLFSLLVSLLACDFCTCSSSSPSTVSGSRLRLLPGADASTMLLVQPAELIPQREKTVIMANPLGR

SEQ ID NO: 12717 - protein, 167 aa, Artificial Sequence
  Synthetic polypeptide
HHASCTACRTNSSEREDCNNGEPPRKIIPEKNSLRQTYNSCARLCLNQETVCLASTAMKTENCVAKTKLANGTSSMIVPKQRKLSASYEKEKELCVKYFEQWSESDQVEFVEHLISQMCHYQHGHINSYLKPMLQRDFITALPARGLDHIAENILSYLDAKSLCAAE

SEQ ID NO: 12718 - protein, 228 aa, Artificial Sequence
  Synthetic polypeptide
NIRLLPIDGANDLFFQPPPLTPTSKVYTIRPYFPKDEASVYKICREMYDDGVGLPFQSQPDLIGDKLVGGLLSLSLDYCFVLEDEDGICGYALGTVDVTPFIKKCKISWIPFMQEKYTKPNGDKELSEAEKIMLSFHEEQEVLPETFLANFPSLIKMDIHKKVTDPSVAKSMMACLLSSLKANGSRGAFCEVRPDDKRILEFYSKLGCFEIAKMEGFPKDVVILGRSL

SEQ ID NO: 12719 - protein, 30 aa, Artificial Sequence
  Synthetic polypeptide
VAQHKFVNFLKTFVCCQLMGQMISFFSHLH

SEQ ID NO: 12720 - protein, 10 aa, Artificial Sequence
  Synthetic polypeptide
TFLKHSFAAN

SEQ ID NO: 12721 - protein, 12 aa, Artificial Sequence
  Synthetic polypeptide
NIGVVVILQHNS

SEQ ID NO: 12722 - protein, 15 aa, Artificial Sequence
  Synthetic polypeptide
VAQHKFVNFLKTLVS

SEQ ID NO: 12723 - protein, 260 aa, Artificial Sequence
  Synthetic polypeptide
TFLKHWCRSHSSAQFLIGDQEPWAFRGGLAGEFQRLLPIDGANDLFFQPPPLTPTSKVYTIRPYFPKDEASVYKICREMYDDGVGLPFQSQPDLIGDKLVGGLLSLSLDYCFVLEDEDGICGYALGTVDVTPFIKKCKISWIPFMQEKYTKPNGDKELSEAEKIMLSFHEEQEVLPETFLANFPSLIKMDIHKKVTDPSVAKSMMACLLSSLKANGSRGAFCEVRPDDKRILEFYSKLGCFEIAKMEGFPKDVVILGRSL

SEQ ID NO: 12724 - protein, 246 aa, Artificial Sequence
  Synthetic polypeptide
TFLKHWCRSHSSAQFLIGDQEPWAFRGGLAGEFQPPPLTPTSKVYTIRPYFPKDEASVYKICREMYDDGVGLPFQSQPDLIGDKLVGGLLSLSLDYCFVLEDEDGICGYALGTVDVTPFIKKCKISWIPFMQEKYTKPNGDKELSEAEKIMLSFHEEQEVLPETFLANFPSLIKMDIHKKVTDPSVAKSMMACLLSSLKANGSRGAFCEVRPDDKRILEFYSKLGCFEIAKMEGFPKDVVILGRSL

SEQ ID NO: 12725 - protein, 20 aa, Artificial Sequence
  Synthetic polypeptide
GCSTEPSSTTLTPKLSPTLL

SEQ ID NO: 12726 - protein, 28 aa, Artificial Sequence
  Synthetic polypeptide
CLREMLIGTICVSDFWIRDAQLSHHQPL

SEQ ID NO: 12727 - protein, 12 aa, Artificial Sequence
  Synthetic polypeptide
NSSVLTRLLFGL

SEQ ID NO: 12728 - protein, 18 aa, Artificial Sequence
  Synthetic polypeptide
PDCCLVCESLYCEAVYRG

SEQ ID NO: 12729 - protein, 476 aa, Artificial Sequence
  Synthetic polypeptide
FQCPDQIVVWSVNPYIVKLSIVDDEATLNGMGLVIAQALSEYNRQYKDKEEEHQSGFFSALTNMVGSMFIADAHEKISVQTNEAILLALYEAVHLNRNFITVLAQSHPEMGLVTTPVSPAPTTPVTPLGTTPPSSDVISSVELPLDADVQTSNLLITFLKYSSIVMQDTKDEHRLHSGKLCLIILTCIAEDQYANAFLHDDNMNFRVNLHRMPMRHRKKAADKNLPCRPLVCAVLDLMVEFIVTHMMKEFPMDLYIRCIQVVHKLLCYQKKCRVRLHYTWRELWSALINLLKFLMSNETVLLAKHNIFTLALMIVNLFNMFITYGDTFLPTPSSYDELYYEIIRMHQSFDNLYSMVLRLSTNAGQWKEAASKVTHALVNIRAIINHFNPKIESYAAVNHISQLSEEQVLEVVRANYDTLTLKLQDGLDQYERYSEQHKEAAFFKELVRSISTNVRRNLAFHTLSQEVLLKEFSTIS

SEQ ID NO: 12730 - protein, 604 aa, Artificial Sequence
  Synthetic polypeptide
DQAPWLMPVILALWEAKAGGLLELRSLRPAWATWQNLVSTKNTKIICVWWHVPNLMESLDSLLCAEGSESLKSLCLKLLLCLVTVTDNISQNTILEYVMINSIFEAILQILSHPPSRREHGYDAVVLLALLVNYRKYESVNPYIVKLSIVDDEATLNGMGLVIAQALSEYNRQYKDKEEEHQSGFFSALTNMVGSMFIADAHEKISVQTNEAILLALYEAVHLNRNFITVLAQSHPEMGLVTTPVSPAPTTPVTPLGTTPPSSDVISSVELPLDADVQTSNLLITFLKYSSIVMQDTKDEHRLHSGKLCLIILTCIAEDQYANAFLHDDNMNFRVNLHRMPMRHRKKAADKNLPCRPLVCAVLDLMVEFIVTHMMKEFPMDLYIRCIQVVHKLLCYQKKCRVRLHYTWRELWSALINLLKFLMSNETVLLAKHNIFTLALMIVNLFNMFITYGDTFLPTPSSYDELYYEIIRMHQSFDNLYSMVLRLSTNAGQWKEAASKVTHALVNIRAIINHFNPKIESYAAVNHISQLSEEQVLEVVRANYDTLTLKLQDGLDQYERYSEQHKEAAFFKELVRSISTNVRRNLAFHTLSQEVLLKEFSTIS

SEQ ID NO: 12731 - protein, 27 aa, Artificial Sequence
  Synthetic polypeptide
DQRGQHGKTSSPQKIQKLSAYGGTCLT

SEQ ID NO: 12732 - protein, 115 aa, Artificial Sequence
  Synthetic polypeptide
ALSCLICKMGMLWSALLPHKVVPQSHSSCTRRRSPRTATPFPPSIPAPCWIGMWAQLPCIRLHTWSQGLGGTHHMATKLTTEYLSLTNGFRTGQRSVTISGGMHSRLSSLRMMPC

SEQ ID NO: 12733 - protein, 81 aa, Artificial Sequence
  Synthetic polypeptide
RKSIGCGNQKIQAQVLALTVTSFMILARSFEPSVASSVKWECYGQPCYLIRLFLKVIQAVLAEGAPERQRLSPLPSRHHAG

SEQ ID NO: 12734 - protein, 1656 aa, Artificial Sequence
  Synthetic polypeptide
RTLARNCGYLGLNARFAPQYLSDLRQLTTPPGTLALSSVTYGLVLLHEEAGDSGFVSLSRLGPSLRDKDLEMEELMLQDETLLGTMQSYMDASLISLIEDFGSLGESRLSLEDQNEVSLLTALTEILDNADSENLSPFDSIPDSELLVSPREGSSLHKLLTLSRTPPERDLITPVDPLGPSTGSSRGSGVEMSLPDPSWDFSPPSFLETSSPKLPSWRPPRSRPRWGQSPPPQQRSDGEEEEEVASFSGQILAGELDNCVSSIPDFPMHLACPEEEDKATAAEMAVPAAGDESISSLSELVRAMHPYCLPNLTHLASLEDELQEQPDDLTLPEGCVVLEIVGQAATAGDDLEIPVVVRQVSPGPRPVLLDDSLETSSALQLLMPTLESETEAAVPKVTLCSEKEGLSLNSEEKLDSACLLKPREVVEPVVPKEPQNPPANAAPGSQRARKGRKKKSKEQPAACVEGYARRLRSSSRGQSTVGTEVTSQVDNLQKQPQEELQKESGPLQGKGKPRAWARAWAAALENSSPKNLERSAGQSSPAKEGPLDLYPKLADTIQTNPIPTHLSLVDSAQASPMPVDSVEADPTAVGPVLAGPVPVDPGLVDLASTSSELVEPLPAEPVLINPVLADSAAVDPAVVPISDNLPPVDAVPSGPAPVDLALVDPVPNDLTPVDPVLVKSRPTDPRRGAVSSALGGSAPQLLVESESLDPPKTIIPEVKEVVDSLKIESGTSATTHEARPRPLSLSEYRRRRQQRQAETEERSPQPPTGKWPSLPETPTGLADIPCLVIPPAPAKKTALQRSPETPLEICLVPVGPSPASPSPEPPVSKPVASSPTEQVPSQEMPLLARPSPPVQSVSPAVPTPPSMSAALPFPAGGLGMPPSLPPPPLQPPSLPLSMGPVLPDPFTHYAPLPSWPCYPHVSPSGYPCLPPPPTVPLVSGTPGAYAVPPTCSVPWAPPPAPVSPYSSTCTYGPLGWGPGPQHAPFWSTVPPPPLPPASIGRAVPQPKMESRGTPAGPPENVLPLSMAPPLSLGLPGHGAPQTEPTKVEVKPVPASPHPKHKVSALVQSPQMKALACVSAEGVTVEEPASERLKPETQETRPREKPPLPATKAVPTPRQSTVPKLPAVHPARLRKLSFLPTPRTQGSEDVVQAFISEIGIEASDLSSLLEQFEKSEAKKECPPPAPADSLAVGNSGGVDIPQEKRPLDRLQAPELANVAGLTPPATPPHQLWKPLAAVSLLAKAKSPKSTAQEGTLKPEGVTEAKHPAAVRLQEGVHGPSRVHVGSGDHDYCVRSRTPPKKMPALVIPEVGSRWNVKRHQDITIKPVLSLGPAAPPPPCIAASREPLDHRTSSEQADPSAPCLAPSSLLSPEASPCRNDMNTRTPPEPSAKQRSMRCYRKACRSASPSSQGWQGRRGRNSRSVSSGSNRTSEASSSSSSSSSSSRSRSRSLSPPHKRWRRSSCSSSGRSRRCSSSSSSSSSSSSSSSSSSSSRSRSRSPSPRRRSDRRRRYSSYRSHDHYQRQRVLQKERAIEERRVVFIGKIPGRMTRSELKQRFSVFGEIEECTIHFRVQGDNYGFVTYRYAEEAFAAIESGHKLRQADEQPFDLCFGGRRQFCKRSYSDLDSNREDFDPAPVKSKFDSLDFDTLLKQAQKNLRR

SEQ ID NO: 12735 - protein, 25 aa, Artificial Sequence
  Synthetic polypeptide
PMAWCCCMRRRVILALSVSLGWAHL

SEQ ID NO: 12736 - protein, 24 aa, Artificial Sequence
  Synthetic polypeptide
FETTDHPTWDTSFILCNLWLGAAA

SEQ ID NO: 12737 - protein, 1392 aa, Artificial Sequence
  Synthetic polypeptide
RTLARNCGYLGLNARFAPQYLSDLRQLTTPPGTLALSSVTYGLVLLHEEAGDSGFVSLSRLGPSLRDKDLEMEELMLQDETLLGTMQSYMDASLISLIEDFGSLGESRLSLEDQNEVSLLTALTEILDNADSENLSPFDSIPDSELLVSPREGSSLHKLLTLSRTPPERDLITPVDPLGPSTGSSRGSGVEMSLPDPSWDFSPPSFLETSSPKLPSWRPPRSRPRWGQSPPPQQRSDGEEEEEVASFSGQILAGELDNCVSSIPDFPMHLACPEEEDKATAAEMAVPAAGDESISSLSELVRAMHPYCLPNLTHLASLEDELQEQPDDLTLPEGCVVLEIVGQAATAGDDLEIPVVVRQVSPGPRPVLLDDSLETSSALQLLMPTLESETEAAVPKVTLCSEKEGLSLNSEEKLDSACLLKPREVVEPVVPKEPQNPPANAAPGSQRARKGRKKKSKEQPAACVEGYARRLRSSSRGQSTVGTEVTSQVDNLQKQPQEELQKESGPLQGKGKPRAWARAWAAALENSSPKNLERSAGQSSPAKEGPLDLYPKLADTIQTNPIPTHLSLVDSAQASPMPVDSVEADPTAVGPVLAGPVPVDPGLVDLASTSSELVEPLPAEPVLINPVLADSAAVDPAVVPISDNLPPVDAVPSGPAPVDLALVDPVPNDLTPVDPVLVKSRPTDPRRGAVSSALGGSAPQLLVESESLDPPKTIIPEVKEVVDSLKIESGTSATTHEARPRPLSLSEYRRRRQQRQAETEERSPQPPTGKWPSLPETPTGLADIPCLVIPPAPAKKTALQRSPETPLEICLVPVGPSPASPSPEPPVSKPVASSPTEQVPSQEMPLLARPSPPVQSVSPAVPTPPSMSAALPFPAGGLGMPPSLPPPPLQPPSLPLSMGPVLPDPFTHYAPLPSWPCYPHVSPSGYPCLPPPPTVPLVSGTPGAYAVPPTCSVPWAPPPAPVSPYSSTCTYGPLGWGPGPQHAPFWSTVPPPPLPPASIGRAVPQPKMESRGTPAGPPENVLPLSMAPPLSLGLPGHGAPQTEPTKVEVKPVPASPHPKHKVSALVQSPQMKALACVSAEGVTVEEPASERLKPETQETRPREKPPLPATKAVPTPRQSTVPKLPAVHPARLRKLSFLPTPRTQGSEDVVQAFISEIGIEASDLSSLLEQFEKSEAKKECPPPAPADSLAVGNSGSSCSSSGRSRRCSSSSSSSSSSSSSSSSSSSSRSRSRSPSPRRRSDRRRRYSSYRSHDHYQRQRVLQKERAIEERRVVFIGKIPGRMTRSELKQRFSVFGEIEECTIHFRVQGDNYGFVTYRYAEEAFAAIESGHKLRQADEQPFDLCFGGRRQFCKRSYSDLDSNREDFDPAPVKSKFDSLDFDTLLKQAQKNLRR

SEQ ID NO: 12738 - protein, 55 aa, Artificial Sequence
  Synthetic polypeptide
GRAWRLTPVITALSEAESGGLLEIWSLRPAWPIRCCCMRRRVILALSVSLGWAHL

SEQ ID NO: 12739 - protein, 1624 aa, Artificial Sequence
  Synthetic polypeptide
DLEFETSLANKVLLHEEAGDSGFVSLSRLGPSLRDKDLEMEELMLQDETLLGTMQSYMDASLISLIEDFGSLGESRLSLEDQNEVSLLTALTEILDNADSENLSPFDSIPDSELLVSPREGSSLHKLLTLSRTPPERDLITPVDPLGPSTGSSRGSGVEMSLPDPSWDFSPPSFLETSSPKLPSWRPPRSRPRWGQSPPPQQRSDGEEEEEVASFSGQILAGELDNCVSSIPDFPMHLACPEEEDKATAAEMAVPAAGDESISSLSELVRAMHPYCLPNLTHLASLEDELQEQPDDLTLPEGCVVLEIVGQAATAGDDLEIPVVVRQVSPGPRPVLLDDSLETSSALQLLMPTLESETEAAVPKVTLCSEKEGLSLNSEEKLDSACLLKPREVVEPVVPKEPQNPPANAAPGSQRARKGRKKKSKEQPAACVEGYARRLRSSSRGQSTVGTEVTSQVDNLQKQPQEELQKESGPLQGKGKPRAWARAWAAALENSSPKNLERSAGQSSPAKEGPLDLYPKLADTIQTNPIPTHLSLVDSAQASPMPVDSVEADPTAVGPVLAGPVPVDPGLVDLASTSSELVEPLPAEPVLINPVLADSAAVDPAVVPISDNLPPVDAVPSGPAPVDLALVDPVPNDLTPVDPVLVKSRPTDPRRGAVSSALGGSAPQLLVESESLDPPKTIIPEVKEVVDSLKIESGTSATTHEARPRPLSLSEYRRRRQQRQAETEERSPQPPTGKWPSLPETPTGLADIPCLVIPPAPAKKTALQRSPETPLEICLVPVGPSPASPSPEPPVSKPVASSPTEQVPSQEMPLLARPSPPVQSVSPAVPTPPSMSAALPFPAGGLGMPPSLPPPPLQPPSLPLSMGPVLPDPFTHYAPLPSWPCYPHVSPSGYPCLPPPPTVPLVSGTPGAYAVPPTCSVPWAPPPAPVSPYSSTCTYGPLGWGPGPQHAPFWSTVPPPPLPPASIGRAVPQPKMESRGTPAGPPENVLPLSMAPPLSLGLPGHGAPQTEPTKVEVKPVPASPHPKHKVSALVQSPQMKALACVSAEGVTVEEPASERLKPETQETRPREKPPLPATKAVPTPRQSTVPKLPAVHPARLRKLSFLPTPRTQGSEDVVQAFISEIGIEASDLSSLLEQFEKSEAKKECPPPAPADSLAVGNSGGVDIPQEKRPLDRLQAPELANVAGLTPPATPPHQLWKPLAAVSLLAKAKSPKSTAQEGTLKPEGVTEAKHPAAVRLQEGVHGPSRVHVGSGDHDYCVRSRTPPKKMPALVIPEVGSRWNVKRHQDITIKPVLSLGPAAPPPPCIAASREPLDHRTSSEQADPSAPCLAPSSLLSPEASPCRNDMNTRTPPEPSAKQRSMRCYRKACRSASPSSQGWQGRRGRNSRSVSSGSNRTSEASSSSSSSSSSSRSRSRSLSPPHKRWRRSSCSSSGRSRRCSSSSSSSSSSSSSSSSSSSSRSRSRSPSPRRRSDRRRRYSSYRSHDHYQRQRVLQKERAIEERRVVFIGKIPGRMTRSELKQRFSVFGEIEECTIHFRVQGDNYGFVTYRYAEEAFAAIESGHKLRQADEQPFDLCFGGRRQFCKRSYSDLDSNREDFDPAPVKSKFDSLDFDTLLKQAQKNLRR

SEQ ID NO: 12740 - protein, 1360 aa, Artificial Sequence
  Synthetic polypeptide
DLEFETSLANKVLLHEEAGDSGFVSLSRLGPSLRDKDLEMEELMLQDETLLGTMQSYMDASLISLIEDFGSLGESRLSLEDQNEVSLLTALTEILDNADSENLSPFDSIPDSELLVSPREGSSLHKLLTLSRTPPERDLITPVDPLGPSTGSSRGSGVEMSLPDPSWDFSPPSFLETSSPKLPSWRPPRSRPRWGQSPPPQQRSDGEEEEEVASFSGQILAGELDNCVSSIPDFPMHLACPEEEDKATAAEMAVPAAGDESISSLSELVRAMHPYCLPNLTHLASLEDELQEQPDDLTLPEGCVVLEIVGQAATAGDDLEIPVVVRQVSPGPRPVLLDDSLETSSALQLLMPTLESETEAAVPKVTLCSEKEGLSLNSEEKLDSACLLKPREVVEPVVPKEPQNPPANAAPGSQRARKGRKKKSKEQPAACVEGYARRLRSSSRGQSTVGTEVTSQVDNLQKQPQEELQKESGPLQGKGKPRAWARAWAAALENSSPKNLERSAGQSSPAKEGPLDLYPKLADTIQTNPIPTHLSLVDSAQASPMPVDSVEADPTAVGPVLAGPVPVDPGLVDLASTSSELVEPLPAEPVLINPVLADSAAVDPAVVPISDNLPPVDAVPSGPAPVDLALVDPVPNDLTPVDPVLVKSRPTDPRRGAVSSALGGSAPQLLVESESLDPPKTIIPEVKEVVDSLKIESGTSATTHEARPRPLSLSEYRRRRQQRQAETEERSPQPPTGKWPSLPETPTGLADIPCLVIPPAPAKKTALQRSPETPLEICLVPVGPSPASPSPEPPVSKPVASSPTEQVPSQEMPLLARPSPPVQSVSPAVPTPPSMSAALPFPAGGLGMPPSLPPPPLQPPSLPLSMGPVLPDPFTHYAPLPSWPCYPHVSPSGYPCLPPPPTVPLVSGTPGAYAVPPTCSVPWAPPPAPVSPYSSTCTYGPLGWGPGPQHAPFWSTVPPPPLPPASIGRAVPQPKMESRGTPAGPPENVLPLSMAPPLSLGLPGHGAPQTEPTKVEVKPVPASPHPKHKVSALVQSPQMKALACVSAEGVTVEEPASERLKPETQETRPREKPPLPATKAVPTPRQSTVPKLPAVHPARLRKLSFLPTPRTQGSEDVVQAFISEIGIEASDLSSLLEQFEKSEAKKECPPPAPADSLAVGNSGSSCSSSGRSRRCSSSSSSSSSSSSSSSSSSSSRSRSRSPSPRRRSDRRRRYSSYRSHDHYQRQRVLQKERAIEERRVVFIGKIPGRMTRSELKQRFSVFGEIEECTIHFRVQGDNYGFVTYRYAEEAFAAIESGHKLRQADEQPFDLCFGGRRQFCKRSYSDLDSNREDFDPAPVKSKFDSLDFDTLLKQAQKNLRR

SEQ ID NO: 12741 - protein, 18 aa, Artificial Sequence
  Synthetic polypeptide
FKNSQKLSPMYSFDLFWK

SEQ ID NO: 12742 - protein, 39 aa, Artificial Sequence
  Synthetic polypeptide
IILCFCSFFKIPNLLDLHAENFTDKMIQCLGFDSRTLRN

SEQ ID NO: 12743 - protein, 1813 aa, Artificial Sequence
  Synthetic polypeptide
YSVWDLIQELSEIEPNVFLRPFLEVIRSEDTTGPITGLALTSVNKFLSYALIDPTHEGTAEGMENMADAVTHARFVGTDPASDEVVLMKILQVLRTLLLTPVGAHLTNESVCEIMQSCFRICFEMRLSELLRKSAEHTLVDMVQLLFTRLPQFKEEPKNYVGTNMKKLKMRAGGMSDSSKWKKQKRSPRPPRHMTKVTPGSELPTPNGTTLSSNLTGGMPFIDVPTPISSASSEAASAVVSPSTDSGLEFSSQTTSKEDLTDLEQPGSPGYSTATEPGSSELGVPEQPDLQEGTHVEKSQSASVESIPEVLEECTSPADHSDSASVHDMDYVNPRGVRFTQSSQKEGTALVPYGLPCIRELFRFLISLTNPHDRHNSEVMIHMGLHLLTVALESAPVAQCQTLLGLIKDEMCRHLFQLLSIERLNLYAASLRVCFLLFESMREHLKFQMEMYIKKLMEIITVENPKMPYEMKEMALEAIVQLWRIPSFVTELYINYDCDYYCSNLFEELTKLLSKNAFPVSGQLYTTHLLSLDALLTVIDSTEAHCQAKVLNSLTQQEKKETARPSCEIVDGTREASNTERTASDGKAVGMASDIPGLHLPGGGRLPPEHGKSGCSDLEEAVDSGADKKFARKPPRFSCLLPDPRELIEIKNKKKLLITGTEQFNQKPKKGIQFLQEKGLLTIPMDNTEVAQWLRENPRLDKKMIGEFVSDRKNIDLLESFVSTFSFQGLRLDEALRLYLEAFRLPGEAPVIQRLLEAFTERWMNCNGSPFANSDACFSLAYAVIMLNTDQHNHNVRKQNAPMTLEEFRKNLKGVNGGKDFEQDILEDMYHAIKNEEIVMPEEQTGLVRENYVWNVLLHRGATPEGIFLRVPTASYDLDLFTMTWGPTIAALSYVFDKSLEETIIQKAISGFRKCAMISAHYGLSDVFDNLIISLCKFTALSSESIENLPSVFGSNPKAHIAAKTVFHLAHRHGDILREGWKNIMEAMLQLFRAQLLPKAMIEVEDFVDPNGKISLQREETPSNRGESTVLSFVSWLTLSGPEQSSVRGPSTENQEAKRVALECIKQCDPEKMITESKFLQLESLQELMKALVSVTPDEETYDEEDAAFCLEMLLRIVLENRDRVGCVWQTVRDHLYHLCVQAQDFCFLVERAVVGLLRLAIRLLRREEISAQVLLSLRILLLMKPSVLSRVSHQVAYGLHELLKTNAANIHSGDDWATLFTLLECIGSGVKPPAALQATARADAPDAGAQSDSELPSYHQNDVSLDRGYTSDSEVYTDHGRPGKIHRSATDADVVNSGWLVVGKDDVDNSKPGPSRPGPSPLINQYSLTVGLDLGPHDTKSLLKCVESLSFIVRDAAHITPDNFELCVKTLRIFVEASLNGGCKSQEKRGKSHKYDSKGNRFKKKSKEGSMLRRPRTSSQHASRGGQSDDDEDEGVPASYHTVSLQVSQDLLDLMHTLHTRAASIYSSWAEEQRHLETGGQKIEADSRTLWAHCWCPLLQGIACLCCDARRQVRMQALTYLQRALLVHDLQKLDALEWESCFNKVLFPLLTKLLENISPADVGGMEETRMRASTLLSKVFLQHLSPLLSLSTFAALWLTILDFMDKYMHAGSSDLLSEAIPESLKNMLLVMDTAEIFHSADARGGGPSALWEITWERIDCFLPHLRDELFKQTVIQDPMPMEPQGQKPLASAHLTSAAGDTRTPGHPPPPEIPSELGACDFEKPESPRAASSSSPGSPVASSPSRLSPTPDGPPPLAQPPLILQPLASPLQVGVPPMTLPIILNPALIEATSPVPLLATPRPTDPIPTSEVN

SEQ ID NO: 12744 - protein, 38 aa, Artificial Sequence
  Synthetic polypeptide
SQLLGRLRQENHLNRGGGGYSEPRSHHCTPAWATERCS

SEQ ID NO: 12745 - protein, 38 aa, Artificial Sequence
  Synthetic polypeptide
TGEAEVTVSRDRTTALQPGQQKDAHEAAGPAGGARAGH

SEQ ID NO: 12746 - protein, 374 aa, Artificial Sequence
  Synthetic polypeptide
AEIAPLHSSLGNRKMLMKQQDRLEEREQDIEDQLYKLESDKRLVEEKVNQLKEEVRLQYEKLHQLLDEDLRQTVEVLDKAQAKFCSENAAQALHLGERMQEAKKLLGSLQLLFDKTEDVSFMKNTKSVKILMDRTQTCTSSSLSPTKIGHLNSKLFLNEVAKKEKQLRKMLEGPFSTPVPFLQSVPLYPCGVSSSGAEKRKHSTAFPEASFLETSSGPVGGQYGAAGTASGEGQSGQPLGPCSSTQHLVALPGGAQPVHSSPVFPPSQYPNGSAAQQPMLPQYGGRKILVCSVDNCYCSSVANHGGHQPYPRSGHFPWTVPSQEYSHPLPPTPSVPQSLPSLAVRDWLDASQQPGHQDFYRVYGQPSTKHYVTS

SEQ ID NO: 12747 - protein, 36 aa, Artificial Sequence
  Synthetic polypeptide
PGMVAHACNPSTLGGRGTSGITGGRKTKLCASAHLC

SEQ ID NO: 12748 - protein, 89 aa, Artificial Sequence
  Synthetic polypeptide
LTPVIPALWEAEELAELLEEEKLSCVPVLIFANKQDLLTAAPASEIAEGLNLHTIRDRVWQIQSCSALTGEGVQDGMNWVCKNVNAKKK

SEQ ID NO: 12749 - protein, 9 aa, Artificial Sequence
  Synthetic polypeptide
SQHFGRPRN

SEQ ID NO: 12750 - protein, 336 aa, Artificial Sequence
  Synthetic polypeptide
NGWDKEACVGTNNQSYICDTGHCCGQSQCCNYYYELWWFWLVWTIIIILSCCCVCHHRRAKHRLQAQQRQHEINLIAYREAHNYSALPFYFRFLPNYLLPPYEEVVNRPPTPPPPYSAFQLQQQQLLPPQCGPAGGSPPGIDPTRGSQGAQSSPLSEPSRSSTRPPSIADPDPSDLPVDRAATKAPGMEPSGSVAGLGELDPGAFLDKDAECREELLKDDSSEHGAPDSKEKTPGRHRRFTGDSGIEVCVCNRGHHDDDLKEFNTLIDDALDGPLDFCDSCHVRPPGDEEEGLCQSSEEQAREPGHPHLPRPPACLLLNTINEQDSPNSQSSSSPS

SEQ ID NO: 12751 - protein, 82 aa, Artificial Sequence
  Synthetic polypeptide
GHFTFSDLQYIHLGSRDSNILLPAVFQLIEGAAKMDGIRKPVWVPTIKATSVTQDTAVDSLSAATTTMNSGGSGWCGPSSSS

SEQ ID NO: 12752 - protein, 8 aa, Artificial Sequence
  Synthetic polypeptide
KEQLKWMG

SEQ ID NO: 12753 - protein, 46 aa, Artificial Sequence
  Synthetic polypeptide
TVALVYLLSRAFFLLNSELLGDKDNVLFIFVSLEPNTMLGTKTASR

SEQ ID NO: 12754 - protein, 370 aa, Artificial Sequence
  Synthetic polypeptide
AGLFSFLTLSFLGIRTMSYSSLYPLNPTQCLAQRQRPDKEACVGTNNQSYICDTGHCCGQSQCCNYYYELWWFWLVWTIIIILSCCCVCHHRRAKHRLQAQQRQHEINLIAYREAHNYSALPFYFRFLPNYLLPPYEEVVNRPPTPPPPYSAFQLQQQQLLPPQCGPAGGSPPGIDPTRGSQGAQSSPLSEPSRSSTRPPSIADPDPSDLPVDRAATKAPGMEPSGSVAGLGELDPGAFLDKDAECREELLKDDSSEHGAPDSKEKTPGRHRRFTGDSGIEVCVCNRGHHDDDLKEFNTLIDDALDGPLDFCDSCHVRPPGDEEEGLCQSSEEQAREPGHPHLPRPPACLLLNTINEQDSPNSQSSSSPS

SEQ ID NO: 12755 - protein, 57 aa, Artificial Sequence
  Synthetic polypeptide
TQHNAWHKDSVQIRKPVWVPTIKATSVTQDTAVDSLSAATTTMNSGGSGWCGPSSSS

SEQ ID NO: 12756 - protein, 187 aa, Artificial Sequence
  Synthetic polypeptide
VVKVTPETQPAWALFEELQSLDIFLAELYKHLDSSSNERPDISSIQRRIKKVTHDMDMCYGMMGSLFRSGSRQTLFASQVMRYADLYAASFINLLYYPFSYLFRAAHVLMPHESTVEHTHVDINEMESPLATRNRTSVDFKDTDYKRHQLTRSISEIKPPNLFPLAPQEITHCHDEDDDEEEEEEEE

SEQ ID NO: 12757 - protein, 47 aa, Artificial Sequence
  Synthetic polypeptide
LRKLSLPGHFSKNFRAWIFSWLNSTSILTAVAMSVQTSVPSRDVLRK

SEQ ID NO: 12758 - protein, 25 aa, Artificial Sequence
  Synthetic polypeptide
GEGDSGNSACLGTFRRTSELGYFLG

SEQ ID NO: 12759 - protein, 72 aa, Artificial Sequence
  Synthetic polypeptide
VVKVTPETQPAWALFEELQSLDIFLAELYKHLDSSSNERPDISSIQRRIKMPHESTVEHTHVDINEMESPLA

SEQ ID NO: 12760 - protein, 57 aa, Artificial Sequence
  Synthetic polypeptide
LRKLSLPGHFSKNFRAWIFSWLNSTSILTAVAMSVQTSVPSRDVLRCLMNQRWSTHT

SEQ ID NO: 12761 - protein, 543 aa, Artificial Sequence
  Synthetic polypeptide
EGCLSPGVQDEPEQHRVFVNRSLAMEKIKCFGFDMDYTLAVYKSPEYESLGFELTVERLVSIGYPQELLSFAYDSTFPTRGLVFDTLYGNLLKVDAYGNLLVCAHGFNFIRGPETREQYPNKFIQRDDTERFYILNTLFNLPETYLLACLVDFFTNCPRYTSCETGFKDGDLFMSYRSMFQDVRDAVDWVHYKGSLKEKTVENLEKYVVKDGKLPLLLSRMKEVGKVFLATNSDYKYTDKIMTYLFDFPHGPKPGSSHRPWQSYFDLILVDARKPLFFGEGTVLRQVDTKTGKLKIGTYTGPLQHGIVYSGGSSDTICDLLGAKGKDILYIGDHIFGDILKSKKRQGWRTFLVIPELAQELHVWTDKSSLFEELQSLDIFLAELYKHLDSSSNERPDISSIQRRIKKVTHDMDMCYGMMGSLFRSGSRQTLFASQVMRYADLYAASFINLLYYPFSYLFRAAHVLMPHESTVEHTHVDINEMESPLATRNRTSVDFKDTDYKRHQLTRSISEIKPPNLFPLAPQEITHCHDEDDDEEEEEEEE

SEQ ID NO: 12762 - protein, 14 aa, Artificial Sequence
  Synthetic polypeptide
AQEFKMSQSNIGCL

SEQ ID NO: 12763 - protein, 247 aa, Artificial Sequence
  Synthetic polypeptide
EGCLSPGVQDEPEQHRVFVNRSLAMEKIKCFGFDMDYTLAVYKSPEYESLGFELTVERLVSIGYPQELLSFAYDSTFPTRGLVFDTLYGNLLKVDAYGNLLVCAHGFNFIRGSQVAVQKRPETREQYPNKFIQRDDTERFYILNTLFNLPETYLLACLVDFFTNCPRYTSCETGFKDGDLFMSYRSMFQDVRDAVDWVHYKGSLKEKTVENLEKYVVKDGKLPLLLSRMKEVGKVFLATNSDYKYTD

SEQ ID NO: 12764 - protein, 44 aa, Artificial Sequence
  Synthetic polypeptide
EGCLSPGVQDEPEQHRVFVNRSLAMEKIKCFGFDMDYTLAGEPV

SEQ ID NO: 12765 - protein, 34 aa, Artificial Sequence
  Synthetic polypeptide
CMPVIPAIGKEVCSSFRRSNYWTCRKIPQKKNGS

SEQ ID NO: 12766 - protein, 82 aa, Artificial Sequence
  Synthetic polypeptide
SQPLEKKFVRVSGEATIGHVEKFLRRKMGLDPACQVDIICGDHLLEQYQTLREIRRAIGDAAMQDGLLVLHYGLVVSPLKIT

SEQ ID NO: 12767 - protein, 28 aa, Artificial Sequence
  Synthetic polypeptide
PGMVMHACNPSHWKRSLFEFQEKQLLDM

SEQ ID NO: 12768 - protein, 102 aa, Artificial Sequence
  Synthetic polypeptide
ELRPASATWGNPVSTESTKISPPLEKKFVRVSGEATIGHVEKFLRRKMGLDPACQVDIICGDHLLEQYQTLREIRRAIGDAAMQDGLLVLHYGLVVSPLKIT

SEQ ID NO: 12769 - protein, 37 aa, Artificial Sequence
  Synthetic polypeptide
DQPRQHGETLSPLKVQKLARHWKRSLFEFQEKQLLDM

SEQ ID NO: 12770 - protein, 29 aa, Artificial Sequence
  Synthetic polypeptide
PAIGKEVCSSFRRSNYWTCRKIPQKKNGS

SEQ ID NO: 12771 - protein, 49 aa, Artificial Sequence
  Synthetic polypeptide
NVQNKKIHRSRKQISGCQRLGEEAEWGVTTKSHWKRSLFEFQEKQLLDM

SEQ ID NO: 12772 - protein, 31 aa, Artificial Sequence
  Synthetic polypeptide
LPRAIGKEVCSSFRRSNYWTCRKIPQKKNGS

SEQ ID NO: 12773 - protein, 87 aa, Artificial Sequence
  Synthetic polypeptide
MGSDYQEPLEKKFVRVSGEATIGHVEKFLRRKMGLDPACQVDIICGDHLLEQYQTLREIRRAIGDAAMQDGLLVLHYGLVVSPLKIT

SEQ ID NO: 12774 - protein, 762 aa, Artificial Sequence
  Synthetic polypeptide
SQHSGRPRPVDHLSELEDGHTALNTHSVSPMEKIKQYQAGQTVTCFLKKYNVVKKWLEVEIAPDIRGRIPLLLTSLSFKVLKHPDKKFRVGQALRATVVGPDSSKTLLCLSLTGPHKLEEGEVAMGRVVKVTPNEGLTVSFPFGKIGTVSIFHMSDSYSETPLEDFVPQKVVRCYILSTADNVLTLSLRSSRTNPETKSKVEDPEINSIQDIKEGQLLRGYVGSIQPHGVFFRLGPSVVGLARYSHVSQHSPSKKALYNKHLPEGKLLTARVLRLNHQKNLVELSFLPGDTGKPDVLSASLEGQLTKQEERKTEAEERDQKGEKKNQKRNEKKNQKGQEEVEMPSKEKQQPQKPQAQKRGGRECRESGSEQERVSKKPKKAGLSEEDDSLVDVYYREGKEEAEETNVLPKEKQTKPAEAPRLQLSSGFAWNVGLDSLTPALPPLAESSDSEEDEKPHQATIKKSKKERELEKQKAEKELSRIEEALMDPGRQPESADDFDRLVLSSPNSSILWLQYMAFHLQATEIEKARAVAERALKTISFREEQEKLNVWVALLNLENMYGSQESLTKVFERAVQYNEPLKVFLHLADIYAKSEKFQEAGELYNRMLKRFRQEKAVWIKYGAFLLRRSQAAASHRVLQRALECLPSKEHVDVIAKFAQLEFQLGDAERAKAIFENTLSTYPKRTDVWSVYIDMTIKHGSQKDVRDIFERVIHLSLAPKRMKFFFKRYLDYEKQHGTEKDVQAVKAKALEYVEAKSSVLED

SEQ ID NO: 12775 - protein, 780 aa, Artificial Sequence
  Synthetic polypeptide
VPWLTSIISALWEAKASGSLEVRSSRPAWPTCELEDGHTALNTHSVSPMEKIKQYQAGQTVTCFLKKYNVVKKWLEVEIAPDIRGRIPLLLTSLSFKVLKHPDKKFRVGQALRATVVGPDSSKTLLCLSLTGPHKLEEGEVAMGRVVKVTPNEGLTVSFPFGKIGTVSIFHMSDSYSETPLEDFVPQKVVRCYILSTADNVLTLSLRSSRTNPETKSKVEDPEINSIQDIKEGQLLRGYVGSIQPHGVFFRLGPSVVGLARYSHVSQHSPSKKALYNKHLPEGKLLTARVLRLNHQKNLVELSFLPGDTGKPDVLSASLEGQLTKQEERKTEAEERDQKGEKKNQKRNEKKNQKGQEEVEMPSKEKQQPQKPQAQKRGGRECRESGSEQERVSKKPKKAGLSEEDDSLVDVYYREGKEEAEETNVLPKEKQTKPAEAPRLQLSSGFAWNVGLDSLTPALPPLAESSDSEEDEKPHQATIKKSKKERELEKQKAEKELSRIEEALMDPGRQPESADDFDRLVLSSPNSSILWLQYMAFHLQATEIEKARAVAERALKTISFREEQEKLNVWVALLNLENMYGSQESLTKVFERAVQYNEPLKVFLHLADIYAKSEKFQEAGELYNRMLKRFRQEKAVWIKYGAFLLRRSQAAASHRVLQRALECLPSKEHVDVIAKFAQLEFQLGDAERAKAIFENTLSTYPKRTDVWSVYIDMTIKHGSQKDVRDIFERVIHLSLAPKRMKFFFKRYLDYEKQHGTEKDVQAVKAKALEYVEAKSSVLED

SEQ ID NO: 12776 - protein, 57 aa, Artificial Sequence
  Synthetic polypeptide
SQHSGRPRPVDHLRSGVRDQPGQHVSWRMATLLLTLTLLAPWRRLNSTRPARLLLAS

SEQ ID NO: 12777 - protein, 57 aa, Artificial Sequence
  Synthetic polypeptide
SAPSVGNQPSPDTKSADTLILDFTASRTGLWQFQEEIRCRRHRRAHDPGTVRGGVQL

SEQ ID NO: 12778 - protein, 368 aa, Artificial Sequence
  Synthetic polypeptide
SWTLQPPELDYGSSKRKSGADATAEPMILEQYVVVSNYKKQENSELSLQAGEVVDVIEKNESGWWFVSTSEEQGWVPATYLEAQNGTRDDSDINTSKTGEVSKRRKAHLRRLDRRWTLGGMVNRQHSREEKYVTVQPYTSQSKDEIGFEKGVTVEVIRKNLEGWWYIRYLGKEGWAPASYLKKAKDDLPTRKKNLAGPVEIIGNIMEISNLLNKKASGDKETPPAEGEGHEAPIAKKEISLPILCNASNGSAVGVPDRTVSRLAQGSPAVARIAPQRAQISSPNLRTRPPPRRESSLTESRCRQAGVQWHDLGSLQSPHPRFKRFSCLSLLSSWDHRHMPPHPANFLIFLIETGFHHVGQDGLHLLTS

SEQ ID NO: 12779 - protein, 29 aa, Artificial Sequence
  Synthetic polypeptide
HLDLGLYSLQNWTMAVPRGNQVPTPPPSP

SEQ ID NO: 12780 - protein, 44 aa, Artificial Sequence
  Synthetic polypeptide
SAPSVGNQPSPDTKSADTLILDFTASRTGLWQFQEEISVAVQLG

SEQ ID NO: 12781 - protein, 1009 aa, Artificial Sequence
  Synthetic polypeptide
SWTLQPPELDYGSSKRKSVWLSSWAESPKKDVTGADATAEPMILEQYVVVSNYKKQENSELSLQAGEVVDVIEKNESGWWFVSTSEEQGWVPATYLEAQNGTRDDSDINTSKTGEVSKRRKAHLRRLDRRWTLGGMVNRQHSREEKYVTVQPYTSQSKDEIGFEKGVTVEVIRKNLEGWWYIRYLGKEGWAPASYLKKAKDDLPTRKKNLAGPVEIIGNIMEISNLLNKKASGDKETPPAEGEGHEAPIAKKEISLPILCNASNGSAVGVPDRTVSRLAQGSPAVARIAPQRAQISSPNLRTRPPPRRESSLGFQLPKPPEPPSVEVEYYTIAEFQSCISDGISFRGGQKAEVIDKNSGGWWYVQIGEKEGWAPASYIDKRKKPNLSRRTSTLTRPKVPPPAPPSKPKEAEEGPTGASESQDSPRKLKYEEPEYDIPAFGFDSEPELSEEPVEDRASGERRPAQPHRPSPASSLQRARFKVGESSEDVALEEETIYENEGFRPYAEDTLSARGSSGDSDSPGSSSLSLTRKNSPKSGSPKSSSLLKLKAEKNAQAEMGKNHSSASFSSSITINTTCCSSSSSSSSSLSKTSGDLKPRSASDAGIRGTPKVRAKKDADANAGLTSCPRAKPSVRPKPFLNRAESQSQEKMDISTLRRQLRPTGQLRGGLKGSKSEDSELPPQTASEAPSEGSRRSSSDLITLPATTPPCPTKKEWEGPATSYMTCSAYQKVQDSEISFPAGVEVQVLEKQESGWWYVRFGELEGWAPSHYLVLDENEQPDPSGKELDTVPAKGRQNEGKSDSLEKIERRVQALNTVNQSKKATPPIPSKPPGGFGKTSGTPAVKMRNGVRQVAVRPQSVFVSPPPKDNNLSCALRRNESLTATDGLRGVRRNSSFSTARSAAAEAKGRLAERAASQGSDSPLLPAQRNSIPVSPVRPKPIEKSQFIHNNLKDVYVSIADYEGDEETAGFQEGVSMEVLERNPNGWWYCQILDGVKPFKGWVPSNYLEKKN

SEQ ID NO: 12782 - protein, 34 aa, Artificial Sequence
  Synthetic polypeptide
HLDLGLYSLQNWTMAVPRGNQCGCPAGLSRPRRT

SEQ ID NO: 12783 - protein, 981 aa, Artificial Sequence
  Synthetic polypeptide
SWTLQPPELDYGSSKRKSVWLSSWAESPKKDVTGADATAEPMILEQYVVVSNYKKQENSELSLQAGEVVDVIEKNESGWWFVSTSEEQGWVPATYLEAQNGTRDDSDINTSKTGEEEKYVTVQPYTSQSKDEIGFEKGVTVEVIRKNLEGWWYIRYLGKEGWAPASYLKKAKDDLPTRKKNLAGPVEIIGNIMEISNLLNKKASGDKETPPAEGEGHEAPIAKKEISLPILCNASNGSAVGVPDRTVSRLAQGSPAVARIAPQRAQISSPNLRTRPPPRRESSLGFQLPKPPEPPSVEVEYYTIAEFQSCISDGISFRGGQKAEVIDKNSGGWWYVQIGEKEGWAPASYIDKRKKPNLSRRTSTLTRPKVPPPAPPSKPKEAEEGPTGASESQDSPRKLKYEEPEYDIPAFGFDSEPELSEEPVEDRASGERRPAQPHRPSPASSLQRARFKVGESSEDVALEEETIYENEGFRPYAEDTLSARGSSGDSDSPGSSSLSLTRKNSPKSGSPKSSSLLKLKAEKNAQAEMGKNHSSASFSSSITINTTCCSSSSSSSSSLSKTSGDLKPRSASDAGIRGTPKVRAKKDADANAGLTSCPRAKPSVRPKPFLNRAESQSQEKMDISTLRRQLRPTGQLRGGLKGSKSEDSELPPQTASEAPSEGSRRSSSDLITLPATTPPCPTKKEWEGPATSYMTCSAYQKVQDSEISFPAGVEVQVLEKQESGWWYVRFGELEGWAPSHYLVLDENEQPDPSGKELDTVPAKGRQNEGKSDSLEKIERRVQALNTVNQSKKATPPIPSKPPGGFGKTSGTPAVKMRNGVRQVAVRPQSVFVSPPPKDNNLSCALRRNESLTATDGLRGVRRNSSFSTARSAAAEAKGRLAERAASQGSDSPLLPAQRNSIPVSPVRPKPIEKSQFIHNNLKDVYVSIADYEGDEETAGFQEGVSMEVLERNPNGWWYCQILDGVKPFKGWVPSNYLEKKN

SEQ ID NO: 12784 - protein, 39 aa, Artificial Sequence
  Synthetic polypeptide
ILYVLIDVLYFPKMYNAGCTPSTLGTCHQDLPKLCRRYT

SEQ ID NO: 12785 - protein, 40 aa, Artificial Sequence
  Synthetic polypeptide
LMYCISLKCITQAVPHPPWAHVIRTSRSCVAGIHNQCDLV

SEQ ID NO: 12786 - protein, 1130 aa, Artificial Sequence
  Synthetic polypeptide
RRLYPIHLGHMSSGPPEAVSQVYIINVTWSDSTSQTIYRRYSKFFDLQMQLLDKFPIEGGQKDPKQRIIPFLPGKILFRRSHIRDVAVKRLKPIDEYCRALVRLPPHISQCDEVFRFFEARPEDVNPPKEDYGSSKRKSVWLSSWAESPKKDVTGADATAEPMILEQYVVVSNYKKQENSELSLQAGEVVDVIEKNESGWWFVSTSEEQGWVPATYLEAQNGTRDDSDINTSKTGEVSKRRKAHLRRLDRRWTLGGMVNRQHSREEKYVTVQPYTSQSKDEIGFEKGVTVEVIRKNLEGWWYIRYLGKEGWAPASYLKKAKDDLPTRKKNLAGPVEIIGNIMEISNLLNKKASGDKETPPAEGEGHEAPIAKKEISLPILCNASNGSAVGVPDRTVSRLAQGSPAVARIAPQRAQISSPNLRTRPPPRRESSLGFQLPKPPEPPSVEVEYYTIAEFQSCISDGISFRGGQKAEVIDKNSGGWWYVQIGEKEGWAPASYIDKRKKPNLSRRTSTLTRPKVPPPAPPSKPKEAEEGPTGASESQDSPRKLKYEEPEYDIPAFGFDSEPELSEEPVEDRASGERRPAQPHRPSPASSLQRARFKVGESSEDVALEEETIYENEGFRPYAEDTLSARGSSGDSDSPGSSSLSLTRKNSPKSGSPKSSSLLKLKAEKNAQAEMGKNHSSASFSSSITINTTCCSSSSSSSSSLSKTSGDLKPRSASDAGIRGTPKVRAKKDADANAGLTSCPRAKPSVRPKPFLNRAESQSQEKMDISTLRRQLRPTGQLRGGLKGSKSEDSELPPQTASEAPSEGSRRSSSDLITLPATTPPCPTKKEWEGPATSYMTCSAYQKVQDSEISFPAGVEVQVLEKQESGWWYVRFGELEGWAPSHYLVLDENEQPDPSGKELDTVPAKGRQNEGKSDSLEKIERRVQALNTVNQSKKATPPIPSKPPGGFGKTSGTPAVKMRNGVRQVAVRPQSVFVSPPPKDNNLSCALRRNESLTATDGLRGVRRNSSFSTARSAAAEAKGRLAERAASQGSDSPLLPAQRNSIPVSPVRPKPIEKSQFIHNNLKDVYVSIADYEGDEETAGFQEGVSMEVLERNPNGWWYCQILDGVKPFKGWVPSNYLEKKN

SEQ ID NO: 12787 - protein, 1102 aa, Artificial Sequence
  Synthetic polypeptide
RRLYPIHLGHMSSGPPEAVSQVYIINVTWSDSTSQTIYRRYSKFFDLQMQLLDKFPIEGGQKDPKQRIIPFLPGKILFRRSHIRDVAVKRLKPIDEYCRALVRLPPHISQCDEVFRFFEARPEDVNPPKEDYGSSKRKSVWLSSWAESPKKDVTGADATAEPMILEQYVVVSNYKKQENSELSLQAGEVVDVIEKNESGWWFVSTSEEQGWVPATYLEAQNGTRDDSDINTSKTGEEEKYVTVQPYTSQSKDEIGFEKGVTVEVIRKNLEGWWYIRYLGKEGWAPASYLKKAKDDLPTRKKNLAGPVEIIGNIMEISNLLNKKASGDKETPPAEGEGHEAPIAKKEISLPILCNASNGSAVGVPDRTVSRLAQGSPAVARIAPQRAQISSPNLRTRPPPRRESSLGFQLPKPPEPPSVEVEYYTIAEFQSCISDGISFRGGQKAEVIDKNSGGWWYVQIGEKEGWAPASYIDKRKKPNLSRRTSTLTRPKVPPPAPPSKPKEAEEGPTGASESQDSPRKLKYEEPEYDIPAFGFDSEPELSEEPVEDRASGERRPAQPHRPSPASSLQRARFKVGESSEDVALEEETIYENEGFRPYAEDTLSARGSSGDSDSPGSSSLSLTRKNSPKSGSPKSSSLLKLKAEKNAQAEMGKNHSSASFSSSITINTTCCSSSSSSSSSLSKTSGDLKPRSASDAGIRGTPKVRAKKDADANAGLTSCPRAKPSVRPKPFLNRAESQSQEKMDISTLRRQLRPTGQLRGGLKGSKSEDSELPPQTASEAPSEGSRRSSSDLITLPATTPPCPTKKEWEGPATSYMTCSAYQKVQDSEISFPAGVEVQVLEKQESGWWYVRFGELEGWAPSHYLVLDENEQPDPSGKELDTVPAKGRQNEGKSDSLEKIERRVQALNTVNQSKKATPPIPSKPPGGFGKTSGTPAVKMRNGVRQVAVRPQSVFVSPPPKDNNLSCALRRNESLTATDGLRGVRRNSSFSTARSAAAEAKGRLAERAASQGSDSPLLPAQRNSIPVSPVRPKPIEKSQFIHNNLKDVYVSIADYEGDEETAGFQEGVSMEVLERNPNGWWYCQILDGVKPFKGWVPSNYLEKKN

SEQ ID NO: 12788 - protein, 90 aa, Artificial Sequence
  Synthetic polypeptide
SQHFGRPSRVESLEVTREDKDLHRKIHRIIQQDCQKPNHMEKGCHFLHILACARLSIRPGLSEAVLQQVLELLEDQSDIVSTMEHYYTAF

SEQ ID NO: 12789 - protein, 23 aa, Artificial Sequence
  Synthetic polypeptide
PGAVAHAYNPSTLGGQVGWNHLR

SEQ ID NO: 12790 - protein, 2 aa, Artificial Sequence
  Synthetic polypeptide
AR

SEQ ID NO: 12791 - protein, 78 aa, Artificial Sequence
  Synthetic polypeptide
GQVTREDKDLHRKIHRIIQQDCQKPNHMEKGCHFLHILACARLSIRPGLSEAVLQQVLELLEDQSDIVSTMEHYYTAF

SEQ ID NO: 12792 - protein, 64 aa, Artificial Sequence
  Synthetic polypeptide
PGNQRRQRPAQKDPPDHSAGLPETKSHGEGLSLPAHLGLCSPEHPPGPERGCAAASSGAPGGPE

SEQ ID NO: 12793 - protein, 39 aa, Artificial Sequence
  Synthetic polypeptide
EYVLVSPLPSTMIVSFLRPPQPALLYNLQNCDSHFDKAL

SEQ ID NO: 12794 - protein, 995 aa, Artificial Sequence
  Synthetic polypeptide
GLPNQPSCTTCRTVILILTKLYDYNLGSITESSLWRSTDYGTTYEKLNDKVGLKTILSYLYVCPTNKRKIMLLTDPEIESSLLISSDEGATYQKYRLNFYIQSLLFHPKQEDWILAYSQDQKLYSSAEFGRRWQLIQEGVVPNRFYWSVMGSNKEPDLVHLEARTVDGHSHYLTCRMQNCTEANRNQPFPGYIDPDSLIVQDHYVFVQLTSGGRPHYYVSYRRNAFAQMKLPKYALPKDMHVISTDENQVFAAVQEWNQNDTYNLYISDTRGVYFTLALENVQSSRGPEGNIMIDLYEVAGIKGMFLANKKIDNQVKTFITYNKGRDWRLLQAPDTDLRGDPVHCLLPYCSLHLHLKVSENPYTSGIIASKDTAPSIIVASGNIGSELSDTDISMFVSSDAGNTWRQIFEEEHSVLYLDQGGVLVAMKHTSLPIRHLWLSFDEGRSWSKYSFTSIPLFVDGVLGEPGEETLIMTVFGHFSHRSEWQLVKVDYKSIFDRRCAEEDYRPWQLHSQGEACIMGAKRIYKKRKSERKCMQGKYAGAMESEPCVCTEADFDCDYGYERHSNGQCLPAFWFNPSSLSKDCSLGQSYLNSTGYRKVVSNNCTDGVREQYTAKPQKCPGKAPRGLRIVTADGKLTAEQGHNVTLMVQLEEGDVQRTLIQVDFGDGIAVSYVNLSSMEDGIKHVYQNVGIFRVTVQVDNSLGSDSAVLYLHVTCPLEHVHLSLPFVTTKNKEVNATAVLWPSQVGTLTYVWWYGNNTEPLITLEGSISFRFTSEGMNTITVQVSAGNAILQDTKTIAVYEEFRSLRLSFSPNLDDYNPDIPEWRRDIGRVIKKSLVEATGVPGQHILVAVLPGLPTTAELFVLPYQDPAGENKRSTDDLEQISELLIHTLNQNSVHFELKPGVRVLVHAAHLTAAPLVDLTPTHSGSAMLMLLSVVFVGLAVFVIYKFKRRVALPSPPSPSTQPGDSSLRLQRARHATPPSTPKRGSAGAQYAI

SEQ ID NO: 12795 - protein, 56 aa, Artificial Sequence
  Synthetic polypeptide
VLTRSADLKVCGTSLLRTFSFLLAVRICACFSFAFHHDCKFPEASPTSPPVQPAEL

SEQ ID NO: 12796 - protein, 1025 aa, Artificial Sequence
  Synthetic polypeptide
GLPNQPSCTTCRTVILILTKLYDYNLGSITESSLWRSTDYGTTYEKLNDKVGLKTILSYLYVCPTNKRKIMLLTDPEIESSLLISSDEGATYQKYRLNFYIQSLLFHPKQEDWILAYSQDQKLYSSAEFGRRWQLIQEGVVPNRFYWSVMGSNKEPDLVHLEARTVDGHSHYLTCRMQNCTEANRNQPFPGYIDPDSLIVQDHYVFVQLTSGGRPHYYVSYRRNAFAQMKLPKYALPKDMHVISTDENQVFAAVQEWNQNDTYNLYISDTRGVYFTLALENVQSSRGPEGNIMIDLYEVAGIKGMFLANKKIDNQVKTFITYNKGRDWRLLQAPDTDLRGDPVHCLLPYCSLHLHLKVSENPYTSGIIASKDTAPSIIVASGNIGSELSDTDISMFVSSDAGNTWRQIFEEEHSVLYLDQGGVLVAMKHTSLPIRHLWLSFDEGRSWSKYSFTSIPLFVDGVLGEPGEETLIMTVFGHFSHRSEWQLVKVDYKSIFDRRCAEEDYRPWQLHSQGEACIMGAKRIYKKRKSERKCMQGKYAGAMESEPCVCTEADFDCDYGYERHSNGQCLPAFWFNPSSLSKDCSLGQSYLNSTGYRKVVSNNCTDGVREQYTAKPQKCPGKAPRGLRIVTADGKLTAEQGHNVTLMVQLEEGDVQRTLIQVDFGDGIAVSYVNLSSMEDGIKHVYQNVGIFRVTVQVDNSLGSDSAVLYLHVTCPLEHVHLSLPFVTTKNKEVNATAVLWPSQVGTLTYVWWYGNNTEPLITLEGSISFRFTSEGMNTITVQVSAGNAILQDTKTIAVYEEFRSLRLSFSPNLDDYNPDIPEWRRDIGRVIKKSLVEATGVPGQHILVAVLPGLPTTAELFVLPYQDPAGENKRSTDDLEQISELLIHTLNQNSVHFELKPGVRVLVHAAHLTAAPLVDLTPTHSGSAMLMLLSVVFVGLAVFVIYKFKRKIPGINVYAQMQNEKEQEMISPVSHSESRPNVPQTELRRPGQLIDEKVESQLIGSISIVAENQSTKEIPTYVNV

SEQ ID NO: 12797 - protein, 995 aa, Artificial Sequence
  Synthetic polypeptide
EYVLVSPLPSTMIVILILTKLYDYNLGSITESSLWRSTDYGTTYEKLNDKVGLKTILSYLYVCPTNKRKIMLLTDPEIESSLLISSDEGATYQKYRLNFYIQSLLFHPKQEDWILAYSQDQKLYSSAEFGRRWQLIQEGVVPNRFYWSVMGSNKEPDLVHLEARTVDGHSHYLTCRMQNCTEANRNQPFPGYIDPDSLIVQDHYVFVQLTSGGRPHYYVSYRRNAFAQMKLPKYALPKDMHVISTDENQVFAAVQEWNQNDTYNLYISDTRGVYFTLALENVQSSRGPEGNIMIDLYEVAGIKGMFLANKKIDNQVKTFITYNKGRDWRLLQAPDTDLRGDPVHCLLPYCSLHLHLKVSENPYTSGIIASKDTAPSIIVASGNIGSELSDTDISMFVSSDAGNTWRQIFEEEHSVLYLDQGGVLVAMKHTSLPIRHLWLSFDEGRSWSKYSFTSIPLFVDGVLGEPGEETLIMTVFGHFSHRSEWQLVKVDYKSIFDRRCAEEDYRPWQLHSQGEACIMGAKRIYKKRKSERKCMQGKYAGAMESEPCVCTEADFDCDYGYERHSNGQCLPAFWFNPSSLSKDCSLGQSYLNSTGYRKVVSNNCTDGVREQYTAKPQKCPGKAPRGLRIVTADGKLTAEQGHNVTLMVQLEEGDVQRTLIQVDFGDGIAVSYVNLSSMEDGIKHVYQNVGIFRVTVQVDNSLGSDSAVLYLHVTCPLEHVHLSLPFVTTKNKEVNATAVLWPSQVGTLTYVWWYGNNTEPLITLEGSISFRFTSEGMNTITVQVSAGNAILQDTKTIAVYEEFRSLRLSFSPNLDDYNPDIPEWRRDIGRVIKKSLVEATGVPGQHILVAVLPGLPTTAELFVLPYQDPAGENKRSTDDLEQISELLIHTLNQNSVHFELKPGVRVLVHAAHLTAAPLVDLTPTHSGSAMLMLLSVVFVGLAVFVIYKFKRRVALPSPPSPSTQPGDSSLRLQRARHATPPSTPKRGSAGAQYAI

SEQ ID NO: 12798 - protein, 47 aa, Artificial Sequence
  Synthetic polypeptide
VLTRSADLKVCGTSLLRTFSFLLAVRICACFSFAFHHDCDSHFDKAL

SEQ ID NO: 12799 - protein, 1025 aa, Artificial Sequence
  Synthetic polypeptide
EYVLVSPLPSTMIVILILTKLYDYNLGSITESSLWRSTDYGTTYEKLNDKVGLKTILSYLYVCPTNKRKIMLLTDPEIESSLLISSDEGATYQKYRLNFYIQSLLFHPKQEDWILAYSQDQKLYSSAEFGRRWQLIQEGVVPNRFYWSVMGSNKEPDLVHLEARTVDGHSHYLTCRMQNCTEANRNQPFPGYIDPDSLIVQDHYVFVQLTSGGRPHYYVSYRRNAFAQMKLPKYALPKDMHVISTDENQVFAAVQEWNQNDTYNLYISDTRGVYFTLALENVQSSRGPEGNIMIDLYEVAGIKGMFLANKKIDNQVKTFITYNKGRDWRLLQAPDTDLRGDPVHCLLPYCSLHLHLKVSENPYTSGIIASKDTAPSIIVASGNIGSELSDTDISMFVSSDAGNTWRQIFEEEHSVLYLDQGGVLVAMKHTSLPIRHLWLSFDEGRSWSKYSFTSIPLFVDGVLGEPGEETLIMTVFGHFSHRSEWQLVKVDYKSIFDRRCAEEDYRPWQLHSQGEACIMGAKRIYKKRKSERKCMQGKYAGAMESEPCVCTEADFDCDYGYERHSNGQCLPAFWFNPSSLSKDCSLGQSYLNSTGYRKVVSNNCTDGVREQYTAKPQKCPGKAPRGLRIVTADGKLTAEQGHNVTLMVQLEEGDVQRTLIQVDFGDGIAVSYVNLSSMEDGIKHVYQNVGIFRVTVQVDNSLGSDSAVLYLHVTCPLEHVHLSLPFVTTKNKEVNATAVLWPSQVGTLTYVWWYGNNTEPLITLEGSISFRFTSEGMNTITVQVSAGNAILQDTKTIAVYEEFRSLRLSFSPNLDDYNPDIPEWRRDIGRVIKKSLVEATGVPGQHILVAVLPGLPTTAELFVLPYQDPAGENKRSTDDLEQISELLIHTLNQNSVHFELKPGVRVLVHAAHLTAAPLVDLTPTHSGSAMLMLLSVVFVGLAVFVIYKFKRKIPGINVYAQMQNEKEQEMISPVSHSESRPNVPQTELRRPGQLIDEKVESQLIGSISIVAENQSTKEIPTYVNV

SEQ ID NO: 12800 - protein, 53 aa, Artificial Sequence
  Synthetic polypeptide
QAQLFSCVSLYCTSQVSYVSYKVEVCGSPAWSKSVSTIFLTCSRTDQTFCNDA

SEQ ID NO: 12801 - protein, 42 aa, Artificial Sequence
  Synthetic polypeptide
GTTVFMCITLLHFTGIICFLQSGGLWQPCMEQVCQHHLSNMF

SEQ ID NO: 12802 - protein, 561 aa, Artificial Sequence
  Synthetic polypeptide
LSEYIAPCDCRRAFVSGFDGSAGTAIITEEHAAMWTDGRYFLQAAKQMDSNWTLMKMGLKDTPTQEDWLVSVLPEGSRVGVDPLIIPTDYWKKMAKVLRSAGHHLIPVKENLVDKIWTDRPERPCKPLLTLGLDYTGISWKDKVADLRLKMAERNVMWFVVTALDEIAWLFNLRGSDVEHNPVFFSYAIIGLETIMLFIDGDRIDAPSVKEHLLLDLGLEAEYRIQVHPYKSILSELKALCADLSPREKVWVSDKASYAVSETIPKDHRCCMPYTPICIAKAVKNSAESEGMRRAHIKDAVALCELFNWLEKEVPKGGVTEISAADKAEEFRRQQADFVDLSFPTISSTGPNGAIIHYADGTTDVTRTMHFGTPTAYEKECFTYVLKGHIAVSAAVFPTGTKGHLLDSFARSALWDSGLDYLHGTGHGVGSFLNVHEGPCGISYKTFSDEPLEAGMIVTDEPGYYEDGAFGIRIENVVLVVPVKTKYNFNNRGSLTFEPLTLVPIQTKMIDVDSLTDKECDWLNNYHLTCRDVIGKELQKQGRQEALEWLIRETQPISKQH

SEQ ID NO: 12803 - protein, 58 aa, Artificial Sequence
  Synthetic polypeptide
PTINLVSILLHVTVGGLLSLDSMALRAQPSSQKSMQPCGLTGATFSRLPSKWTATGHL

SEQ ID NO: 12804 - protein, 585 aa, Artificial Sequence
  Synthetic polypeptide
LSEYIAPCDCRRAFVSGFDGSAGTAIITEEHAAMWTDGRYFLQAAKQMDSNWTLMKMGLKDTPTQEDWLVSVLPEGSRVGVDPLIIPTDYWKKMAKVLRSAGHHLIPVKENLVDKIWTDRPERPCKPLLTLGLDYTGISWKDKVADLRLKMAERNVMWFVVTALDEIAWLFNLRGSDVEHNPVFFSYAIIGLETIMLFIDGDRIDAPSVKEHLLLDLGLEAEYRIQVHPYKSILSELKALCADLSPREKVWVSDKASYAVSETIPKDHRCCMPYTPICIAKAVKNSAESEGMRRAHIKDAVALCELFNWLEKEVPKGGVTEISAADKAEEFRRQQADFVDLSFPTISSTGPNGAIIHYAPVPETNRTLSLDEVYLIDSGAQYKDGTTDVTRTMHFGTPTAYEKECFTYVLKGHIAVSAAVFPTGTKGHLLDSFARSALWDSGLDYLHGTGHGVGSFLNVHEGPCGISYKTFSDEPLEAGMIVTDEPGYYEDGAFGIRIENVVLVVPVKTKYNFNNRGSLTFEPLTLVPIQTKMIDVDSLTDKECDWLNNYHLTCRDVIGKELQKQGRQEALEWLIRETQPISKQH

SEQ ID NO: 12805 - protein, 265 aa, Artificial Sequence
  Synthetic polypeptide
LSEYIAPCDCRRAFVSGFDGSAGTAIITEEHAAMWTDGRYFLQAAKQMDSNWTLMKMGLKDTPTQEDWLVSVLPEGSRVGVDPLIIPTDYWKKMAKVLRSAGHHLIPVKENLVDKIWTDRPERPCKPLLTLGLDYTGISWKDKVADLRLKMAERNVMWFVVTALDEIAWLFNLRGSDVEHNPVFFSYAIIGLETIMLFIDGDRIDAPSVKEHLLLDLGLEAEYRIQVHPYKSILSELKALCADLSPREKVWVSDKASYAVSETIP

SEQ ID NO: 12806 - protein, 195 aa, Artificial Sequence
  Synthetic polypeptide
LSEYIAPCDCRRAFVSGFDGSAGTAIITEEHAAMWTDGRYFLQAAKQMDSNWTLMKMGLKDTPTQEDWLVSVLPEGSRVGVDPLIIPTDYWKKMAKVLRSAGHHLIPVKENLVDKIWTDRPERPCKPLLTLGLDYTGLFNLRGSDVEHNPVFFSYAIIGLETIMLFIDGDRIDAPSVKEHLLLDLGLEAEYRIQV

SEQ ID NO: 12807 - protein, 664 aa, Artificial Sequence
  Synthetic polypeptide
TRHTPASWPLHLLLSWNIVPLAVHMACFLTLFRVNHQDFQLRNLRIIEPNEVTHSGDTGVETDGRMPPKVTSELLRQLRQAMRNSEYVTEPIQAYIIPSGDAHQSEYIAPCDCRRAFVSGFDGSAGTAIITEEHAAMWTDGRYFLQAAKQMDSNWTLMKMGLKDTPTQEDWLVSVLPEGSRVGVDPLIIPTDYWKKMAKVLRSAGHHLIPVKENLVDKIWTDRPERPCKPLLTLGLDYTGISWKDKVADLRLKMAERNVMWFVVTALDEIAWLFNLRGSDVEHNPVFFSYAIIGLETIMLFIDGDRIDAPSVKEHLLLDLGLEAEYRIQVHPYKSILSELKALCADLSPREKVWVSDKASYAVSETIPKDHRCCMPYTPICIAKAVKNSAESEGMRRAHIKDAVALCELFNWLEKEVPKGGVTEISAADKAEEFRRQQADFVDLSFPTISSTGPNGAIIHYADGTTDVTRTMHFGTPTAYEKECFTYVLKGHIAVSAAVFPTGTKGHLLDSFARSALWDSGLDYLHGTGHGVGSFLNVHEGPCGISYKTFSDEPLEAGMIVTDEPGYYEDGAFGIRIENVVLVVPVKTKYNFNNRGSLTFEPLTLVPIQTKMIDVDSLTDKECDWLNNYHLTCRDVIGKELQKQGRQEALEWLIRETQPISKQH

SEQ ID NO: 12808 - protein, 12 aa, Artificial Sequence
  Synthetic polypeptide
PFTWLASSLFLG

SEQ ID NO: 12809 - protein, 688 aa, Artificial Sequence
  Synthetic polypeptide
TRHTPASWPLHLLLSWNIVPLAVHMACFLTLFRVNHQDFQLRNLRIIEPNEVTHSGDTGVETDGRMPPKVTSELLRQLRQAMRNSEYVTEPIQAYIIPSGDAHQSEYIAPCDCRRAFVSGFDGSAGTAIITEEHAAMWTDGRYFLQAAKQMDSNWTLMKMGLKDTPTQEDWLVSVLPEGSRVGVDPLIIPTDYWKKMAKVLRSAGHHLIPVKENLVDKIWTDRPERPCKPLLTLGLDYTGISWKDKVADLRLKMAERNVMWFVVTALDEIAWLFNLRGSDVEHNPVFFSYAIIGLETIMLFIDGDRIDAPSVKEHLLLDLGLEAEYRIQVHPYKSILSELKALCADLSPREKVWVSDKASYAVSETIPKDHRCCMPYTPICIAKAVKNSAESEGMRRAHIKDAVALCELFNWLEKEVPKGGVTEISAADKAEEFRRQQADFVDLSFPTISSTGPNGAIIHYAPVPETNRTLSLDEVYLIDSGAQYKDGTTDVTRTMHFGTPTAYEKECFTYVLKGHIAVSAAVFPTGTKGHLLDSFARSALWDSGLDYLHGTGHGVGSFLNVHEGPCGISYKTFSDEPLEAGMIVTDEPGYYEDGAFGIRIENVVLVVPVKTKYNFNNRGSLTFEPLTLVPIQTKMIDVDSLTDKECDWLNNYHLTCRDVIGKELQKQGRQEALEWLIRETQPISKQH

SEQ ID NO: 12810 - protein, 56 aa, Artificial Sequence
  Synthetic polypeptide
NSKPFLWPHSRPPGASMMLSLNHLPPHPLIQSHCADLLAFPQGESPGFSTEKFKNN

SEQ ID NO: 12811 - protein, 644 aa, Artificial Sequence
  Synthetic polypeptide
YNHTALTFLLFLRVNHQDFQLRNLRIIEPNEVTHSGDTGVETDGRMPPKVTSELLRQLRQAMRNSEYVTEPIQAYIIPSGDAHQSEYIAPCDCRRAFVSGFDGSAGTAIITEEHAAMWTDGRYFLQAAKQMDSNWTLMKMGLKDTPTQEDWLVSVLPEGSRVGVDPLIIPTDYWKKMAKVLRSAGHHLIPVKENLVDKIWTDRPERPCKPLLTLGLDYTGISWKDKVADLRLKMAERNVMWFVVTALDEIAWLFNLRGSDVEHNPVFFSYAIIGLETIMLFIDGDRIDAPSVKEHLLLDLGLEAEYRIQVHPYKSILSELKALCADLSPREKVWVSDKASYAVSETIPKDHRCCMPYTPICIAKAVKNSAESEGMRRAHIKDAVALCELFNWLEKEVPKGGVTEISAADKAEEFRRQQADFVDLSFPTISSTGPNGAIIHYADGTTDVTRTMHFGTPTAYEKECFTYVLKGHIAVSAAVFPTGTKGHLLDSFARSALWDSGLDYLHGTGHGVGSFLNVHEGPCGISYKTFSDEPLEAGMIVTDEPGYYEDGAFGIRIENVVLVVPVKTKYNFNNRGSLTFEPLTLVPIQTKMIDVDSLTDKECDWLNNYHLTCRDVIGKELQKQGRQEALEWLIRETQPISKQH

SEQ ID NO: 12812 - protein, 7 aa, Artificial Sequence
  Synthetic polypeptide
PSCFSSG

SEQ ID NO: 12813 - protein, 668 aa, Artificial Sequence
  Synthetic polypeptide
YNHTALTFLLFLRVNHQDFQLRNLRIIEPNEVTHSGDTGVETDGRMPPKVTSELLRQLRQAMRNSEYVTEPIQAYIIPSGDAHQSEYIAPCDCRRAFVSGFDGSAGTAIITEEHAAMWTDGRYFLQAAKQMDSNWTLMKMGLKDTPTQEDWLVSVLPEGSRVGVDPLIIPTDYWKKMAKVLRSAGHHLIPVKENLVDKIWTDRPERPCKPLLTLGLDYTGISWKDKVADLRLKMAERNVMWFVVTALDEIAWLFNLRGSDVEHNPVFFSYAIIGLETIMLFIDGDRIDAPSVKEHLLLDLGLEAEYRIQVHPYKSILSELKALCADLSPREKVWVSDKASYAVSETIPKDHRCCMPYTPICIAKAVKNSAESEGMRRAHIKDAVALCELFNWLEKEVPKGGVTEISAADKAEEFRRQQADFVDLSFPTISSTGPNGAIIHYAPVPETNRTLSLDEVYLIDSGAQYKDGTTDVTRTMHFGTPTAYEKECFTYVLKGHIAVSAAVFPTGTKGHLLDSFARSALWDSGLDYLHGTGHGVGSFLNVHEGPCGISYKTFSDEPLEAGMIVTDEPGYYEDGAFGIRIENVVLVVPVKTKYNFNNRGSLTFEPLTLVPIQTKMIDVDSLTDKECDWLNNYHLTCRDVIGKELQKQGRQEALEWLIRETQPISKQH

SEQ ID NO: 12814 - protein, 19 aa, Artificial Sequence
  Synthetic polypeptide
VIWPMGESPGFSTEKFKNN

SEQ ID NO: 12815 - protein, 648 aa, Artificial Sequence
  Synthetic polypeptide
DLVSGLGFAATELYGLWVNHQDFQLRNLRIIEPNEVTHSGDTGVETDGRMPPKVTSELLRQLRQAMRNSEYVTEPIQAYIIPSGDAHQSEYIAPCDCRRAFVSGFDGSAGTAIITEEHAAMWTDGRYFLQAAKQMDSNWTLMKMGLKDTPTQEDWLVSVLPEGSRVGVDPLIIPTDYWKKMAKVLRSAGHHLIPVKENLVDKIWTDRPERPCKPLLTLGLDYTGISWKDKVADLRLKMAERNVMWFVVTALDEIAWLFNLRGSDVEHNPVFFSYAIIGLETIMLFIDGDRIDAPSVKEHLLLDLGLEAEYRIQVHPYKSILSELKALCADLSPREKVWVSDKASYAVSETIPKDHRCCMPYTPICIAKAVKNSAESEGMRRAHIKDAVALCELFNWLEKEVPKGGVTEISAADKAEEFRRQQADFVDLSFPTISSTGPNGAIIHYADGTTDVTRTMHFGTPTAYEKECFTYVLKGHIAVSAAVFPTGTKGHLLDSFARSALWDSGLDYLHGTGHGVGSFLNVHEGPCGISYKTFSDEPLEAGMIVTDEPGYYEDGAFGIRIENVVLVVPVKTKYNFNNRGSLTFEPLTLVPIQTKMIDVDSLTDKECDWLNNYHLTCRDVIGKELQKQGRQEALEWLIRETQPISKQH

SEQ ID NO: 12816 - protein, 15 aa, Artificial Sequence
  Synthetic polypeptide
FLVLALRLLSYMAYG

SEQ ID NO: 12817 - protein, 672 aa, Artificial Sequence
  Synthetic polypeptide
DLVSGLGFAATELYGLWVNHQDFQLRNLRIIEPNEVTHSGDTGVETDGRMPPKVTSELLRQLRQAMRNSEYVTEPIQAYIIPSGDAHQSEYIAPCDCRRAFVSGFDGSAGTAIITEEHAAMWTDGRYFLQAAKQMDSNWTLMKMGLKDTPTQEDWLVSVLPEGSRVGVDPLIIPTDYWKKMAKVLRSAGHHLIPVKENLVDKIWTDRPERPCKPLLTLGLDYTGISWKDKVADLRLKMAERNVMWFVVTALDEIAWLFNLRGSDVEHNPVFFSYAIIGLETIMLFIDGDRIDAPSVKEHLLLDLGLEAEYRIQVHPYKSILSELKALCADLSPREKVWVSDKASYAVSETIPKDHRCCMPYTPICIAKAVKNSAESEGMRRAHIKDAVALCELFNWLEKEVPKGGVTEISAADKAEEFRRQQADFVDLSFPTISSTGPNGAIIHYAPVPETNRTLSLDEVYLIDSGAQYKDGTTDVTRTMHFGTPTAYEKECFTYVLKGHIAVSAAVFPTGTKGHLLDSFARSALWDSGLDYLHGTGHGVGSFLNVHEGPCGISYKTFSDEPLEAGMIVTDEPGYYEDGAFGIRIENVVLVVPVKTKYNFNNRGSLTFEPLTLVPIQTKMIDVDSLTDKECDWLNNYHLTCRDVIGKELQKQGRQEALEWLIRETQPISKQH

SEQ ID NO: 12818 - protein, 585 aa, Artificial Sequence
  Synthetic polypeptide
HFGRPRQEDHWRPGVQDQPGQHSLGMVTPINDLPGADTSSYVKGEKLTRCKLASLYRLVDLFGWAHLANTYISVRISKEQDHIIIIPRGLSFSEATASNLVKVNIIGEVVDQGSTNLKIDHTGFSPHAAIYSTRPDVKCVIHIHTLATAAVSSMKCGILPISQESLLLGDVAYYDYQGSLEEQEERIQLQKVLGPSCKVLVLRNHGVVALGETLEEAFHYIFNVQLACEIQVQALAGAGGVDNLHVLDFQKYKAFTYTVAASGGGGVNMGSHQKWKVGEIEFEGLMRTLDNLGYRTGYAYRHPLIREKPRHKSDVEIPATVTAFSFEDDTVPLSPLKYMAQRQQREKTRWLNSPNTYMKVNVPEESRNGETSPRTKITWMKAEDSSKVSGGTPIKIEDPNQFVPLNTNPNEVLEKRNKIREQNRYDLKTAGPQSQLLAGIVVDKPPSTMQFEDDDHGPPAPPNPFSHLTEGELEEYKRTIERKQQGLEENHELFSKSFISMEVPVMVVNGKDDMHDVEDELAKRVSRLSTSTTIENIEITIKSPEKIEEVLSPEGSPSKSPSKKKKKFRTPSFLKKNKKKEKVEA

SEQ ID NO: 12819 - protein, 52 aa, Artificial Sequence
  Synthetic polypeptide
MGTVAHVCNPSTLGGQGRRITGGQEFKTSLGNIVLAWSHLSMTFLVQIHPHM

SEQ ID NO: 12820 - protein, 617 aa, Artificial Sequence
  Synthetic polypeptide
HFGRPRQEDHWRPGVQDQPGQHSLGMVTPINDLPGADTSSYVKGEKLTRCKLASLYRLVDLFGWAHLANTYISVRISKEQDHIIIIPRGLSFSEATASNLVKVNIIGEVVDQGSTNLKIDHTGFSPHAAIYSTRPDVKCVIHIHTLATAAVSSMKCGILPISQESLLLGDVAYYDYQGSLEEQEERIQLQKVLGPSCKVLVLRNHGVVALGETLEEAFHYIFNVQLACEIQVQALAGAGGVDNLHVLDFQKYKAFTYTVAASGGGGVNMGSHQKWKVGEIEFEGLMRTLDNLGYRTGYAYRHPLIREKPRHKSDVEIPATVTAFSFEDDTVPLSPLKYMAQRQQREKTRWLNSPNTYMKVNVPEESRNGETSPRTKITWMKAEDSSKVSGGTPIKIEDPNQFVPLNTNPNEVLEKRNKIREQNRYDLKTAGPQSQLLAGIVVDKPPSTMQFEDDDHGPPAPPNPFSHLTEGELEEYKRTIERKQQGLEDAEQELLSDDASSVSQIQSQTQSPQNVPEKLEENHELFSKSFISMEVPVMVVNGKDDMHDVEDELAKRVSRLSTSTTIENIEITIKSPEKIEEVLSPEGSPSKSPSKKKKKFRTPSFLKKNKKKEKVEA

SEQ ID NO: 12821 - protein, 4 aa, Artificial Sequence
  Synthetic polypeptide
GQGV

SEQ ID NO: 12822 - protein, 237 aa, Artificial Sequence
  Synthetic polypeptide
AHVRGGVRACEGRGVRVWGGACEGRAMRVCEGRECEHGYASSFPSMPSPRLQHSKPPRRLSRAQKHSSGSSNTSTANRSTHNELEKNRRAHLRLCLERLKVLIPLGPDCTRHTTLGLLNKAKAHIKKLEEAERKSQHQLENLEREQRFLKWRLEQLQGPQEMERIRMDSIGSTISSDRSDSEREEIEVDVESTEFSHGEVDNISTTSISDIDDHSSLPSIGSDEGYSSASVKLSFTS

SEQ ID NO: 12823 - protein, 56 aa, Artificial Sequence
  Synthetic polypeptide
GEGCEHVRGGAYACGEGRVRGGPCVCVRAGSVNMATPLHSRPCRAPDCSIQSPHGG

SEQ ID NO: 12824 - protein, 168 aa, Artificial Sequence
  Synthetic polypeptide
AHVRGGVRACEGRGVRVWGGACEGRAMRVCEGRECEHGYASSFPSMPSPRLQHSKPPRRLSRAQKHSSGSSNTSTANRRAHLRLCLERLKVLIPLGPDCTRHTTLGLLNKAKAHIKKLEEAERKSQHQLENLEREQRFLKWRLEQLQGPQEMERIRMDSIGSTISSDR

SEQ ID NO: 12825 - protein, 227 aa, Artificial Sequence
  Synthetic polypeptide
AHVRGGVRACEGRGVRVWGGACEGRAMRVCEGRECEHGYASSFPSMPSPRLQHSKPPRRLSRAQKHSSGSSNTSTANRRAHLRLCLERLKVLIPLGPDCTRHTTLGLLNKAKAHIKKLEEAERKSQHQLENLEREQRFLKWRLEQLQGPQEMERIRMDSIGSTISSDRSDSEREEIEVDVESTEFSHGEVDNISTTSISDIDDHSSLPSIGSDEGYSSASVKLSFTS

SEQ ID NO: 12826 - protein, 64 aa, Artificial Sequence
  Synthetic polypeptide
GGRGVCGKGVRVWEGRARVGGAGAGRGARAWGGVCAEISVNMATPLHSRPCRAPDCSIQSPHGG

SEQ ID NO: 12827 - protein, 39 aa, Artificial Sequence
  Synthetic polypeptide
GGGACAGRACACGRGVRVWEGRVRGGARVRGEVCVLRSV

SEQ ID NO: 12828 - protein, 205 aa, Artificial Sequence
  Synthetic polypeptide
DQCEHGYASSFPSMPSPRLQHSKPPRRLSRAQKHSSGSSNTSTANRSTHNELEKNRRAHLRLCLERLKVLIPLGPDCTRHTTLGLLNKAKAHIKKLEEAERKSQHQLENLEREQRFLKWRLEQLQGPQEMERIRMDSIGSTISSDRSDSEREEIEVDVESTEFSHGEVDNISTTSISDIDDHSSLPSIGSDEGYSSASVKLSFTS

SEQ ID NO: 12829 - protein, 136 aa, Artificial Sequence
  Synthetic polypeptide
DQCEHGYASSFPSMPSPRLQHSKPPRRLSRAQKHSSGSSNTSTANRRAHLRLCLERLKVLIPLGPDCTRHTTLGLLNKAKAHIKKLEEAERKSQHQLENLEREQRFLKWRLEQLQGPQEMERIRMDSIGSTISSDR

SEQ ID NO: 12830 - protein, 195 aa, Artificial Sequence
  Synthetic polypeptide
DQCEHGYASSFPSMPSPRLQHSKPPRRLSRAQKHSSGSSNTSTANRRAHLRLCLERLKVLIPLGPDCTRHTTLGLLNKAKAHIKKLEEAERKSQHQLENLEREQRFLKWRLEQLQGPQEMERIRMDSIGSTISSDRSDSEREEIEVDVESTEFSHGEVDNISTTSISDIDDHSSLPSIGSDEGYSSASVKLSFTS

SEQ ID NO: 12831 - protein, 259 aa, Artificial Sequence
  Synthetic polypeptide
GGRGVCGKGVRVWEGRARVGGAGAGRGARAWGGVCAEIVSGGVCERSRRCWGRCEECEHGYASSFPSMPSPRLQHSKPPRRLSRAQKHSSGSSNTSTANRSTHNELEKNRRAHLRLCLERLKVLIPLGPDCTRHTTLGLLNKAKAHIKKLEEAERKSQHQLENLEREQRFLKWRLEQLQGPQEMERIRMDSIGSTISSDRSDSEREEIEVDVESTEFSHGEVDNISTTSISDIDDHSSLPSIGSDEGYSSASVKLSFTS

SEQ ID NO: 12832 - protein, 42 aa, Artificial Sequence
  Synthetic polypeptide
VEACVRGRAGAGGGARSVNMATPLHSRPCRAPDCSIQSPHGG

SEQ ID NO: 12833 - protein, 12 aa, Artificial Sequence
  Synthetic polypeptide
EVAQVLGEVRGV

SEQ ID NO: 12834 - protein, 190 aa, Artificial Sequence
  Synthetic polypeptide
GGRGVCGKGVRVWEGRARVGGAGAGRGARAWGGVCAEIVSGGVCERSRRCWGRCEECEHGYASSFPSMPSPRLQHSKPPRRLSRAQKHSSGSSNTSTANRRAHLRLCLERLKVLIPLGPDCTRHTTLGLLNKAKAHIKKLEEAERKSQHQLENLEREQRFLKWRLEQLQGPQEMERIRMDSIGSTISSDR

SEQ ID NO: 12835 - protein, 249 aa, Artificial Sequence
  Synthetic polypeptide
GGRGVCGKGVRVWEGRARVGGAGAGRGARAWGGVCAEIVSGGVCERSRRCWGRCEECEHGYASSFPSMPSPRLQHSKPPRRLSRAQKHSSGSSNTSTANRRAHLRLCLERLKVLIPLGPDCTRHTTLGLLNKAKAHIKKLEEAERKSQHQLENLEREQRFLKWRLEQLQGPQEMERIRMDSIGSTISSDRSDSEREEIEVDVESTEFSHGEVDNISTTSISDIDDHSSLPSIGSDEGYSSASVKLSFTS

SEQ ID NO: 12836 - protein, 26 aa, Artificial Sequence
  Synthetic polypeptide
CLPAMRKYVRGFSKAAGKLQSSAPAS

SEQ ID NO: 12837 - protein, 289 aa, Artificial Sequence
  Synthetic polypeptide
VLMRSEGFINVSQFLLHTFFSLLQPREEGPCFPFTFHPDCKFPDASQPCGNMSEDLAKQLASYKAQLQQVEAALSGNGENEDLLKLKKDLQEVIELTKDLLSTQPSETLASSDSFASTQPTHSWKVGDKCMAVWSEDGQCYEAEIEEIDEENGTAAITFAGYGNAEVTPLLNLKPVEEGRKAKEDSGNKPMSKKEMIAQQREYKKKKALKKAQRIKELEQEREDQKVKWQQFNNRAYSKNKKGQVKRSIFASPESVTGKVGVGTCGIADKPMTQYQDTSKYNVRHLMPQ

SEQ ID NO: 12838 - protein, 46 aa, Artificial Sequence
  Synthetic polypeptide
MFHSSSFTRFSLSCSHVKKVLASPSPSTLIVSFLMPPSHAEICQRI

SEQ ID NO: 12839 - protein, 79 aa, Artificial Sequence
  Synthetic polypeptide
VEGMKVGTQTLEAKAWLLRTRLEKRNRRAWKKALNQWADRRKKQSSLIRKTQGQRRNKIGRVKVRQRGRAGIPLTWRSW

SEQ ID NO: 12840 - protein, 28 aa, Artificial Sequence
  Synthetic polypeptide
EPGWKRGTGGHGRKPSISGQTGERSRVL

SEQ ID NO: 12841 - protein, 396 aa, Artificial Sequence
  Synthetic polypeptide
RYEGWNPDSGSKGLASENQAGKEEQEGMEESPQSVGRQEKEAEFSDPENTRTKKEQDWESESEAEGESWYPTNMEELVTVDEVGEEEDFIVEPDIPELEEIVPIDQKDKICPETCLCVTTTLDLDLAQDFPKEGVKAVGNGAAEISLKSPRELPSASTSCPSDMDVEMPGLNLDAERKPAESETGLSLEDSDCYEKEAKGVESSDVHPAPTVQQMSSPKPAEERARQPSPFVDDCKTRGTPEDGACEGSPLEEKASPPIETDLQNQACQEVLTPENSRYVEMKSLEVRSPEYTEVELKQPLSLPSWEPEDVFSELSIPLGVEFVVPRTGFYCKLCGLFYTSEETAKMSHCRSAVHYRNLQKYLSQLAEEGLKETEGADSPRPEDSGIVPRFERKKL

SEQ ID NO: 12842 - protein, 351 aa, Artificial Sequence
  Synthetic polypeptide
FISFKLHAILSSVMRSPAVQLHPPHPAQDENCVYETVVLPLDERAFEKTLTPIIQEYFEHGDTNEVAEMLRDLNLGEMKSGVPVLAVSLALEGKASHREMTSKLLSDLCGTVMSTTDVEKSFDKLLKDLPELALDTPRAPQLVGQFIARAVGDGILCNTYIDSYKGTVDCVQARAALDKATVLLSMSKGGKRKDSVWGSGGGQQSVNHLVKEIDMLLKEYLLSGDISEAEHCLKELEVPHFHHELVYEAIIMVLESTGESTFKMILDLLKSLWKSSTITVDQMKRGYERIYNEIPDINLDVPHSYSVLERFVEECFQAGIISKQLRDLCPSRGRKRFVSEGDGGRLKPESY

SEQ ID NO: 12843 - protein, 22 aa, Artificial Sequence
  Synthetic polypeptide
DLLLSSFIHLILPRMRTVFMKL

SEQ ID NO: 12844 - protein, 127 aa, Artificial Sequence
  Synthetic polypeptide
FISFKLHAILSSVMRSPAVQLHPPHPAQDENCVYETVVLPLDERAFEKTLTPIIQEYFEHGDTNEVAEMLRDLNLGEMKSGVPVLAVSLALEGKASHREMTSKLLSDLCGTVMSTTDVEKSFDKLLK

SEQ ID NO: 12845 - protein, 7 aa, Artificial Sequence
  Synthetic polypeptide
VRACVCV

SEQ ID NO: 12846 - protein, 20 aa, Artificial Sequence
  Synthetic polypeptide
CARVCVSEFPAAVHKDAFYL

SEQ ID NO: 12847 - protein, 698 aa, Artificial Sequence
  Synthetic polypeptide
ARVCVCLNFLLLFTKMLFIFNFLFSPLPTPALICILTFGAAIFLWLITRPQPVLPLLDLNNQSVGIEGGARKGVSQKNNDLTSCCFSDAKTMYEVFQRGLAVSDNGPCLGYRKPNQPYRWLSYKQVSDRAEYLGSCLLHKGYKSSPDQFVGIFAQNRPEWIISELACYTYSMVAVPLYDTLGPEAIVHIVNKADIAMVICDTPQKALVLIGNVEKGFTPSLKVIILMDPFDDDLKQRGEKSGIEILSLYDAENLGKEHFRKPVPPSPEDLSVICFTSGTTGDPKGAMITHQNIVSNAAAFLKCVEHAYEPTPDDVAISYLPLAHMFERIVQAVVYSCGARVGFFQGDIRLLADDMKTLKPTLFPAVPRLLNRIYDKVQNEAKTPLKKFLLKLAVSSKFKELQKGIIRHDSFWDKLIFAKIQDSLGGRVRVIVTGAAPMSTSVMTFFRAAMGCQVYEAYGQTECTGGCTFTLPGDWTSGHVGVPLACNYVKLEDVADMNYFTVNNEGEVCIKGTNVFKGYLKDPEKTQEALDSDGWLHTGDIGRWLPNGTLKIIDRKKNIFKLAQGEYIAPEKIENIYNRSQPVLQIFVHGESLRSSLVGVVVPDTDVLPSFAAKLGVKGSFEELCQNQVVREAILEDLQKIGKESGLKTFEQVKAIFLHPEPFSIENGLLTPTLKAKRGELSKYFRTQIDSLYEHIQD

SEQ ID NO: 12848 - protein, 15 aa, Artificial Sequence
  Synthetic polypeptide
VRLGEEARQWALLGI

SEQ ID NO: 12849 - protein, 643 aa, Artificial Sequence
  Synthetic polypeptide
SVKLENNLNTHDEIKSTIIEPFIDWPLKPLQRRDNDMKILRSDWERKQDNGPCLGYRKPNQPYRWLSYKQVSDRAEYLGSCLLHKGYKSSPDQFVGIFAQNRPEWIISELACYTYSMVAVPLYDTLGPEAIVHIVNKADIAMVICDTPQKALVLIGNVEKGFTPSLKVIILMDPFDDDLKQRGEKSGIEILSLYDAENLGKEHFRKPVPPSPEDLSVICFTSGTTGDPKGAMITHQNIVSNAAAFLKCVEHAYEPTPDDVAISYLPLAHMFERIVQAVVYSCGARVGFFQGDIRLLADDMKTLKPTLFPAVPRLLNRIYDKVQNEAKTPLKKFLLKLAVSSKFKELQKGIIRHDSFWDKLIFAKIQDSLGGRVRVIVTGAAPMSTSVMTFFRAAMGCQVYEAYGQTECTGGCTFTLPGDWTSGHVGVPLACNYVKLEDVADMNYFTVNNEGEVCIKGTNVFKGYLKDPEKTQEALDSDGWLHTGDIGRWLPNGTLKIIDRKKNIFKLAQGEYIAPEKIENIYNRSQPVLQIFVHGESLRSSLVGVVVPDTDVLPSFAAKLGVKGSFEELCQNQVVREAILEDLQKIGKESGLKTFEQVKAIFLHPEPFSIENGLLTPTLKAKRGELSKYFRTQIDSLYEHIQD

SEQ ID NO: 12850 - protein, 80 aa, Artificial Sequence
  Synthetic polypeptide
KYLGQIGRGSKTMGPAWDIENQTSPTDGYLTNRCLIEQSTWVPVSCIKVINHHQTSLSASLLRIGQSGSSPNWLVTRTLW

SEQ ID NO: 12851 - protein, 619 aa, Artificial Sequence
  Synthetic polypeptide
SVKLENNLNTHDEIKSTIIEPFIDWPLKPLQRRDNDMKILRSDWERKQDNGPCLGYRKPNQPYRWLSYKQVSDRAEYLGSCLLHKGYKSSPDQFVGIFAQNRPEWIISELACYTYSMVAVPLYDTLGPEAIVHIVNKADIAMVICDTPQKALVLIGNVEKGFTPSLKVIILMDPFDDDLKQRGEKSGIEILSLYDAENLGKEHFRKPVPPSPEDLSVICFTSGTTGDPKGAMITHQNIVSNAAAFLKCVEHAYEPTPDDVAISYLPLAHMFERIVQAVVYSCGARVGFFQGDIRLLADDMKTLKPTLFPAVPRLLNRIYDKVQNEAKTPLKKFLLKLAVSSKFKELQKGIIRHDSFWDKLIFAKIQDSLGGRVRVIVTGAAPMSTSVMTFFRAAMGCQVYEAYGQTECTGGCTFTLPGDWTSGHVGVPLACNYVKLEDVADMNYFTVNNEGEVCIKGTNVFKGYLKDPEKTQEALDSDGWLHTGDIGRWLPNGTLKIIDRKKNIFKLAQGEYIAPEKIENIYNRSQPVLQIFVHGESLRSSLVGVVVPDTDVLPSFAAKLGVKGSFEELCQNQVKAIFLHPEPFSIENGLLTPTLKAKRGELSKYFRTQIDSLYEHIQD

SEQ ID NO: 12852 - protein, 61 aa, Artificial Sequence
  Synthetic polypeptide
QPFQLGSARDLRLVFKYIKGHGSPTVTKYGMSSWGMMGIPQRTRGHICSITQRGWKGHLGD

SEQ ID NO: 12853 - protein, 132 aa, Artificial Sequence
  Synthetic polypeptide
AFSTGFCQRLKTCLQIYKRSRIAYSDEVRNELLGDDGNSSENQRAHLLDNTERLERSSRRLEAGYQIAVETEQIGQEMLENLSHDREKIQRARERLRETDANLGKSSRILTGMLRRGCSVKKQCNLSLAPKA

SEQ ID NO: 12854 - protein, 146 aa, Artificial Sequence
  Synthetic polypeptide
AFSTGFCQRLKTCLQIYKRSRIAYSDEVRNELLGDDGNSSENQRAHLLDNTERLERSSRRLEAGYQIAVETEQIGQEMLENLSHDREKIQRARERLRETDANLGKSSRILTGMLRRIIQNRILLVILGIIVVITILMAITFSVRRH

SEQ ID NO: 12855 - protein, 24 aa, Artificial Sequence
  Synthetic polypeptide
ANLLAIPGDISRKVANWSGDVGKP

SEQ ID NO: 12856 - protein, 43 aa, Artificial Sequence
  Synthetic polypeptide
HQQKSSKLVRRCWKTLVMTEKRYSEHVKDFGKQMLIWEKAPGF

SEQ ID NO: 12857 - protein, 68 aa, Artificial Sequence
  Synthetic polypeptide
HLILEWHNMSLNHMDPLRHGFSSASETARPTPSLPSLPPLPPQPTHPKDGKDEDLYDDPLPLNEYISR

SEQ ID NO: 12858 - protein, 62 aa, Artificial Sequence
  Synthetic polypeptide
TTWIHLDMDFLLPLRQQDQPLLFLLFLLFLLSQLIPKTARMKTFMMIHFHLMNISPDEMATA

SEQ ID NO: 12859 - protein, 345 aa, Artificial Sequence
  Synthetic polypeptide
IYLQMKWPLLDVQAGSLQSRQALKDARSPSPAHIVSNKVPVVQHPHHVHPLTPLITYSNEHFTPGNPPPHLPADVDPKTGIPRPPHPPDISPYYPLSPGTVGQIPHPLGWLVPQQGQPVYPITTGGFRHPYPTALTVNASMSRFPPHMVPPHHTLHTTGIPHPAIVTPTVKQESSQSDVGSLHSSKHQDSKKEEEKKKPHIKKPLNAFMLYMKEMRAKVVAECTLKESAAINQILGRRWHALSREEQAKYYELARKERQLHMQLYPGWSARDNYGKKKKRKRDKQPGETNEHSECFLNPCLSLPPITDLSAPKKCRARFGLDQQNNWCGPCRCKYSKEVSGTVRA

SEQ ID NO: 12860 - protein, 363 aa, Artificial Sequence
  Synthetic polypeptide
IYLQMKWPLLDVQAGSLQSRQALKDARSPSPAHIVSPLPCCTQGHDCQHFYPPSDFTVSTQVFRDMKRSHSLQKVGEPWCIESNKVPVVQHPHHVHPLTPLITYSNEHFTPGNPPPHLPADVDPKTGIPRPPHPPDISPYYPLSPGTVGQIPHPLGWLVPQQGQPVYPITTGGFRHPYPTALTVNASMSRFPPHMVPPHHTLHTTGIPHPAIVTPTVKQESSQSDVGSLHSSKHQDSKKEEEKKKPHIKKPLNAFMLYMKEMRAKVVAECTLKESAAINQILGRRWHALSREEQAKYYELARKERQLHMQLYPGWSARDNYGKKKKRKRDKQPGETNGEKKSAFATYKVKAAASAHPLQMEAY

SEQ ID NO: 12861 - protein, 470 aa, Artificial Sequence
  Synthetic polypeptide
IYLQMKWPLLDVQAGSLQSRQALKDARSPSPAHIVSNKVPVVQHPHHVHPLTPLITYSNEHFTPGNPPPHLPADVDPKTGIPRPPHPPDISPYYPLSPGTVGQIPHPLGWLVPQQGQPVYPITTGGFRHPYPTALTVNASMSRFPPHMVPPHHTLHTTGIPHPAIVTPTVKQESSQSDVGSLHSSKHQDSKKEEEKKKPHIKKPLNAFMLYMKEMRAKVVAECTLKESAAINQILGRRWHALSREEQAKYYELARKERQLHMQLYPGWSARDNYGKKKKRKRDKQPGETNEHSECFLNPCLSLPPITDLSAPKKCRARFGLDQQNNWCGPCRRKKKCVRYIQGEGSCLSPPSSDGSLLDSPPPSPNLLGSPPRDAKSQTEQTQPLSLSLKPDPLAHLSMMPPPPALLLAEATHKASALCPNGALDLPPAALQPAAPSSSIAQPSTSSLHSHSSLAGTQPQPLSLVTKSLE

SEQ ID NO: 12862 - protein, 453 aa, Artificial Sequence
  Synthetic polypeptide
IYLQMKWPLLDVQAGSLQSRQALKDARSPSPAHIVSNKVPVVQHPHHVHPLTPLITYSNEHFTPGNPPPHLPADVDPKTGIPRPPHPPDISPYYPLSPGTVGQIPHPLGWLVPQQGQPVYPITTGGFRHPYPTALTVNASMSRFPPHMVPPHHTLHTTGIPHPAIVTPTVKQESSQSDVGSLHSSKHQDSKKEEEKKKPHIKKPLNAFMLYMKEMRAKVVAECTLKESAAINQILGRRWHALSREEQAKYYELARKERQLHMQLYPGWSARDNYGKKKKRKRDKQPGETNDLSAPKKCRARFGLDQQNNWCGPCRRKKKCVRYIQGEGSCLSPPSSDGSLLDSPPPSPNLLGSPPRDAKSQTEQTQPLSLSLKPDPLAHLSMMPPPPALLLAEATHKASALCPNGALDLPPAALQPAAPSSSIAQPSTSSLHSHSSLAGTQPQPLSLVTKSLE

SEQ ID NO: 12863 - protein, 333 aa, Artificial Sequence
  Synthetic polypeptide
IYLQMKWPLLDVQAGSLQSRQALKDARSPSPAHIVSNKVPVVQHPHHVHPLTPLITYSNEHFTPGNPPPHLPADVDPKTGIPRPPHPPDISPYYPLSPGTVGQIPHPLGWLVPQQGQPVYPITTGGFRHPYPTALTVNASMSRFPPHMVPPHHTLHTTGIPHPAIVTPTVKQESSQSDVGSLHSSKHQDSKKEEEKKKPHIKKPLNAFMLYMKEMRAKVVAECTLKESAAINQILGRRWHALSREEQAKYYELARKERQLHMQLYPGWSARDNYGKKKKRKRDKQPGETNEHSECFLNPCLSLPPITGEKKSAFATYKVKAAASAHPLQMEAY

SEQ ID NO: 12864 - protein, 453 aa, Artificial Sequence
  Synthetic polypeptide
IYLQMKWPLLDVQAGSLQSRQALKDARSPSPAHIVSNKVPVVQHPHHVHPLTPLITYSNEHFTPGNPPPHLPADVDPKTGIPRPPHPPDISPYYPLSPGTVGQIPHPLGWLVPQQGQPVYPITTGGFRHPYPTALTVNASMSRFPPHMVPPHHTLHTTGIPHPAIVTPTVKQESSQSDVGSLHSSKHQDSKKEEEKKKPHIKKPLNAFMLYMKEMRAKVVAECTLKESAAINQILGRRWHALSREEQAKYYELARKERQLHMQLYPGWSARDNYGKKKKRKRDKQPGETNDANTPKKCRALFGLDRQTLWCKPCRRKKKCVRYIQGEGSCLSPPSSDGSLLDSPPPSPNLLGSPPRDAKSQTEQTQPLSLSLKPDPLAHLSMMPPPPALLLAEATHKASALCPNGALDLPPAALQPAAPSSSIAQPSTSSLHSHSSLAGTQPQPLSLVTKSLE

SEQ ID NO: 12865 - protein, 470 aa, Artificial Sequence
  Synthetic polypeptide
IYLQMKWPLLDVQAGSLQSRQALKDARSPSPAHIVSNKVPVVQHPHHVHPLTPLITYSNEHFTPGNPPPHLPADVDPKTGIPRPPHPPDISPYYPLSPGTVGQIPHPLGWLVPQQGQPVYPITTGGFRHPYPTALTVNASMSRFPPHMVPPHHTLHTTGIPHPAIVTPTVKQESSQSDVGSLHSSKHQDSKKEEEKKKPHIKKPLNAFMLYMKEMRAKVVAECTLKESAAINQILGRRWHALSREEQAKYYELARKERQLHMQLYPGWSARDNYGKKKKRKRDKQPGETNEHSECFLNPCLSLPPITDANTPKKCRALFGLDRQTLWCKPCRRKKKCVRYIQGEGSCLSPPSSDGSLLDSPPPSPNLLGSPPRDAKSQTEQTQPLSLSLKPDPLAHLSMMPPPPALLLAEATHKASALCPNGALDLPPAALQPAAPSSSIAQPSTSSLHSHSSLAGTQPQPLSLVTKSLE

SEQ ID NO: 12866 - protein, 139 aa, Artificial Sequence
  Synthetic polypeptide
IYLQMKWPLLDVQAGSLQSRQALKDARSPSPAHIVSNKVPVVQHPHHVHPLTPLITYSNEHFTPGNPPPHLPADVDPKTGIPRPPHPPDISPYYPLSPGTVGQIPHPLGWQGQPVYPITTGGFRHPYPTALTVNASMSR

SEQ ID NO: 12867 - protein, 333 aa, Artificial Sequence
  Synthetic polypeptide
IYLQMKWPLLDVQAGSLQSRQALKDARSPSPAHIVSNKVPVVQHPHHVHPLTPLITYSNEHFTPGNPPPHLPADVDPKTGIPRPPHPPDISPYYPLSPGTVGQIPHPLGWLVPQQGQPVYPITTGGFRHPYPTALTVNASMSRFPPHMVPPHHTLHTTGIPHPAIVTPTVKQESSQSDVGSLHSSKHQDSKKEEEKKKPHIKKPLNAFMLYMKEMRAKVVAECTLKESAAINQILGRRWHALSREEQAKYYELARKERQLHMQLYPGWSARDNYGKKKKRKRDKQPGETNEHSECFLNPCLSLPPITDLSAPKKCRARFGLDQQNNWCGPCSL

SEQ ID NO: 12868 - protein, 191 aa, Artificial Sequence
  Synthetic polypeptide
IYLQMKWPLLDVQAGSLQSRQALKDARSPSPAHIVQSPLPCCTQGHDCQHFYPPSDFTVSTQVFRDMKRSHSLQKVGEPWCIESNKVPVVQHPHHVHPLTPLITYSNEHFTPGNPPPHLPADVDPKTGIPRPPHPPDISPYYPLSPGTVGQIPHPLGWLVPQQGQPVYPITTGGFRHPYPTALTVNASMSR

SEQ ID NO: 12869 - protein, 126 aa, Artificial Sequence
  Synthetic polypeptide
IYLQMKWPLLDVQAGSLQSRQALKDARSPSPAHIVSPLPCCTQGHDCQHFYPPSDFTVSTQVFRDMKRSHSLQKVGEPWCIESNKVPVVQHPHHVHPLTPLITYSNEHFTPGNPPPHLPADVDPKT

SEQ ID NO: 12870 - protein, 16 aa, Artificial Sequence
  Synthetic polypeptide
ELKDLEIKTQSTGLFT

SEQ ID NO: 12871 - protein, 703 aa, Artificial Sequence
  Synthetic polypeptide
KIWKLKHRARGCSPDIRQIDLDVNRTFRDHIMFRDRYGVKQQSLFHVLAAYSIYNTEVGYCQGMSQITALLLMYMNEEDAFWALVKLFSGPKHAMHGFFVQGFPKLLRFQEHHEKILNKFLSKLKQHLDSQEIYTSFYTMKWFFQCFLDRTPFTLNLRIWDIYIFEGERVLTAMSYTILKLHKKHLMKLSMEELVEFFQETLAKDFFFEDDFVIEQLQISMTELKRAKLDLPEPGKEDEYPKKPLGQLPPELQSWGVHHLSNGQRSVGRPSPLASGRRESGAPHRRHEHSPHPQSRTGTPERAQPPRRKSVEEESKKLKDEADFQRKLPSGPQDSSRQYNHAAANQNSNATSNIRKEFVPKWNKPSDVSATERTAKYTMEGKGRAAHPALAVTVPGPAEVRVSNVRPKMKALDAEDGKRGSTASQYDNVPGPELDSGASVEEALERAYSQSPRHALYPPSPRKHAEPSSSPSKVSNKFTFKVQPPSHARYPSQLDGEARGLAHPPSYSNPPVYHGNSPKHFPTANSSFASPQFSPGTQLNPSRRPHGSTLSVSASPEKSYSRPSPLVLPSSRIEVLPVDTGAGGYSGNSGSPKNGKLIIPPVDYLPDNRTWSEVSYTYRPETQGQSWTRDASRGNLPKYSAFQLAPFQDHGLPAVSVDSPVRYKASPAAEDASPSGYPYSGPPPPAYHYRNRDGLSIQESVLL

SEQ ID NO: 12872 - protein, 10 aa, Artificial Sequence
  Synthetic polypeptide
RCLRAERFGN

SEQ ID NO: 12873 - protein, 718 aa, Artificial Sequence
  Synthetic polypeptide
RQHLGRRPLPGGPRSSSSKLKHRARGCSPDIRQIDLDVNRTFRDHIMFRDRYGVKQQSLFHVLAAYSIYNTEVGYCQGMSQITALLLMYMNEEDAFWALVKLFSGPKHAMHGFFVQGFPKLLRFQEHHEKILNKFLSKLKQHLDSQEIYTSFYTMKWFFQCFLDRTPFTLNLRIWDIYIFEGERVLTAMSYTILKLHKKHLMKLSMEELVEFFQETLAKDFFFEDDFVIEQLQISMTELKRAKLDLPEPGKEDEYPKKPLGQLPPELQSWGVHHLSNGQRSVGRPSPLASGRRESGAPHRRHEHSPHPQSRTGTPERAQPPRRKSVEEESKKLKDEADFQRKLPSGPQDSSRQYNHAAANQNSNATSNIRKEFVPKWNKPSDVSATERTAKYTMEGKGRAAHPALAVTVPGPAEVRVSNVRPKMKALDAEDGKRGSTASQYDNVPGPELDSGASVEEALERAYSQSPRHALYPPSPRKHAEPSSSPSKVSNKFTFKVQPPSHARYPSQLDGEARGLAHPPSYSNPPVYHGNSPKHFPTANSSFASPQFSPGTQLNPSRRPHGSTLSVSASPEKSYSRPSPLVLPSSRIEVLPVDTGAGGYSGNSGSPKNGKLIIPPVDYLPDNRTWSEVSYTYRPETQGQSWTRDASRGNLPKYSAFQLAPFQDHGLPAVSVDSPVRYKASPAAEDASPSGYPYSGPPPPAYHYRNRDGLSIQESVLL

SEQ ID NO: 12874 - protein, 46 aa, Artificial Sequence
  Synthetic polypeptide
EVTRRQECEPSVMPGQGHQRAPWSSGNASIWEDARCQADRGLAVAN

SEQ ID NO: 12875 - protein, 227 aa, Artificial Sequence
  Synthetic polypeptide
VLMRSDGFMCLTVPPTHTLSLLLPCKTCLLPLPPCFPSHVELKKKKNVTMRSIKTTRDRVPTYQYNMNFEKLGKCIIINNKNFDKVTGMGVRNGTDKDAEALFKCFRSLGFDVIVYNDCSCAKMQDLLKKASEEDHTNAACFACILLSHGEENVIYGKDGVTPIKDLTAHFRGDRCKTLLEKPKLFFIQACRGTELDDGIQADSGPINDTDANPRYKIPVEADFLFA

SEQ ID NO: 12876 - protein, 55 aa, Artificial Sequence
  Synthetic polypeptide
RFLLHTLCLSCCHVRHVCSPFHHASPAMWNLRRRKMSPCDPSRPPGTECLHISTT

SEQ ID NO: 12877 - protein, 258 aa, Artificial Sequence
  Synthetic polypeptide
VLMRSDGFMCLTVPPTHTLSLLLPCKTCLLPLPPCFPSHVELKKKKNVTMRSIKTTRDRVPTYQYNMNFEKLGKCIIINNKNFDKVTGMGVRNGTDKDAEALFKCFRSLGFDVIVYNDCSCAKMQDLLKKASEEDHTNAACFACILLSHGEENMESCSVTQAGVQRRDLGRLQPPPPRLAEGPSLMMASRPTRGPSMTQMLILDTRSQWKLTSSSPIPRFQAITRGGAQEEAPGLCKPSAPSWRSTEKTWKSCRSSPG

SEQ ID NO: 12878 - protein, 308 aa, Artificial Sequence
  Synthetic polypeptide
VLMRSDGFMCLTVPPTHTLSLLLPCKTCLLPLPPCFPSHVELKKKKNVTMRSIKTTRDRVPTYQYNMNFEKLGKCIIINNKNFDKVTGMGVRNGTDKDAEALFKCFRSLGFDVIVYNDCSCAKMQDLLKKASEEDHTNAACFACILLSHGEENVIYGKDGVTPIKDLTAHFRGDRCKTLLEKPKLFFIQACRGTELDDGIQADSGPINDTDANPRYKIPVEADFLFAYSTVPGYYSWRSPGRGSWFVQALCSILEEHGKDLEIMQILTRVNDRVARHFESQSDDPHFHEKKQIPCVVSMLTKELYFSQ

SEQ ID NO: 12879 - protein, 888 aa, Artificial Sequence
  Synthetic polypeptide
PECPDGLLCTSTIPFHYKRYTHFLLAQSRAGDHPFSSPSPASGGSFSETKSGVLCSLEERWSSYQNQTDNSVSNDPLLMTQYFKKSPSLTEASEKISTHIQTSQQALQFTDFVENDKLVGVALRLANNSEHINLPLPENDFSDCEISYSPLQSDEDTHDIDEKPDDSQEQLFFTESSKDGSLEEDDDSCGFFKKRHGPLLKDQDESCPKVNSFLTRDKYDEGLYRFNSLNDLSQPISQNNESTLPYDLACTGGDFVLFPPALAGKLAASVHQATKAKPDEPEFHSAQSNKQKQVIEESSVYNQVSLPLVKSLMLKPFESQVEGYLSSQPTQNTIRKLSSENLNAKNNTNSACFCRKALEGVPVGKATILNTENLSSTPAPKYLKILPSGLKYNARHPSTKVMKQMDIGVYFGLPPKRKEEKLLGESALEGINLNPVPSPNQKRSSQCKRKAEKSLSDLEFDASTLHESQLSVELSSERSQRQKKRCRKSNSLQEGACQKRSDHLINTESEAVNLSKVKVFTKSAHGGLQRGNKKIPESSNVGGSRKKTCPFYKKIPGTGFTVDAFQYGVVEGCTAYFLTHFHSDHYAGLSKHFTFPVYCSEITGNLLKNKLHVQEQYIHPLPLDTECIVNGVKVVLLDANHCPGAVMILFYLPNGTVILHTGDFRADPSMERSLLADQKVHMLYLDTTYCSPEYTFPSQQEVIRFAINTAFEAVTLNPHALVVCGTYSIGKEKVFLAIADVLGSKVGMSQEKYKTLQCLNIPEINSLITTDMCSSLVHLLPMMQINFKGLQSHLKKCGGKYNQILAFRPTGWTHSNKFTRIADVIPQTKGNISIYGIPYSEHSSYLEMKRFVQWLKPQKIIPTVNVGTWKSRSTMEKYFREWKLEAGY

SEQ ID NO: 12880 - protein, 62 aa, Artificial Sequence
  Synthetic polypeptide
SQYFGRWRQADHLSLGIQDQPVQHGETPSLQKKLPKISQSVLMVFCVPQPFLFITRDTLTSC

SEQ ID NO: 12881 - protein, 26 aa, Artificial Sequence
  Synthetic polypeptide
EFKTSLCNMVKPHLYKKNYQKLARVS

SEQ ID NO: 12882 - protein, 911 aa, Artificial Sequence
  Synthetic polypeptide
SQYFGRWRQADHLSLGIQDQPVQHECPDGLLCTSTIPFHYKRYTHFLLAQSRAGDHPFSSPSPASGGSFSETKSGVLCSLEERWSSYQNQTDNSVSNDPLLMTQYFKKSPSLTEASEKISTHIQTSQQALQFTDFVENDKLVGVALRLANNSEHINLPLPENDFSDCEISYSPLQSDEDTHDIDEKPDDSQEQLFFTESSKDGSLEEDDDSCGFFKKRHGPLLKDQDESCPKVNSFLTRDKYDEGLYRFNSLNDLSQPISQNNESTLPYDLACTGGDFVLFPPALAGKLAASVHQATKAKPDEPEFHSAQSNKQKQVIEESSVYNQVSLPLVKSLMLKPFESQVEGYLSSQPTQNTIRKLSSENLNAKNNTNSACFCRKALEGVPVGKATILNTENLSSTPAPKYLKILPSGLKYNARHPSTKVMKQMDIGVYFGLPPKRKEEKLLGESALEGINLNPVPSPNQKRSSQCKRKAEKSLSDLEFDASTLHESQLSVELSSERSQRQKKRCRKSNSLQEGACQKRSDHLINTESEAVNLSKVKVFTKSAHGGLQRGNKKIPESSNVGGSRKKTCPFYKKIPGTGFTVDAFQYGVVEGCTAYFLTHFHSDHYAGLSKHFTFPVYCSEITGNLLKNKLHVQEQYIHPLPLDTECIVNGVKVVLLDANHCPGAVMILFYLPNGTVILHTGDFRADPSMERSLLADQKVHMLYLDTTYCSPEYTFPSQQEVIRFAINTAFEAVTLNPHALVVCGTYSIGKEKVFLAIADVLGSKVGMSQEKYKTLQCLNIPEINSLITTDMCSSLVHLLPMMQINFKGLQSHLKKCGGKYNQILAFRPTGWTHSNKFTRIADVIPQTKGNISIYGIPYSEHSSYLEMKRFVQWLKPQKIIPTVNVGTWKSRSTMEKYFREWKLEAGY

SEQ ID NO: 12883 - protein, 32 aa, Artificial Sequence
  Synthetic polypeptide
EFKTSLCNMSVLMVFCVPQPFLFITRDTLTSC

SEQ ID NO: 12884 - protein, 45 aa, Artificial Sequence
  Synthetic polypeptide
GLCEVMCMRDSHSACHTVRNKDGVLPCHPGWSAVAQSRLTASSAS

SEQ ID NO: 12885 - protein, 27 aa, Artificial Sequence
  Synthetic polypeptide
GIKTESCPVTQAGVQWRNLGSLQAPPP

SEQ ID NO: 12886 - protein, 59 aa, Artificial Sequence
  Synthetic polypeptide
YMWPTLRTLTTHQRSLSFTAINVGSLARVKCFGSRPNISTSSVSPAKCVAVTWHKGASS

SEQ ID NO: 12887 - protein, 75 aa, Artificial Sequence
  Synthetic polypeptide
GWPLNNMGLNCVGPLLCGFFSASASPEIARPTPSLPPRTQCKDDKDLCDDPLPFNTCGPPSGPSPPIREACHSLP

SEQ ID NO: 12888 - protein, 662 aa, Artificial Sequence
  Synthetic polypeptide
QDQPLLFLRVLNVKMTRTFVMIHFHLIHVAHPQDPHHPSEKPVIHCHKCGEPCKGEVLRVQTKHFHIKCFTCKVCGCDLAQGGFFIKNGEYLCTLDYQRMYGTRCHGCGEFVEGEVVTALGKTYHPNCFACTICKRPFPPGDRVTFNGRDCLCQLCAQPMSSSPKETTFSSNCAGCGRDIKNGQALLALDKQWHLGCFKCKSCGKVLTGEYISKDGAPYCEKDYQGLFGVKCEACHQFITGKVLEAGDKHYHPSCARCSRCNQMFTEGEEMYLQGSTVWHPDCKQSTKTEEKLRPTRTSSESIYSRPGSSIPGSPGHTIYAKVDNEILDYKDLAAIPKVKAIYDIERPDLITYEPFYTSGYDDKQERQSLGESPRTLSPTPSAEGYQDVRDRMIHRSTSQGSINSPVYSRHSYTPTTSRSPQHFHRPGNEPSSGRNSPLPYRPDSRPLTPTYAQAPKHFHVPDQGINIYRKPPIYKQHAALAAQSKSSEDIIKFSKFPAAQAPDPSETPKIETDHWPGPPSFAVVGPDMKRRSSGREEDDEELLRRRQLQEEQLMKLNSGLGQLILKEEMEKESRERSSLLASRYDSPINSASHIPSSKTASLPGYGRNGLHRPVSTDFAQYNSYGDVSGGVRDTPRWPHACNENGPRSVYAQHVGTKDISI

SEQ ID NO: 12889 - protein, 725 aa, Artificial Sequence
  Synthetic polypeptide
QDQPLLFLRVLNVKMTRTFVMIHFHLIHVAHPQDPHHPSEKPVIHCHKCGEPCKGEVLRVQTKHFHIKCFTCKVCGCDLAQGGFFIKNGEYLCTLDYQRMYGTRCHGCGEFVEGEVVTALGKTYHPNCFACTICKRPFPPGDRVTFNGRDCLCQLCAQPMSSSPKETTFSSNCAGCGRDIKNGQALLALDKQWHLGCFKCKSCGKVLTGEYISKDGAPYCEKDYQGLFGVKCEACHQFITGKVLEAGDKHYHPSCARCSRCNQMFTEGEEMYLQGSTVWHPDCKQSTKTEEKLRPTRTSSESIYSRPGSSIPGSPGHTIYAKVDNEILDYKDLAAIPKVKAIYDIERPDLITYEPFYTSGYDDKQERQSLGESPRTLSPTPSAEGYQDVRDRMIHRSTSQGSINSPVYSRHSYTPTTSRSPQHFHRPGNEPSSGRNSPLPYRPDSRPLTPTYAQAPKHFHVPDQGINIYRKPPIYKQHAALAAQSKSSEDIIKFSKFPAAQAPDPSETPKIETDHWPGPPSFAVVGPDMKRRSSGREEDDEELLRRRQLQEEQLMKLNSGLGQLILKEEMEKESRERSSLLASRYDSPINSASHIPSSKTASLPGYGRNGLHRPVSTDFAQYNSYGDVSGGVRDYQTLPDGHMPAMRMDRGVSMPNMLEPKIFPYEMLMVTNRGRNKILREVDRTRLERHLAPEVFREIFGMSIQEFDRLPLWRRNDMKKKAKLF

SEQ ID NO: 12890 - protein, 725 aa, Artificial Sequence
  Synthetic polypeptide
QDQPLLFLRVLNVKMTRTFVMIHFHLIHVAHPQDPHHPSEKPVIHCHKCGEPCKGEVLRVQTKHFHIKCFTCKVCGCDLAQGGFFIKNGEYLCTLDYQRMYGTRCHGCGEFVEGEVVTALGKTYHPNCFACTICKRPFPPGDRVTFNGRDCLCQLCAQPMSSSPKETTFSSNCAGCGRDIKNGQALLALDKQWHLGCFKCKSCGKVLTGEYISKDGAPYCEKDYQGLFGVKCEACHQFITGKVLEAGDKHYHPSCARCSRCNQMFTEGEEMYLQGSTVWHPDCKQSTKTEEKLRPTRTSSESIYSRPGSSIPGSPGHTIYAKVDNEILDYKDLAAIPKVKAIYDIERPDLITYEPFYTSGYDDKQERQSLGESPRTLSPTPSAEGYQDVRDRMIHRSTSQGSINSPVYSRHSYTPTTSRSPQHFHRPGNEPSSGRNSPLPYRPDSRPLTPTYAQAPKHFHVPDQGINIYRKPPIYKQHAALAAQSKSSEDIIKFSKFPAAQAPDPSETPKIETDHWPGPPSFAVVGPDMKRRSSGREEDDEELLRRRQLQEEQLMKLNSGLGQLILKEEMEKESRERSSLLASRYDSPINSASHIPSSKTASLPGYGRNGLHRPVSTDFAQYNSYGDVSGGVRDFQTLPDGHMPAMRMDRGVSMPNMLEPKIFPYEMLMVTNRGRNKILREVDRTRLERHLAPEVFREIFGMSIQEFDRLPLWRRNDMKKKAKLF

SEQ ID NO: 12891 - protein, 695 aa, Artificial Sequence
  Synthetic polypeptide
QDQPLLFLRVLNVKMTRTFVMIHFHLIHVAHPQDPHHPSEKPVIHCHKCGEPCKGEVLRVQTKHFHIKCFTCKVCGCDLAQGGFFIKNGEYLCTLDYQRMYGTRCHGCGEFVEGEVVTALGKTYHPNCFACTICKRPFPPGDRVTFNGRDCLCQLCAQPMSSSPKETTFSSNCAGCGRDIKNGQALLALDKQWHLGCFKCKSCGKVLTGEYISKDGAPYCEKDYQGLFGVKCEACHQFITGKVLEAGDKHYHPSCARCSRCNQMFTEGEEMYLQGSTVWHPDCKQSTKTEEKLRLPNIRRSSSDFFYSKSLIRRTGRSPSLQPTRTSSESIYSRPGSSIPGSPGHTIYAKVDNEILDYKDLAAIPKVKAIYDIERPDLITYEPFYTSGYDDKQERQSLGESPRTLSPTPSAEGYQDVRDRMIHRSTSQGSINSPVYSRHSYTPTTSRSPQHFHRPGNEPSSGRNSPLPYRPDSRPLTPTYAQAPKHFHVPDQGINIYRKPPIYKQHDAAALAAQSKSSEDIIKFSKFPAAQAPDPSETPKIETDHWPGPPSFAVVGPDMKRRSSGREEDDEELLRRRQLQEEQLMKLNSGLGQLILKEEMEKESRERSSLLASRYDSPINSASHIPSSKTASLPGYGRNGLHRPVSTDFAQYNSYGDVSGGVRDYQTLPDGHMPAMRMDRGVSMPNMLEPKIFPY

SEQ ID NO: 12892 - protein, 54 aa, Artificial Sequence
  Synthetic polypeptide
VLRRSDGFTSIWHFPCWHSFSFLLPCEEVPFTLIISFLRLPQPFGTEKKFAMKG

SEQ ID NO: 12893 - protein, 13 aa, Artificial Sequence
  Synthetic polypeptide
GFPSHLELKRSLL

SEQ ID NO: 12894 - protein, 21 aa, Artificial Sequence
  Synthetic polypeptide
RQSKGWTQLGHFSTTLQRKSG

SEQ ID NO: 12895 - protein, 80 aa, Artificial Sequence
  Synthetic polypeptide
CFLSLAEACPSSARLGYMWLLCAWITLMITTASARRTLTGVPFPSNGKSLEDKARVGPSWAIFPQHSKGSQARPLGCQLC

SEQ ID NO: 12896 - protein, 295 aa, Artificial Sequence
  Synthetic polypeptide
LGCLSHQMENPLKTKQGLDPAGPFFHNTPKEVRLDPSDANFVDVIHTNAARILFELGVGTIDACGHLDFYPNGGKHMPGCEDLITPLLKFNFNAYKKEMASFFDCNHARSYQFYAESILNPDAFIAYPCRSYTSFKAGNCFFCSKEGCPTMGHFADRFHFKNMKTNGSHYFLNTGSLSPFARWRHKLSVKLSGSEVTQGTVFLRVGGAVRKTGEFAIVSGKLEPGMTYTKLIDADVNVGNITSVQFIWKKHLFEDSQNKLGAEMVINTSGKYGYKSTFCSQDIMGPNILQNLKPC

SEQ ID NO: 12897 - protein, 28 aa, Artificial Sequence
  Synthetic polypeptide
GSLEARSSRPAWPTRACTCWEGAQETRC

SEQ ID NO: 12898 - protein, 319 aa, Artificial Sequence
  Synthetic polypeptide
DHLRPGVQDQPGQHGPAPAGKEHRKQDAETPPPPDPPAPETLLAPPPLPSTPDPPRRELRAPSPPVEHPRLLRSVPTPLVMAQKISERMAGNEALSPTSPFREGRPGEWRTPAARGPRSGDPGPGPSHPAQPKAPRFPSNIIVTNGAAREPRRTLSRAAVSVQERRAQVLATIHGHAGAFPAAGDAGEGAPGGGSSPERVARGRGLPGPAESLRAGGQAPRGPALANGFPSAHEALKSAPSSFAPAGKSLCFRPGPALPSTRARQSFPGPRQPNGAQDWRRADSLPRPQGITVQFAGRGSSEEARREALRKLGLLRESS

SEQ ID NO: 12899 - protein, 232 aa, Artificial Sequence
  Synthetic polypeptide
GQEFKTSLANTGLHLLGRSTGNKMLRLLHLQTPRLPRPFLRHHPCLAPPIPPGGSCAPPPRRWSTPDSCALFPRPSLWRRRFPRGWRGTKPSRPPPRSGRAGPGSGGHLPPGGPAVETLARGPATRRSPRHPASPATSSSPTARPGSPAGPCPGRPSACRSAGRRCWPPSTATPAPSPPRGTPARGPQGAAPPRSGWRVAGACRAPLRVSGQGVRLRGARRWPTASQVRTRP

SEQ ID NO: 12900 - protein, 18 aa, Artificial Sequence
  Synthetic polypeptide
GVSPKSATGWLGNLGERH

SEQ ID NO: 12901 - protein, 129 aa, Artificial Sequence
  Synthetic polypeptide
VPNLPLAGWETLGNDTSPESFLLHNALARKPKRIRTAFSPSQLLRLEHAFEKNHYVVGAERKQLAHSLSLTETQVKVWFQNRRTKFKRQKLEEEGSDSQQKKKGTHHINRWRIATKQASPEEIDVTSDD

SEQ ID NO: 12902 - protein, 45 aa, Artificial Sequence
  Synthetic polypeptide
CESQICHWLAGKPWGTTLAPRVSFCTTRWPESPSGSEPPSPRPSF

SEQ ID NO: 12903 - protein, 15 aa, Artificial Sequence
  Synthetic polypeptide
GVSPKSATGWLGNLG

SEQ ID NO: 12904 - protein, 46 aa, Artificial Sequence
  Synthetic polypeptide
VPNLPLAGWETLGKSMVSEPKNKVQKAEAGGRRLRFATKEKRDAPY

SEQ ID NO: 12905 - protein, 69 aa, Artificial Sequence
  Synthetic polypeptide
CESQICHWLAGKPWVKVWFQNRRTKFKRQKLEEEGSDSQQKKKGTHHINRWRIATKQASPEEIDVTSDD

SEQ ID NO: 12906 - protein, 48 aa, Artificial Sequence
  Synthetic polypeptide
CESQICHWLAGKPWVKVWFQNRRTKFKRQKLEEEGSDSQQKKKGTHHI

SEQ ID NO: 12907 - protein, 11 aa, Artificial Sequence
  Synthetic polypeptide
GLPNRVELERH

SEQ ID NO: 12908 - protein, 140 aa, Artificial Sequence
  Synthetic polypeptide
RRRVCFSFHHDCKFLEASPTVWNWNDTSPESFLLHNALARKPKRIRTAFSPSQLLRLEHAFEKNHYVVGAERKQLAHSLSLTETQVKVWFQNRRTKFKRQKLEEEGSDSQQKKKGTHHINRWRIATKQASPEEIDVTSDD

SEQ ID NO: 12909 - protein, 80 aa, Artificial Sequence
  Synthetic polypeptide
IFIRSDGFIKGFSSFAQHFSLLLPCEEDVFASPSIMIVNFLRPPQPCGTGTTLAPRVSFCTTRWPESPSGSEPPSPRPSF

SEQ ID NO: 12910 - protein, 20 aa, Artificial Sequence
  Synthetic polypeptide
SSGLFKSSWKRCIPLSEILC

SEQ ID NO: 12911 - protein, 25 aa, Artificial Sequence
  Synthetic polypeptide
VLAYLRVHGRDVYHFQKYFADPCSS

SEQ ID NO: 12912 - protein, 121 aa, Artificial Sequence
  Synthetic polypeptide
EFMEEMYTTFRNTLLTPAVAEWRGSLRWAELFHMSPTSNEDLRKIPDSNPFDATAGYRSLTYEEVLQELVKHKELLRRKDTHIRELEDYIDNLLVRVMEETPSILRVPYEPSRKAGKFSNS

SEQ ID NO: 12913 - protein, 23 aa, Artificial Sequence
  Synthetic polypeptide
AKITPLHYSLGNKSETPSQKNKA

SEQ ID NO: 12914 - protein, 47 aa, Artificial Sequence
  Synthetic polypeptide
SQLLRRLRQENRLNPGDGGWSEPRSRHCTTAWVTRAKLHLKKIKPSK

SEQ ID NO: 12915 - protein, 29 aa, Artificial Sequence
  Synthetic polypeptide
HQYTLAWVTKRTQMEKFCGCGVILPRQPH

SEQ ID NO: 12916 - protein, 210 aa, Artificial Sequence
  Synthetic polypeptide
SQLLGRPRQKNRLNLGAKIAPVHSSLGDEKDTNGEVLWVWCYPSTTATLRNLLLRKCCLTDENKLLHPFVFGQYRRTWFYITTIEVPDSSILKKVTHFSIVLTAKDFNPEKYAAFTRILCRMYLKHGSPVKMMESYIAVLTKGICQSEENGSFLSKDFDARKAYLAGSIKGLCLPWCGTDRTGPSFTLTCTSTPMSWKPCRCAQVTSLDL

SEQ ID NO: 12917 - protein, 367 aa, Artificial Sequence
  Synthetic polypeptide
SQLLGRPRQKNRLNLGAKIAPVHSSLGDEKDTNGEVLWVWCYPSTTATLRNLLLRKCCLTDENKLLHPFVFGQYRRTWFYITTIEVPDSSILKKVTHFSIVLTAKDFNPEKYAAFTRILCRMYLKHGSPVKMMESYIAVLTKGICQSEENGSFLSKDFDARKAYLAGSIKDIVSQFGMETVILHTALMLKKRIVVYHPKIEAVQEFTRTLPALVWHRQDWTILHSYVHLNADELEALQMCTGYVAGFVDLEVSNRPDLYDVFVNLAESEITIAPLAKEAMAMGKLHKEMGQLIVQSAEDPEKSESHVIQDIALKTREIFTNLAPFSEVSADGEKRVLNLEALKQKRFPPATENFLYHLAAAEQMLKI

SEQ ID NO: 12918 - protein, 19 aa, Artificial Sequence
  Synthetic polypeptide
SHLRRALHSSVGNTRSLHN

SEQ ID NO: 12919 - protein, 83 aa, Artificial Sequence
  Synthetic polypeptide
EEHCTPAWAIQGLFIIDPNGVIKHLSVNDLPVGRSVEETLRLVKAFQYVETHGEVCPANWTPDSPTIKPSPAASKEYFQKVNQ

SEQ ID NO: 12920 - protein, 28 aa, Artificial Sequence
  Synthetic polypeptide
ARSSRLQPAVITPEKSTALQRGQYKVSS

SEQ ID NO: 12921 - protein, 27 aa, Artificial Sequence
  Synthetic polypeptide
LAGCKSSFCSFLAVTWNKLLRMVVWAT

SEQ ID NO: 12922 - protein, 22 aa, Artificial Sequence
  Synthetic polypeptide
PGTSYLEWWFGPHEHRTLVRLN

SEQ ID NO: 12923 - protein, 19 aa, Artificial Sequence
  Synthetic polypeptide
EKLEGLKALLPGKFISLIS

SEQ ID NO: 12924 - protein, 25 aa, Artificial Sequence
  Synthetic polypeptide
TVSSQRHPKRSLRGLKLCYLGNSYL

SEQ ID NO: 12925 - protein, 56 aa, Artificial Sequence
  Synthetic polypeptide
SFATWEIHIFNLMKYDSYSRFLKSDLFLKHKRTEEEEEDLPDAQTAAKRASRIYNT

SEQ ID NO: 12926 - protein, 26 aa, Artificial Sequence
  Synthetic polypeptide
GRAQWLTLVIPALWEAKADRSPEIRR

SEQ ID NO: 12927 - protein, 395 aa, Artificial Sequence
  Synthetic polypeptide
FQHFGRPRRTDHLRYVGNLSRDVTEVLILQLFSQIGPCKSCKMITEQPDSRRVNSSVGFSVLQHTSNDPYCFVEFYEHRDAAAALAAMNGRKILGKEVKVNWATTPSSQKKDTSNHFHVFVGDLSPEITTEDIKSAFAPFGKISDARVVKDMATGKSKGYGFVSFYNKLDAENAIVHMGGQWLGGRQIRTNWATRKPPAPKSTQENNTKQLRFEDVVNQSSPKNCTVYCGGIASGLTDQLMRQTFSPFGQIMEIRVFPEKGYSFVRFSTHESAAHAIVSVNGTTIEGHVVKCYWGKESPDMTKNFQQVDYSQWGQWSQVYGNPQQYGQYMANGWQVPPYGVYGQPWNQQGFGVDQSPSAAWMGGFGAQPPQGQAPPPVIPPPNQAGYGMASYQTQ

SEQ ID NO: 12928 - protein, 138 aa, Artificial Sequence
  Synthetic polypeptide
FQHFGRPRRTDHLRYVGNLSRDVTEVLILQLFSQIGPCKSCKMITEHTSNDPYCFVEFYEHRDAAAALAAMNGRKILGKEVKVNWATTPSSQKKDTSNHFHVFVGDLSPEITTEDIKSAFAPFGKISIAHKNGQDLEG

SEQ ID NO: 12929 - protein, 378 aa, Artificial Sequence
  Synthetic polypeptide
FQHFGRPRRTDHLRYVGNLSRDVTEVLILQLFSQIGPCKSCKMITEHTSNDPYCFVEFYEHRDAAAALAAMNGRKILGKEVKVNWATTPSSQKKDTSNHFHVFVGDLSPEITTEDIKSAFAPFGKISDARVVKDMATGKSKGYGFVSFYNKLDAENAIVHMGGQWLGGRQIRTNWATRKPPAPKSTQENNTKQLRFEDVVNQSSPKNCTVYCGGIASGLTDQLMRQTFSPFGQIMEIRVFPEKGYSFVRFSTHESAAHAIVSVNGTTIEGHVVKCYWGKESPDMTKNFQQVDYSQWGQWSQVYGNPQQYGQYMANGWQVPPYGVYGQPWNQQGFGVDQSPSAAWMGGFGAQPPQGQAPPPVIPPPNQAGYGMASYQTQ

SEQ ID NO: 12930 - protein, 25 aa, Artificial Sequence
  Synthetic polypeptide
PQHFGGPRSATAHCQKRPSWDLNMG

SEQ ID NO: 12931 - protein, 30 aa, Artificial Sequence
  Synthetic polypeptide
AGRGGSCCNPSTLGGQGQQQPTVRRGRPGI

SEQ ID NO: 12932 - protein, 303 aa, Artificial Sequence
  Synthetic polypeptide
PGVVAHAVTPALWGAKVSNSPLSEEAVLGFEYGMSIESPKLLPLWEAQFGDFFNGAQIIFDTFISGGEAKWLLQSGIVILLPHGYDGAGPDHSSCRIERFLQMCDSAEEGVDGDTVNMFVVHPTTPAQYFHLLRRQMVRNFRKPLIVASPKMLLRLPAAVSTLQEMAPGTTFNPVIGDSSVDPKKVKTLVFCSGKHFYSLVKQRESLGAKKHDFAIIRVEELCPFPLDSLQQEMSKYKHVKDHIWSQEEPQNMGPWSFVSPRFEKQLACKLRLVGRPPLPVPAVGIGTVHLHQHEDILAKTFA

SEQ ID NO: 12933 - protein, 357 aa, Artificial Sequence
  Synthetic polypeptide
EVRSPSTGQLPRLRTTDLLLAWNPICLGLVEGVIGKIQLHSDLPWWLILIRQKALVGKLPGDHEVCKVTKIAVLSLSEMEPQDLELELCKKHHFGINKPEKIIPSPDDSKFLLKTFTHIKSNVSAPNKKKVKESKEKEKLERRLLEELLKMFMDSESFYYSLTYDLTNSVQRQSTGERDGRPLWQKVDDRFFWNKYMIQDLTEIGTPDVDFWIIPMIQGFVQIEELVVNYTESSDDEKSSPETPPQESTCVDDIHPRFLVALISRRSRHRAGMRYKRRGVDKNGNVANYVETEQLIHVHNHTLSFVQTRGSVPVFWSQVGYRYNPRPRLDRSEKETVAYFCAHFEEQLNIYKKQQQK

SEQ ID NO: 12934 - protein, 16 aa, Artificial Sequence
  Synthetic polypeptide
ELLIYFLPGIPFVWGW

SEQ ID NO: 12935 - protein, 29 aa, Artificial Sequence
  Synthetic polypeptide
EVRRPSAWQPPHLRSEEPLHRAAAPSENY

SEQ ID NO: 12936 - protein, 1114 aa, Artificial Sequence
  Synthetic polypeptide
EVRSPSTGQLPRLRTTDLLLAWNPICLGLVEGVIGKIQLHSDLPWWLILIRQKALVGKLPGDHEVCKVTKIAVLSLSEMEPQDLELELCKKHHFGINKPEKIIPSPDDSKFLLKTFTHIKSNVSAPNKKKVKESKEKEKLERRLLEELLKMFMDSESFYYSLTYDLTNSVQRQSTGERDGRPLWQKVDDRFFWNKYMIQDLTEIGTPDVDFWIIPMIQGFVQIEELVVNYTESSDDEKSSPETPPQESTCVDDIHPRFLVALISRRSRHRAGMRYKRRGVDKNGNVANYVETEQLIHVHNHTLSFVQTRGSVPVFWSQVGYRYNPRPRLDRSEKETVAYFCAHFEEQLNIYKKQVIINLVDQAGREKIIGDAYLKQVLLFNNSHLTYVSFDFHEHCRGMKFENVQTLTDAIYDIILDMKWCWVDEAGVICKQEGIFRVNCMDCLDRTNVVQAAIARVVMEQQLKKLGVMPPEQPLPVKCNRIYQIMWANNGDSISRQYAGTAALKGDFTRTGERKLAGVMKDGVNSANRYYLNRFKDAYRQAVIDLMQGIPVTEDLYSIFTKEKEHEALHKENQRSHQELISQLLQSYMKLLLPDDEKFHGGWALIDCDPSLIDATHRDVDVLLLLSNSAYYVAYYDDEVDKVNQYQRLSLENLEKIEIGPEPTLFGKPKFSCMRLHYRYKEASGYFHTLRAVMRNPEEDGKDTLQCIAEMLQITKQAMGSDLPIIEKKLERKSSKPHEDIIGIRSQNQGSLAQGKNFLMSKFSSLNQKVKQTKSNVNIGNLRKLGNFTKPEMKVNFLKPNLKVNLWKSDSSLETMENTGVMDKVQAESDGDMSSDNDSYHSDEFLTNSKSDEDRQLANSLESVGPIDYVLPSCGIIASAPRLGSRSQSLSSTDSSVHAPSEITVAHGSGLGKGQESPLKKSPSAGDVHILTGFAKPMDIYCHRFVQDAQNKVTHLSETRSVSQQASQERNQMTNQVSNETQSESTEQTPSRPSQLDVSLSATGPQFLSVEPAHSVASQKTPTSASSMLELETGLHVTPSPSESSSSRAVSPFAKIRSSMVQVASITQAGLTHGINFAVSKVQKSPPEPEIINQVQQNELKKMFIQCQTRIIQI

SEQ ID NO: 12937 - protein, 29 aa, Artificial Sequence
  Synthetic polypeptide
EVRSPSTGQLPRLRSEEPLRPAATPSGNY

SEQ ID NO: 12938 - protein, 357 aa, Artificial Sequence
  Synthetic polypeptide
EVRSLSARQPPHLGTTDLLLAWNPICLGLVEGVIGKIQLHSDLPWWLILIRQKALVGKLPGDHEVCKVTKIAVLSLSEMEPQDLELELCKKHHFGINKPEKIIPSPDDSKFLLKTFTHIKSNVSAPNKKKVKESKEKEKLERRLLEELLKMFMDSESFYYSLTYDLTNSVQRQSTGERDGRPLWQKVDDRFFWNKYMIQDLTEIGTPDVDFWIIPMIQGFVQIEELVVNYTESSDDEKSSPETPPQESTCVDDIHPRFLVALISRRSRHRAGMRYKRRGVDKNGNVANYVETEQLIHVHNHTLSFVQTRGSVPVFWSQVGYRYNPRPRLDRSEKETVAYFCAHFEEQLNIYKKQQQK

SEQ ID NO: 12939 - protein, 27 aa, Artificial Sequence
  Synthetic polypeptide
GASPPGSHPIWELLIYFLPGIPFVWGW

SEQ ID NO: 12940 - protein, 1114 aa, Artificial Sequence
  Synthetic polypeptide
EVRSLSARQPPHLGTTDLLLAWNPICLGLVEGVIGKIQLHSDLPWWLILIRQKALVGKLPGDHEVCKVTKIAVLSLSEMEPQDLELELCKKHHFGINKPEKIIPSPDDSKFLLKTFTHIKSNVSAPNKKKVKESKEKEKLERRLLEELLKMFMDSESFYYSLTYDLTNSVQRQSTGERDGRPLWQKVDDRFFWNKYMIQDLTEIGTPDVDFWIIPMIQGFVQIEELVVNYTESSDDEKSSPETPPQESTCVDDIHPRFLVALISRRSRHRAGMRYKRRGVDKNGNVANYVETEQLIHVHNHTLSFVQTRGSVPVFWSQVGYRYNPRPRLDRSEKETVAYFCAHFEEQLNIYKKQVIINLVDQAGREKIIGDAYLKQVLLFNNSHLTYVSFDFHEHCRGMKFENVQTLTDAIYDIILDMKWCWVDEAGVICKQEGIFRVNCMDCLDRTNVVQAAIARVVMEQQLKKLGVMPPEQPLPVKCNRIYQIMWANNGDSISRQYAGTAALKGDFTRTGERKLAGVMKDGVNSANRYYLNRFKDAYRQAVIDLMQGIPVTEDLYSIFTKEKEHEALHKENQRSHQELISQLLQSYMKLLLPDDEKFHGGWALIDCDPSLIDATHRDVDVLLLLSNSAYYVAYYDDEVDKVNQYQRLSLENLEKIEIGPEPTLFGKPKFSCMRLHYRYKEASGYFHTLRAVMRNPEEDGKDTLQCIAEMLQITKQAMGSDLPIIEKKLERKSSKPHEDIIGIRSQNQGSLAQGKNFLMSKFSSLNQKVKQTKSNVNIGNLRKLGNFTKPEMKVNFLKPNLKVNLWKSDSSLETMENTGVMDKVQAESDGDMSSDNDSYHSDEFLTNSKSDEDRQLANSLESVGPIDYVLPSCGIIASAPRLGSRSQSLSSTDSSVHAPSEITVAHGSGLGKGQESPLKKSPSAGDVHILTGFAKPMDIYCHRFVQDAQNKVTHLSETRSVSQQASQERNQMTNQVSNETQSESTEQTPSRPSQLDVSLSATGPQFLSVEPAHSVASQKTPTSASSMLELETGLHVTPSPSESSSSRAVSPFAKIRSSMVQVASITQAGLTHGINFAVSKVQKSPPEPEIINQVQQNELKKMFIQCQTRIIQI

SEQ ID NO: 12941 - protein, 367 aa, Artificial Sequence
  Synthetic polypeptide
SQHFGRPRWMDHLRSGVQDQPSQHATDLLLAWNPICLGLVEGVIGKIQLHSDLPWWLILIRQKALVGKLPGDHEVCKVTKIAVLSLSEMEPQDLELELCKKHHFGINKPEKIIPSPDDSKFLLKTFTHIKSNVSAPNKKKVKESKEKEKLERRLLEELLKMFMDSESFYYSLTYDLTNSVQRQSTGERDGRPLWQKVDDRFFWNKYMIQDLTEIGTPDVDFWIIPMIQGFVQIEELVVNYTESSDDEKSSPETPPQESTCVDDIHPRFLVALISRRSRHRAGMRYKRRGVDKNGNVANYVETEQLIHVHNHTLSFVQTRGSVPVFWSQVGYRYNPRPRLDRSEKETVAYFCAHFEEQLNIYKKQQQK

SEQ ID NO: 12942 - protein, 26 aa, Artificial Sequence
  Synthetic polypeptide
GQEFKTSLANMLLIYFLPGIPFVWGW

SEQ ID NO: 12943 - protein, 4 aa, Artificial Sequence
  Synthetic polypeptide
PTCY

SEQ ID NO: 12944 - protein, 1124 aa, Artificial Sequence
  Synthetic polypeptide
SQHFGRPRWMDHLRSGVQDQPSQHATDLLLAWNPICLGLVEGVIGKIQLHSDLPWWLILIRQKALVGKLPGDHEVCKVTKIAVLSLSEMEPQDLELELCKKHHFGINKPEKIIPSPDDSKFLLKTFTHIKSNVSAPNKKKVKESKEKEKLERRLLEELLKMFMDSESFYYSLTYDLTNSVQRQSTGERDGRPLWQKVDDRFFWNKYMIQDLTEIGTPDVDFWIIPMIQGFVQIEELVVNYTESSDDEKSSPETPPQESTCVDDIHPRFLVALISRRSRHRAGMRYKRRGVDKNGNVANYVETEQLIHVHNHTLSFVQTRGSVPVFWSQVGYRYNPRPRLDRSEKETVAYFCAHFEEQLNIYKKQVIINLVDQAGREKIIGDAYLKQVLLFNNSHLTYVSFDFHEHCRGMKFENVQTLTDAIYDIILDMKWCWVDEAGVICKQEGIFRVNCMDCLDRTNVVQAAIARVVMEQQLKKLGVMPPEQPLPVKCNRIYQIMWANNGDSISRQYAGTAALKGDFTRTGERKLAGVMKDGVNSANRYYLNRFKDAYRQAVIDLMQGIPVTEDLYSIFTKEKEHEALHKENQRSHQELISQLLQSYMKLLLPDDEKFHGGWALIDCDPSLIDATHRDVDVLLLLSNSAYYVAYYDDEVDKVNQYQRLSLENLEKIEIGPEPTLFGKPKFSCMRLHYRYKEASGYFHTLRAVMRNPEEDGKDTLQCIAEMLQITKQAMGSDLPIIEKKLERKSSKPHEDIIGIRSQNQGSLAQGKNFLMSKFSSLNQKVKQTKSNVNIGNLRKLGNFTKPEMKVNFLKPNLKVNLWKSDSSLETMENTGVMDKVQAESDGDMSSDNDSYHSDEFLTNSKSDEDRQLANSLESVGPIDYVLPSCGIIASAPRLGSRSQSLSSTDSSVHAPSEITVAHGSGLGKGQESPLKKSPSAGDVHILTGFAKPMDIYCHRFVQDAQNKVTHLSETRSVSQQASQERNQMTNQVSNETQSESTEQTPSRPSQLDVSLSATGPQFLSVEPAHSVASQKTPTSASSMLELETGLHVTPSPSESSSSRAVSPFAKIRSSMVQVASITQAGLTHGINFAVSKVQKSPPEPEIINQVQQNELKKMFIQCQTRIIQI

SEQ ID NO: 12945 - protein, 46 aa, Artificial Sequence
  Synthetic polypeptide
CLSSHGNNLQEDSNWGHVYSAYLLCLCVLAHCRAIQKYSIFHGGLF

SEQ ID NO: 12946 - protein, 60 aa, Artificial Sequence
  Synthetic polypeptide
VCLLMEITSKKTATGAMSILLTCCVSVCWPTAGQFRNIQSSMVAYSNSAESIGGQTPRRP

SEQ ID NO: 12947 - protein, 347 aa, Artificial Sequence
  Synthetic polypeptide
PPRRQQLGPCLFCLPAVSLCAGPLQGNSEIFNLPWWLILIRQKALVGKLPGDHEVCKVTKIAVLSLSEMEPQDLELELCKKHHFGINKPEKIIPSPDDSKFLLKTFTHIKSNVSAPNKKKVKESKEKEKLERRLLEELLKMFMDSESFYYSLTYDLTNSVQRQSTGERDGRPLWQKVDDRFFWNKYMIQDLTEIGTPDVDFWIIPMIQGFVQIEELVVNYTESSDDEKSSPETPPQESTCVDDIHPRFLVALISRRSRHRAGMRYKRRGVDKNGNVANYVETEQLIHVHNHTLSFVQTRGSVPVFWSQVGYRYNPRPRLDRSEKETVAYFCAHFEEQLNIYKKQQQK

SEQ ID NO: 12948 - protein, 1104 aa, Artificial Sequence
  Synthetic polypeptide
PPRRQQLGPCLFCLPAVSLCAGPLQGNSEIFNLPWWLILIRQKALVGKLPGDHEVCKVTKIAVLSLSEMEPQDLELELCKKHHFGINKPEKIIPSPDDSKFLLKTFTHIKSNVSAPNKKKVKESKEKEKLERRLLEELLKMFMDSESFYYSLTYDLTNSVQRQSTGERDGRPLWQKVDDRFFWNKYMIQDLTEIGTPDVDFWIIPMIQGFVQIEELVVNYTESSDDEKSSPETPPQESTCVDDIHPRFLVALISRRSRHRAGMRYKRRGVDKNGNVANYVETEQLIHVHNHTLSFVQTRGSVPVFWSQVGYRYNPRPRLDRSEKETVAYFCAHFEEQLNIYKKQVIINLVDQAGREKIIGDAYLKQVLLFNNSHLTYVSFDFHEHCRGMKFENVQTLTDAIYDIILDMKWCWVDEAGVICKQEGIFRVNCMDCLDRTNVVQAAIARVVMEQQLKKLGVMPPEQPLPVKCNRIYQIMWANNGDSISRQYAGTAALKGDFTRTGERKLAGVMKDGVNSANRYYLNRFKDAYRQAVIDLMQGIPVTEDLYSIFTKEKEHEALHKENQRSHQELISQLLQSYMKLLLPDDEKFHGGWALIDCDPSLIDATHRDVDVLLLLSNSAYYVAYYDDEVDKVNQYQRLSLENLEKIEIGPEPTLFGKPKFSCMRLHYRYKEASGYFHTLRAVMRNPEEDGKDTLQCIAEMLQITKQAMGSDLPIIEKKLERKSSKPHEDIIGIRSQNQGSLAQGKNFLMSKFSSLNQKVKQTKSNVNIGNLRKLGNFTKPEMKVNFLKPNLKVNLWKSDSSLETMENTGVMDKVQAESDGDMSSDNDSYHSDEFLTNSKSDEDRQLANSLESVGPIDYVLPSCGIIASAPRLGSRSQSLSSTDSSVHAPSEITVAHGSGLGKGQESPLKKSPSAGDVHILTGFAKPMDIYCHRFVQDAQNKVTHLSETRSVSQQASQERNQMTNQVSNETQSESTEQTPSRPSQLDVSLSATGPQFLSVEPAHSVASQKTPTSASSMLELETGLHVTPSPSESSSSRAVSPFAKIRSSMVQVASITQAGLTHGINFAVSKVQKSPPEPEIINQVQQNELKKMFIQCQTRIIQI

SEQ ID NO: 12949 - protein, 309 aa, Artificial Sequence
  Synthetic polypeptide
CLSSHGNNLQEDSNWGHVYSAYLLCLCVLAHCRAIQKYSLCKKHHFGINKPEKIIPSPDDSKFLLKTFTHIKSNVSAPNKKKVKESKEKEKLERRLLEELLKMFMDSESFYYSLTYDLTNSVQRQSTGERDGRPLWQKVDDRFFWNKYMIQDLTEIGTPDVDFWIIPMIQGFVQIEELVVNYTESSDDEKSSPETPPQESTCVDDIHPRFLVALISRRSRHRAGMRYKRRGVDKNGNVANYVETEQLIHVHNHTLSFVQTRGSVPVFWSQVGYRYNPRPRLDRSEKETVAYFCAHFEEQLNIYKKQQQK

SEQ ID NO: 12950 - protein, 64 aa, Artificial Sequence
  Synthetic polypeptide
VCLLMEITSKKTATGAMSILLTCCVSVCWPTAGQFRNIHSVRSIILVLTNQRRSYHLLMTQSFY

SEQ ID NO: 12951 - protein, 33 aa, Artificial Sequence
  Synthetic polypeptide
PPRRQQLGPCLFCLPAVSLCAGPLQGNSEIFTL

SEQ ID NO: 12952 - protein, 1066 aa, Artificial Sequence
  Synthetic polypeptide
CLSSHGNNLQEDSNWGHVYSAYLLCLCVLAHCRAIQKYSLCKKHHFGINKPEKIIPSPDDSKFLLKTFTHIKSNVSAPNKKKVKESKEKEKLERRLLEELLKMFMDSESFYYSLTYDLTNSVQRQSTGERDGRPLWQKVDDRFFWNKYMIQDLTEIGTPDVDFWIIPMIQGFVQIEELVVNYTESSDDEKSSPETPPQESTCVDDIHPRFLVALISRRSRHRAGMRYKRRGVDKNGNVANYVETEQLIHVHNHTLSFVQTRGSVPVFWSQVGYRYNPRPRLDRSEKETVAYFCAHFEEQLNIYKKQVIINLVDQAGREKIIGDAYLKQVLLFNNSHLTYVSFDFHEHCRGMKFENVQTLTDAIYDIILDMKWCWVDEAGVICKQEGIFRVNCMDCLDRTNVVQAAIARVVMEQQLKKLGVMPPEQPLPVKCNRIYQIMWANNGDSISRQYAGTAALKGDFTRTGERKLAGVMKDGVNSANRYYLNRFKDAYRQAVIDLMQGIPVTEDLYSIFTKEKEHEALHKENQRSHQELISQLLQSYMKLLLPDDEKFHGGWALIDCDPSLIDATHRDVDVLLLLSNSAYYVAYYDDEVDKVNQYQRLSLENLEKIEIGPEPTLFGKPKFSCMRLHYRYKEASGYFHTLRAVMRNPEEDGKDTLQCIAEMLQITKQAMGSDLPIIEKKLERKSSKPHEDIIGIRSQNQGSLAQGKNFLMSKFSSLNQKVKQTKSNVNIGNLRKLGNFTKPEMKVNFLKPNLKVNLWKSDSSLETMENTGVMDKVQAESDGDMSSDNDSYHSDEFLTNSKSDEDRQLANSLESVGPIDYVLPSCGIIASAPRLGSRSQSLSSTDSSVHAPSEITVAHGSGLGKGQESPLKKSPSAGDVHILTGFAKPMDIYCHRFVQDAQNKVTHLSETRSVSQQASQERNQMTNQVSNETQSESTEQTPSRPSQLDVSLSATGPQFLSVEPAHSVASQKTPTSASSMLELETGLHVTPSPSESSSSRAVSPFAKIRSSMVQVASITQAGLTHGINFAVSKVQKSPPEPEIINQVQQNELKKMFIQCQTRIIQI

SEQ ID NO: 12953 - protein, 153 aa, Artificial Sequence
  Synthetic polypeptide
CLSSHGNNLQEDSNWGHVYSAYLLCLCVLAHCRAIQKYSLCKKHHFGINKPEKIIPSPDDSKFLLKTFTHIKSNVSAPNKKKVKESKEKEKLERRLLEELLKMFMDSESFYYSLTYDLTNSVQRQSTGERDGRPLWQKVPLTARRAGFALGKK

SEQ ID NO: 12954 - protein, 13 aa, Artificial Sequence
  Synthetic polypeptide
LLHCSRIFHGGLF

SEQ ID NO: 12955 - protein, 39 aa, Artificial Sequence
  Synthetic polypeptide
KVACAWGVSTPNSCIVQGSSMVAYSNSAESIGGQTPRRP

SEQ ID NO: 12956 - protein, 333 aa, Artificial Sequence
  Synthetic polypeptide
KLHVHGESAPLTPALFKDLPWWLILIRQKALVGKLPGDHEVCKVTKIAVLSLSEMEPQDLELELCKKHHFGINKPEKIIPSPDDSKFLLKTFTHIKSNVSAPNKKKVKESKEKEKLERRLLEELLKMFMDSESFYYSLTYDLTNSVQRQSTGERDGRPLWQKVDDRFFWNKYMIQDLTEIGTPDVDFWIIPMIQGFVQIEELVVNYTESSDDEKSSPETPPQESTCVDDIHPRFLVALISRRSRHRAGMRYKRRGVDKNGNVANYVETEQLIHVHNHTLSFVQTRGSVPVFWSQVGYRYNPRPRLDRSEKETVAYFCAHFEEQLNIYKKQQQK

SEQ ID NO: 12957 - protein, 1090 aa, Artificial Sequence
  Synthetic polypeptide
KLHVHGESAPLTPALFKDLPWWLILIRQKALVGKLPGDHEVCKVTKIAVLSLSEMEPQDLELELCKKHHFGINKPEKIIPSPDDSKFLLKTFTHIKSNVSAPNKKKVKESKEKEKLERRLLEELLKMFMDSESFYYSLTYDLTNSVQRQSTGERDGRPLWQKVDDRFFWNKYMIQDLTEIGTPDVDFWIIPMIQGFVQIEELVVNYTESSDDEKSSPETPPQESTCVDDIHPRFLVALISRRSRHRAGMRYKRRGVDKNGNVANYVETEQLIHVHNHTLSFVQTRGSVPVFWSQVGYRYNPRPRLDRSEKETVAYFCAHFEEQLNIYKKQVIINLVDQAGREKIIGDAYLKQVLLFNNSHLTYVSFDFHEHCRGMKFENVQTLTDAIYDIILDMKWCWVDEAGVICKQEGIFRVNCMDCLDRTNVVQAAIARVVMEQQLKKLGVMPPEQPLPVKCNRIYQIMWANNGDSISRQYAGTAALKGDFTRTGERKLAGVMKDGVNSANRYYLNRFKDAYRQAVIDLMQGIPVTEDLYSIFTKEKEHEALHKENQRSHQELISQLLQSYMKLLLPDDEKFHGGWALIDCDPSLIDATHRDVDVLLLLSNSAYYVAYYDDEVDKVNQYQRLSLENLEKIEIGPEPTLFGKPKFSCMRLHYRYKEASGYFHTLRAVMRNPEEDGKDTLQCIAEMLQITKQAMGSDLPIIEKKLERKSSKPHEDIIGIRSQNQGSLAQGKNFLMSKFSSLNQKVKQTKSNVNIGNLRKLGNFTKPEMKVNFLKPNLKVNLWKSDSSLETMENTGVMDKVQAESDGDMSSDNDSYHSDEFLTNSKSDEDRQLANSLESVGPIDYVLPSCGIIASAPRLGSRSQSLSSTDSSVHAPSEITVAHGSGLGKGQESPLKKSPSAGDVHILTGFAKPMDIYCHRFVQDAQNKVTHLSETRSVSQQASQERNQMTNQVSNETQSESTEQTPSRPSQLDVSLSATGPQFLSVEPAHSVASQKTPTSASSMLELETGLHVTPSPSESSSSRAVSPFAKIRSSMVQVASITQAGLTHGINFAVSKVQKSPPEPEIINQVQQNELKKMFIQCQTRIIQI

SEQ ID NO: 12958 - protein, 641 aa, Artificial Sequence
  Synthetic polypeptide
GPQQKQMPAPCFLYSLQNPQNGVNPDWEKKVIEYFKEKLKENNAPKWVPSLNEVPLHYLKPNSFVKFRCMIQDMFDPEFYMGVYETVNQNTKAHVLHFGKYRDVAECGPQQELDLNSPRNTTLERQTFYCVPVPGESTWVKEAYVNANQARVSPSTSYTPSRHKRSYEDDDDMDLQPNKQKDQHAGARQAGSVGGLQWCGEPKRLETEASTGQQLNSLNLSSPFDLNFPLPGEKGPACLVKVYEDWDCFKVNDILELYGILSVDPVLSILNNDERDASALLDPMECTDTAEEQRVHSPPASLVPRIHVILAQKLQHINPLLPACLNKEESKTCKFVSSFMSELSPVRAELLGFLTHALLGDSLAAEYLILHLISTVYTRRDVLPLGKFTVNLSGCPRNSTFTEHLYRIIQHLVPASFRLQMTIENMNHLKFIPHKDYTANRLVSGLLQLPSNTSLVIDETLLEQGQLDTPGVHNVTALSNLITWQKVDYDFSYHQMEFPCNINVFITSEGRSLLPADCQIHLQPQLIPPNMEEYMNSLLSAVLPSVLNKFRIYLTLLRFLEYSISDEITKAVEDDFVEMRKNDPQSITADDLHQLLVVARCLSLSAGQTTLSRERWLRAKQLESLRRTRLQQQKCVNGNEL

SEQ ID NO: 12959 - protein, 36 aa, Artificial Sequence
  Synthetic polypeptide
DCELPEDLNRSRCQHHASCTACRTPKMELILTGRRK

SEQ ID NO: 12960 - protein, 28 aa, Artificial Sequence
  Synthetic polypeptide
IVSFLRTSTEADASTMLPVQPAEPPKWS

SEQ ID NO: 12961 - protein, 639 aa, Artificial Sequence
  Synthetic polypeptide
GPQQKQMPAPCFLYSLQNPQNGVNPDWEKKVIEYFKEKLKENNAPKWVPSLNEVPLHYLKPNSFVKFRCMIQDMFDPEFYMGVYETVNQNTKAHVLHFGKYRDVAECGPQQELDLNSPRNTTLERQTFYCVPVPGESTWVKEAYVNANQARVSPSTSYTPSRHKRSYEDDDDMDLQPNKQKDQHAGARQAGSVGGLQWCGEPKRLETEASTGQQLNSLNLSSPFDLNFPLPGEKGPACLVKVYEDWDCFKVNDILELYGILSVDPVLSILNNDERDASALLDPMECTDTAEEQRVHSPPASLVPRIHVILAQKLQHINPLLPACLNKEESKTFVSSFMSELSPVRAELLGFLTHALLGDSLAAEYLILHLISTVYTRRDVLPLGKFTVNLSGCPRNSTFTEHLYRIIQHLVPASFRLQMTIENMNHLKFIPHKDYTANRLVSGLLQLPSNTSLVIDETLLEQGQLDTPGVHNVTALSNLITWQKVDYDFSYHQMEFPCNINVFITSEGRSLLPADCQIHLQPQLIPPNMEEYMNSLLSAVLPSVLNKFRIYLTLLRFLEYSISDEITKAVEDDFVEMRKNDPQSITADDLHQLLVVARCLSLSAGQTTLSRERWLRAKQLESLRRTRLQQQKCVNGNEL

SEQ ID NO: 12962 - protein, 168 aa, Artificial Sequence
  Synthetic polypeptide
GWVRWLTPVIPGLWEAEDVSGGGPARSYPVGGLCYYLSPPESMGAIFEDPVHVVVYIIFMLGSCAFFSKTWIEVSGSSAKDVAKQLKEQQMVMRGHRDTSMVHELNRYIPTAAAFGGLCIGALSVLADFLGAIGSGTGILLAVTIIYQYFEIFVKEQAEVGGMGALFF

SEQ ID NO: 12963 - protein, 72 aa, Artificial Sequence
  Synthetic polypeptide
SQDFGRLRMSVGEDPHVLTQLEAFVTIFLLLSPWAPSLRILSMSLFISSSCWGHVHSSLRHGLKCLVPQPKM

SEQ ID NO: 12964 - protein, 110 aa, Artificial Sequence
  Synthetic polypeptide
GWVRWLTPVIPGLWEAEDVSGGGPARSYPVGGLCYYLSPPESMGAIFEDPVHVVVYIIFMLGSCAFFSKTWIEVSGSSAKDVAKQLKEQQMVMRGHRDTSMVHELNSARA

SEQ ID NO: 12965 - protein, 129 aa, Artificial Sequence
  Synthetic polypeptide
GWVRWLTPVIPGLWEAEDVSGGGPARSYPVGGLCYYLSPPESMGAIFEDPVHVVVYIIFMLGSCAFFSKTWIEVSGSSAKDVAKQLKEQQMVMRGHRDTSMVHELNRPKVKLRRWKGEGRHFTKRILFY

SEQ ID NO: 12966 - protein, 28 aa, Artificial Sequence
  Synthetic polypeptide
AQEFEGCQWGRTRTFLPSWRPLLLSFSS

SEQ ID NO: 12967 - protein, 202 aa, Artificial Sequence
  Synthetic polypeptide
RPGVGDLSGQHSETPSLQKNLKTSRAQCYVPVVLATWEAELGGLLEPRSLKDVSGGGPARSYPVGGLCYYLSPPESMGAIFEDPVHVVVYIIFMLGSCAFFSKTWIEVSGSSAKDVAKQLKEQQMVMRGHRDTSMVHELNRYIPTAAAFGGLCIGALSVLADFLGAIGSGTGILLAVTIIYQYFEIFVKEQAEVGGMGALFF

SEQ ID NO: 12968 - protein, 144 aa, Artificial Sequence
  Synthetic polypeptide
RPGVGDLSGQHSETPSLQKNLKTSRAQCYVPVVLATWEAELGGLLEPRSLKDVSGGGPARSYPVGGLCYYLSPPESMGAIFEDPVHVVVYIIFMLGSCAFFSKTWIEVSGSSAKDVAKQLKEQQMVMRGHRDTSMVHELNSARA

SEQ ID NO: 12969 - protein, 163 aa, Artificial Sequence
  Synthetic polypeptide
RPGVGDLSGQHSETPSLQKNLKTSRAQCYVPVVLATWEAELGGLLEPRSLKDVSGGGPARSYPVGGLCYYLSPPESMGAIFEDPVHVVVYIIFMLGSCAFFSKTWIEVSGSSAKDVAKQLKEQQMVMRGHRDTSMVHELNRPKVKLRRWKGEGRHFTKRILFY

SEQ ID NO: 12970 - protein, 84 aa, Artificial Sequence
  Synthetic polypeptide
FLHFQLSFTEFLDPFQRVIQPEEIWLYKNPLVQSDNIPTRLMFIPLWVESSASFLHTFATDSTILLWPTQLAINPTLVCESQPH

SEQ ID NO: 12971 - protein, 52 aa, Artificial Sequence
  Synthetic polypeptide
GWFQDGQIGTAPVYSSQHKQRRRRVISAFPTEFYRVFGSVPESHPARRDLAL

SEQ ID NO: 12972 - protein, 259 aa, Artificial Sequence
  Synthetic polypeptide
FLHFQLSFTEFLDPFQRVIQPEEIWLYKNPLVQSDNIPTRLMFAISFLTPLAVICVVKIIRRTDKTEIKEAFLAVSLALALNGVCTNTIKLIVGRPRPDFFYRCFPDGVMNSEMHCTGDPDLVSEGRKSFPSIHSSFAFSGLGFTTFYLAGKLHCFTESGRGKSWRLCAAILPLYCAMMIALSRMCDYKHHWQDSFVGGVIGLIFAYICYRQHYPPLANTACHKPYVSLRVPASLKKEERPTADSAPSLPLEGITEGPV

SEQ ID NO: 12973 - protein, 196 aa, Artificial Sequence
  Synthetic polypeptide
FLHFQLSFTEFLDPFQRVIQPEEIWLYKNPLVQSDNIPTRLMFAISFLTPLAVICVVKIIRRTDKTEIKEAFLVAFSGLGFTTFYLAGKLHCFTESGRGKSWRLCAAILPLYCAMMIALSRMCDYKHHWQDSFVGGVIGLIFAYICYRQHYPPLANTACHKPYVSLRVPASLKKEERPTADSAPSLPLEGITEGPV

SEQ ID NO: 12974 - protein, 255 aa, Artificial Sequence
  Synthetic polypeptide
FLHFQLSFTEFLDPFQRVIQPEEIWLYKNPLVQSDNIPTRLMFAISFLTPLAVICVVKIIRRTDKTEIKEAFLAVSLALALNGVCTNTIKLIVGRPRPDFFYRCFPDGVMNSEMHCTGDPDLVSEGRKSFPSIHSSFAFSGLGFTTFYLAGKLHCFTESGRGKSWRLCAAILPLYCAMMIALSRMCDYKHHWQDSFVGGVIGLIFAYICYRQHYPPLANTACHKPYVSLRVPASLKKEERPTADSAPSLPLEGIT

SEQ ID NO: 12975 - protein, 221 aa, Artificial Sequence
  Synthetic polypeptide
FLHFQLSFTEFLDPFQRVIQPEEIWLYKNPLVQSDNIPTRLMFAISFLTPLAVICVVKIIRRTDKTEIKEAFLAVSLALALNGVCTNTIKLIVGRPRPDFFYRCFPDGVMNSEMHCTGDPDLVSEGRKSFPSIHSSFAFSGLGFTTFYLAGKLHCFTESGRGKSWRLCAAILPLYCAMMIALSRMCDYKHHWQVGCCVWQGPQSHLPSAANPRLCLGTSEP

SEQ ID NO: 12976 - protein, 75 aa, Artificial Sequence
  Synthetic polypeptide
KRKASLQLRHVGTFHDSTGLSGSHRPRMAKKWKICVQTCHESNMLSSVHNKVPTFTISAFKISQEGFEKNVEISS

SEQ ID NO: 12977 - protein, 19 aa, Artificial Sequence
  Synthetic polypeptide
GGLVKEEGLFAVEACGHIP

SEQ ID NO: 12978 - protein, 88 aa, Artificial Sequence
  Synthetic polypeptide
SRVSRDTMHCGRPQGPLPRKARHVGTFHDSTGLSGSHRPRMAKKWKICVQTCHESNMLSSVHNKVPTFTISAFKISQEGFEKNVEISS

SEQ ID NO: 12979 - protein, 511 aa, Artificial Sequence
  Synthetic polypeptide
KSLIFSNLEYPGTQCTVEGHRDLCPGKPGMWAHSMTVQDYQDLIDRGWRRSGKYVYKPVMNQTCCPQYTIRCRPLQFQPSKSHKKVLKKMLKFLAKGEVPKGSCEDEPMDSTMDDAVAGDFALINKLDIQCDLKTLSDDIKESLESEGKNSKKEEPQELLQSQDFVGEKLGSGEPSHSVKVHTVPKPGKGADLSKPPCRKAKEIRKERKRLKLMQQNPAGELEGFQAQGHPPSLFPPKAKSNQPKSLEDLIFESLPENASHKLEVRLVPVSFEDPEFKSSFSQSFSLYVKYQVAIHQDPPDECGKTEFTRFLCSSPLEAETPPNGPDCGYGSFHQQYWLDGKIIAVGVIDILPNCVSSVYLYYDPDYSFLSLGVYSALREIAFTRQLHEKTSQLSYYYMGFYIHSCPKMKYKGQYRPSDLLCPETYVWVPIEQCLPSLENSKYCRFNQDPEAVDEDRSTEPDRLQVFHKRAIMPYGVYKKQQKDPSEEAAVLQYASLVGQKCSERMLLFRN

SEQ ID NO: 12980 - protein, 31 aa, Artificial Sequence
  Synthetic polypeptide
YSLISSIQGHNALWKATGTSAQESQACGHIP

SEQ ID NO: 12981 - protein, 511 aa, Artificial Sequence
  Synthetic polypeptide
KSLIFSNLEYPGTQCTVEGHRDLCPGKPGMWAHSMTVQDYQDLIDRGWRRSGKYVYKPVMNQTCCPQYTIRCRPLQFQPSKSHKKVLKKMLKFLAKGEVPKGSCEDEPMDSTMDDAVAGDFALINKLDIQCDLKTLSDDIKESLESEGKNSKKEEPQELLQSQDFVGEKLGSGEPSHSVKVHTVPKPGKGADLSKPPCRKAKEIRKERKRLKLMQQNPAGELEGFQAQGHPPSLFPPKAKSNQPKSLEDLIFESLPENASHKLEVRVVRSSPPSSQFKATLLESYQVYKRYQMVIHKNPPDTPTESQFTRFLCSSPLEAETPPNGPDCGYGSFHQQYWLDGKIIAVGVIDILPNCVSSVYLYYDPDYSFLSLGVYSALREIAFTRQLHEKTSQLSYYYMGFYIHSCPKMKYKGQYRPSDLLCPETYVWVPIEQCLPSLENSKYCRFNQDPEAVDEDRSTEPDRLQVFHKRAIMPYGVYKKQQKDPSEEAAVLQYASLVGQKCSERMLLFRN

SEQ ID NO: 12982 - protein, 222 aa, Artificial Sequence
  Synthetic polypeptide
KSLIFSNLEYPGTQCTVEGHRDLCPGKPGMWAHSMTVQDYQDLIDRGWRRSGKYVYKPVMNQTCCPQYTIRCRPLQFQPSKSHKKVLKKMLKFLAKGEVPKGSCEDEPMDSTMDDAVAGDFALINKLDIQCDLKTLSDDIKESLESEGKNSKKEEPQELLQSQDFVGEKLGSGEPSHSVKVHTVPKPGKGADLSKPPCRKAKEIRKERKRLKLMQQNPAGEL

SEQ ID NO: 12983 - protein, 32 aa, Artificial Sequence
  Synthetic polypeptide
TCWCLDLGLPSLQNSSPQLLPMRVFLPRLQNT

SEQ ID NO: 12984 - protein, 43 aa, Artificial Sequence
  Synthetic polypeptide
DTEPAGALILDFPASRTHLPSCCPCGSSSLGCRTHSFAICPSW

SEQ ID NO: 12985 - protein, 1057 aa, Artificial Sequence
  Synthetic polypeptide
SWTSQPPELISPAAAHAGLPPSAAEHIVSPSAPAGDRVEASTPSCPDPAKDLSRSSDSEEAFETPESTTPVKAPPAPPPPPPEVIPEPEVSTQPPPEEPGCGSETVPVPDGPRSDSVEGSPFRPPSHSFSAVFDEDKPIASSGTYNLDFDNIELVDTFQTLEPRASDAKNQEGKVNTRRKSTDSVPISKSTLSRSLSLQASDFDGASSSGNPEAVALAPDAYSTGSSSASSTLKRTKKPRPPSLKKKQTTKKPTETPPVKETQQEPDEESLVPSGENLASETKTESAKTEGPSPALLEETPLEPAVGPKAACPLDSESAEGVVPPASGGGRVQNSPPVGRKTLPLTTAPEAGEVTPSDSGGQEDSPAKGLSVRLEFDYSEDKSSWDNQQENPPPTKKIGKKPVAKMPLRRPKMKKTPEKLDNTPASPPRSPAEPNDIPIAKGTYTFDIDKWDDPNFNPFSSTSKMQESPKLPQQSYNFDPDTCDESVDPFKTSSKTPSSPSKSPASFEIPASAMEANGVDGDGLNKPAKKKKTPLKTDTFRVKKSPKRSPLSDPPSQDPTPAATPETPPVISAVVHATDEEKLAVTNQKWTCMTVDLEADKQDYPQPSDLSTFVNETKFSSPTEELDYRNSYEIEYMEKIGSSLPQDDDAPKKQALYLMFDTSQESPVKSSPVRMSESPTPCSGSSFEETEALVNTAAKNQHPVPRGLAPNQESHLQVPEKSSQKELEAMGLGTPSEAIEITAPEGSFASADALLSRLAHPVSLCGALDYLEPDLAEKNPPLFAQKLQEELEFAIMRIEALKLARQIALASRSHQDAKREAAHPTDVSISKTALYSRIGTAEVEKPAGLLFQQPDLDSALQIARAEIITKEREVSEWKDKYEESRREVMEMRKIVAEYEKTIAQMIEDEQREKSVSHQTVQQLVLEKEQALADLNSVEKSLADLFRRYEKMKEVLEGFRKNEEVLKRCAQEYLSRVKKEEQRYQALKVHAEEKLDRANAEIAQVRGKAQQEQAAHQASLRKEQLRVDALERTLEQKNKEIEELTKICDELIAKMGKS

SEQ ID NO: 12986 - protein, 21 aa, Artificial Sequence
  Synthetic polypeptide
DTEPAGALILDFPASRTEFRF

SEQ ID NO: 12987 - protein, 1012 aa, Artificial Sequence
  Synthetic polypeptide
SWTSQPPELSSDSEEAFETPESTTPVKAPPAPPPPPPEVIPEPEVSTQPPPEEPGCGSETVPVPDGPRSDSVEGSPFRPPSHSFSAVFDEDKPIASSGTYNLDFDNIELVDTFQTLEPRASDAKNQEGKVNTRRKSTDSVPISKSTLSRSLSLQASDFDGASSSGNPEAVALAPDAYSTGSSSASSTLKRTKKPRPPSLKKKQTTKKPTETPPVKETQQEPDEESLVPSGENLASETKTESAKTEGPSPALLEETPLEPAVGPKAACPLDSESAEGVVPPASGGGRVQNSPPVGRKTLPLTTAPEAGEVTPSDSGGQEDSPAKGLSVRLEFDYSEDKSSWDNQQENPPPTKKIGKKPVAKMPLRRPKMKKTPEKLDNTPASPPRSPAEPNDIPIAKGTYTFDIDKWDDPNFNPFSSTSKMQESPKLPQQSYNFDPDTCDESVDPFKTSSKTPSSPSKSPASFEIPASAMEANGVDGDGLNKPAKKKKTPLKTDTFRVKKSPKRSPLSDPPSQDPTPAATPETPPVISAVVHATDEEKLAVTNQKWTCMTVDLEADKQDYPQPSDLSTFVNETKFSSPTEELDYRNSYEIEYMEKIGSSLPQDDDAPKKQALYLMFDTSQESPVKSSPVRMSESPTPCSGSSFEETEALVNTAAKNQHPVPRGLAPNQESHLQVPEKSSQKELEAMGLGTPSEAIEITAPEGSFASADALLSRLAHPVSLCGALDYLEPDLAEKNPPLFAQKLQEELEFAIMRIEALKLARQIALASRSHQDAKREAAHPTDVSISKTALYSRIGTAEVEKPAGLLFQQPDLDSALQIARAEIITKEREVSEWKDKYEESRREVMEMRKIVAEYEKTIAQMIEDEQREKSVSHQTVQQLVLEKEQALADLNSVEKSLADLFRRYEKMKEVLEGFRKNEEVLKRCAQEYLSRVKKEEQRYQALKVHAEEKLDRANAEIAQVRGKAQQEQAAHQASLRKEQLRVDALERTLEQKNKEIEELTKICDELIAKMGKS

SEQ ID NO: 12988 - protein, 935 aa, Artificial Sequence
  Synthetic polypeptide
SWTSQPPELSSDSEEAFETPESTTPVKAPPAPPPPPPEVIPEPEVSTQPPPEEPGCGSETVPVPDGPRSDSVEGSPFRPPSHSFSAVFDEDKPIASSGTYNLDFDNIELVDTFQTLEPRASDAKNQEGKVNTRRKSTDSVPISKSTLSRSLSLQASDFDGASSSGNPEAVALAPDAYSTGSSSASSTLKRTKKPRPPSLKKKQTTKKPTETPPVKETQQEPDEESLVPSGENLASETKTESAKTEGPSPALLEETPLEPAVGPKAACPLDSESAEGVVPPASGGGRVQNSPPVGRKTLPLTTAPEAGEVTPSDSGGQEDSPAKGLSVRLEFDYSEDKSSWDNQQENPPPTKKIGKKPVAKMPLRRPKMKKTPEKLDNTPASPPRSPAEPNDIPIAKGTYTFDIDKWDDPNFNPFSSTSKMQESPKLPQQSYNFDPDTCDESVDPFKTSSKTPSSPSKSPASFEIPASAMEANGVDGDGLNKPAKKKKTPLKTDTFRVKKSPKRSPLSDPPSQDPTPAATPETPPVISAVVHATDEEKLAVTNQKWTCMTVDLEADKQDYPQPSDLSTFVNETKFSSPTEELDYRNSYEIEYMEKIGSSLPQDDDAPKKQALYLMFDTSQESPVKSSPVRMSESPTPCSGSSFEETEALVNTAAKNQHPVPRGLAPNQESHLQVPEKSSQKELEAMGLGTPSEAIEIREAAHPTDVSISKTALYSRIGTAEVEKPAGLLFQQPDLDSALQIARAEIITKEREVSEWKDKYEESRREVMEMRKIVAEYEKTIAQMIEDEQREKSVSHQTVQQLVLEKEQALADLNSVEKSLADLFRRYEKMKEVLEGFRKNEEVLKRCAQEYLSRVKKEEQRYQALKVHAEEKLDRANAEIAQVRGKAQQEQAAHQASLRKEQLRVDALERTLEQKNKEIEELTKICDELIAKMGKS

SEQ ID NO: 12989 - protein, 982 aa, Artificial Sequence
  Synthetic polypeptide
SWTSQPPELSSDSEEAFETPESTTPVKAPPAPPPPPPEVIPEPEVSTQPPPEEPGCGSETVPVPDGPRSDSVEGSPFRPPSHSFSAVFDEDKPIASSGTYNLDFDNIELVDTFQTLEPRASDAKNQEGKVNTRRKSTDSVPISKSTLSRSLSLQASDFDGASSSGNPEAVALAPDAYSTGSSSASSTLKRTKKPRPPSLKKKQTTKKPTETPPVKETQQEPDEESLVPSGENLASETKTESAKTEGPSPALLEETPLEPAVGPKAACPLDSESAEGVVPPASGGGRVQNSPPVGRKTLPLTTAPEAGEVTPSDSGGQEDSPAKGLSVRLEFDYSEDKSSWDNQQENPPPTKKIGKKPVAKMPLRRPKMKKTPEKLDNTPASPPRSPAEPNDIPIAKGTYTFDIDKWDDPNFNPFSSTSKMQESPKLPQQSYNFDPDTCDESVDPFKTSSKTPSSPSKSPASFEIPASAMEANGVDGDGLNKPAKKKKTPLKTDTFRVKKSPKRSPLSDPPSQDPTPAATPETPPVISAVVHATDEEKLAVTNQKWTCMTVDLEADKQDYPQPSDLSTFVNETKFSSPTEELDYRNSYEIEYMEKIGSSLPQDDDAPKKQALYLMFDTSQESPVKSSPVRMSESPTPCSGSSFEETEALVNTAAKNQHPVPRGLAPNQESHLQVPEKSSQKELEAMGLGTPSEAIEITAPEGSFASADALLSRLAHPVSLCGALDYLEPDLAEKNPPLFAQKLQREAAHPTDVSISKTALYSRIGTAEVEKPAGLLFQQPDLDSALQIARAEIITKEREVSEWKDKYEESRREVMEMRKIVAEYEKTIAQMIEDEQREKSVSHQTVQQLVLEKEQALADLNSVEKSLADLFRRYEKMKEVLEGFRKNEEVLKRCAQEYLSRVKKEEQRYQALKVHAEEKLDRANAEIAQVRGKAQQEQAAHQASLRKEQLRVDALERTLEQKNKEIEELTKICDELIAKMGKS

SEQ ID NO: 12990 - protein, 1024 aa, Artificial Sequence
  Synthetic polypeptide
SWTSQPPELSSDSEEAFETPESTTPVKAPPAPPPPPPEVIPEPEVSTQPPPEEPGCGSETVPVPDGPRSDSVEGSPFRPPSHSFSAVFDEDKPIASSGTYNLDFDNIELVDTFQTLEPRASDAKNQEGKVNTRRKSTDSVPISKSTLSRSLSLQASDFDGASSSGNPEAVALAPDAYSTGSSSASSTLKRTKKPRPPSLKKKQTTKKPTETPPVKETQQEPDEESLVPSGENLASETKTESAKTEGPSPALLEETPLEPAVGPKAACPLDSESAEGVVPPASGGGRVQNSPPVGRKTLPLTTAPEAGEVTPSDSGGQEDSPAKGLSVRLEFDYSEDKSSWDNQQENPPPTKKIGKKPVAKMPLRRPKMKKTPEKLDNTPASPPRSPAEPNDIPIAKGTYTFDIDKWDDPNFNPFSSTSKMQESPKLPQQSYNFDPDTCDESVDPFKTSSKTPSSPSKSPASFEIPASAMEANGVDGDGLNKPAKKKKTPLKTMVEDVMSVCSLFDTFRVKKSPKRSPLSDPPSQDPTPAATPETPPVISAVVHATDEEKLAVTNQKWTCMTVDLEADKQDYPQPSDLSTFVNETKFSSPTEELDYRNSYEIEYMEKIGSSLPQDDDAPKKQALYLMFDTSQESPVKSSPVRMSESPTPCSGSSFEETEALVNTAAKNQHPVPRGLAPNQESHLQVPEKSSQKELEAMGLGTPSEAIEITAPEGSFASADALLSRLAHPVSLCGALDYLEPDLAEKNPPLFAQKLQEELEFAIMRIEALKLARQIALASRSHQDAKREAAHPTDVSISKTALYSRIGTAEVEKPAGLLFQQPDLDSALQIARAEIITKEREVSEWKDKYEESRREVMEMRKIVAEYEKTIAQMIEDEQREKSVSHQTVQQLVLEKEQALADLNSVEKSLADLFRRYEKMKEVLEGFRKNEEVLKRCAQEYLSRVKKEEQRYQALKVHAEEKLDRANAEIAQVRGKAQQEQAAHQASLRKEQLRVDALERTLEQKNKEIEELTKICDELIAKMGKS

SEQ ID NO: 12991 - protein, 994 aa, Artificial Sequence
  Synthetic polypeptide
SWTSQPPELSSDSEEAFETPESTTPVKAPPAPPPPPPEVIPEPEVSTQPPPEEPGCGSETVPVPDGPRSDSVEGSPFRPPSHSFSAVFDEDKPIASSGTYNLDFDNIELVDTFQTLEPRASDAKNQEGKVNTRRKSTDSVPISKSTLSRSLSLQASDFDGASSSGNPEAVALAPDAYSTGSSSASSTLKRTKKPRPPSLKKKQTTKKPTETPPVKETQQEPDEESLVPSGENLASETKTESAKTEGPSPALLEETPLEPAVGPKAACPLDSESAEGVVPPASGGGRVQNSPPVGRKTLPLTTAPEAGEVTPSDSGGQEDSPAKGLSVRLEFDYSEDKSSWDNQQENPPPTKKIGKKPVAKMPLRRPKMKKTPEKLDNTPASPPRSPAEPNDIPIAKGTYTFDIDKWDDPNFNPFSSTSKMQESPKLPQQSYNFDPDTCDESVDPFKTSSKTPSSPSKSPASFEIPASAMEANGVDGDGLNKPAKKKKTPLKTMVEDVMSVCSLFDTFRVKKSPKRSPLSDPPSQDPTPAATPETPPVISAVVHATDEEKLAVTNQKWTCMTVDLEADKQDYPQPSDLSTFVNETKFSSPTEELDYRNSYEIEYMEKIGSSLPQDDDAPKKQALYLMFDTSQESPVKSSPVRMSESPTPCSGSSFEETEALVNTAAKNQHPVPRGLAPNQESHLQVPEKSSQKELEAMGLGTPSEAIEITAPEGSFASADALLSRLAHPVSLCGALDYLEPDLAEKNPPLFAQKLQREAAHPTDVSISKTALYSRIGTAEVEKPAGLLFQQPDLDSALQIARAEIITKEREVSEWKDKYEESRREVMEMRKIVAEYEKTIAQMIEDEQREKSVSHQTVQQLVLEKEQALADLNSVEKSLADLFRRYEKMKEVLEGFRKNEEVLKRCAQEYLSRVKKEEQRYQALKVHAEEKLDRANAEIAQVRGKAQQEQAAHQASLRKEQLRVDALERTLEQKNKEIEELTKICDELIAKMGKS

SEQ ID NO: 12992 - protein, 638 aa, Artificial Sequence
  Synthetic polypeptide
SWTSQPPELSSDSEEAFETPESTTPVKAPPAPPPPPPEVIPEPEVSTQPPPEEPGCGSETVPVPDGPRSDSVEGSPFRPPSHSFSAVFDEDKPIASSGTYNLDFDNIELVDTFQTLEPRASDAKNQEGKVNTRRKSTDSVPISKSTLSRSLSLQASDFDGASSSGNPEAVALAPDAYSTGSSSASSTLKRTKKPRPPSLKKKQTTKKPTETPPVKETQQEPDEESLVPSGENLASETKTESAKTEGPSPALLEETPLEPAVGPKAACPLDSESAEGVVPPASGGGRVQNSPPVGRKTLPLTTAPEAGEVTPSDSGGQEDSPAKGLSVRLEFDYSEDKSSWDNQQENPPPTKKIGKKPVAKMPLRRPKMKKTPEKLDNTPASPPRSPAEPNDIPIAKGTYTFDIDKWDDPNFNPFSSTSKMQESPKLPQQSYNFDPDTCDESVDPFKTSSKTPSSPSKSPASFEIPASAMEANGVDGDGLNKPAKKKKTPLKTDTFRVKKSPKRSPLSDPPSQDPTPAATPETPPVISAVVHATDEEKLAVTNQKWTCMTVDLEADKQDYPQPSDLSTFVNETKFSSPTEELDYRNSYEIEYMEKIGSSLPQDDDAPKKQALYLMFDTSQESPVKSSPVRMSESPTPCS

SEQ ID NO: 12993 - protein, 34 aa, Artificial Sequence
  Synthetic polypeptide
TTSVLCRVPTSKKALTRCCPLTFDFSDSITEFRF

SEQ ID NO: 12994 - protein, 69 aa, Artificial Sequence
  Synthetic polypeptide
FCDCDHLCPMHTFYFPCETAQILFCLLLASSESTGHSARHKNKAHRPGISLCGLRAQPRQPASGTPGEV

SEQ ID NO: 12995 - protein, 132 aa, Artificial Sequence
  Synthetic polypeptide
GALLALDFVTVIISAPCTHFISHVRLLRYFFVFSLHPLRALDTVPDTRIKHTDLESPSAVYEHNHVSLRAARLVKYEIRAEALVDGKWQEFRTNQIKQKFGLTTSSCKSHTLKIQTVGIPIYVSFAFIFPAS

SEQ ID NO: 12996 - protein, 10 aa, Artificial Sequence
  Synthetic polypeptide
EHWTQCQTQE

SEQ ID NO: 12997 - protein, 27 aa, Artificial Sequence
  Synthetic polypeptide
QDSGRRRQHHFCEIPAQGKGTSSCNTT

SEQ ID NO: 12998 - protein, 201 aa, Artificial Sequence
  Synthetic polypeptide
GKLKSPDRIVEDEDSITSVKSLPKEKEPLRVIPLKEVHKVQECKQSDIMMRDNLFEIVTTSRTFYVQADSPEEMHSWIKAVSGAIVAQRGPGRSASSEHPPGPSESKHAFRPTNAATATSHSTASRSNSLVSTFTMEKRGFYESLAKVKPGNFKVQTVSPREPASKVTEQALLRPQSKNGPQEKDCDLVDLDDASLPVSDV

SEQ ID NO: 12999 - protein, 11 aa, Artificial Sequence
  Synthetic polypeptide
NPCPRKRNLFV

SEQ ID NO: 13000 - protein, 180 aa, Artificial Sequence
  Synthetic polypeptide
GKLKSPDRIVEDEDSITSVKSLPKEKEPLRVIPLKEVHKVQECKQSDIMMRDNLFEIVTTSRTFYVQADSPEEMHSWIKAVSGAIVAQRGPGRSASSMRQARRLSNPCIQRSIPPVLQNPNTLSVLPTQPPPPHIPQPLAATLWSQPLPWRSEDFTSLLPRSSQGTSRSRLSLQENQLPK

SEQ ID NO: 13001 - protein, 131 aa, Artificial Sequence
  Synthetic polypeptide
GKLKSPDRIVEDEDSITSVKSLPKEKEPLRVIPLKEVHKVQECKQSDIMMRDNLFEIVTTSRTFYVQADSPEEMHSWIKAVSGAIVAQRGPGRSASSMRQARRLSNPCIQRYTSRAGECSTYVGSHANVPS

SEQ ID NO: 13002 - protein, 68 aa, Artificial Sequence
  Synthetic polypeptide
DTLGKKEGDKQFCVLLNMLMEDFLPKLYSHWRAASVGVGQFWIQAYDWTTILIYLRNLKQVVLHTFSF

SEQ ID NO: 13003 - protein, 235 aa, Artificial Sequence
  Synthetic polypeptide
WKTSFLNCIPIGEQLQSVLGNSGYKHMIGLQSSSTLGTLNKSSSTPFPFRTGLTSGNVTENLQTYIDKSTQLPGGENSTKLDECKVMPQNHSFLENDLKNAMASFLPKKVSDNSNIPNSELLPFLQNLCSQVNHLHVGNKTECQENITKHGERILGVGMEEQSICSYLEKILSKNMELMEKKLMDYIDQRIHELQEHIDDKIALLLDLLQNPNSPPTGIPLRHYDSGERLSNGER

SEQ ID NO: 13004 - protein, 21 aa, Artificial Sequence
  Synthetic polypeptide
LTTRGSNGFVGLLPALFRLSS

SEQ ID NO: 13005 - protein, 185 aa, Artificial Sequence
  Synthetic polypeptide
PPEEVMDSLGFCQLFLDCPLETCLQRNGQRPQALPPETIHLMGRKLEKPNPEKNAWEHNSLTIPSPACASEASLEVTDLLLTALENPVKYAEDNMEQKDTDRIICSTNILHKTDQTLRRIVSQTMKEAKGNQEAFSEMTFKQRWVRANHAAIWRIILGNEHIKCRSAKVGWLQCCRIEKRPLSTG

SEQ ID NO: 13006 - protein, 10 aa, Artificial Sequence
  Synthetic polypeptide
WIRWAFASSF

SEQ ID NO: 13007 - protein, 126 aa, Artificial Sequence
  Synthetic polypeptide
PPEEVMDSLGFCQLFLDCPLETCLQRNGQRPQALPPETIHLMGRKLEKPNPEKNAWEHNSLTIPSPACASEASLEVTDLLLTALENPVKYAEDNMEQKVNFQCKFNVNEKEQLFVGRSFEPNIKCE

SEQ ID NO: 13008 - protein, 195 aa, Artificial Sequence
  Synthetic polypeptide
PPEEVMDSLGFCQLFLDCPLETCLQRNGQRPQALPPETIHLMGRKLEKPNPEKNAWEHNSLTIPSPACASEASLEVTDLLLTALENPVKYAEDNMEQKDTDRIICSTNILHKTDQTLRRIVSQTMKEAKDEQVLPHNLKLLAEELNKLKAEFLEDLKQGNKKYLCFQQTIDIPDVISFFHYEKDNIVQKYFSKQH

SEQ ID NO: 13009 - protein, 12 aa, Artificial Sequence
  Synthetic polypeptide
CKVQEVSPKDQV

SEQ ID NO: 13010 - protein, 80 aa, Artificial Sequence
  Synthetic polypeptide
KHDAKCKKSVPKTKYEQVLPHNLKLLAEELNKLKAEFLEDLKQGNKKYLCFQQTIDIPDVISFFHYEKDNIVQKYFSKQH

SEQ ID NO: 13011 - protein, 35 aa, Artificial Sequence
  Synthetic polypeptide
NADMCYTMWNNLENMMQSARSQSQRPSMNKCFLTT

SEQ ID NO: 13012 - protein, 10 aa, Artificial Sequence
  Synthetic polypeptide
MRGQTGRPPD

SEQ ID NO: 13013 - protein, 40 aa, Artificial Sequence
  Synthetic polypeptide
CAVRQGGHLTEAFPAEGEVLHQRVAEVPGRAGGAASEAGI

SEQ ID NO: 13014 - protein, 51 aa, Artificial Sequence
  Synthetic polypeptide
YYSSPPCAAPVQKMTDGETWTGNALFRLTNRAPASGNACLKRTAHYGTGRQ

SEQ ID NO: 13015 - protein, 13 aa, Artificial Sequence
  Synthetic polypeptide
IIAALLVPPQFRK

SEQ ID NO: 13016 - protein, 387 aa, Artificial Sequence
  Synthetic polypeptide
QPSLCRPSSENDRWRDLDRKCPLQIDQPSTSIWECLPEKDSSLWHREAVTACAVTSLIKDLSISDHNGNPSAPPSKRQCRSLSFSDEMSSCRTSWRPLGSKVWTPVEKRRCYSGGSVQRYSNGFSTMQRSSSFSLPSRANVLSSPCDQAGLHHRFGGQPCQGVPGSAPCGQAGDTWSPDLHPVGGGRLDLQRSLSCSHEQFSFVEYCPPSANSTPASTPELARRSSGLSRSRSQPCVLNDKKVGVKRRRPEEVQEQRPSLDLAKMAQNCQTFSSLSCLSAGTEDCGPQSPFARHVSNTRAWTALLSASGPGGRTPAGTPVPEPLPPSFDDHLACQEDLSCEESDSCALDEDCGRRAEPAAAWRDRGAPGNSLCSLDGELDIEQIEKN

SEQ ID NO: 13017 - protein, 270 aa, Artificial Sequence
  Synthetic polypeptide
QPSLCRPSSENDRWRDLDRKCPLQIDQPSTSIWECLPEKDSSLWHREAVTACAVTSLIKDLSISDHNGNPSAPPSKRQCRSLSFSDEMSSCRTSWRPLGSKVWTPVEKRRCYSGGSVQRYSNGFSTMQRSSSFSLPSRANVLSSPCDQAGLHHRFGGQPCQGVPGSAPCGQAGDTWSPDLHPVGGGRLDLQRSLSCSHEQFSFVEYCPPSANSTPASTPELARRSSGLSRSRSQPCVLNDKKVGVKRRRPEEVQEQRPSLDLAKMAQIAP

SEQ ID NO: 13018 - protein, 63 aa, Artificial Sequence
  Synthetic polypeptide
KESHWVVQIPAQYAAADVLQRAGSSQAAHPHPRRARPRLSSLQLHLHCQQFHSRFRICALQTK

SEQ ID NO: 13019 - protein, 333 aa, Artificial Sequence
  Synthetic polypeptide
DWQKSKKKVIGWYRFRRNTQQQMSYREQVLHKQLTRILGVPDLVFLLFSFISTANNSTHALEYVLFRPNRRYNQRISLAIPNLGNTSQQEYKVSSVPNTSQSYAKVIKEHGTDFFDKDGVMKDIRAIYQVYNALQEKVQAVCADVEKSERVVESCQAEVNKLRRQITQRKNEKEQERRLQQAVLSRQMPSESLDPAFSPRMPSSGFAAEGRSTLGDAEASDPPPPYSDFHPNNQESTLSHSRMERSVFMPRPQAVGSSNYASTSAGLKYPGSGADLPPPQRAAGDSGEDSDDSDYENLIDPTEPSNSEYSHSKDSRPMAHPDEDPRNTQTSQI

SEQ ID NO: 13020 - protein, 69 aa, Artificial Sequence
  Synthetic polypeptide
NEILFFAHKIGKRVKRKSLGGTDSGAIRSSRCPTESRFFTSSSPASSACPTSSFFSSASSPLPTIPLTL

SEQ ID NO: 13021 - protein, 126 aa, Artificial Sequence
  Synthetic polypeptide
FLHFQLSAQQQTPRQEVPRAPAHQDRVRGRDGPRAWPQRSADLGRRPAGGAADHHVLHGQDRQVERPGAAGRAPVPLRGARVPAEHRGGQPAPHGPPRTRHEPPHGGCRPAARLLPAQPASPQRRE

SEQ ID NO: 13022 - protein, 77 aa, Artificial Sequence
  Synthetic polypeptide
GRSQDGRIGTAPVYSSQRERRRRQVISAFPTECTAANTSSGSSAGTCAPRSSPGKGRSPCVAPAQCRPGTASCWGSS

SEQ ID NO: 13023 - protein, 135 aa, Artificial Sequence
  Synthetic polypeptide
EQLRSTAPSVSDAEDSAQQQTPRQEVPRAPAHQDRVRGRDGPRAWPQRSADLGRRPAGGAADHHVLHGQDRQVERPGAAGRAPVPLRGARVPAEHRGGQPAPHGPPRTRHEPPHGGCRPAARLLPAQPASPQRRE

SEQ ID NO: 13024 - protein, 240 aa, Artificial Sequence
  Synthetic polypeptide
ATQKTVHSSKHLVRKFRGHLRTKIESGEGTVPVRGPSAVQTWDGVLLGEQLITMSCTDKIARWNVLGLQGALLSHFVEPVYLQSIVVGSLHHTGHLARVMSHRMEGVGQLPASYRHNRPLLSGVSDAEARQPGKSPPFSMNWVVGSADLEIINATTGRRSCGGPSRLCKHVLSARWARLYGRLSTRTPSPGDTPSMYCEAKLGAHTYQSVKQQLFKAFQKAGLGTWVRKPPEQQQFLLTL

SEQ ID NO: 13025 - protein, 69 aa, Artificial Sequence
  Synthetic polypeptide
GRSQDGRIGTAPVYSSQRERRRRQCTAANTSSGSSAGTCAPRSSPGKGRSPCVAPAQCRPGTASCWGSS

SEQ ID NO: 13026 - protein, 70 aa, Artificial Sequence
  Synthetic polypeptide
TLSFLREILGIRNSPVYPKSPRINSSRHIVSTHFLILKITGDSFLPAPEQWKQQSYVWSKTIKLKSGKGL

SEQ ID NO: 13027 - protein, 6 aa, Artificial Sequence
  Synthetic polypeptide
ALTFSS

SEQ ID NO: 13028 - protein, 224 aa, Artificial Sequence
  Synthetic polypeptide
FQAHSKHSLSHPEDYGGLIFTSPRAVEAAELCLEQNNKTEVWERSLKEKWNAKSVYVVGNATASLVSKIGLDTEGETCGNAEKLAEYICSRESSALPLLFPCGNLKREILPKALKDKGIAMESITVYQTVAHPGIQGNLNSYYSQQGVPASITFFSPSGLTYSLKHIQELSGDNIDQIKFAAIGPTTARALAAQGLPVSCTAESPTPQALATGIRKALQPHGCC

SEQ ID NO: 13029 - protein, 172 aa, Artificial Sequence
  Synthetic polypeptide
FQAHSKHSLSHPEDYGGLIFTSPRAVEAAELCLEQNNKTEVWERSLKEKWNAKSVYVVGNATASLVSKIGLDTEGETCGNAEKLAEYICSRESSALPLLFPCGNLKREILPKALKDKGIAMESITVYQTVAHPGIQGNLNSYYSQQGVPASITFFSPSGLTYSLKHIQELSG

SEQ ID NO: 13030 - protein, 98 aa, Artificial Sequence
  Synthetic polypeptide
FQAHSKHSLSHPEDYGGLIFTSPRAVEAAELCLEQNNKTEVWERSLKEKWNAKSVYVVGNATASLVSKIGLDTEGETCGNAEKLAEYICSSEEVKGIF

SEQ ID NO: 13031 - protein, 92 aa, Artificial Sequence
  Synthetic polypeptide
FQAHSKHSLSHPEDYGGLIFTSPRAVEAAELCLEQNNKTEVWERSLKEKWNAKSVYVVGNATASLVSKIGLDTEGETCGNAEKLAEYICSSK

SEQ ID NO: 13032 - protein, 27 aa, Artificial Sequence
  Synthetic polypeptide
FLHFHLRNHATLKASSTCRGQSDSSQH

SEQ ID NO: 13033 - protein, 47 aa, Artificial Sequence
  Synthetic polypeptide
GRSQDGRIGTAPVYSSQCERRRRRVISAFPSEKSCHPQSLIHLSWAK

SEQ ID NO: 13034 - protein, 52 aa, Artificial Sequence
  Synthetic polypeptide
VLPCDLPNYHEPQFLHLSNGKKYSCLPEQLWDSTRKHWKFVSLSSFLAHKNG

SEQ ID NO: 13035 - protein, 40 aa, Artificial Sequence
  Synthetic polypeptide
CYHVIYQTTMSLSFCICQMERNIPAFLNSCGTPRGSTGSS

SEQ ID NO: 13036 - protein, 133 aa, Artificial Sequence
  Synthetic polypeptide
TVVGLHEEALEVRKPQFISRSQERLKKLEHMVQQRKAQRKEDLRQKQSLLPIRTSKKQFTIPHPLSDNLFKPKERCISEKEMHMRSKRIYDNLPEVKKKKEEQRKRVILQSNRLRAEVFKKQLLDQLLQRNAV

SEQ ID NO: 13037 - protein, 141 aa, Artificial Sequence
  Synthetic polypeptide
TVVGLHEEALEVRKPQFISRSQERLKKLEHMVQQRKAQRKEDLRQKQSLLPIRTSKKQFTIPHPLSDNLFKPKERCISEKEMHMRSKRIYDNLPEVKKKKEEQRKRVILQSNRLRAEVFKKVMASSPAGVMCVVHRCRIST

SEQ ID NO: 13038 - protein, 96 aa, Artificial Sequence
  Synthetic polypeptide
TVVGLHEEALEVRKPQFISRSQERLKKLEHMVQQRKAQRKEDLRQKQSLLPIRTSKKQFTIPHPLSDNLFKPKERCISEKEMHMRSKRIYDNLPEV

SEQ ID NO: 13039 - protein, 12 aa, Artificial Sequence
  Synthetic polypeptide
EEEEITHAVTWL

SEQ ID NO: 13040 - protein, 9 aa, Artificial Sequence
  Synthetic polypeptide
ERKRRLHML

SEQ ID NO: 13041 - protein, 191 aa, Artificial Sequence
  Synthetic polypeptide
RGRGDYTCCDLVVKIKECKKSEDPTTPEPSPAAPSPAPRDGAGSPGLSEDCSESQQTPARSLTLQEALEVRKPQFISRSQERLKKLEHMVQQRKAQRKEDLRQKQSLLPIRTSKKQFTIPHPLSDNLFKPKERCISEKEMHMRSKRIYDNLPEVKKKKEEQRKRVILQSNRLRAEVFKKQLLDQLLQRNAV

SEQ ID NO: 13042 - protein, 199 aa, Artificial Sequence
  Synthetic polypeptide
RGRGDYTCCDLVVKIKECKKSEDPTTPEPSPAAPSPAPRDGAGSPGLSEDCSESQQTPARSLTLQEALEVRKPQFISRSQERLKKLEHMVQQRKAQRKEDLRQKQSLLPIRTSKKQFTIPHPLSDNLFKPKERCISEKEMHMRSKRIYDNLPEVKKKKEEQRKRVILQSNRLRAEVFKKVMASSPAGVMCVVHRCRIST

SEQ ID NO: 13043 - protein, 154 aa, Artificial Sequence
  Synthetic polypeptide
RGRGDYTCCDLVVKIKECKKSEDPTTPEPSPAAPSPAPRDGAGSPGLSEDCSESQQTPARSLTLQEALEVRKPQFISRSQERLKKLEHMVQQRKAQRKEDLRQKQSLLPIRTSKKQFTIPHPLSDNLFKPKERCISEKEMHMRSKRIYDNLPEV

SEQ ID NO: 13044 - protein, 21 aa, Artificial Sequence
  Synthetic polypeptide
EEEYTQKYFLEAARGNKEKYV

SEQ ID NO: 13045 - protein, 34 aa, Artificial Sequence
  Synthetic polypeptide
ERKSTHKSIFWKQQEATRRSMYDCVCSSSGTEAH

SEQ ID NO: 13046 - protein, 288 aa, Artificial Sequence
  Synthetic polypeptide
RGRVHTKVFSGSSKRQQGEVCMTVSAPPVEQKPTRHFLPIGDSSPSDDCLSRDLSEPTERRHQSFLKPRILFPGFLCPLQDVCASLQEDNGVQIESKFPKGDYTCCDLVVKIKECKKSEDPTTPEPSPAAPSPAPRDGAGSPGLSEDCSESQQTPARSLTLQEALEVRKPQFISRSQERLKKLEHMVQQRKAQRKEDLRQKQSLLPIRTSKKQFTIPHPLSDNLFKPKERCISEKEMHMRSKRIYDNLPEVKKKKEEQRKRVILQSNRLRAEVFKKQLLDQLLQRNAV

SEQ ID NO: 13047 - protein, 296 aa, Artificial Sequence
  Synthetic polypeptide
RGRVHTKVFSGSSKRQQGEVCMTVSAPPVEQKPTRHFLPIGDSSPSDDCLSRDLSEPTERRHQSFLKPRILFPGFLCPLQDVCASLQEDNGVQIESKFPKGDYTCCDLVVKIKECKKSEDPTTPEPSPAAPSPAPRDGAGSPGLSEDCSESQQTPARSLTLQEALEVRKPQFISRSQERLKKLEHMVQQRKAQRKEDLRQKQSLLPIRTSKKQFTIPHPLSDNLFKPKERCISEKEMHMRSKRIYDNLPEVKKKKEEQRKRVILQSNRLRAEVFKKVMASSPAGVMCVVHRCRIST

SEQ ID NO: 13048 - protein, 251 aa, Artificial Sequence
  Synthetic polypeptide
RGRVHTKVFSGSSKRQQGEVCMTVSAPPVEQKPTRHFLPIGDSSPSDDCLSRDLSEPTERRHQSFLKPRILFPGFLCPLQDVCASLQEDNGVQIESKFPKGDYTCCDLVVKIKECKKSEDPTTPEPSPAAPSPAPRDGAGSPGLSEDCSESQQTPARSLTLQEALEVRKPQFISRSQERLKKLEHMVQQRKAQRKEDLRQKQSLLPIRTSKKQFTIPHPLSDNLFKPKERCISEKEMHMRSKRIYDNLPEV

SEQ ID NO: 13049 - protein, 699 aa, Artificial Sequence
  Synthetic polypeptide
LTGGVTPGLRDSYHSRRDQIALKNLQSDVTEAKSDFTKETLASQNTKMISSIVISQMIDENKSRENRASLPLPCAIAQSRAHHAKQSLANRSGVNIHRAFALLPGRLGIPAPSDERGPEAELPPKEERPCGGPRRGFASITITARRVGPPARALVWGTAGDSLCPKCRAEDTLFQAPPALANGAHPGRHQRSFACTEFSRNSSVVRLKVPEAHTGLCERRKYWVTHADDKETSFSPDTPLSGKSPLVFSSCVHLRVSQQCPDSIYYVDKSLSVPIEPPQIASPKMHRSVLSLNLNCSSHRLTADGVDGLVNREPISEALKQELLEGDQDLVGQRWNPGLQESHLKETPSLRRVHLGTGACPWSGSFPLENTELANVGANQVTVRKGEKDHTTHCHASDHANQLSIHIPGWSYRAVHTKVFSGSSKRQQGEVCMTVSAPPVEQKPTRHFLPIGDSSPSDDCLSRDLSEPTERRHQSFLKPRILFPGFLCPLQDVCASLQEDNGVQIESKFPKGDYTCCDLVVKIKECKKSEDPTTPEPSPAAPSPAPRDGAGSPGLSEDCSESQQTPARSLTLQEALEVRKPQFISRSQERLKKLEHMVQQRKAQRKEDLRQKQSLLPIRTSKKQFTIPHPLSDNLFKPKERCISEKEMHMRSKRIYDNLPEVKKKKEEQRKRVILQSNRLRAEVFKKQLLDQLLQRNAV

SEQ ID NO: 13050 - protein, 42 aa, Artificial Sequence
  Synthetic polypeptide
HLDYGTATTVEEIKLPLKISSLMSQRQNLTSPRRPWHHKTQK

SEQ ID NO: 13051 - protein, 14 aa, Artificial Sequence
  Synthetic polypeptide
YWRGDTWITGQLPQ

SEQ ID NO: 13052 - protein, 602 aa, Artificial Sequence
  Synthetic polypeptide
LTGGVTPGLRDSYHSRRDQIALKNLQSDVTEAKSDFTKETLASQNTKMISSIVISQMIDENKSRENRASLPLPCAIAQSRAHHAKQSLANRSGVNIHRAFALLPGRLGIPAPSDERGPEAELPPKEERPCGGPRRGFASITITARRVGPPARALVWGTAGDSLCPKCRAEDTLFQAPPALANGAHPGRHQRSFACTEFSRNSSVVRLKVPEAHTGLCERRKYWVTHADDKETSFSPDTPLSGKSPLVFSSCVHLRVSQQCPDSIYYVDKSLSVPIEPPQIASPKMHRSVLSLNLNCSSHRLTADGVDGLVNREPISEALKQELLEGDQDLVGQRWNPGLQESHLKETPSLRRVHLGTGACPWSGSFPLENTELANVGANQVTVRKGEKDHTTHCHASDHANQLSIHIPGWSYRAGDYTCCDLVVKIKECKKSEDPTTPEPSPAAPSPAPRDGAGSPGLSEDCSESQQTPARSLTLQEALEVRKPQFISRSQERLKKLEHMVQQRKAQRKEDLRQKQSLLPIRTSKKQFTIPHPLSDNLFKPKERCISEKEMHMRSKRIYDNLPEVKKKKEEQRKRVILQSNRLRAEVFKKQLLDQLLQRNAV

SEQ ID NO: 13053 - protein, 662 aa, Artificial Sequence
  Synthetic polypeptide
LTGGVTPGLRDSYHSRRDQIALKNLQSDVTEAKSDFTKETLASQNTKMISSIVISQMIDENKSRENRASLPLPCAIAQSRAHHAKQSLANRSGVNIHRAFALLPGRLGIPAPSDERGPEAELPPKEERPCGGPRRGFASITITARRVGPPARALVWGTAGDSLCPKCRAEDTLFQAPPALANGAHPGRHQRSFACTEFSRNSSVVRLKVPEAHTGLCERRKYWVTHADDKETSFSPDTPLSGKSPLVFSSCVHLRVSQQCPDSIYYVDKSLSVPIEPPQIASPKMHRSVLSLNLNCSSHRLTADGVDGLVNREPISEALKQELLEGDQDLVGQRWNPGLQESHLKETPSLRRVHLGTGACPWSGSFPLENTELANVGANQVTVRKGEKDHTTHCHASDHANQLSIHIPGWSYRAVHTKVFSGSSKRQQGEVCMTVSAPPVEQKPTRHFLPIGDSSPSDDCLSRDLSEPTERRHQSFLKPRILFPGFLCPLQDVCASLQEDNGVQIESKFPKGDYTCCDLVVKIKECKKSEDPTTPEPSPAAPSPAPRDGAGSPGLSEDCSESQQTPARSLTLQEALEVRKPQFISRSQERLKKLEHMVQQRKAQRKEDLRQKQSLLPIRTSKKQFTIPHPLSDNLFKPKERCISEKEMHMRSKRIYDNLPEV

SEQ ID NO: 13054 - protein, 39 aa, Artificial Sequence
  Synthetic polypeptide
LTGGVTPGLRDSYHSRRDQIALKNLQSDVTEAKSDFTKV

SEQ ID NO: 13055 - protein, 34 aa, Artificial Sequence
  Synthetic polypeptide
HLDYGTATTVEEIKLPLKISSLMSQRQNLTSPRF

SEQ ID NO: 13056 - protein, 19 aa, Artificial Sequence
  Synthetic polypeptide
KYLFMCVISSRLITGQLPQ

SEQ ID NO: 13057 - protein, 51 aa, Artificial Sequence
  Synthetic polypeptide
ISLYVCHLLKTDYGTATTVEEIKLPLKISSLMSQRQNLTSPRRPWHHKTQK

SEQ ID NO: 13058 - protein, 43 aa, Artificial Sequence
  Synthetic polypeptide
ISLYVCHLLKTDYGTATTVEEIKLPLKISSLMSQRQNLTSPRF

SEQ ID NO: 13059 - protein, 41 aa, Artificial Sequence
  Synthetic polypeptide
QDYGTATTVEEIKLPLKISSLMSQRQNLTSPRRPWHHKTQK

SEQ ID NO: 13060 - protein, 18 aa, Artificial Sequence
  Synthetic polypeptide
GQGIMWSATNRITGQLPQ

SEQ ID NO: 13061 - protein, 716 aa, Artificial Sequence
  Synthetic polypeptide
LQRETVVEWLPGAEVKGSCGVLLTGLRDSYHSRRDQIALKNLQSDVTEAKSDFTKETLASQNTKMISSIVISQMIDENKSRENRASLPLPCAIAQSRAHHAKQSLANRSGVNIHRAFALLPGRLGIPAPSDERGPEAELPPKEERPCGGPRRGFASITITARRVGPPARALVWGTAGDSLCPKCRAEDTLFQAPPALANGAHPGRHQRSFACTEFSRNSSVVRLKVPEAHTGLCERRKYWVTHADDKETSFSPDTPLSGKSPLVFSSCVHLRVSQQCPDSIYYVDKSLSVPIEPPQIASPKMHRSVLSLNLNCSSHRLTADGVDGLVNREPISEALKQELLEGDQDLVGQRWNPGLQESHLKETPSLRRVHLGTGACPWSGSFPLENTELANVGANQVTVRKGEKDHTTHCHASDHANQLSIHIPGWSYRAVHTKVFSGSSKRQQGEVCMTVSAPPVEQKPTRHFLPIGDSSPSDDCLSRDLSEPTERRHQSFLKPRILFPGFLCPLQDVCASLQEDNGVQIESKFPKGDYTCCDLVVKIKECKKSEDPTTPEPSPAAPSPAPRDGAGSPGLSEDCSESQQTPARSLTLQEALEVRKPQFISRSQERLKKLEHMVQQRKAQRKEDLRQKQSLLPIRTSKKQFTIPHPLSDNLFKPKERCISEKEMHMRSKRIYDNLPEVKKKKEEQRKRVILQSNRLRAEVFKKQLLDQLLQRNAV

SEQ ID NO: 13062 - protein, 619 aa, Artificial Sequence
  Synthetic polypeptide
LQRETVVEWLPGAEVKGSCGVLLTGLRDSYHSRRDQIALKNLQSDVTEAKSDFTKETLASQNTKMISSIVISQMIDENKSRENRASLPLPCAIAQSRAHHAKQSLANRSGVNIHRAFALLPGRLGIPAPSDERGPEAELPPKEERPCGGPRRGFASITITARRVGPPARALVWGTAGDSLCPKCRAEDTLFQAPPALANGAHPGRHQRSFACTEFSRNSSVVRLKVPEAHTGLCERRKYWVTHADDKETSFSPDTPLSGKSPLVFSSCVHLRVSQQCPDSIYYVDKSLSVPIEPPQIASPKMHRSVLSLNLNCSSHRLTADGVDGLVNREPISEALKQELLEGDQDLVGQRWNPGLQESHLKETPSLRRVHLGTGACPWSGSFPLENTELANVGANQVTVRKGEKDHTTHCHASDHANQLSIHIPGWSYRAGDYTCCDLVVKIKECKKSEDPTTPEPSPAAPSPAPRDGAGSPGLSEDCSESQQTPARSLTLQEALEVRKPQFISRSQERLKKLEHMVQQRKAQRKEDLRQKQSLLPIRTSKKQFTIPHPLSDNLFKPKERCISEKEMHMRSKRIYDNLPEVKKKKEEQRKRVILQSNRLRAEVFKKQLLDQLLQRNAV

SEQ ID NO: 13063 - protein, 679 aa, Artificial Sequence
  Synthetic polypeptide
LQRETVVEWLPGAEVKGSCGVLLTGLRDSYHSRRDQIALKNLQSDVTEAKSDFTKETLASQNTKMISSIVISQMIDENKSRENRASLPLPCAIAQSRAHHAKQSLANRSGVNIHRAFALLPGRLGIPAPSDERGPEAELPPKEERPCGGPRRGFASITITARRVGPPARALVWGTAGDSLCPKCRAEDTLFQAPPALANGAHPGRHQRSFACTEFSRNSSVVRLKVPEAHTGLCERRKYWVTHADDKETSFSPDTPLSGKSPLVFSSCVHLRVSQQCPDSIYYVDKSLSVPIEPPQIASPKMHRSVLSLNLNCSSHRLTADGVDGLVNREPISEALKQELLEGDQDLVGQRWNPGLQESHLKETPSLRRVHLGTGACPWSGSFPLENTELANVGANQVTVRKGEKDHTTHCHASDHANQLSIHIPGWSYRAVHTKVFSGSSKRQQGEVCMTVSAPPVEQKPTRHFLPIGDSSPSDDCLSRDLSEPTERRHQSFLKPRILFPGFLCPLQDVCASLQEDNGVQIESKFPKGDYTCCDLVVKIKECKKSEDPTTPEPSPAAPSPAPRDGAGSPGLSEDCSESQQTPARSLTLQEALEVRKPQFISRSQERLKKLEHMVQQRKAQRKEDLRQKQSLLPIRTSKKQFTIPHPLSDNLFKPKERCISEKEMHMRSKRIYDNLPEV

SEQ ID NO: 13064 - protein, 33 aa, Artificial Sequence
  Synthetic polypeptide
QDYGTATTVEEIKLPLKISSLMSQRQNLTSPRF

SEQ ID NO: 13065 - protein, 56 aa, Artificial Sequence
  Synthetic polypeptide
LQRETVVEWLPGAEVKGSCGVLLTGLRDSYHSRRDQIALKNLQSDVTEAKSDFTKV

SEQ ID NO: 13066 - protein, 720 aa, Artificial Sequence
  Synthetic polypeptide
FKIKIHSRLFSSPKDHSAWERNESLSNAGLRDSYHSRRDQIALKNLQSDVTEAKSDFTKETLASQNTKMISSIVISQMIDENKSRENRASLPLPCAIAQSRAHHAKQSLANRSGVNIHRAFALLPGRLGIPAPSDERGPEAELPPKEERPCGGPRRGFASITITARRVGPPARALVWGTAGDSLCPKCRAEDTLFQAPPALANGAHPGRHQRSFACTEFSRNSSVVRLKVPEAHTGLCERRKYWVTHADDKETSFSPDTPLSGKSPLVFSSCVHLRVSQQCPDSIYYVDKSLSVPIEPPQIASPKMHRSVLSLNLNCSSHRLTADGVDGLVNREPISEALKQELLEGDQDLVGQRWNPGLQESHLKETPSLRRVHLGTGACPWSGSFPLENTELANVGANQVTVRKGEKDHTTHCHASDHANQLSIHIPGWSYRAVHTKVFSGSSKRQQGEVCMTVSAPPVEQKPTRHFLPIGDSSPSDDCLSRDLSEPTERRHQSFLKPRILFPGFLCPLQDVCASLQEDNGVQIESKFPKGDYTCCDLVVKIKECKKSEDPTTPEPSPAAPSPAPRDGAGSPGLSEDCSESQQTPARSLTLQEALEVRKPQFISRSQERLKKLEHMVQQRKAQRKEDLRQKQSLLPIRTSKKQFTIPHPLSDNLFKPKERCISEKEMHMRSKRIYDNLPEVKKKKEEQRKRVILQSNRLRAEVFKKQLLDQLLQRNAV

SEQ ID NO: 13067 - protein, 183 aa, Artificial Sequence
  Synthetic polypeptide
NDNKQLRIFYKFVDRAVVRFEGIASKVERSSTAGEMPPNNFTCYRELFRERKSQLMQQTSLLSHFKELLQPLQPSANTTLISWQLSTPRQDPPPEKDCNLLKAQMISIFVLAVSSLKLRSTVDSSHPPKIILPGKEMKVFPMQDYGTATTVEEIKLPLKISSLMSQRQNLTSPRRPWHHKTQK

SEQ ID NO: 13068 - protein, 47 aa, Artificial Sequence
  Synthetic polypeptide
NGITVVPSFGSCHGDYIMPVKHLEWCLALDPQSTLLIPQRSFCLGKK

SEQ ID NO: 13069 - protein, 722 aa, Artificial Sequence
  Synthetic polypeptide
NGAWPLIHSRLFSSPKDHSAWERNESLSNAGLRDSYHSRRDQIALKNLQSDVTEAKSDFTKETLASQNTKMISSIVISQMIDENKSRENRASLPLPCAIAQSRAHHAKQSLANRSGVNIHRAFALLPGRLGIPAPSDERGPEAELPPKEERPCGGPRRGFASITITARRVGPPARALVWGTAGDSLCPKCRAEDTLFQAPPALANGAHPGRHQRSFACTEFSRNSSVVRLKVPEAHTGLCERRKYWVTHADDKETSFSPDTPLSGKSPLVFSSCVHLRVSQQCPDSIYYVDKSLSVPIEPPQIASPKMHRSVLSLNLNCSSHRLTADGVDGLVNREPISEALKQELLEGDQDLVGQRWNPGLQESHLKETPSLRRVHLGTGACPWSGSFPLENTELANVGANQVTVRKGEKDHTTHCHASDHANQLSIHIPGWSYRAVHTKVFSGSSKRQQGEVCMTVSAPPVEQKPTRHFLPIGDSSPSDDCLSRDLSEPTERRHQSFLKPRILFPGFLCPLQDVCASLQEDNGVQIESKFPKGDYTCCDLVVKIKECKKSEDPTTPEPSPAAPSPAPRDGAGSPGLSEDCSESQQTPARSLTLQEALEVRKPQFISRSQERLKKLEHMVQQRKAQRKEDLRQKQSLLPIRTSKKQFTIPHPLSDNLFKPKERCISEKEMHMRSKRIYDNLPEVKKKKEEQRKRVILQSNRLRAEVFKKQLLDQLLQRNAV

SEQ ID NO: 13070 - protein, 19 aa, Artificial Sequence
  Synthetic polypeptide
KDPQSTLLIPQRSFCLGKK

SEQ ID NO: 13071 - protein, 743 aa, Artificial Sequence
  Synthetic polypeptide
RPPGAGRRRNGELSFNKYRDAVQDDKKIHSRLFSSPKDHSAWERNESLSNAGLRDSYHSRRDQIALKNLQSDVTEAKSDFTKETLASQNTKMISSIVISQMIDENKSRENRASLPLPCAIAQSRAHHAKQSLANRSGVNIHRAFALLPGRLGIPAPSDERGPEAELPPKEERPCGGPRRGFASITITARRVGPPARALVWGTAGDSLCPKCRAEDTLFQAPPALANGAHPGRHQRSFACTEFSRNSSVVRLKVPEAHTGLCERRKYWVTHADDKETSFSPDTPLSGKSPLVFSSCVHLRVSQQCPDSIYYVDKSLSVPIEPPQIASPKMHRSVLSLNLNCSSHRLTADGVDGLVNREPISEALKQELLEGDQDLVGQRWNPGLQESHLKETPSLRRVHLGTGACPWSGSFPLENTELANVGANQVTVRKGEKDHTTHCHASDHANQLSIHIPGWSYRAVHTKVFSGSSKRQQGEVCMTVSAPPVEQKPTRHFLPIGDSSPSDDCLSRDLSEPTERRHQSFLKPRILFPGFLCPLQDVCASLQEDNGVQIESKFPKGDYTCCDLVVKIKECKKSEDPTTPEPSPAAPSPAPRDGAGSPGLSEDCSESQQTPARSLTLQEALEVRKPQFISRSQERLKKLEHMVQQRKAQRKEDLRQKQSLLPIRTSKKQFTIPHPLSDNLFKPKERCISEKEMHMRSKRIYDNLPEVKKKKEEQRKRVILQSNRLRAEVFKKQLLDQLLQRNAV

SEQ ID NO: 13072 - protein, 93 aa, Artificial Sequence
  Synthetic polypeptide
NRGPQGLGGGGMGNYHLISTEMLFRMIKRSTVDSSHPPKIILPGKEMKVFPMQDYGTATTVEEIKLPLKISSLMSQRQNLTSPRRPWHHKTQK

SEQ ID NO: 13073 - protein, 958 aa, Artificial Sequence
  Synthetic polypeptide
HDAQRKCLLEHFGFQMRDIEPGNFVACMTAILRQMEDYHYAHLIKTFGKMRTDVVDFLMETFIMFKNLIGKNVYPFDWVIMNMVQNKVFLRAINQYADMLNKKFLDQANFELQLWNNYFHLAVAFLTQESLQLENFSSAKRAKILNKYGDMRRQIGFEIRDMWYNLGQHKIKFIPEMVGPILEMTLIPETELRKATIPIFFDMMQCEFHSTRSFQMFENEIITKLDHEVEGGRGDEQYKVLFDKILLEHCRKHKYLAKTGETFVKLVVRLMERLLDYRTIMHDENKENRMSCTVNVLNFYKEIEREEMYIRYLYKLCDLHKECDNYTEAAYTLLLHAKLLKWSEDVCVAHLTQRDGYQATTQGQLKEQLYQEIIHYFDKGKMWEEAIALGKELAEQYENEMFDYEQLSELLKKQAQFYENIVKVIRPKPDYFAVGYYGQGFPTFLRGKVFIYRGKEYERREDFEARLLTQFPNAEKMKTTSPPGDDIKNSPGQYIQCFTVKPKLDLPPKFHRPVSEQIVSFYRVNEVQRFEYSRPIRKGEKNPDNEFANMWIERTIYTTAYKLPGILRWFEVKSVFMVEISPLENAIETMQLTNDKINSMVQQHLDDPSLPINPLSMLLNGIVDPAVMGGFANYEKAFFTDRYLQEHPEAHEKIEKLKDLIAWQIPFLAEGIRIHGDKVTEALRPFHERMEACFKQLKEKVEKEYGVRIMPSSLDDRRGSRPRSMVRSFTMPSSSRPLSVASVSSLSSDSTPSRPGSDGFALEPLLPKKMHSRSQDKLDKDDLEKEKKDKKKEKRNSKHQEIFEKEFKPTDISLQQSEAVILSETISPLRPQRPKSQVMNVIGSERRFSVSPSSPSSQQTPPPVTPRAKLSFSMQSSLELNGMTGADVADVPPPLPLKGSVADYGNLMENQDLLGSPTPPPPPPHQRHLPPPLPSKTPPPPPPKTTRKQASVDSGIVQ

SEQ ID NO: 13074 - protein, 11 aa, Artificial Sequence
  Synthetic polypeptide
EILNRETSWLA

SEQ ID NO: 13075 - protein, 32 aa, Artificial Sequence
  Synthetic polypeptide
TGKLRGLHDSYFTTNGRLPLCPLDQDFWENED

SEQ ID NO: 13076 - protein, 30 aa, Artificial Sequence
  Synthetic polypeptide
LQENKFRLPLILHDDVGGGHCLGQGASRAV

SEQ ID NO: 13077 - protein, 581 aa, Artificial Sequence
  Synthetic polypeptide
FYMMMWEEAIALGKELAEQYENEMFDYEQLSELLKKQAQFYENIVKVIRPKPDYFAVGYYGQGFPTFLRGKVFIYRGKEYERREDFEARLLTQFPNAEKMKTTSPPGDDIKNSPGQYIQCFTVKPKLDLPPKFHRPVSEQIVSFYRVNEVQRFEYSRPIRKGEKNPDNEFANMWIERTIYTTAYKLPGILRWFEVKSVFMVEISPLENAIETMQLTNDKINSMVQQHLDDPSLPINPLSMLLNGIVDPAVMGGFANYEKAFFTDRYLQEHPEAHEKIEKLKDLIAWQIPFLAEGIRIHGDKVTEALRPFHERMEACFKQLKEKVEKEYGVRIMPSSLDDRRGSRPRSMVRSFTMPSSSRPLSVASVSSLSSDSTPSRPGSDGFALEPLLPKKMHSRSQDKLDKDDLEKEKKDKKKEKRNSKHQEIFEKEFKPTDISLQQSEAVILSETISPLRPQRPKSQVMNVIGSERRFSVSPSSPSSQQTPPPVTPRAKLSFSMQSSLELNGMTGADVADVPPPLPLKGSVADYGNLMENQDLLGSPTPPPPPPHQRHLPPPLPSKTPPPPPPKTTRKQASVDSGIVQ

SEQ ID NO: 13078 - protein, 13 aa, Artificial Sequence
  Synthetic polypeptide
VCNLFVLGKVSGP

SEQ ID NO: 13079 - protein, 273 aa, Artificial Sequence
  Synthetic polypeptide
YNMAATTKDFGQTDLDLTYESATYLCWARCQALERKNSAIPSELNEKQELVYTNKKLELQVESMLSEIKMEQAKTEDEKSKLTVLQMTHNKLLQEHNNALKTIEELTRKESEKVDRAVLKELSEKLELAEKALASKQLQMDEMKQTIAKQEEDLETMTILRAQMEVYCSDFHAERAAREKIHEEKEQLALQLAVLLKENDAFEDGGRQSLMEMQSRHGARTSDSDQQAYLVQRGAEDRDWRQQRNIPIHSCPKCGEVLPDIDTLQIHVMDCII

SEQ ID NO: 13080 - protein, 26 aa, Artificial Sequence
  Synthetic polypeptide
HMSLQLICVGQGVRPLKGKILQFHQS

SEQ ID NO: 13081 - protein, 19 aa, Artificial Sequence
  Synthetic polypeptide
QLWGQVRFQQADGGNSSQT

SEQ ID NO: 13082 - protein, 198 aa, Artificial Sequence
  Synthetic polypeptide
MGVMPGEPQAHPCGLSNFGDKSGFSKQMVEILHKHNIQFSSFDIFSDEEVRQGLKAYSSWPTYPQLYVSGELIGGLDIIKELEASEELDTICPKAPKLEERLKVLTNKASVMLFMKGNKQEAKCGFSKQILEILNSTGVEYETFDILEDEEVRQGLKAYSNWPTYPQLYVKGELVGGLDIVKELKENGELLPILRGEN

SEQ ID NO: 13083 - protein, 72 aa, Artificial Sequence
  Synthetic polypeptide
WVSCQASLRPTPAALATLGTSQVSASRWWKFFTNIIFSLAVLISSQMKRFDRDSKPIPVGLPILSSMFLESS

SEQ ID NO: 13084 - protein, 174 aa, Artificial Sequence
  Synthetic polypeptide
GLPIHAQLTEGCGSPKPEEAKREDKGTRTPPPQILLPLEERVTHFRDMLLERGVSAFSTWEKELHKIVFDPRYLLLNSEERKQIFEQFVKTRIKEEYKEKKSKLLLAKEEFKKLLEESKVSPRTTFKEFAEKYGRDQRFRLVQKRKDQEHFFNQFILILKKRDKENRLRLRKMR

SEQ ID NO: 13085 - protein, 110 aa, Artificial Sequence
  Synthetic polypeptide
VLTRFGGLKVRGSLPHPLCLLPPWKTGLASSSTSAKIESFLRPPDPCATDRRLRESQARGGKERGQRHKDAAPADPPASGGACDPLPRHAAGERGISIFYLGERITQNRV

SEQ ID NO: 13086 - protein, 122 aa, Artificial Sequence
  Synthetic polypeptide
DLELEIPFDPAIPLLGIYPKDYKSCCCKDACTHMFIAALFTIAKTWNQLKCPSMIDWIKKMWHIHTVEYYAAVKKDEFMYFAGRWMKLETIILSKLSKGQKTKRRMFSLIGQTMQCQGTCWC

SEQ ID NO: 13087 - protein, 239 aa, Artificial Sequence
  Synthetic polypeptide
VHVLCREMDEAGNHHSKQTIKRTENQTPHVLTHRPDNAVPGDVLVLTKPLGTQVAVAVHQWLDIPEKWNKIKLVVTQEDVELAYQEAMMNMARLNRTAAGLMHTFNAHAATDITGFGILGHAQNLAKQQRNEVSFVIHNLPVLAKMAAVSKACGNMFGLMHGTCPETSGGLLICLPREQAARFCAEIKSPKYGEGHQAWIIGIVEKGNRTARIIDKPRIIEVAPQVATQNVNPTPGATS

SEQ ID NO: 13088 - protein, 168 aa, Artificial Sequence
  Synthetic polypeptide
VHVLCREMDEAGNHHSKQTIKRTENQTPHVLTHRPDNAVPGDVLVLTKPLGTQVAVAVHQWLDIPEKWNKIKLVVTQEDVELAYQEAMMNMARLNRTGGLLICLPREQAARFCAEIKSPKYGEGHQAWIIGIVEKGNRTARIIDKPRIIEVAPQVATQNVNPTPGATS

SEQ ID NO: 13089 - protein, 171 aa, Artificial Sequence
  Synthetic polypeptide
VHVLCREMDEAGNHHSKQTIKRTENQTPHVLTHRPDNAVPGDVLVLTKPLGTQVAVAVHQWLDIPEKWNKIKLVVTQEDVELAYQEAMMNMARLNRTAAGLMHTFNAHAATDITGFGILGHAQNLAKQQRNEVSFVIHNLPVLAKMAAVSKACGNMFGLMHGTCPETSDVQ

SEQ ID NO: 13090 - protein, 66 aa, Artificial Sequence
  Synthetic polypeptide
VSATSILHELPVSARKPAEELASGILPGRAHTQAALHGLALSGVWREELRGLHVPRGQVRQRTIVE

SEQ ID NO: 13091 - protein, 448 aa, Artificial Sequence
  Synthetic polypeptide
KCVALPLSHSISCSTMVRRAFFFFTFRHDCKFSEASQPCFLYRLWNCESVQPLFSMNYQSQPENLQKNWLREFYQVVHTHKPHFMALHCQEFGGKNYEASMSHVDKFVKELLSSDAMKEYNRARVYLDENYKSQEHFTALGSFYFLHESLKNIYQFDFKAKKYRKVAGKEIYSDTLESTPMLEKEKFPQDYFPECKWSRKGFIRTRWCIADCAFDLVNIHLFHDASNLVAWETSPSVYSGIRHKALGYVLDRIIDQRFEKVSYFVFGDFNFRLDSKSVVETLCTKATMQTVRAADTNEVVKLIFRESDNDRKVMLQLEKKLFDYFNQEVFRDNNGTALLEFDKELSVFKDRLYELDISFPPSYPYSEDARQGEQYMNTRCPAWCDRILMSPSAKELVLRSESEEKVVTYDHIGPNVCMGDHKPVFLAFRIMPGAGKPHAHVHKCCVVQ

SEQ ID NO: 13092 - protein, 60 aa, Artificial Sequence
  Synthetic polypeptide
ITSLSQKTCRRTGFGNFTRSCTHTSRTSWPCTVRSLEGRTTRPPCPTWTSSSKNYCRVMR

SEQ ID NO: 13093 - protein, 423 aa, Artificial Sequence
  Synthetic polypeptide
KCVALPLSHSISCSTMVRRAFFFFTFRHDCKFSEASQPCFLYRLWNCESVQPLFSMNYQSQPENLQKNWLREFYQVVHTHKPHFMALHCQEFGGKNYEASMSHVDKFVKELLSSDAMKEYNRARVYLDENYKSQEHFTALGSFYFLHESLKNIYQFDFKAKKYRKVAGKEIYSDTLESTPMLEKEKFPQDYFPECKWSRKGFIRTRWCIADCAFDLVNIHLFHDASNLVAWETSPSVYSGIRHKALGYVLDRIIDQRFEKVSYFVFGDFNFRLDSKSVVETLCTKATMQTVRAADTNEVVKLIFRESDNDRKVMLQLEKKLFDYFNQEVFRDNNGTALLEFDKELSVFKDRLYELDISFPPSYPYSEDARQGEQYMNTRCPAWCDRILMSPSAKELVLRVSVCCPSPGHRGMWSAGSGLAQPW

SEQ ID NO: 13094 - protein, 36 aa, Artificial Sequence
  Synthetic polypeptide
VSATSILHELPVSARKPAEELASGILPGTRKLLFSS

SEQ ID NO: 13095 - protein, 188 aa, Artificial Sequence
  Synthetic polypeptide
KCVALPLSHSISCSTMVRRAFFFFTFRHDCKFSEASQPCFLYRLWNCESVQPLFSMNYQSQPENLQKNWLREFYQALGSFYFLHESLKNIYQFDFKAKKYRKVAGKEIYSDTLESTPMLEKEKFPQDYFPECKWSRKGFIRTRWCIADCAFDLVNIHLFHDASNLVAWETSPSVYSGIRHKALGYVLD

SEQ ID NO: 13096 - protein, 20 aa, Artificial Sequence
  Synthetic polypeptide
ITSLSQKTCRRTGFGNFTRH

SEQ ID NO: 13097 - protein, 201 aa, Artificial Sequence
  Synthetic polypeptide
MEVPLHKLSCLPPCKMCLCSSFAFHGDCEASPAMLNFFTEKYCTANHVDKLPGPRDWVQILQDQIKLARRRLKRGSEIADSDERLDGIALPPTGACGGPCTVLPGGSAAVTLVLQSSPQTMSQEKGQMAEPWEEQHLVLLNNLTRDRAETGALSQTSQDFKHHSFLITQVSATLHHQRGIRNFPTPGSAKSLTLHISCLSL

SEQ ID NO: 13098 - protein, 36 aa, Artificial Sequence
  Synthetic polypeptide
TSSQKSTVQLTMWISFLAQEIGYRFYRIKLNWPEEG

SEQ ID NO: 13099 - protein, 16 aa, Artificial Sequence
  Synthetic polypeptide
GLPSHVKLLHRKVLYS

SEQ ID NO: 13100 - protein, 202 aa, Artificial Sequence
  Synthetic polypeptide
MEVPLHKLSCLPPCKMCLCSSFAFHGDCEASPAMLNFFTEKYCTANHVDKLPGPRDWVQILQDQIKLARRRLKRGSAEIADSDERLDGIALPPTGACGGPCTVLPGGSAAVTLVLQSSPQTMSQEKGQMAEPWEEQHLVLLNNLTRDRAETGALSQTSQDFKHHSFLITQVSATLHHQRGIRNFPTPGSAKSLTLHISCLSL

SEQ ID NO: 13101 - protein, 95 aa, Artificial Sequence
  Synthetic polypeptide
MEVPLHKLSCLPPCKMCLCSSFAFHGDCEASPAMLNFFTEKYCTANHVDKLPGPRDWVQILQDQIKLARRRLKRGSEIADSDERLDGIALPPTGK

SEQ ID NO: 13102 - protein, 95 aa, Artificial Sequence
  Synthetic polypeptide
MEVPLHKLSCLPPCKMCLCSSFAFHGDCEASPAMLNFFTEKYCTANHVDKLPGPRDWVQILQDQIKLARRRLKRGSEIADSDERLDGIALPPTVV

SEQ ID NO: 13103 - protein, 14 aa, Artificial Sequence
  Synthetic polypeptide
WEPGSVWGVGSAGG

SEQ ID NO: 13104 - protein, 50 aa, Artificial Sequence
  Synthetic polypeptide
GSQGVCGAWAVLGAEEDAEQPEAGGLYHRGPRCPDPTFRPQPSVSGNPWA

SEQ ID NO: 13105 - protein, 309 aa, Artificial Sequence
  Synthetic polypeptide
GARECVGRGQCWGLKKMQSSLKLVDCIIEVHDARIPLSGRNPLFQETLGLKPHLLVLNKMDLADLTEQQKIMQHLEGEGLKNVIFTNCVKDENVKQIIPMVTELIGRSHRYHRKENLEYCIMVIGVPNVGKSSLINSLRRQHLRKGKATRVGGEPGITRAVMSKIQVSERPLMFLLDTPGVLAPRIESVETGLKLALCGTVLDHLVGEETMADYLLYTLNKHQRFGYVQHYGLGSACDNVERVLKSVAVKLGKTQKVKVLTGTGNVNIIQPNYPAAARDFLQTFRRGLLGSVMLDLDVLRGHPPAETLP

SEQ ID NO: 13106 - protein, 258 aa, Artificial Sequence
  Synthetic polypeptide
GARECVGRGQCWGLKKMQSSLKLVDCIIEVHDARIPLSGRNPLFQETLGLKPHLLVLNKMDLADLTEQQKIMQHLEGEGLKNVIFTNCVKDENVKQIIPMVTELIGRSHRYHRKEVSERPLMFLLDTPGVLAPRIESVETGLKLALCGTVLDHLVGEETMADYLLYTLNKHQRFGYVQHYGLGSACDNVERVLKSVAVKLGKTQKVKVLTGTGNVNIIQPNYPAAARDFLQTFRRGLLGSVMLDLDVLRGHPPAETLP

SEQ ID NO: 13107 - protein, 36 aa, Artificial Sequence
  Synthetic polypeptide
NGETPSLLKIRKIRESHQGGWRAWDHQSCDVQNSGL

SEQ ID NO: 13108 - protein, 169 aa, Artificial Sequence
  Synthetic polypeptide
KYEKLGKATRVGGEPGITRAVMSKIQVSERPLMFLLDTPGVLAPRIESVETGLKLALCGTVLDHLVGEETMADYLLYTLNKHQRFGYVQHYGLGSACDNVERVLKSVAVKLGKTQKVKVLTGTGNVNIIQPNYPAAARDFLQTFRRGLLGSVMLDLDVLRGHPPAETLP

SEQ ID NO: 13109 - protein, 11 aa, Artificial Sequence
  Synthetic polypeptide
GQSTGAQGIEE

SEQ ID NO: 13110 - protein, 228 aa, Artificial Sequence
  Synthetic polypeptide
DKAQEHKGLRNDLKAALDKIDQQYLNEIVGGQEPGEEDTQNDLKVHEENTTIEELEALGESLGKGDDHKDMDIITKFLKFLLGVWAKELNAREDYVKRSVQGKLNSATQKQTESYLRPLFRKLRKRNLPADIKESITDIIKFMLQREYVKANDAYLQMAIGNAPWPIGVTMVGIHARTGREKIFSKHVAHVLNDETQRKYIQGLKRLMTICQKHFPTDPSKCVEYNAL

SEQ ID NO: 13111 - protein, 8 aa, Artificial Sequence
  Synthetic polypeptide
TKHRSTRD

SEQ ID NO: 13112 - protein, 141 aa, Artificial Sequence
  Synthetic polypeptide
DKAQEHKGLRNDLKAALDKIDQQYLNEIVGGQEPGEEDTQNDLKVHEENTTIEELEALGESLGKGDDHKDMDIITKFLKFLLGVWAKELNAREDYVKRSVQGKLNSATQKQTESYLRPLFRKLRKRNLPADIKESITDIIK

SEQ ID NO: 13113 - protein, 68 aa, Artificial Sequence
  Synthetic polypeptide
DKAQEHKGLRNDLKAALDKIDQQYLNEIVGGQEPGEEDTQNDLKVHEENTTIEELEALGESLGKGDDH

SEQ ID NO: 13114 - protein, 220 aa, Artificial Sequence
  Synthetic polypeptide
GILRQKEREERNRIHLTDVLMNEILHGADGTSIKCGIIGEIGCSWPLTESERKVLQATAHAQAQLGCPVIIHPGRSSRAPFQIIRILQEAGADISKTVMSHLDRTILDKKELLEFAQLGCYLEYDLFGTELLHYQLGPDIDMPDDNKRIRRVRLLVEEGCEDRILVAHDIHTKTRLMKYGGHGYSHILTNVVPKMLLRGITENVLDKILIENPKQWLTFK

SEQ ID NO: 13115 - protein, 17 aa, Artificial Sequence
  Synthetic polypeptide
DRKRERRETAFTLPMSL

SEQ ID NO: 13116 - protein, 44 aa, Artificial Sequence
  Synthetic polypeptide
PYPWFCFLWFQLPVVNHSLKILRYFKTERERGEKPHSPYRCPYE

SEQ ID NO: 13117 - protein, 173 aa, Artificial Sequence
  Synthetic polypeptide
GILRQKEREERNRIHLTDVLMNEILHGADGTSIKCGIIGEIGCSWPLTESERKVLQATAHAQAQLGCPVIIHPGRSSRAPFQIIRILQEAGADISKTVMSHLDRVRLLVEEGCEDRILVAHDIHTKTRLMKYGGHGYSHILTNVVPKMLLRGITENVLDKILIENPKQWLTFK

SEQ ID NO: 13118 - protein, 330 aa, Artificial Sequence
  Synthetic polypeptide
YGWLCPHPSLILNYSSHNLHVLWEGPGGRYSENDYLQIITDIQSCPWKRQAEEYANFRAKLASCCDAVQNFVVSQNNTPVGTNMSYEVESKKEIPIKKNIFHMFPVSQPFVDYPYNQCAVVGNGGILNKSLCGTEIDKSDFVFRCNLPPTTGDVSKDVGSKTNLVTINPSIITLKYGNLKEKKALFLEDIATYGDAFFLLPAFSFRANTGTSFKVYYTLEESKARQKVLFFHPKYLKDLALFWRTKGVTAYRLSTGLMITSVAVELCKNVKLYGFWPFSKTVEDIPVSHHYYDNKLPKHGFHQMPKEYSQILQLHMKGILKLQFSKCEVA

SEQ ID NO: 13119 - protein, 71 aa, Artificial Sequence
  Synthetic polypeptide
ITAPIISMCCGKDLGGGIQRTTTFRLSQIYRVVHGNGKQKNMQILEPNLLPAVMLFKTLLFLRITLQLGLI

SEQ ID NO: 13120 - protein, 39 aa, Artificial Sequence
  Synthetic polypeptide
SPCVVGRTWGEVFRERLPSDYHRYTELSMETASRRICKF

SEQ ID NO: 13121 - protein, 17 aa, Artificial Sequence
  Synthetic polypeptide
VQNSTPLPTRTATSAHI

SEQ ID NO: 13122 - protein, 20 aa, Artificial Sequence
  Synthetic polypeptide
SEFKTPLHFQLGQRLRHISE

SEQ ID NO: 13123 - protein, 347 aa, Artificial Sequence
  Synthetic polypeptide
MSSKLHSTSNSDSDFGTYLNEKSLQLTEKCKNLQYGIESFSNKTKGYSENDYLQIITDIQSCPWKRQAEEYANFRAKLASCCDAVQNFVVSQNNTPVGTNMSYEVESKKEIPIKKNIFHMFPVSQPFVDYPYNQCAVVGNGGILNKSLCGTEIDKSDFVFRCNLPPTTGDVSKDVGSKTNLVTINPSIITLKYGNLKEKKALFLEDIATYGDAFFLLPAFSFRANTGTSFKVYYTLEESKARQKVLFFHPKYLKDLALFWRTKGVTAYRLSTGLMITSVAVELCKNVKLYGFWPFSKTVEDIPVSHHYYDNKLPKHGFHQMPKEYSQILQLHMKGILKLQFSKCEVA

SEQ ID NO: 13124 - protein, 72 aa, Artificial Sequence
  Synthetic polypeptide
GPSQQAAVCKPGREPSPGIQRTTTFRLSQIYRVVHGNGKQKNMQILEPNLLPAVMLFKTLLFLRITLQLGLI

SEQ ID NO: 13125 - protein, 59 aa, Artificial Sequence
  Synthetic polypeptide
HSLPHACTKKRQCEDPASRQLSASQEESPHQVFRERLPSDYHRYTELSMETASRRICKF

SEQ ID NO: 13126 - protein, 347 aa, Artificial Sequence
  Synthetic polypeptide
FDRAGVFIRRGRDTSTLSLMHAPRKDNVRTQPAGSCLQARKRALTRYSENDYLQIITDIQSCPWKRQAEEYANFRAKLASCCDAVQNFVVSQNNTPVGTNMSYEVESKKEIPIKKNIFHMFPVSQPFVDYPYNQCAVVGNGGILNKSLCGTEIDKSDFVFRCNLPPTTGDVSKDVGSKTNLVTINPSIITLKYGNLKEKKALFLEDIATYGDAFFLLPAFSFRANTGTSFKVYYTLEESKARQKVLFFHPKYLKDLALFWRTKGVTAYRLSTGLMITSVAVELCKNVKLYGFWPFSKTVEDIPVSHHYYDNKLPKHGFHQMPKEYSQILQLHMKGILKLQFSKCEVA

SEQ ID NO: 13127 - protein, 20 aa, Artificial Sequence
  Synthetic polypeptide
GPSQQAAVCKPGREPSPAHI

SEQ ID NO: 13128 - protein, 35 aa, Artificial Sequence
  Synthetic polypeptide
HSLPHACTKKRQCEDPASRQLSASQEESPHQHISE

SEQ ID NO: 13129 - protein, 377 aa, Artificial Sequence
  Synthetic polypeptide
FDRAGVFIRRGRDTSTLSLMHAPRKDNVRTQPAGSCLQARKRALTSTYLNEKSLQLTEKCKNLQYGIESFSNKTKGYSENDYLQIITDIQSCPWKRQAEEYANFRAKLASCCDAVQNFVVSQNNTPVGTNMSYEVESKKEIPIKKNIFHMFPVSQPFVDYPYNQCAVVGNGGILNKSLCGTEIDKSDFVFRCNLPPTTGDVSKDVGSKTNLVTINPSIITLKYGNLKEKKALFLEDIATYGDAFFLLPAFSFRANTGTSFKVYYTLEESKARQKVLFFHPKYLKDLALFWRTKGVTAYRLSTGLMITSVAVELCKNVKLYGFWPFSKTVEDIPVSHHYYDNKLPKHGFHQMPKEYSQILQLHMKGILKLQFSKCEVA

SEQ ID NO: 13130 - protein, 76 aa, Artificial Sequence
  Synthetic polypeptide
VLMRSDGLKVWALPPLLSPAALLEDVPAFPLPSATTVSFLRPPHSGGTVFRERLPSDYHRYTELSMETASRRICKF

SEQ ID NO: 13131 - protein, 309 aa, Artificial Sequence
  Synthetic polypeptide
GLPTQVELYSENDYLQIITDIQSCPWKRQAEEYANFRAKLASCCDAVQNFVVSQNNTPVGTNMSYEVESKKEIPIKKNIFHMFPVSQPFVDYPYNQCAVVGNGGILNKSLCGTEIDKSDFVFRCNLPPTTGDVSKDVGSKTNLVTINPSIITLKYGNLKEKKALFLEDIATYGDAFFLLPAFSFRANTGTSFKVYYTLEESKARQKVLFFHPKYLKDLALFWRTKGVTAYRLSTGLMITSVAVELCKNVKLYGFWPFSKTVEDIPVSHHYYDNKLPKHGFHQMPKEYSQILQLHMKGILKLQFSKCEVA

SEQ ID NO: 13132 - protein, 97 aa, Artificial Sequence
  Synthetic polypeptide
WFKSVGTSPFALSCCPVRRCASFPFAFRHDCKFPEASPLRWNCIQRTTTFRLSQIYRVVHGNGKQKNMQILEPNLLPAVMLFKTLLFLRITLQLGLI

SEQ ID NO: 13133 - protein, 52 aa, Artificial Sequence
  Synthetic polypeptide
VLMRSDGLKVWALPPLLSPAALLEDVPAFPLPSATTVSFLRPPHSGGTHISE

SEQ ID NO: 13134 - protein, 339 aa, Artificial Sequence
  Synthetic polypeptide
GLPTQVELTYLNEKSLQLTEKCKNLQYGIESFSNKTKGYSENDYLQIITDIQSCPWKRQAEEYANFRAKLASCCDAVQNFVVSQNNTPVGTNMSYEVESKKEIPIKKNIFHMFPVSQPFVDYPYNQCAVVGNGGILNKSLCGTEIDKSDFVFRCNLPPTTGDVSKDVGSKTNLVTINPSIITLKYGNLKEKKALFLEDIATYGDAFFLLPAFSFRANTGTSFKVYYTLEESKARQKVLFFHPKYLKDLALFWRTKGVTAYRLSTGLMITSVAVELCKNVKLYGFWPFSKTVEDIPVSHHYYDNKLPKHGFHQMPKEYSQILQLHMKGILKLQFSKCEVA

SEQ ID NO: 13135 - protein, 45 aa, Artificial Sequence
  Synthetic polypeptide
WFKSVGTSPFALSCCPVRRCASFPFAFRHDCKFPEASPLRWNSHI

SEQ ID NO: 13136 - protein, 64 aa, Artificial Sequence
  Synthetic polypeptide
VLMRSDGLKVWALPPLLSPAALLEDVPAFPLPSATTVFRERLPSDYHRYTELSMETASRRICKF

SEQ ID NO: 13137 - protein, 314 aa, Artificial Sequence
  Synthetic polypeptide
KMCQLSLCLPPRLYSENDYLQIITDIQSCPWKRQAEEYANFRAKLASCCDAVQNFVVSQNNTPVGTNMSYEVESKKEIPIKKNIFHMFPVSQPFVDYPYNQCAVVGNGGILNKSLCGTEIDKSDFVFRCNLPPTTGDVSKDVGSKTNLVTINPSIITLKYGNLKEKKALFLEDIATYGDAFFLLPAFSFRANTGTSFKVYYTLEESKARQKVLFFHPKYLKDLALFWRTKGVTAYRLSTGLMITSVAVELCKNVKLYGFWPFSKTVEDIPVSHHYYDNKLPKHGFHQMPKEYSQILQLHMKGILKLQFSKCEVA

SEQ ID NO: 13138 - protein, 85 aa, Artificial Sequence
  Synthetic polypeptide
WFKSVGTSPFALSCCPVRRCASFPFAFRHDCIQRTTTFRLSQIYRVVHGNGKQKNMQILEPNLLPAVMLFKTLLFLRITLQLGLI

SEQ ID NO: 13139 - protein, 40 aa, Artificial Sequence
  Synthetic polypeptide
VLMRSDGLKVWALPPLLSPAALLEDVPAFPLPSATTHISE

SEQ ID NO: 13140 - protein, 344 aa, Artificial Sequence
  Synthetic polypeptide
KMCQLSLCLPPRLTYLNEKSLQLTEKCKNLQYGIESFSNKTKGYSENDYLQIITDIQSCPWKRQAEEYANFRAKLASCCDAVQNFVVSQNNTPVGTNMSYEVESKKEIPIKKNIFHMFPVSQPFVDYPYNQCAVVGNGGILNKSLCGTEIDKSDFVFRCNLPPTTGDVSKDVGSKTNLVTINPSIITLKYGNLKEKKALFLEDIATYGDAFFLLPAFSFRANTGTSFKVYYTLEESKARQKVLFFHPKYLKDLALFWRTKGVTAYRLSTGLMITSVAVELCKNVKLYGFWPFSKTVEDIPVSHHYYDNKLPKHGFHQMPKEYSQILQLHMKGILKLQFSKCEVA

SEQ ID NO: 13141 - protein, 33 aa, Artificial Sequence
  Synthetic polypeptide
WFKSVGTSPFALSCCPVRRCASFPFAFRHDSHI

SEQ ID NO: 13142 - protein, 25 aa, Artificial Sequence
  Synthetic polypeptide
GRAQWLTPVIPALLEAEMGGSKAHI

SEQ ID NO: 13143 - protein, 17 aa, Artificial Sequence
  Synthetic polypeptide
SQHFWRPRWVDQKHISE

SEQ ID NO: 13144 - protein, 353 aa, Artificial Sequence
  Synthetic polypeptide
PGAMAHACNPSTFGGRDGWIKSTYLNEKSLQLTEKCKNLQYGIESFSNKTKGYSENDYLQIITDIQSCPWKRQAEEYANFRAKLASCCDAVQNFVVSQNNTPVGTNMSYEVESKKEIPIKKNIFHMFPVSQPFVDYPYNQCAVVGNGGILNKSLCGTEIDKSDFVFRCNLPPTTGDVSKDVGSKTNLVTINPSIITLKYGNLKEKKALFLEDIATYGDAFFLLPAFSFRANTGTSFKVYYTLEESKARQKVLFFHPKYLKDLALFWRTKGVTAYRLSTGLMITSVAVELCKNVKLYGFWPFSKTVEDIPVSHHYYDNKLPKHGFHQMPKEYSQILQLHMKGILKLQFSKCEVA

SEQ ID NO: 13145 - protein, 15 aa, Artificial Sequence
  Synthetic polypeptide
ILDFLGSRNRKQPAR

SEQ ID NO: 13146 - protein, 13 aa, Artificial Sequence
  Synthetic polypeptide
VPEIESNQRDEYC

SEQ ID NO: 13147 - protein, 38 aa, Artificial Sequence
  Synthetic polypeptide
ALSRFLAHRNCEIISETCSDDVCGPHHTALPHLFHSSD

SEQ ID NO: 13148 - protein, 267 aa, Artificial Sequence
  Synthetic polypeptide
SVRPVLMMCVVLTTLPCLTFSIAVTEVQKSINGSADVLPDMLPDLPVSLVLLSLIMVDIIEKLRIYPLRGSQKSSENGHIHSTSLQHIKTVTEQVRQSPENAASPQATNSTQVSQPSGAMTRSQESVFMGPQEPSCDSGILRMMSRRDVRAELFLWSFLLWSDTIEMVRVAGHPNVYKSSWLYPVYIFSFISLLRITFTPQNPLLNSLSVLLQDLPFVFVRLGLIIALGTITPVLGLCKNILVTLSYIYFNYLTRIRIFSAFEMSPF

SEQ ID NO: 13149 - protein, 42 aa, Artificial Sequence
  Synthetic polypeptide
AAGRRRHRRGGPGAAAAAVEEPEHNGICLESTVCTLKRPPVS

SEQ ID NO: 13150 - protein, 35 aa, Artificial Sequence
  Synthetic polypeptide
RREGGGTGGEGRARRRRRWRSRSIMVYVSSPRYAP

SEQ ID NO: 13151 - protein, 58 aa, Artificial Sequence
  Synthetic polypeptide
VTCSLGQSNAWCSFTVSHQPHKGPSSCRKTSSGIPLILHYGYPSQGSPLTSRLPNARY

SEQ ID NO: 13152 - protein, 12 aa, Artificial Sequence
  Synthetic polypeptide
FYIMDIHHKGHR

SEQ ID NO: 13153 - protein, 360 aa, Artificial Sequence
  Synthetic polypeptide
LQENKLRDPTDSTLWISITRVTADISLAKRSVLNNPSKHAIIERSNTRSSLAEVQSEIERIFELARTLQLVVLDADTINHPAQLSKTSLAPIIVYVKISSPKVLQRLIKSRGKSQAKHLNVQMVAADKLAQCPPELFDVILDENQLEDACEHLADYLEAYWKATHPPSSSLPNPLLSRTLATSSLPLSPTLASNSQGSQGDQRTDRSAPIRSASQAEEEPSVEPVKKSQHRSSSSAPHHNHRSGTSRGLSRQETFDSETQESRDSAYVEPKEDYSHDHVDHYASHRDHNHRDETHGSSDHRHRESRHRSRDVDREQDHNECNKQRSRHKSKDRYCEKDGEVISKKRNEAGEWNRDVYIRQ

SEQ ID NO: 13154 - protein, 16 aa, Artificial Sequence
  Synthetic polypeptide
EGKSSGVMNKDCDCFR

SEQ ID NO: 13155 - protein, 446 aa, Artificial Sequence
  Synthetic polypeptide
TKIVTALGKQEAERKFETLLKHLSHPPSFTTVRVNTHLASVQHVKNLLLDELQKQFNGLSVPILQHPDLQDVLLIPVIGPRKNIKKQQCEAIVGAQCGNAVLRGAHVYAPGIVSASQFMKAGDVISVYSDIKGKCKKGAKEFDGTKVFLGNGISELSRKEIFSGLPELKGMGIRMTEPVYLSPSFDSVLPRYLFLQNLPSALVSHVLNPQPGEKILDLCAAPGGKTTHIAALMHDQGEVIALDKIFNKVEKIKQNALLLGLNSIRAFCFDGTKAVKLDMVEDTEGEPPFLPESFDRILLDAPCSGMGQRPNMACTWSVKEVASYQPLQRKLFTAAVQLLKPEGVLVYSTCTITLAENEEQVAWALTKFPCLQLQPQEPQIGGEGMRGAGLSCEQLKQLQRFDPSAVPLPDTDMDSLREARREDMLRLANKDSIGFFIAKFVKCKST

SEQ ID NO: 13156 - protein, 11 aa, Artificial Sequence
  Synthetic polypeptide
GKEFRCNEQRL

SEQ ID NO: 13157 - protein, 80 aa, Artificial Sequence
  Synthetic polypeptide
TKIVTALGKQEAERKFETLLKHLSHPPSFTTVRVNTHLASVQHVKNLLLDELQKQFNGLSVPILQHPDLQDVLLIPVIGP

SEQ ID NO: 13158 - protein, 54 aa, Artificial Sequence
  Synthetic polypeptide
HACNPSTLGSGGGWITRVQEFKTSLANMHLFFPEPISKAIPKAMATCTRPVCHP

SEQ ID NO: 13159 - protein, 76 aa, Artificial Sequence
  Synthetic polypeptide
TPAIPALWEAEVGGSLESRSSRPAWPTCTCSSRSLSAKPFPRLWLHAPDQCVIHEINAAFTKSKDLPSHVRLQCPG

SEQ ID NO: 13160 - protein, 105 aa, Artificial Sequence
  Synthetic polypeptide
SPGVQDQLGQHAPVLPGAYQQSHSQGYGYMHQTSVSSMRSMQHSPNLRTYRAMYDYSAQDEDEVSFRDGDYIVNVQPIDDGWMYGTVQRTGRTGMLPANYIEFVN

SEQ ID NO: 13161 - protein, 217 aa, Artificial Sequence
  Synthetic polypeptide
KCVALPPSLALFRTPLCEGVLVSPLPSAMIVKYKRDFEESKGRGFSIVTDTPELQRLKRTQEQISNVKYHEDFEKTKGRGFTPVVDDPVTERVRKNTQVVSDAAYKGVHPHIVEMDRRPGIIVAPVLPGAYQQSHSQGYGYMHQTSVSSMRSMQHSPNLRTYRAMYDYSAQDEDEVSFRDGDYIVNVQPIDDGWMYGTVQRTGRTGMLPANYIEFVN

SEQ ID NO: 13162 - protein, 19 aa, Artificial Sequence
  Synthetic polypeptide
GCAGFPFAFCHDCQVQKRF

SEQ ID NO: 13163 - protein, 922 aa, Artificial Sequence
  Synthetic polypeptide
GLPSQMELGVMKVDINLQKVDIDQCSSDGWFSGTHKCHLNNSECMPIKGLGFVLGAYECICKAGFYHPGVLPVNNFRRRGPDQHISGSTKDVSEEAYVCLPCREGCPFCADDSPCFVQEDKYLRLAIISFQALCMLLDFVSMLVVYHFRKAKSIRASGLILLETILFGSLLLYFPVVILYFEPSTFRCILLRWARLLGFATVYGTVTLKLHRVLKVFLSRTAQRIPYMTGGRVMRMLAVILLVVFWFLIGWTSSVCQNLEKQISLIGQGKTSDHLIFNMCLIDRWDYMTAVAEFLFLLWGVYLCYAVRTVPSAFHEPRYMAVAVHNELIISAIFHTIRFVLASRLQSDWMLMLYFAHTHLTVTVTIGLLLIPKFSHSSNNPRDDIATEAYEDELDMGRSGSYLNSSINSAWSEHSLDPEDIRDELKKLYAQLEIYKRKKMITNNPHLQKKRCSKKGLGRSIMRRITEIPETVSRQCSKEDKEGADHGTAKGTALIRKNPPESSGNTGKSKEETLKNRVFSLKKSHSTYDHVRDQTEESSSLPTESQEEETTENSTLESLSGKKLTQKLKEDSEAESTESVPLVCKSASAHNLSSEKKTGHPRTSMLQKSLSVIASAKEKTLGLAGKTQTAGVEERTKSQKPLPKDKETNRNHSNSDNTETKDPAPQNSNPAEEPRKPQKSGIMKQQRVNPTTANSDLNPGTTQMKDNFDIGEVCPWEVYDLTPGPVPSESKVQKHVSIVASEMEKNPTFSLKEKSHHKPKAAEVCQQSNQKRIDKAEVCLWESQGQSILEDEKLLISKTPVLPERAKEENGGQPRAANVCAGQSEELPPKAVASKTENENLNQIGHQEKKTSSSEENVRGSYNSSNNFQQPLTSRAEVCPWEFETPAQPNAGRSVALPASSALSANKIAGPRKEEIWDSFKV

SEQ ID NO: 13164 - protein, 44 aa, Artificial Sequence
  Synthetic polypeptide
VCSSPSWVHFPHCHLMKKVPCFSFTFRHGFKFPEASPAKWNWVS

SEQ ID NO: 13165 - protein, 30 aa, Artificial Sequence
  Synthetic polypeptide
RRCLASPSPSATVLSFLRPPQPNGTGCHES

SEQ ID NO: 13166 - protein, 8 aa, Artificial Sequence
  Synthetic polypeptide
SQHFGRPS

SEQ ID NO: 13167 - protein, 61 aa, Artificial Sequence
  Synthetic polypeptide
AKLNFYSSCGVFISAMQCGQSHRHSMSPAIWLLQFTMSSSSLLYSIQLDLFLPQDFSLIGC

SEQ ID NO: 13168 - protein, 647 aa, Artificial Sequence
  Synthetic polypeptide
PGVVAHACNPSTLVGQAEFLFLLWGVYLCYAVRTVPSAFHEPRYMAVAVHNELIISAIFHTIRFVLASRLQSDWMLMLYFAHTHLTVTVTIGLLLIPKFSHSSNNPRDDIATEAYEDELDMGRSGSYLNSSINSAWSEHSLDPEDIRDELKKLYAQLEIYKRKKMITNNPHLQKKRCSKKGLGRSIMRRITEIPETVSRQCSKEDKEGADHGTAKGTALIRKNPPESSGNTGKSKEETLKNRVFSLKKSHSTYDHVRDQTEESSSLPTESQEEETTENSTLESLSGKKLTQKLKEDSEAESTESVPLVCKSASAHNLSSEKKTGHPRTSMLQKSLSVIASAKEKTLGLAGKTQTAGVEERTKSQKPLPKDKETNRNHSNSDNTETKDPAPQNSNPAEEPRKPQKSGIMKQQRVNPTTANSDLNPGTTQMKDNFDIGEVCPWEVYDLTPGPVPSESKVQKHVSIVASEMEKNPTFSLKEKSHHKPKAAEVCQQSNQKRIDKAEVCLWESQGQSILEDEKLLISKTPVLPERAKEENGGQPRAANVCAGQSEELPPKAVASKTENENLNQIGHQEKKTSSSEENVRGSYNSSNNFQQPLTSRAEVCPWEFETPAQPNAGRSVALPASSALSANKIAGPRKEEIWDSFKV

SEQ ID NO: 13169 - protein, 671 aa, Artificial Sequence
  Synthetic polypeptide
KEGRKMGESSEDIDQMFSTLLGEMDLLTQSLGVDTLPPPDPNPPRAEFNYSVGFKDLNESLNALEDQDLDALMADLVADISEAEQRTIQAQKESLQNQHHSASLQASIFSGAASLGYGTNVAATGISQYEDDLPPPPADPVLDLPLPPPPPEPLSQEEEEAQAKADKIKLALEKLKEAKVKKLVVKVHMNDNSTKSLMVDERQLARDVLDNLFEKTHCDCNVDWCLYEIYPELQIERFFEDHENVVEVLSDWTRDTENKILFLEKEEKYAVFKNPQNFYLDNRGKKESKETNEKMNAKNKESLLEESFCGTSIIVPELEGALYLKEDGKKSWKRRYFLLRASGIYYVPKGKTKTSRDLACFIQFENVNIYYGTQHKMKYKAPTDYCFVLKHPQIQKESQYIKYLCCDDTRTLNQWVMGIRIAKYGKTLYDNYQRAVAKAGLASRWTNLGTVNAAAPAQPSTGPKTGTTQPNGQIPQATHSVSAVLQEAQRHAETSKDKKPALGNHHDPAVPRAPHAPKSSLPPPPPVRRSSDTSGSPATPLKAKGTGGGGLPAPPDDFLPPPPPPPPLDDPELPPPPPDFMEPPPDFVPPPPPSYAGIAGSELPPPPPPPPAPAPAPVPDSARPPPAVAKRPPVPPKRQENPGHPGGAGGGEQDFMSDLMKALQKKRGNVS

SEQ ID NO: 13170 - protein, 12 aa, Artificial Sequence
  Synthetic polypeptide
RKEGRWVSQVKT

SEQ ID NO: 13171 - protein, 6 aa, Artificial Sequence
  Synthetic polypeptide
GRKEDG

SEQ ID NO: 13172 - protein, 177 aa, Artificial Sequence
  Synthetic polypeptide
KEGRKMGESSEDIDQMFSTLLGEMDLLTQSLGVDTLPPPDPNPPRAEFNYSVGFKDLNESLNALEDQDLDALMADLVADISEAEQRTIQAQKESLQNQHHSASLQASIFSGAASLGYGTNVAATGISQYEDDLPPPPADPVLDLPLPPPPPEPLSQVSMWDQRWQDHQPLLPITDVP

SEQ ID NO: 13173 - protein, 12 aa, Artificial Sequence
  Synthetic polypeptide
YIARCRCPGNDG

SEQ ID NO: 13174 - protein, 681 aa, Artificial Sequence
  Synthetic polypeptide
PLKHNILPDAGALEMMGESSEDIDQMFSTLLGEMDLLTQSLGVDTLPPPDPNPPRAEFNYSVGFKDLNESLNALEDQDLDALMADLVADISEAEQRTIQAQKESLQNQHHSASLQASIFSGAASLGYGTNVAATGISQYEDDLPPPPADPVLDLPLPPPPPEPLSQEEEEAQAKADKIKLALEKLKEAKVKKLVVKVHMNDNSTKSLMVDERQLARDVLDNLFEKTHCDCNVDWCLYEIYPELQIERFFEDHENVVEVLSDWTRDTENKILFLEKEEKYAVFKNPQNFYLDNRGKKESKETNEKMNAKNKESLLEESFCGTSIIVPELEGALYLKEDGKKSWKRRYFLLRASGIYYVPKGKTKTSRDLACFIQFENVNIYYGTQHKMKYKAPTDYCFVLKHPQIQKESQYIKYLCCDDTRTLNQWVMGIRIAKYGKTLYDNYQRAVAKAGLASRWTNLGTVNAAAPAQPSTGPKTGTTQPNGQIPQATHSVSAVLQEAQRHAETSKDKKPALGNHHDPAVPRAPHAPKSSLPPPPPVRRSSDTSGSPATPLKAKGTGGGGLPAPPDDFLPPPPPPPPLDDPELPPPPPDFMEPPPDFVPPPPPSYAGIAGSELPPPPPPPPAPAPAPVPDSARPPPAVAKRPPVPPKRQENPGHPGGAGGGEQDFMSDLMKALQKKRGNVS

SEQ ID NO: 13175 - protein, 187 aa, Artificial Sequence
  Synthetic polypeptide
PLKHNILPDAGALEMMGESSEDIDQMFSTLLGEMDLLTQSLGVDTLPPPDPNPPRAEFNYSVGFKDLNESLNALEDQDLDALMADLVADISEAEQRTIQAQKESLQNQHHSASLQASIFSGAASLGYGTNVAATGISQYEDDLPPPPADPVLDLPLPPPPPEPLSQVSMWDQRWQDHQPLLPITDVP

SEQ ID NO: 13176 - protein, 24 aa, Artificial Sequence
  Synthetic polypeptide
FGDSEQYDLKENEMSHIFHTVSGF

SEQ ID NO: 13177 - protein, 575 aa, Artificial Sequence
  Synthetic polypeptide
AIFFIQSRGFKTLKSRTRRLQSTSERLAETQNIAPSFVKGFLLRDRGSDVESLDKLMKTKNIPEAHQDAFKTGFAEGFLKAQALTQKTNDSLRRTRLILFVLLLFGIYGLLKNPFLSVRFRTTTGLDSAVDPVQMKNVTFEHVKGVEEAKQELQEVVEFLKNPQKFTILGGKLPKGILLVGPPGTGKTLLARAVAGEADVPFYYASGSEFDEMFVGVGASRIRNLFREAKANAPCVIFIDELDSVGGKRIESPMHPYSRQTINQLLAEMDGFKPNEGVIIIGATNFPEALDNALIRPGRFDMQVTVPRPDVKGRTEILKWYLNKIKFDQSVDPEIIARGTVGFSGAELENLVNQAALKAAVDGKEMVTMKELEFSKDKILMGPERRSVEIDNKNKTITAYHESGHAIIAYYTKDAMPINKATIMPRGPTLGHVSLLPENDRWNETRAQLLAQMDVSMGGRVAEELIFGTDHITTGASSDFDNATKIAKRMVTKFGMSEKLGVMTYSDTGKLSPETQSAIEQEIRILLRDSYERAKHILKTHAKEHKNLAEALLTYETLDAKEIQIVLEGKKLEVR

SEQ ID NO: 13178 - protein, 19 aa, Artificial Sequence
  Synthetic polypeptide
FKRKRNEPYFSYSLGVLKL

SEQ ID NO: 13179 - protein, 145 aa, Artificial Sequence
  Synthetic polypeptide
AIFFIQSRGFKTLKSRTRRLQSTSERLAETQNIAPSFVKGFLLRDRGSDVESLDKLMKTKNIPEAHQDAFKTGFAEGFLKAQALTQKTNDSLRRTRLILFVLLLFGIYGLLKNPFLSVRFRTTTGLDSAVDPVQMKNVTFEHVKG

SEQ ID NO: 13180 - protein, 115 aa, Artificial Sequence
  Synthetic polypeptide
AIFFIQSRGFKTLKSRTRRLQSTSERLAETQNIAPSFVKGFLLRDRGSDVESLDKLMKTKNIPEAHQDAFKTGFAEGFLKAQALTQKTNDSLRRTRLILFVLLLFGIYGLLKNPF

SEQ ID NO: 13181 - protein, 53 aa, Artificial Sequence
  Synthetic polypeptide
HELKRHPLFSDVDWENLQHQTMPFIPQPDDETDTSYFEARNTAQHLTVSGFSL

SEQ ID NO: 13182 - protein, 25 aa, Artificial Sequence
  Synthetic polypeptide
SKHSGRPRQADHEIRRSRPSWLNMS

SEQ ID NO: 13183 - protein, 52 aa, Artificial Sequence
  Synthetic polypeptide
AEIMPLHSSLGGRKSNSYSDCVVFNEGFQLSSRNLPVGHQRCWRPGSADKFA

SEQ ID NO: 13184 - protein, 584 aa, Artificial Sequence
  Synthetic polypeptide
SQLLGMLRQENCLNPGGGGCSEPRSCHCTPAWEGGNQTATVIALCSMRDFSLAQETCQLAIRDVGGLEVLINLLETDEVKCKIGSLKILKEISHNPQIRQNIVDLGGLPIMVNILDSPHKSLKCLAAETIANVAKFKRARRVVRQHGGITKLVALLDCAHDSTKPAQSSLYEARDVEVARCGALALWSCSKSHTNKEAIRKAGGIPLLARLLKTSHENMLIPVVGTLQECASEENYRAAIKAERIIENLVKNLNSENEQLQEHCAMAIYQCAEDKETRDLVRLHGGLKPLASLLNNTDNKERLAAVTGAIWKCSISKENVTKFREYKAIETLVGLLTDQPEEVLVNVVGALGECCQERENRVIVRKCGGIQPLVNLLVGINQALLVNVTKAVGACAVEPESMMIIDRLDGVRLLWSLLKNPHPDVKASAAWALCPCIKNAKDAGEMVRSFVGGLELIVNLLKSDNKEVLASVCAAITNIAKDQENLAVITDHGVVPLLSKLANTNNNKLRHHLAEAISRCCMWGRNRVAFGEHKAVAPLVRYLKSNDTNVHRATAQALYQLSEDADNCITMHENGAVKKNIFIS

SEQ ID NO: 13185 - protein, 27 aa, Artificial Sequence
  Synthetic polypeptide
TQEAEVAVSRDHAIALQPGREEIKQLQ

SEQ ID NO: 13186 - protein, 615 aa, Artificial Sequence
  Synthetic polypeptide
SQLLGMLRQENCLNPGGGGCSEPRSCHCTPAWEGGNQTATVIALCSMRDFSLAQETCQLAIRDVGGLEVLINLLETDEVKCKIGSLKILKEISHNPQIRQNIVDLGGLPIMVNILDSPHKSLKCLAAETIANVAKFKRARRVVRQHGGITKLVALLDCAHDSTKPAQSSLYEARDVEVARCGALALWSCSKSHTNKEAIRKAGGIPLLARLLKTSHENMLIPVVGTLQECASEENYRAAIKAERIIENLVKNLNSENEQLQEHCAMAIYQCAEDKETRDLVRLHGGLKPLASLLNNTDNKERLAAVTGAIWKCSISKENVTKFREYKAIETLVGLLTDQPEEVLVNVVGALGECCQERENRVIVRKCGGIQPLVNLLVGINQALLVNVTKAVGACAVEPESMMIIDRLDGVRLLWSLLKNPHPDVKASAAWALCPCIKNAKDAGEMVRSFVGGLELIVNLLKSDNKEVLASVCAAITNIAKDQENLAVITDHGVVPLLSKLANTNNNKLRHHLAEAISRCCMWGRNRVAFGEHKAVAPLVRYLKSNDTNVHRATAQALYQLSEDADNCITMHENGAVKLLLDMVGSPDQDLQEAAAGCISNIRRLALATEKARYT

SEQ ID NO: 13187 - protein, 47 aa, Artificial Sequence
  Synthetic polypeptide
GQARWLTPVISALGRPRRADHLRSGVQDQPGQQLLSTRKFTQPQCSS

SEQ ID NO: 13188 - protein, 564 aa, Artificial Sequence
  Synthetic polypeptide
GQEFKTSLASSYSPQENSHNHSALHSSNSHSSNPSNNPSKTSDAPYDSADDWSEHISSSGKKYYYNCRTEVSQWEKPKEWLEREQRQKEANKMAVNSFPKDRDYRREVMQATATSGFASGMEDKHSSDASSLLPQNILSQTSRHNDRDYRLPRAETHSSSTPVQHPIKPVVHPTATPSTVPSSPFTLQSDHQPKKSFDANGASTLSKLPTPTSSVPAQKTERKESTSGDKPVSHSCTTPSTSSASGLNPTSAPPTSASAVPVSPVPQSPIPPLLQDPNLLRQLLPALQATLQLNNSNVDISKINEVLTAAVTQASLQSIIHKFLTAGPSAFNITSLISQAAQLSTQAQPSNQSPMSLTSDASSPRSYVSPRISTPQTNTVPIKPLISTPPVSSQPKVSTPVVKQGPVSQSATQQPVTADKQQGHEPVSPRSLQRSSSQRSPSPGPNHTSNSSNASNATVVPQNSSARSTCSLTPALAAHFSENLIKHVQGWPADHAEKQASRLREEAHNMGTIHMSEICTELKNLRSLVRVCEIQATLREQRILFLRQQIKELEKLKNQNSFMV

SEQ ID NO: 13189 - protein, 129 aa, Artificial Sequence
  Synthetic polypeptide
PGAVAHACNLSTWEAEAGRSPEVRSSRPAWPAVTLHKKIHTTTVLFIVQIHILLIQAITQAKLQMHLMILQMTGLSILALLGKSTTTIVEQKFHNGKNQKSGLKENRDKKKQTRWQSTASQKIGITEER

SEQ ID NO: 13190 - protein, 457 aa, Artificial Sequence
  Synthetic polypeptide
GQEFKTSLASSYSPQENSHNHSALHSSNSHSSNPSNNPSKTSDAPYDSADDWSEHISSSGKKYYYNCRTEVSQWEKPKEWLEREQRQKEANKMAVNSFPKDRDYRREVMQATATSGFASGKSTSGDKPVSHSCTTPSTSSASGLNPTSAPPTSASAVPVSPVPQSPIPPLLQDPNLLRQLLPALQATLQLNNSNVDISKINEAVTQASLQSIIHKFLTAGPSAFNITSLISQAAQLSTQAQPSNQSPMSLTSDASSPRSYVSPRISTPQTNTVPIKPLISTPPVSSQPKVSTPVVKQGPVSQSATQQPVTADKQQGHEPVSPRSLQRSSSQRSPSPGPNHTSNSSNASNATVVPQNSSARSTCSLTPALAAHFSENLIKHVQGWPADHAEKQASRLREEAHNMGTIHMSEICTELKNLRSLVRVCEIQATLREQRILFLRQQIKELEKLKNQNSFMV

SEQ ID NO: 13191 - protein, 461 aa, Artificial Sequence
  Synthetic polypeptide
GQEFKTSLASSYSPQENSHNHSALHSSNSHSSNPSNNPSKTSDAPYDSADDWSEHISSSGKKYYYNCRTEVSQWEKPKEWLEREQRQKEANKMAVNSFPKDRDYRREVMQATATSGFASGKSTSGDKPVSHSCTTPSTSSASGLNPTSAPPTSASAVPVSPVPQSPIPPLLQDPNLLRQLLPALQATLQLNNSNVDISKINEVLTAAVTQASLQSIIHKFLTAGPSAFNITSLISQAAQLSTQAQPSNQSPMSLTSDASSPRSYVSPRISTPQTNTVPIKPLISTPPVSSQPKVSTPVVKQGPVSQSATQQPVTADKQQGHEPVSPRSLQRSSSQRSPSPGPNHTSNSSNASNATVVPQNSSARSTCSLTPALAAHFSENLIKHVQGWPADHAEKQASRLREEAHNMGTIHMSEICTELKNLRSLVRVCEIQATLREQRILFLRQQIKELEKLKNQNSFMV

SEQ ID NO: 13192 - protein, 398 aa, Artificial Sequence
  Synthetic polypeptide
GQEFKTSLASSYSPQENSHNHSALHSSNSHSSNPSNNPSKTSDAPYDSADDWSEHISSSGKKYYYNCRTEVSQWEKPKEWLEREQRQKEANKMAVNSFPKDRDYRREVMQATATSGFASGMEDKHSSDASSLLPQNILSQTSRHNDRDYRLPRAETHSSSTPVQHPIKPVVHPTATPSTVPSSPFTLQSDHQPKKSFDANGASTLSKLPTPTSSVPAQKTERKESTSGDKPVSHSCTTPSTSSASGLNPTSAPPTSASAVPVSPVPQSPIPPLLQDPNLLRQLLPALQATLQLNNSNVDISKINEVLTAAVTQASLQSIIHKFLTAGPSAFNITSLISQAAQLSTQDIPLHEGIQMERDTHRSKWEVKGSLCQKADKQQECLVWNGSIMVQRLLQPSG

SEQ ID NO: 13193 - protein, 166 aa, Artificial Sequence
  Synthetic polypeptide
GQEFKTSLASSYSPQENSHNHSALHSSNSHSSNPSNNPSKTSDAPYDSADDWSEHISSSGKKYYYNCRTEVSQWEKPKEWLEREQRQKEANKMAVNSFPKDRDYRREVMQATATSGFASGMEDKHSSDASSLLPQNILSQTSRHNDRDYRLPRAETHSSSTPVQHP

SEQ ID NO: 13194 - protein, 135 aa, Artificial Sequence
  Synthetic polypeptide
GQEFKTSLASSYSPQENSHNHSALHSSNSHSSNPSNNPSKTSDAPYDSADDWSEHISSSGKKYYYNCRTEVSQWEKPKEWLEREQRQKEANKMAVNSFPKDRDYRREVMQATATSGFASGMEDKHSSDASSLLPQ

SEQ ID NO: 13195 - protein, 43 aa, Artificial Sequence
  Synthetic polypeptide
GQARWLTPVISALGRPRRADHLRSGVQDQPGQQLLSTRKFTQP

SEQ ID NO: 13196 - protein, 21 aa, Artificial Sequence
  Synthetic polypeptide
GQEFKTSLASSYSPQENSHNH

SEQ ID NO: 13197 - protein, 42 aa, Artificial Sequence
  Synthetic polypeptide
PGAVAHACNLSTWEAEAGRSPEVRSSRPAWPAVTLHKKIHTT

SEQ ID NO: 13198 - protein, 195 aa, Artificial Sequence
  Synthetic polypeptide
GQEFKTSLASSYSPQENSHNHSALHSSNSHSSNPSNNPSKTSDAPYDSADDWSEHISSSGKKYYYNCRTEVSQWEKPKEWLEREQRQKEANKMAVNSFPKDRDYRREVMQATATSGFASGMEDKHSSDASSLLPQNILSQTSRHNDRDYRLPRAETHSSSTPVQHPIKPVVHPTATPSTVPSSPFTLQSDHQPKK

SEQ ID NO: 13199 - protein, 110 aa, Artificial Sequence
  Synthetic polypeptide
GQEFETSLANVGPVTLHKKIHTTTVLFIVQIHILLIQAITQAKLQMHLMILQMTGLSILALLGKSTTTIVEQKFHNGKNQKSGLKENRDKKKQTRWQSTASQKIGITEER

SEQ ID NO: 13200 - protein, 49 aa, Artificial Sequence
  Synthetic polypeptide
AGSVAHAGISALWEAEAGRSPEVRSLRPAWPTWDQLLSTRKFTQPQCSS

SEQ ID NO: 13201 - protein, 562 aa, Artificial Sequence
  Synthetic polypeptide
DQPGQRGTSYSPQENSHNHSALHSSNSHSSNPSNNPSKTSDAPYDSADDWSEHISSSGKKYYYNCRTEVSQWEKPKEWLEREQRQKEANKMAVNSFPKDRDYRREVMQATATSGFASGMEDKHSSDASSLLPQNILSQTSRHNDRDYRLPRAETHSSSTPVQHPIKPVVHPTATPSTVPSSPFTLQSDHQPKKSFDANGASTLSKLPTPTSSVPAQKTERKESTSGDKPVSHSCTTPSTSSASGLNPTSAPPTSASAVPVSPVPQSPIPPLLQDPNLLRQLLPALQATLQLNNSNVDISKINEVLTAAVTQASLQSIIHKFLTAGPSAFNITSLISQAAQLSTQAQPSNQSPMSLTSDASSPRSYVSPRISTPQTNTVPIKPLISTPPVSSQPKVSTPVVKQGPVSQSATQQPVTADKQQGHEPVSPRSLQRSSSQRSPSPGPNHTSNSSNASNATVVPQNSSARSTCSLTPALAAHFSENLIKHVQGWPADHAEKQASRLREEAHNMGTIHMSEICTELKNLRSLVRVCEIQATLREQRILFLRQQIKELEKLKNQNSFMV

SEQ ID NO: 13202 - protein, 455 aa, Artificial Sequence
  Synthetic polypeptide
DQPGQRGTSYSPQENSHNHSALHSSNSHSSNPSNNPSKTSDAPYDSADDWSEHISSSGKKYYYNCRTEVSQWEKPKEWLEREQRQKEANKMAVNSFPKDRDYRREVMQATATSGFASGKSTSGDKPVSHSCTTPSTSSASGLNPTSAPPTSASAVPVSPVPQSPIPPLLQDPNLLRQLLPALQATLQLNNSNVDISKINEAVTQASLQSIIHKFLTAGPSAFNITSLISQAAQLSTQAQPSNQSPMSLTSDASSPRSYVSPRISTPQTNTVPIKPLISTPPVSSQPKVSTPVVKQGPVSQSATQQPVTADKQQGHEPVSPRSLQRSSSQRSPSPGPNHTSNSSNASNATVVPQNSSARSTCSLTPALAAHFSENLIKHVQGWPADHAEKQASRLREEAHNMGTIHMSEICTELKNLRSLVRVCEIQATLREQRILFLRQQIKELEKLKNQNSFMV

SEQ ID NO: 13203 - protein, 459 aa, Artificial Sequence
  Synthetic polypeptide
DQPGQRGTSYSPQENSHNHSALHSSNSHSSNPSNNPSKTSDAPYDSADDWSEHISSSGKKYYYNCRTEVSQWEKPKEWLEREQRQKEANKMAVNSFPKDRDYRREVMQATATSGFASGKSTSGDKPVSHSCTTPSTSSASGLNPTSAPPTSASAVPVSPVPQSPIPPLLQDPNLLRQLLPALQATLQLNNSNVDISKINEVLTAAVTQASLQSIIHKFLTAGPSAFNITSLISQAAQLSTQAQPSNQSPMSLTSDASSPRSYVSPRISTPQTNTVPIKPLISTPPVSSQPKVSTPVVKQGPVSQSATQQPVTADKQQGHEPVSPRSLQRSSSQRSPSPGPNHTSNSSNASNATVVPQNSSARSTCSLTPALAAHFSENLIKHVQGWPADHAEKQASRLREEAHNMGTIHMSEICTELKNLRSLVRVCEIQATLREQRILFLRQQIKELEKLKNQNSFMV

SEQ ID NO: 13204 - protein, 396 aa, Artificial Sequence
  Synthetic polypeptide
DQPGQRGTSYSPQENSHNHSALHSSNSHSSNPSNNPSKTSDAPYDSADDWSEHISSSGKKYYYNCRTEVSQWEKPKEWLEREQRQKEANKMAVNSFPKDRDYRREVMQATATSGFASGMEDKHSSDASSLLPQNILSQTSRHNDRDYRLPRAETHSSSTPVQHPIKPVVHPTATPSTVPSSPFTLQSDHQPKKSFDANGASTLSKLPTPTSSVPAQKTERKESTSGDKPVSHSCTTPSTSSASGLNPTSAPPTSASAVPVSPVPQSPIPPLLQDPNLLRQLLPALQATLQLNNSNVDISKINEVLTAAVTQASLQSIIHKFLTAGPSAFNITSLISQAAQLSTQDIPLHEGIQMERDTHRSKWEVKGSLCQKADKQQECLVWNGSIMVQRLLQPSG

SEQ ID NO: 13205 - protein, 164 aa, Artificial Sequence
  Synthetic polypeptide
DQPGQRGTSYSPQENSHNHSALHSSNSHSSNPSNNPSKTSDAPYDSADDWSEHISSSGKKYYYNCRTEVSQWEKPKEWLEREQRQKEANKMAVNSFPKDRDYRREVMQATATSGFASGMEDKHSSDASSLLPQNILSQTSRHNDRDYRLPRAETHSSSTPVQHP

SEQ ID NO: 13206 - protein, 133 aa, Artificial Sequence
  Synthetic polypeptide
DQPGQRGTSYSPQENSHNHSALHSSNSHSSNPSNNPSKTSDAPYDSADDWSEHISSSGKKYYYNCRTEVSQWEKPKEWLEREQRQKEANKMAVNSFPKDRDYRREVMQATATSGFASGMEDKHSSDASSLLPQ

SEQ ID NO: 13207 - protein, 23 aa, Artificial Sequence
  Synthetic polypeptide
GQEFETSLANVGPVTLHKKIHTT

SEQ ID NO: 13208 - protein, 45 aa, Artificial Sequence
  Synthetic polypeptide
AGSVAHAGISALWEAEAGRSPEVRSLRPAWPTWDQLLSTRKFTQP

SEQ ID NO: 13209 - protein, 19 aa, Artificial Sequence
  Synthetic polypeptide
DQPGQRGTSYSPQENSHNH

SEQ ID NO: 13210 - protein, 193 aa, Artificial Sequence
  Synthetic polypeptide
DQPGQRGTSYSPQENSHNHSALHSSNSHSSNPSNNPSKTSDAPYDSADDWSEHISSSGKKYYYNCRTEVSQWEKPKEWLEREQRQKEANKMAVNSFPKDRDYRREVMQATATSGFASGMEDKHSSDASSLLPQNILSQTSRHNDRDYRLPRAETHSSSTPVQHPIKPVVHPTATPSTVPSSPFTLQSDHQPKK

SEQ ID NO: 13211 - protein, 27 aa, Artificial Sequence
  Synthetic polypeptide
QDFISTKNEKISQCLPTPTSQKSPWRV

SEQ ID NO: 13212 - protein, 36 aa, Artificial Sequence
  Synthetic polypeptide
DQPGKHSKTSSLQKMKKLASVFQLQLLRSHPGGFSQ

SEQ ID NO: 13213 - protein, 818 aa, Artificial Sequence
  Synthetic polypeptide
PVSSNSNFSEVTLAGLASKENFSNVSLRSVNLTEQNSNNSAVPYKRLMLLQIKGRRHVQTRLVEPRASALNSGDCFLLLSPHCCFLWVGEFANVIEKAKASELATLIQTKRELGCRATYIQTIEEGINTHTHAAKDFWKLLGGQTSYQSAGDPKEDELYEAAIIETNCIYRLMDDKLVPDDDYWGKIPKCSLLQPKEVLVFDFGSEVYVWHGKEVTLAQRKIAFQLAKHLWNGTFDYENCDINPLDPGECNPLIPRKGQGRPDWAIFGRLTEHNETILFKEKFLDWTELKRSNEKNPGELAQHKEDPRTDVKAYDVTRMVSMPQTTAGTILDGVNVGRGYGLVEGHDRRQFEITSVSVDVWHILEFDYSRLPKQSIGQFHEGDAYVVKWKFMVSTAVGSRQKGEHSVRAAGKEKCVYFFWQGRHSTVSEKGTSALMTVELDEERGAQVQVLQGKEPPCFLQCFQGGMVVHSGRREEEEENVQSEWRLYCVRGEVPVEGNLLEVACHCSSLRSRTSMVVLNVNKALIYLWHGCKAQAHTKEVGRTAANKIKEQCPLEAGLHSSSKVTIHECDEGSEPLGFWDALGRRDRKAYDCMLQDPGSFNFAPRLFILSSSSGDFAATEFVYPARAPSVVSSMPFLQEDLYSAPQPALFLVDNHHEVYLWQGWWPIENKITGSARIRWASDRKSAMETVLQYCKGKNLKKPAPKSYLIHAGLEPLTFTNMFPSWEHREDIAEITEMDTEVSNQITLVEDVLAKLCKTIYPLADLLARPLPEGVDPLKLEIYLTDEDFEFALDMTRDEYNALPAWKQVNLKKAKGLF

SEQ ID NO: 13214 - protein, 397 aa, Artificial Sequence
  Synthetic polypeptide
PVSSNSNFSEVTLAGLASKENFSNVSLRSVNLTEQNSNNSAVPYKRLMLLQIKGRRHVQTRLVEPRASALNSGDCFLLLSPHCCFLWVGEFANVIEKAKASELATLIQTKRELGCRATYIQTIEEGINTHTHAAKDFWKLLGGQTSYQSAGDPKEDELYEAAIIETNCIYRLMDDKLVPDDDYWGKIPKCSLLQPKEVLVFDFGSEVYVWHGKEVTLAQRKIAFQLAKHLWNGTFDYENCDINPLDPGECNPLIPRKGQGRPDWAIFGRLTEHNETILFKEKFLDWTELKRSNEKNPGELAQHKEDPRTDVKAYDVTRMVSMPQTTAGTILDGVNVGRGYGLVEGHDRRQFEITSVSVDVWHILEFDYSRLPKQSIGQFHEGDAYVVKWKFMVSTAG

SEQ ID NO: 13215 - protein, 455 aa, Artificial Sequence
  Synthetic polypeptide
QINGYNASSQQQREIIKSRSLDRRLQEPIVLTKWRHSTIVLDTNDKESPTASKPCFPENESSPSSPKHQDTDQEKYGLLNVTKIAENGKKVRKNWLSSWAVLQGSSLLFTKTQGSSTSWFGSNQSKPEFTVDLKGATIEMASKDKSSKKNVFELKTRQGTELLIQSDNDTVINDWFKVLSSTINNQAVETDEGIEEEIPDSPGIEKHDKEKEQKDPKKLRSFKVSSIDSSEQKKTKKNLKKFLTRRPTLQAVREKGYIKDQVFGSNLANLCQRENGTVPKFVKLCIEHVEEHGLDIDGIYRVSGNLAVIQKLRFAVNHDEKLDLNDSKWEDIHVITGALKMFFRELPEPLFTFNHFNDFVNAIKQEPRQRVAAVKDLIRQLPKPNQDTMQILFRHLRRVIENGEKNRMTYQSIAIVFGPTLLKPEKETGNIAVHTVYQNQIVELILLELSSIFGR

SEQ ID NO: 13216 - protein, 14 aa, Artificial Sequence
  Synthetic polypeptide
KSMGIMLHPSSKEK

SEQ ID NO: 13217 - protein, 4 aa, Artificial Sequence
  Synthetic polypeptide
NQWV

SEQ ID NO: 13218 - protein, 430 aa, Artificial Sequence
  Synthetic polypeptide
QINGYNASSQQQREIIKSRSLDRRLQEPIVLTKWRHSTIVLDTNDKDQEKYGLLNVTKIAENGKKVRKNWLSSWAVLQGSSLLFTKTQGSSTSWFGSNQSKPEFTVDLKGATIEMASKDKSSKKNVFELKTRQGTELLIQSDNDTVINDWFKVLSSTINNQAVETDEGIEEEIPDSPGIEKHDKEKEQKDPKKLRSFKVSSIDSSEQKKTKKNLKKFLTRRPTLQAVREKGYIKDQVFGSNLANLCQRENGTVPKFVKLCIEHVEEHGLDIDGIYRVSGNLAVIQKLRFAVNHDEKLDLNDSKWEDIHVITGALKMFFRELPEPLFTFNHFNDFVNAIKQEPRQRVAAVKDLIRQLPKPNQDTMQILFRHLRRVIENGEKNRMTYQSIAIVFGPTLLKPEKETGNIAVHTVYQNQIVELILLELSSIFGR

SEQ ID NO: 13219 - protein, 460 aa, Artificial Sequence
  Synthetic polypeptide
QINGYNASSQQQREIIKSRSLDRRLQEPIVLTKWRHSTIVLDTNDKESPTASKPCFPENESSPSSPKHQDTASSPKDQEKYGLLNVTKIAENGKKVRKNWLSSWAVLQGSSLLFTKTQGSSTSWFGSNQSKPEFTVDLKGATIEMASKDKSSKKNVFELKTRQGTELLIQSDNDTVINDWFKVLSSTINNQAVETDEGIEEEIPDSPGIEKHDKEKEQKDPKKLRSFKVSSIDSSEQKKTKKNLKKFLTRRPTLQAVREKGYIKDQVFGSNLANLCQRENGTVPKFVKLCIEHVEEHGLDIDGIYRVSGNLAVIQKLRFAVNHDEKLDLNDSKWEDIHVITGALKMFFRELPEPLFTFNHFNDFVNAIKQEPRQRVAAVKDLIRQLPKPNQDTMQILFRHLRRVIENGEKNRMTYQSIAIVFGPTLLKPEKETGNIAVHTVYQNQIVELILLELSSIFGR

SEQ ID NO: 13220 - protein, 134 aa, Artificial Sequence
  Synthetic polypeptide
QINGYNASSQQQREIIKSRSLDRRLQEPIVLTKWRHSTIVLDTNDKESPTASKPCFPENESSPSSPKHQDTDQEKYGLLNVTKIAENGKKVRKNWLSSWAVLQGSSLLFTKTQGSSTSWFGSNQSKPEFTVDLK

SEQ ID NO: 13221 - protein, 32 aa, Artificial Sequence
  Synthetic polypeptide
KCPQFGKRQTNRLKKLNKHQISIMLHPSSKEK

SEQ ID NO: 13222 - protein, 455 aa, Artificial Sequence
  Synthetic polypeptide
TPDKYNASSQQQREIIKSRSLDRRLQEPIVLTKWRHSTIVLDTNDKESPTASKPCFPENESSPSSPKHQDTDQEKYGLLNVTKIAENGKKVRKNWLSSWAVLQGSSLLFTKTQGSSTSWFGSNQSKPEFTVDLKGATIEMASKDKSSKKNVFELKTRQGTELLIQSDNDTVINDWFKVLSSTINNQAVETDEGIEEEIPDSPGIEKHDKEKEQKDPKKLRSFKVSSIDSSEQKKTKKNLKKFLTRRPTLQAVREKGYIKDQVFGSNLANLCQRENGTVPKFVKLCIEHVEEHGLDIDGIYRVSGNLAVIQKLRFAVNHDEKLDLNDSKWEDIHVITGALKMFFRELPEPLFTFNHFNDFVNAIKQEPRQRVAAVKDLIRQLPKPNQDTMQILFRHLRRVIENGEKNRMTYQSIAIVFGPTLLKPEKETGNIAVHTVYQNQIVELILLELSSIFGR

SEQ ID NO: 13223 - protein, 430 aa, Artificial Sequence
  Synthetic polypeptide
TPDKYNASSQQQREIIKSRSLDRRLQEPIVLTKWRHSTIVLDTNDKDQEKYGLLNVTKIAENGKKVRKNWLSSWAVLQGSSLLFTKTQGSSTSWFGSNQSKPEFTVDLKGATIEMASKDKSSKKNVFELKTRQGTELLIQSDNDTVINDWFKVLSSTINNQAVETDEGIEEEIPDSPGIEKHDKEKEQKDPKKLRSFKVSSIDSSEQKKTKKNLKKFLTRRPTLQAVREKGYIKDQVFGSNLANLCQRENGTVPKFVKLCIEHVEEHGLDIDGIYRVSGNLAVIQKLRFAVNHDEKLDLNDSKWEDIHVITGALKMFFRELPEPLFTFNHFNDFVNAIKQEPRQRVAAVKDLIRQLPKPNQDTMQILFRHLRRVIENGEKNRMTYQSIAIVFGPTLLKPEKETGNIAVHTVYQNQIVELILLELSSIFGR

SEQ ID NO: 13224 - protein, 460 aa, Artificial Sequence
  Synthetic polypeptide
TPDKYNASSQQQREIIKSRSLDRRLQEPIVLTKWRHSTIVLDTNDKESPTASKPCFPENESSPSSPKHQDTASSPKDQEKYGLLNVTKIAENGKKVRKNWLSSWAVLQGSSLLFTKTQGSSTSWFGSNQSKPEFTVDLKGATIEMASKDKSSKKNVFELKTRQGTELLIQSDNDTVINDWFKVLSSTINNQAVETDEGIEEEIPDSPGIEKHDKEKEQKDPKKLRSFKVSSIDSSEQKKTKKNLKKFLTRRPTLQAVREKGYIKDQVFGSNLANLCQRENGTVPKFVKLCIEHVEEHGLDIDGIYRVSGNLAVIQKLRFAVNHDEKLDLNDSKWEDIHVITGALKMFFRELPEPLFTFNHFNDFVNAIKQEPRQRVAAVKDLIRQLPKPNQDTMQILFRHLRRVIENGEKNRMTYQSIAIVFGPTLLKPEKETGNIAVHTVYQNQIVELILLELSSIFGR

SEQ ID NO: 13225 - protein, 134 aa, Artificial Sequence
  Synthetic polypeptide
TPDKYNASSQQQREIIKSRSLDRRLQEPIVLTKWRHSTIVLDTNDKESPTASKPCFPENESSPSSPKHQDTDQEKYGLLNVTKIAENGKKVRKNWLSSWAVLQGSSLLFTKTQGSSTSWFGSNQSKPEFTVDLK

SEQ ID NO: 13226 - protein, 8 aa, Artificial Sequence
  Synthetic polypeptide
FLHFHLRK

SEQ ID NO: 13227 - protein, 120 aa, Artificial Sequence
  Synthetic polypeptide
RRRRVISAFPSEKVARLEIENKVLQEQLKQALQEAEKAKHQLNYFLNQEKLLKSEGKTETTMQVGNSQTKVKGEDSKNIPLEKETRKSLVSDSGGQRTSDKIQEYPQITAQSGRLIEKRC

SEQ ID NO: 13228 - protein, 125 aa, Artificial Sequence
  Synthetic polypeptide
RRRRVISAFPSEKVARLEIENKVLQEQLKQALQEAEKAKHQLNYFLNQEKLLKSEGKTETTMQVGNSQTKVKGEDSKNIPLEKETRKSLVSDSGGQRTSDKIQEYPQMLIEFLKYFGKVSQTFRE

SEQ ID NO: 13229 - protein, 35 aa, Artificial Sequence
  Synthetic polypeptide
LLAQHSEIKLQGGSEAGGGAPAIAQACLESSTSGN

SEQ ID NO: 13230 - protein, 23 aa, Artificial Sequence
  Synthetic polypeptide
DQTARRQRGWGRGARHCPGLLRK

SEQ ID NO: 13231 - protein, 803 aa, Artificial Sequence
  Synthetic polypeptide
SLMNLQPIFWIGLISSVCCVFAQTDENRCLKANAKSCGECIQAGPNCGWCTNSTFLQEGMPTSARCDDLEALKKKGCPPDDIENPRGSKDIKKNKNVTNRSKGTAEKLKPEDITQIQPQQLVLRLRSGEPQTFTLKFKRAEDYPIDLYYLMDLSYSMKDDLENVKSLGTDLMNEMRRITSDFRIGFGSFVEKTVMPYISTTPAKLRNPCTSEQNCTSPFSYKNVLSLTNKGEVFNELVGKQRISGNLDSPEGGFDAIMQVAVCGSLIGWRNVTRLLVFSTDAGFHFAGDGKLGGIVLPNDGQCHLENNMYTMSHYYDYPSIAHLVQKLSENNIQTIFAVTEEFQPVYKELKNLIPKSAVGTLSANSSNVIQLIIDAYNSLSSEVILENGKLSEGVTISYKSYCKNGVNGTGENGRKCSNISIGDEVQFEISITSNKCPKKDSDSFKIRPLGFTEEVEVILQYICECECQSEGIPESPKCHEGNGTFECGACRCNEGRVGRHCECSTDEVNSEDMDAYCRKENSSEICSNNGECVCGQCVCRKRDNTNEIYSGKFCECDNFNCDRSNGLICGGNGVCKCRVCECNPNYTGSACDCSLDTSTCEASNGQICNGRGICECGVCKCTDPKFQGQTCEMCQTCLGVCAEHKECVQCRAFNKGEKKDTCTQECSYFNITKVESRDKLPQPVQPDPVSHCKEKDVDDCWFYFTYSVNGNNEVMVHVVENPECPTGPDIIPIVAGVVAGIVLIGLALLLIWKLLMIIHDRREFAKFEKEKMNAKWDTQENPIYKSPINNFKNPNYGRKAGL

SEQ ID NO: 13232 - protein, 34 aa, Artificial Sequence
  Synthetic polypeptide
VQNFALIGMIINEFTTNFLDWTDQFSLLCVCSNR

SEQ ID NO: 13233 - protein, 800 aa, Artificial Sequence
  Synthetic polypeptide
SLMNLQPIFWIGLISSVCCVFAQTDENRCLKANAKSCGECIQAGPNCGWCTNSTFLQEGMPTSARCDDLEALKKKGCPPDDIENPRGSKDIKKNKNVTNRSKGTAEKLKPEDITQIQPQQLVLRLRSGEPQTFTLKFKRAEDYPIDLYYLMDLSYSMKDDLENVKSLGTDLMNEMRRITSDFRIGFGSFVEKTVMPYISTTPAKLRNPCTSEQNCTSPFSYKNVLSLTNKGEVFNELVGKQRISGNLDSPEGGFDAIMQVAVCGSLIGWRNVTRLLVFSTDAGFHFAGDGKLGGIVLPNDGQCHLENNMYTMSHYYDYPSIAHLVQKLSENNIQTIFAVTEEFQPVYKELKNLIPKSAVGTLSANSSNVIQLIIDAYNSLSSEVILENGKLSEGVTISYKSYCKNGVNGTGENGRKCSNISIGDEVQFEISITSNKCPKKDSDSFKIRPLGFTEEVEVILQYICECECQSEGIPESPKCHEGNGTFECGACRCNEGRVGRHCECSTDEVNSEDMDAYCRKENSSEICSNNGECVCGQCVCRKRDNTNEIYSGKFCECDNFNCDRSNGLICGGNGVCKCRVCECNPNYTGSACDCSLDTSTCEASNGQICNGRGICECGVCKCTDPKFQGQTCEMCQTCLGVCAEHKECVQCRAFNKGEKKDTCTQECSYFNITKVESRDKLPQPVQPDPVSHCKEKDVDDCWFYFTYSVNGNNEVMVHVVENPECPTGPDIIPIVAGVVAGIVLIGLALLLIWKLLMIIHDRREFAKFEKEKMNAKWDTGENPIYKSAVTTVVNPKYEGK

SEQ ID NO: 13234 - protein, 827 aa, Artificial Sequence
  Synthetic polypeptide
SLMNLQPIFWIGLISSVCCVFAQTDENRCLKANAKSCGECIQAGPNCGWCTNSTFLQEGMPTSARCDDLEALKKKGCPPDDIENPRGSKDIKKNKNVTNRSKGTAEKLKPEDITQIQPQQLVLRLRSGEPQTFTLKFKRAEDYPIDLYYLMDLSYSMKDDLENVKSLGTDLMNEMRRITSDFRIGFGSFVEKTVMPYISTTPAKLRNPCTSEQNCTSPFSYKNVLSLTNKGEVFNELVGKQRISGNLDSPEGGFDAIMQVAVCGSLIGWRNVTRLLVFSTDAGFHFAGDGKLGGIVLPNDGQCHLENNMYTMSHYYDYPSIAHLVQKLSENNIQTIFAVTEEFQPVYKELKNLIPKSAVGTLSANSSNVIQLIIDAYNSLSSEVILENGKLSEGVTISYKSYCKNGVNGTGENGRKCSNISIGDEVQFEISITSNKCPKKDSDSFKIRPLGFTEEVEVILQYICECECQSEGIPESPKCHEGNGTFECGACRCNEGRVGRHCECSTDEVNSEDMDAYCRKENSSEICSNNGECVCGQCVCRKRDNTNEIYSGKFCECDNFNCDRSNGLICGGNGVCKCRVCECNPNYTGSACDCSLDTSTCEASNGQICNGRGICECGVCKCTDPKFQGQTCEMCQTCLGVCAEHKECVQCRAFNKGEKKDTCTQECSYFNITKVESRDKLPQPVQPDPVSHCKEKDVDDCWFYFTYSVNGNNEVMVHVVENPECPTGPDIIPIVAGVVAGIVLIGLALLLIWKLLMIIHDRREFAKFEKEKMNAKWDTSLSVAQPGVQWCDISSLQPLTSRFQQFSCLSLPSTWDYRVKILFIRVP

SEQ ID NO: 13235 - protein, 165 aa, Artificial Sequence
  Synthetic polypeptide
SLMNLQPIFWIGLISSVCCVFAQTDENRCLKANAKSCGECIQAGPNCGWCTNSTFLQEGMPTSARCDDLEALKKKGCPPDDIENPRGSKDIKKNKNVTNRSKGTAEKLKPEDITQIQPQQLVLRLRSGEPQTFTLKFKRAEDYPIDLYYLMDLSYSMKDDLENVK

SEQ ID NO: 13236 - protein, 154 aa, Artificial Sequence
  Synthetic polypeptide
SLMNLQPIFWIGLISSVCCVFAQTDENRCLKANAKSCGECIQAGPNCGWCTNSVSKTFLQEGMPTSARCDDLEALKKKGCPPDDIENPRGSKDIKKNKNVTNRSKGTAEKLKPEDITQIQPQQLVLRLRSGEPQTFTLKFKRAEDYPIDLYYLM

SEQ ID NO: 13237 - protein, 145 aa, Artificial Sequence
  Synthetic polypeptide
SLMNLQPIFWIGLISSVCCVFAQTDENRCLKANAKSCGECIQAGPNCGWCTNSTFLQEGMPTSARCDDLEALKKKGCPPDDIENPRGSKDIKKNKNVTNRSKGTAEKLKPEDITQIQPQQLVLRLRSGEPQTFTLKFKRAEDYPI

SEQ ID NO: 13238 - protein, 138 aa, Artificial Sequence
  Synthetic polypeptide
SLMNLQPIFWIGLISSVCCVFAQTDENRCLKANAKSCGECIQAGPNCGWCTNSTFLQEGMPTSARCDDLEALKKKGCPPDDIENPRGSKDIKKNKNVTNRSKGTAEKLKPEDITQIQPQQLVLRLRSGEPQTFTLKFK

SEQ ID NO: 13239 - protein, 126 aa, Artificial Sequence
  Synthetic polypeptide
SLMNLQPIFWIGLISSVCCVFAQTDENRCLKANAKSCGECIQAGPNCGWCTNSTFLQEGMPTSARCDDLEALKKKGCPPDDIENPRGSKDIKKNKNVTNRSKGTAEKLKPEDITQIQPQQLVLRLR

SEQ ID NO: 13240 - protein, 106 aa, Artificial Sequence
  Synthetic polypeptide
SLMNLQPIFWIGLISSVCCVFAQTDENRCLKANAKSCGECIQAGPNCGWCTNSTFLQEGMPTSARCDDLEALKKKGCPPDDIENPRGSKDIKKNKNVTNRSKGTAE

SEQ ID NO: 13241 - protein, 91 aa, Artificial Sequence
  Synthetic polypeptide
SLMNLQPIFWIGLISSVCCVFAQTDENRCLKANAKSCGECIQAGPNCGWCTNSTFLQEGMPTSARCDDLEALKKKGCPPDDIENPRGSKDI

SEQ ID NO: 13242 - protein, 51 aa, Artificial Sequence
  Synthetic polypeptide
SLMNLQPIFWIGLISSVCCVFAQTDENRCLKANAKSCGECIQAGPNCGWCT

SEQ ID NO: 13243 - protein, 347 aa, Artificial Sequence
  Synthetic polypeptide
WELIDTKHFRTPPGTKFGKHRKDDKIEKTGKIKIQESFTSEEERIRMKQEQERIQAKTREFRERQARERDYAEIQDFHRTFGCDDELMYGGVSSYEGSMALNARPQSPREGHMMDALYAQVKKPRNSKPSPVDSNRSTPSNHDRIQRLRQEFQQAKQDEDVEDRRRTYSFEQPWPNARPATQSGRHSVSVEVQMQRQRQEERESSQQAQRQYSSLPRQSRKNASSVSQDSWEQNYSPGEGFQSAKENPRYSSYQGSRNGYLGGHGFNARVMLETQELLRQEQRRKEQQMKKQPPSEGPSNYDSYKKVQDPSYAPPKGPFRQDVPPSPSQVARLNRLQTPEKGRPFYS

SEQ ID NO: 13244 - protein, 27 aa, Artificial Sequence
  Synthetic polypeptide
IQSILELLLVQSLANIEKMTRLRKRVK

SEQ ID NO: 13245 - protein, 13 aa, Artificial Sequence
  Synthetic polypeptide
NSSWYKVWQTSKR

SEQ ID NO: 13246 - protein, 47 aa, Artificial Sequence
  Synthetic polypeptide
LTPVIPALWEERLVDHEVKRSRPSWPTCGRRHRRKFKIRERVCIHSQ

SEQ ID NO: 13247 - protein, 432 aa, Artificial Sequence
  Synthetic polypeptide
SQHFGRRGWWIMRSRDRDHPGQHVEEDTEESSRSGRESVSTASDQPSHSLERQMNGNQEKGDKTDRKKDKTGKEKKKDRDKEKDKMKAKKGMLKGLGDMFRFGKHRKDDKIEKTGKIKIQESFTSEEERIRMKQEQERIQAKTREFRERQARERDYAEIQDFHRTFGCDDELMYGGVSSYEGSMALNARPQSPREGHMMDALYAQVKKPRNSKPSPVDSNRSTPSNHDRIQRLRQEFQQAKQDEDVEDRRRTYSFEQPWPNARPATQSGRHSVSVEVQMQRQRQEERESSQQAQRQYSSLPRQSRKNASSVSQDSWEQNYSPGEGFQSAKENPRYSSYQGSRNGYLGGHGFNARVMLETQELLRQEQRRKEQQMKKQPPSEGPSNYDSYKKVQDPSYAPPKGPFRQDVPPSPSQVARLNRLQTPEKGRPFYS

SEQ ID NO: 13248 - protein, 41 aa, Artificial Sequence
  Synthetic polypeptide
GQEIETILANMWKKTQKKVQDQGESLYPQPVISLPTLWRDK

SEQ ID NO: 13249 - protein, 395 aa, Artificial Sequence
  Synthetic polypeptide
SQHFGRRGWWIMRSRDRDHPGQHVEEDTEESSRSGRESVSTASDQPSHSLERQMNGNQEKGDKTDRKKDKTGKEKKKDRDKEKDKMKAKKGMLKGLGDMFRIQAKTREFRERQARERDYAEIQDFHRTFGCDDELMYGGVSSYEGSMALNARPQSPREGHMMDALYAQVKKPRNSKPSPVDSNRSTPSNHDRIQRLRQEFQQAKQDEDVEDRRRTYSFEQPWPNARPATQSGRHSVSVEVQMQRQRQEERESSQQAQRQYSSLPRQSRKNASSVSQDSWEQNYSPGEGFQSAKENPRYSSYQGSRNGYLGGHGFNARVMLETQELLRQEQRRKEQQMKKQPPSEGPSNYDSYKKVQDPSYAPPKGPFRQDVPPSPSQVARLNRLQTPEKGRPFYS

SEQ ID NO: 13250 - protein, 110 aa, Artificial Sequence
  Synthetic polypeptide
SQHFGRRGWWIMRSRDRDHPGQHVEEDTEESSRSGRESVSTASDQPSHSLERQMNGNQEKGDKTDRKKDKTGKEKKKDRDKEKDKMKAKKGMLKGLGDMFSLAKLKPEKR

SEQ ID NO: 13251 - protein, 186 aa, Artificial Sequence
  Synthetic polypeptide
MDKESMVAAIAETDESAESEGVIDSHKRREILSRRPSYRKILNELSSDVPGVPKIEEERSEEEGTPPSIATMAVPTSIYQTSTGQYTATGDMPTYQIRAPTAALPQGVVMAASPGSLHSPQQLAEEATRKRELRLMKNREAARECRRKKKEYVKCLENRVAVLENQNKTLIEELKALKDLYCHKVE

SEQ ID NO: 13252 - protein, 60 aa, Artificial Sequence
  Synthetic polypeptide
KIEVPDDPAISLLGIYPKEMKAVCGRDICTSIFIAALCIMAKIRNQPRCSSVDEWIKKVW

SEQ ID NO: 13253 - protein, 11 aa, Artificial Sequence
  Synthetic polypeptide
RKYGSSNCRDR

SEQ ID NO: 13254 - protein, 103 aa, Artificial Sequence
  Synthetic polypeptide
MDKESMVAAIAETDESAESEGVIDSHKRREILSRRPSYRKILNELSSDVPGVPKIEEERSEEEGTPPSIATMAVPTSIYQTSTGQYSMYAAIRYDTVLALSLL

SEQ ID NO: 13255 - protein, 7 aa, Artificial Sequence
  Synthetic polypeptide
MDKESMV

SEQ ID NO: 13256 - protein, 4 aa, Artificial Sequence
  Synthetic polypeptide
RKYG

SEQ ID NO: 13257 - protein, 262 aa, Artificial Sequence
  Synthetic polypeptide
MDKESMVAAIAETDESAESEGVIDSHKRREILSRRPSYRKILNELSSDVPGVPKIEEERSEEEGTPPSIATMAVPTSIYQTSTGQYIAIAQGGTIQISNPGSDGVQGLQALTMTNSGAPPPGATIVQYAAQSADGTQQFFVPGSQVVVQDEETELAPSHMAAATGDMPTYQIRAPTAALPQGVVMAASPGSLHSPQQLAEEATRKRELRLMKNREAAKECRRRKKEYVKCLESRVAVLEVQNKKLIEELETLKDICSPKTDY

SEQ ID NO: 13258 - protein, 198 aa, Artificial Sequence
  Synthetic polypeptide
MDKESMVAAIAETDESAESEGVIDSHKRREILSRRPSYRKILNELSSDVPGVPKIEEERSEEEGTPPSIATMAVPTSIYQTSTGQYNEETELAPSHMAAATGDMPTYQIRAPTAALPQGVVMAASPGSLHSPQQLAEEATRKRELRLMKNREAARECRRKKKEYVKCLENRVAVLENQNKTLIEELKALKDLYCHKVE

SEQ ID NO: 13259 - protein, 106 aa, Artificial Sequence
  Synthetic polypeptide
MDKESMVAAIAETDESAESEGVIDSHKRREILSRRPSYRKILNELSSDVPGVPKIEEERSEEEGTPPSIATMAVPTSIYQTSTGQYIAIAQGGTIQISNPGSDGVQ

SEQ ID NO: 13260 - protein, 187 aa, Artificial Sequence
  Synthetic polypeptide
MDKESMVAAIAETDESAESEGVIDSHKRREILSRRPSYRKILNELSSDVPGVPKIEEERSEEEGTPPSIATMAVPTSIYQTSTGQYTATGDMPTYQIRAPTAALPQGVVMAASPGSLHSPQQLAEEATRKRELRLMKNREAAKECRRRKKEYVKCLESRVAVLEVQNKKLIEELETLKDICSPKTDY

SEQ ID NO: 13261 - protein, 250 aa, Artificial Sequence
  Synthetic polypeptide
MDKESMVAAIAETDESAESEGVIDSHKRREILSRRPSYRKILNELSSDVPGVPKIEEERSEEEGTPPSIATMAVPTSIYQTSTGQYIAIAQGGTIQISNPGSDGVQGLQALTMTNSGAPPPGATIVQYAAQSADGTQQFFVPGSQVVVQAATGDMPTYQIRAPTAALPQGVVMAASPGSLHSPQQLAEEATRKRELRLMKNREAAKECRRRKKEYVKCLESRVAVLEVQNKKLIEELETLKDICSPKTDY

SEQ ID NO: 13262 - protein, 152 aa, Artificial Sequence
  Synthetic polypeptide
MDKESMVAAIAETDESAESEGVIDSHKRREILSRRPSYRKILNELSSDVPGVPKIEEERSEEEGTPPSIATMAVPTSIYQTSTGQYTATGDMPTYQIRAPTAALPQGVVMAASPGSLHSPQQLAEEATRKRELRLMKNREAAKECRRRKKEY

SEQ ID NO: 13263 - protein, 249 aa, Artificial Sequence
  Synthetic polypeptide
MDKESMVAAIAETDESAESEGVIDSHKRREILSRRPSYRKILNELSSDVPGVPKIEEERSEEEGTPPSIATMAVPTSIYQTSTGQYIAIAQGGTIQISNPGSDGVQGLQALTMTNSGAPPPGATIVQYAAQSADGTQQFFVPGSQVVVQAATGDMPTYQIRAPTAALPQGVVMAASPGSLHSPQQLAEEATRKRELRLMKNREAARECRRKKKEYVKCLENRVAVLENQNKTLIEELKALKDLYCHKVE

SEQ ID NO: 13264 - protein, 199 aa, Artificial Sequence
  Synthetic polypeptide
MDKESMVAAIAETDESAESEGVIDSHKRREILSRRPSYRKILNELSSDVPGVPKIEEERSEEEGTPPSIATMAVPTSIYQTSTGQYNEETELAPSHMAAATGDMPTYQIRAPTAALPQGVVMAASPGSLHSPQQLAEEATRKRELRLMKNREAAKECRRRKKEYVKCLESRVAVLEVQNKKLIEELETLKDICSPKTDY

SEQ ID NO: 13265 - protein, 27 aa, Artificial Sequence
  Synthetic polypeptide
SQPFGRPRFEHGIQSFRSSSGQHNIPQ

SEQ ID NO: 13266 - protein, 306 aa, Artificial Sequence
  Synthetic polypeptide
MGAVAHVCNPSPLGGQDLNMEFNPSDHPRASTIFLSKSQTDVREKRKSLFINHHPPGQIARKYSSCSTIFLDDSTVSQPNLKYTIKCVALAIYYHIKNRDPDGRMLLDIFDENLHPLSKSEVPPDYDKHNPEQKQIYRFVRTLFSAAQLTAECAIVTLVYLERLLTYAEIDICPANWKRIVLGAILLASKVWDDQAVWNVDYCQILKDITVEDMNELERQFLELLQFNINVPSSVYAKYYFDLRSLAEANNLSFPLEPLSRERAHKLEAISRLCEDKYKDLRRSARKRSASADNLTLPRWSPAIIS

SEQ ID NO: 13267 - protein, 17 aa, Artificial Sequence
  Synthetic polypeptide
WALWLMSVIPALWEAKI

SEQ ID NO: 13268 - protein, 13 aa, Artificial Sequence
  Synthetic polypeptide
YELTRGHLRRLNI

SEQ ID NO: 13269 - protein, 300 aa, Artificial Sequence
  Synthetic polypeptide
ADSWAFEKIKYLNMEFNPSDHPRASTIFLSKSQTDVREKRKSLFINHHPPGQIARKYSSCSTIFLDDSTVSQPNLKYTIKCVALAIYYHIKNRDPDGRMLLDIFDENLHPLSKSEVPPDYDKHNPEQKQIYRFVRTLFSAAQLTAECAIVTLVYLERLLTYAEIDICPANWKRIVLGAILLASKVWDDQAVWNVDYCQILKDITVEDMNELERQFLELLQFNINVPSSVYAKYYFDLRSLAEANNLSFPLEPLSRERAHKLEAISRLCEDKYKDLRRSARKRSASADNLTLPRWSPAIIS

SEQ ID NO: 13270 - protein, 59 aa, Artificial Sequence
  Synthetic polypeptide
RGLARLSLPSLPSCLHSPQCHAAAALFPGCTGHTPASGLLHLRTSSTPWHPAPSVPGVP

SEQ ID NO: 13271 - protein, 198 aa, Artificial Sequence
  Synthetic polypeptide
ASHLCPAASTLLSVMLQLLCSLDVPDTHLPRDFCTSGLPPPLGTQLPLSQVYLERLLTYAEIDICPANWKRIVLGAILLASKVWDDQAVWNVDYCQILKDITVEDMNELERQFLELLQFNINVPSSVYAKYYFDLRSLAEANNLSFPLEPLSRERAHKLEAISRLCEDKYKDLRRSARKRSASADNLTLPRWSPAIIS

SEQ ID NO: 13272 - protein, 86 aa, Artificial Sequence
  Synthetic polypeptide
LLCSEPVVVPIFLKGKHKALMLLTGPSKIKPPISAQLPPLSSVSCCSCSVPWMYRTHTCLGTSAPQDFLHPLAPSSLCPRCTLKDF

SEQ ID NO: 13273 - protein, 33 aa, Artificial Sequence
  Synthetic polypeptide
QSETPSEKSLPRSHLPSSLPLKCKSLFQIKPWN

SEQ ID NO: 13274 - protein, 95 aa, Artificial Sequence
  Synthetic polypeptide
QFGRQRRADKLRSGVPDQPGQTSETPSLLNITKNSRLWWWVPVISATLEAEAGEWLEPRTQKLHEPSLCHFSLSDRVRLHLKRASREAICLRACH

SEQ ID NO: 13275 - protein, 646 aa, Artificial Sequence
  Synthetic polypeptide
KEPPEKPSAFEPAIEMQKSVPNKALELKNEQTLRADEILPSESKQKDYEESSWDSESLCETVSQKDVCLPKATHQKEIDKINGKLEESPDNDGFLKAPCRMKVSIPTKALELMDMQTFKAEPPEKPSAFEPAIEMQKSVPNKALELKNEQTLRADQMFPSESKQKKVEENSWDSESLRETVSQKDVCVPKATHQKEMDKISGKLEDSTSLSKILDTVHSCERARELQKDHCEQRTGKMEQMKKKFCVLKKKLSEAKEIKSQLENQKVKWEQELCSVRLTLNQEEEKRRNADILNEKIREELGRIEEQHRKELEVKQQLEQALRIQDIELKSVESNLNQVSHTHENENYLLHENCMLKKEIAMLKLEIATLKHQYQEKENKYFEDIKILKEKNAELQMTLKLKEESLTKRASQYSGQLKVLIAENTMLTSKLKEKQDKEILEAEIESHHPRLASAVQDHDQIVTSRKSQEPAFHIAGDACLQRKMNVDVSSTIYNNEVLHQPLSEAQRKSKSLKINLNYAGDALRENTLVSEHAQRDQRETQCQMKEAEHMYQNEQDNVNKHTEQQESLDQKLFQLQSKNMWLQQQLVHAHKKADNKSKITIDIHFLERKMQHHLLKEKNEEIFNYNNHLKNRIYQYEKEKAETENS

SEQ ID NO: 13276 - protein, 765 aa, Artificial Sequence
  Synthetic polypeptide
KEPPEKPSAFEPAIEMQKSVPNKALELKNEQTLRADEILPSESKQKDYEESSWDSESLCETVSQKDVCLPKAAHQKEIDKINGKLEGSPVKDGLLKANCGMKVSIPTKALELMDMQTFKAEPPEKPSAFEPAIEMQKSVPNKALELKNEQTLRADEILPSESKQKDYEESSWDSESLCETVSQKDVCLPKATHQKEIDKINGKLEESPDNDGFLKAPCRMKVSIPTKALELMDMQTFKAEPPEKPSAFEPAIEMQKSVPNKALELKNEQTLRADQMFPSESKQKKVEENSWDSESLRETVSQKDVCVPKATHQKEMDKISGKLEDSTSLSKILDTVHSCERARELQKDHCEQRTGKMEQMKKKFCVLKKKLSEAKEIKSQLENQKVKWEQELCSVRLTLNQEEEKRRNADILNEKIREELGRIEEQHRKELEVKQQLEQALRIQDIELKSVESNLNQVSHTHENENYLLHENCMLKKEIAMLKLEIATLKHQYQEKENKYFEDIKILKEKNAELQMTLKLKEESLTKRASQYSGQLKVLIAENTMLTSKLKEKQDKEILEAEIESHHPRLASAVQDHDQIVTSRKSQEPAFHIAGDACLQRKMNVDVSSTIYNNEVLHQPLSEAQRKSKSLKINLNYAGDALRENTLVSEHAQRDQRETQCQMKEAEHMYQNEQDNVNKHTEQQESLDQKLFQLQSKNMWLQQQLVHAHKKADNKSKITIDIHFLERKMQHHLLKEKNEEIFNYNNHLKNRIYQYEKEKAETENS

SEQ ID NO: 13277 - protein, 33 aa, Artificial Sequence; identical to SEQ ID NO: 13273
  Synthetic polypeptide

SEQ ID NO: 13278 - protein, 95 aa, Artificial Sequence; identical to SEQ ID NO: 13274
  Synthetic polypeptide

SEQ ID NO: 13279 - protein, 646 aa, Artificial Sequence; identical to SEQ ID NO: 13275
  Synthetic polypeptide

SEQ ID NO: 13280 - protein, 33 aa, Artificial Sequence; identical to SEQ ID NO: 13273
  Synthetic polypeptide

SEQ ID NO: 13281 - protein, 95 aa, Artificial Sequence; identical to SEQ ID NO: 13274
  Synthetic polypeptide

SEQ ID NO: 13282 - protein, 527 aa, Artificial Sequence
  Synthetic polypeptide
KEPPEKPSAFEPAIEMQKSVPNKALELKNEQTLRADQMFPSESKQKKVEENSWDSESLRETVSQKDVCVPKATHQKEMDKISGKLEDSTSLSKILDTVHSCERARELQKDHCEQRTGKMEQMKKKFCVLKKKLSEAKEIKSQLENQKVKWEQELCSVRLTLNQEEEKRRNADILNEKIREELGRIEEQHRKELEVKQQLEQALRIQDIELKSVESNLNQVSHTHENENYLLHENCMLKKEIAMLKLEIATLKHQYQEKENKYFEDIKILKEKNAELQMTLKLKEESLTKRASQYSGQLKVLIAENTMLTSKLKEKQDKEILEAEIESHHPRLASAVQDHDQIVTSRKSQEPAFHIAGDACLQRKMNVDVSSTIYNNEVLHQPLSEAQRKSKSLKINLNYAGDALRENTLVSEHAQRDQRETQCQMKEAEHMYQNEQDNVNKHTEQQESLDQKLFQLQSKNMWLQQQLVHAHKKADNKSKITIDIHFLERKMQHHLLKEKNEEIFNYNNHLKNRIYQYEKEKAETENS

SEQ ID NO: 13283 - protein, 33 aa, Artificial Sequence; identical to SEQ ID NO: 13273
  Synthetic polypeptide

SEQ ID NO: 13284 - protein, 95 aa, Artificial Sequence; identical to SEQ ID NO: 13274
  Synthetic polypeptide

SEQ ID NO: 13285 - protein, 646 aa, Artificial Sequence; identical to SEQ ID NO: 13275
  Synthetic polypeptide

SEQ ID NO: 13286 - protein, 33 aa, Artificial Sequence; identical to SEQ ID NO: 13273
  Synthetic polypeptide

SEQ ID NO: 13287 - protein, 95 aa, Artificial Sequence; identical to SEQ ID NO: 13274
  Synthetic polypeptide

SEQ ID NO: 13288 - protein, 527 aa, Artificial Sequence; identical to SEQ ID NO: 13282
  Synthetic polypeptide

SEQ ID NO: 13289 - protein, 123 aa, Artificial Sequence
  Synthetic polypeptide
GRAPWLLPVIPALWEAEEQVSFKDVCVDFTQEEWYLLDPAQKILYRDVILENYSNLVSVGYCITKPEVIFKIEQGEEPWILEKGFPSQCHPERKWKVDDVLESSQENEDDHFWELLFHNNKTH

SEQ ID NO: 13290 - protein, 38 aa, Artificial Sequence
  Synthetic polypeptide
SQHFGRPRNKCHSRMYVWTSLRKSGICWTLLRRFYTEM

SEQ ID NO: 13291 - protein, 52 aa, Artificial Sequence
  Synthetic polypeptide
PGTVAPACNPSTLGGRGTSVIQGCMCGLHSGRVVSAGPCSEDSIQRCDPGKL

SEQ ID NO: 13292 - protein, 591 aa, Artificial Sequence
  Synthetic polypeptide
GRAPWLLPVIPALWEAEEQVSFKDVCVDFTQEEWYLLDPAQKILYRDVILENYSNLVSVGYCITKPEVIFKIEQGEEPWILEKGFPSQCHPERKWKVDDVLESSQENEDDHFWELLFHNNKTVSVENGDRGSKTFNLGTDPVSLRNYPYKICDSCEMNLKNISGLIISKKNCSRKKPDEFNVCEKLLLDIRHEKIPIGEKSYKYDQKRNAINYHQDLSQPSFGQSFEYSKNGQGFHDEAAFFTNKRSQIGETVCKYNECGRTFIESLKLNISQRPHLEMEPYGCSICGKSFCMNLRFGHQRALTKDNPYEYNEYGEIFCDNSAFIIHQGAYTRKILREYKVSDKTWEKSALLKHQIVHMGGKSYDYNENGSNFSKKSHLTQLRRAHTGEKTFECGECGKTFWEKSNLTQHQRTHTGEKPYECTECGKAFCQKPHLTNHQRTHTGEKPYECKQCGKTFCVKSNLTEHQRTHTGEKPYECNACGKSFCHRSALTVHQRTHTGEKPFICNECGKSFCVKSNLIVHQRTHTGEKPYKCNECGKTFCEKSALTKHQRTHTGEKPYECNACGKTFSQRSVLTKHQRIHTRVKALSTS

SEQ ID NO: 13293 - protein, 131 aa, Artificial Sequence
  Synthetic polypeptide
GRAPWLLPVIPALWEAEEQVSFKDVCVDFTQEEWYLLDPAQKILYRDVILENYSNLVSVGYCITKPEVIFKIEQGEEPWILEKGFPSQCHPERKWKVDDVLESSQENEDDHFWELLFHNNKTWNLKLIKVE

SEQ ID NO: 13294 - protein, 112 aa, Artificial Sequence
  Synthetic polypeptide
GRAPWLLPVIPALWEAEEQVSFKDVCVDFTQEEWYLLDPAQKILYRDVILENYSNLVSVGYCITKPEVIFKIEQGEEPWILEKGFPSQCHPERKWKVDDVLESSQENEDDHF

SEQ ID NO: 13295 - protein, 81 aa, Artificial Sequence
  Synthetic polypeptide
GRAPWLLPVIPALWEAEEQVSFKDVCVDFTQEEWYLLDPAQKILYRDVILENYSNLVSVGYCITKPEVIFKIEQGEEPWIL

SEQ ID NO: 13296 - protein, 29 aa, Artificial Sequence
  Synthetic polypeptide
PGTRDIKGCYCGIHQGRMEVTDPCSEDSV

SEQ ID NO: 13297 - protein, 470 aa, Artificial Sequence
  Synthetic polypeptide
NHPGQHDKTLSLQNTKISQGPVTLKDVIVEFTKEEWKLLTPAQRTLYKDVMLENYSHLVSVGYHVNKPNAVFKLKQGKEPWILEVEFPHRGFPEDLWSIHDLEARYQESQAGNSRNGELTKHQKTHTTEKACECKECGKFFCQKSALIVHQHTHSKGKSYDCDKCGKSFSKNEDLIRHQKIHTRDKTYECKECKKIFYHLSSLSRHLRTHAGEKPYECNQCEKSFYQKPHLTEHQKTHTGEKPFECTECGKFFYVKAYLMVHQKTHTGEKPYECKECGKAFSQKSHLTVHQRMHTGEKPYKCKECGKFFSRNSHLKTHQRSHTGEKPYECKECRKCFYQKSALTVHQRTHTGEKPFECNKCGKTFYYKSDLTKHQRKHTGEKPYECTECGKSFAVNSVLRLHQRTHTGEKPYACKECGKSFSQKSHFIIHQRKHTGEKPYECQECGETFIQKSQLTAHQKTHTKKRNAEK

SEQ ID NO: 13298 - protein, 26 aa, Artificial Sequence
  Synthetic polypeptide
AQEFETILGNMTRPCLCKIQKLARDP

SEQ ID NO: 13299 - protein, 812 aa, Artificial Sequence
  Synthetic polypeptide
FAPNVEQKSQESVSFKDVTVGFTQEEWQHLDPSQRALYRDVMLENYSNLVSVGYCVHKPEVIFRLQQGEEPWKQEEEFPSQSFPEVWTADHLKERSQENQSKHLWEVVFINNEMLTKEQGDVIGIPFNVDVSSFPSRKMFCQCDSCGMSFNTVSELVISKINYLGKKSDEFNACGKLLLNIKHDETHTQEKNEVLKNRNTLSHHEETLQHEKIQTLEHNFEYSICQETLLEKAVFNTQKRENAEENNCDYNEFGRTLCDSSSLLFHQISPSRDNHYEFSDCEKFLCVKSTLSKPHGVSMKHYDCGESGNNFRRKLCLSHLQKGDKGEKHFECNECGKAFWEKSHLTRHQRVHTGQKPFQCNECEKAFWDKSNLTKHQRSHTGEKPFECNECGKAFSHKSALTLHQRTHTGEKPYQCNACGKTFCQKSDLTKHQRTHTGLKPYECYECGKSFRVTSHLKVHQRTHTGEKPFECLECGKSFSEKSNLTQHQRIHIGDKSYECNACGKTFYHKSLLTRHQIIHTGWKPYECYECGKTFCLKSDLTVHQRTHTGQKPFACPECGKFFSHKSTLSQHYRTHTGEKPYECHECGKIFYNKSYLTKHNRTHTGEKPYECNECGKAFYQKSQLTQHQRIHIGEKPYKCNECGKAFCHKSALIVHQRTHTQEKPYKCNECGKSFCVKSGLIFHERKHTGEKPYECNECGKFFRHKSSLTVHHRAHTGEKSCQCNECGKIFYRKSELAQHQRSHTGEKPYECNTCRKTFSQKSNLIVHQRRHIGENLMNEMDIRNFQPQVSLHNASEYSHCGESPDDILNVQ

SEQ ID NO: 13300 - protein, 4 aa, Artificial Sequence
  Synthetic polypeptide
MLLM

SEQ ID NO: 13301 - protein, 811 aa, Artificial Sequence
  Synthetic polypeptide
FAPNVEQKSQESVSFKDVTVGFTQEEWQHLDPSQRALYRDVMLENYSNLVSVGYCVHKPEVIFRLQQGEEPWKQEEEFPSQSFPVWTADHLKERSQENQSKHLWEVVFINNEMLTKEQGDVIGIPFNVDVSSFPSRKMFCQCDSCGMSFNTVSELVISKINYLGKKSDEFNACGKLLLNIKHDETHTQEKNEVLKNRNTLSHHEETLQHEKIQTLEHNFEYSICQETLLEKAVFNTQKRENAEENNCDYNEFGRTLCDSSSLLFHQISPSRDNHYEFSDCEKFLCVKSTLSKPHGVSMKHYDCGESGNNFRRKLCLSHLQKGDKGEKHFECNECGKAFWEKSHLTRHQRVHTGQKPFQCNECEKAFWDKSNLTKHQRSHTGEKPFECNECGKAFSHKSALTLHQRTHTGEKPYQCNACGKTFCQKSDLTKHQRTHTGLKPYECYECGKSFRVTSHLKVHQRTHTGEKPFECLECGKSFSEKSNLTQHQRIHIGDKSYECNACGKTFYHKSLLTRHQIIHTGWKPYECYECGKTFCLKSDLTVHQRTHTGQKPFACPECGKFFSHKSTLSQHYRTHTGEKPYECHECGKIFYNKSYLTKHNRTHTGEKPYECNECGKAFYQKSQLTQHQRIHIGEKPYKCNECGKAFCHKSALIVHQRTHTQEKPYKCNECGKSFCVKSGLIFHERKHTGEKPYECNECGKFFRHKSSLTVHHRAHTGEKSCQCNECGKIFYRKSELAQHQRSHTGEKPYECNTCRKTFSQKSNLIVHQRRHIGENLMNEMDIRNFQPQVSLHNASEYSHCGESPDDILNVQ

SEQ ID NO: 13302 - protein, 139 aa, Artificial Sequence
  Synthetic polypeptide
FAPNVEQKSQESVSFKDVTVGFTQEEWQHLDPSQRALYRDVMLENYSNLVSVGYCVHKPEVIFRLQQGEEPWKQEEEFPSQSFPEVWTADHLKERSQENQSKHLWEVVFINNEMLTKEQGDVIGIPFNVDAPEMLMPLD

SEQ ID NO: 13303 - protein, 34 aa, Artificial Sequence
  Synthetic polypeptide
YRLYVHVSPEFICWSPHPKCGGVWRYAALGSLDS

SEQ ID NO: 13304 - protein, 757 aa, Artificial Sequence
  Synthetic polypeptide
IDYMFMSPQNSYVGALTPSVVVFGDMQPLAVWTADHLKERSQENQSKHLWEVVFINNEMLTKEQGDVIGIPFNVDVSSFPSRKMFCQCDSCGMSFNTVSELVISKINYLGKKSDEFNACGKLLLNIKHDETHTQEKNEVLKNRNTLSHHEETLQHEKIQTLEHNFEYSICQETLLEKAVFNTQKRENAEENNCDYNEFGRTLCDSSSLLFHQISPSRDNHYEFSDCEKFLCVKSTLSKPHGVSMKHYDCGESGNNFRRKLCLSHLQKGDKGEKHFECNECGKAFWEKSHLTRHQRVHTGQKPFQCNECEKAFWDKSNLTKHQRSHTGEKPFECNECGKAFSHKSALTLHQRTHTGEKPYQCNACGKTFCQKSDLTKHQRTHTGLKPYECYECGKSFRVTSHLKVHQRTHTGEKPFECLECGKSFSEKSNLTQHQRIHIGDKSYECNACGKTFYHKSLLTRHQIIHTGWKPYECYECGKTFCLKSDLTVHQRTHTGQKPFACPECGKFFSHKSTLSQHYRTHTGEKPYECHECGKIFYNKSYLTKHNRTHTGEKPYECNECGKAFYQKSQLTQHQRIHIGEKPYKCNECGKAFCHKSALIVHQRTHTQEKPYKCNECGKSFCVKSGLIFHERKHTGEKPYECNECGKFFRHKSSLTVHHRAHTGEKSCQCNECGKIFYRKSELAQHQRSHTGEKPYECNTCRKTFSQKSNLIVHQRRHIGENLMNEMDIRNFQPQVSLHNASEYSHCGESPDDILNVQ

SEQ ID NO: 13305 - protein, 35 aa, Artificial Sequence
  Synthetic polypeptide
TICSCLPRIHMLEPSPQVWWCLEICSPWQSGQLIT

SEQ ID NO: 13306 - protein, 84 aa, Artificial Sequence
  Synthetic polypeptide
IDYMFMSPQNSYVGALTPSVVVFGDMQPLAVWTADHLKERSQENQSKHLWEVVFINNEMLTKEQGDVIGIPFNVDAPEMLMPLD

SEQ ID NO: 13307 - protein, 45 aa, Artificial Sequence
  Synthetic polypeptide
CGNGRRGQRGRFEDAALLALNMESRETGPCPVTQDGVQWSYHGSL

SEQ ID NO: 13308 - protein, 98 aa, Artificial Sequence
  Synthetic polypeptide
IWSHEKQDLALSLRMEFSGPIMVHYSLKLPGSSNPTMSAFPVAGTTGLTLSPRLEYSGTTSAHCSLHLPGSSNSPASASRVAGITRSDLTMTQATTCC

SEQ ID NO: 13309 - protein, 49 aa, Artificial Sequence
  Synthetic polypeptide
RCCTSGLEYGVTRNRTLPCHSGWSSVVLSWFIIASNSQAQAILPCQPSQ

SEQ ID NO: 13310 - protein, 16 aa, Artificial Sequence
  Synthetic polypeptide
LLGYVYKIFFFISLDS

SEQ ID NO: 13311 - protein, 34 aa, Artificial Sequence
  Synthetic polypeptide
WKSGSTQGDEEQEMLTTWICIQDIFLYKSGQLIT

SEQ ID NO: 13312 - protein, 152 aa, Artificial Sequence
  Synthetic polypeptide
GEAAQDPRQMCCLISDFSDTSRPILRQKKHFNSLHIPKALQKALPFKNKPKTQAKAGKVPKDRRRPAVIREPHERKILALLDALSTVHSQKMKKAKEQRHLHNKEHFRAKQKEEEEKLKRQKDLRKKLFRIQGQKERRNQKSSLKGAEGQLQ

SEQ ID NO: 13313 - protein, 11 aa, Artificial Sequence
  Synthetic polypeptide
SQTFQTQAGQS

SEQ ID NO: 13314 - protein, 29 aa, Artificial Sequence
  Synthetic polypeptide
SSTRPSPDVLPDLRLFRHKQANPEAKETF

SEQ ID NO: 13315 - protein, 420 aa, Artificial Sequence
  Synthetic polypeptide
MHIIFEGSVSFSDVAVGFTQEEWQHLDSAQRTPYRDMMLENYSLLLSVGYCITKPEVVCKLEHGQVLWILEEESPSQSHLDCCIDDDLMEKRQENQDQHLQKVDFVNNKTLTMDRNGVLGKTFSLDTNPILSRKIRGNCDSSGMNLNNISELIISNRSSFVRNPAECNVRGKFLLCMKRENPYARGKPLEYDGNGKAVSQNEDLFRHQYIQTLKQCFEYNHRGYTEERNPMNALNVGKLLDIGHALQYIKEHTRDKTYECNECGKNFCEKSNLHVHQRTHTGEKPYGCNECQKAFGDRSALKVHQRIHTGEKPYELHQRTHTGEKPYACSECGKTFYQKSSLTTHQRTHTREQPYEYNESFYQNPNFTKCQRDNIEETLVNILKAQKPSPSWTRSIAETTQVGGSVSLKDVTVDFTQEEW

SEQ ID NO: 13316 - protein, 67 aa, Artificial Sequence
  Synthetic polypeptide
YSENITFTCMGNQHTRMTQVTFALLQWSGTECTLSLRDQCPSVMWLWASPRRSGSIWTLLRGPRTET

SEQ ID NO: 13317 - protein, 163 aa, Artificial Sequence
  Synthetic polypeptide
MHIIFEGSVSFSDVAVGFTQEEWQHLDSAQRTPYRDMMLENYSLLLSVGYCITKPEVVCKLEHGQVLWILEEESPSQSHLDCCIDDDLMEKRQENQDQHLQKVDFVNNKTLTMDRNGVLGKTFSLDTNPILSRKIRGNCDSSGMNLNNISELIISNRSSFVRN

SEQ ID NO: 13318 - protein, 38 aa, Artificial Sequence
  Synthetic polypeptide
EFRSAWATWRNPVSTNSKNIQGSVSLKDVTVDFTQEEW

SEQ ID NO: 13319 - protein, 49 aa, Artificial Sequence
  Synthetic polypeptide
WLTPVIPALWEAEEGGLPETRSSDQPGRHGETLSLQTVKISRDQCRSRT

SEQ ID NO: 13320 - protein, 21 aa, Artificial Sequence
  Synthetic polypeptide
KYPGISVAQGRDCGLHPGGVV

SEQ ID NO: 13321 - protein, 49 aa, Artificial Sequence
  Synthetic polypeptide
FLHFHLRYRVHLTRECQTVGTGGFIRRDCGRGTGRDPAGQNREAQVLAE

SEQ ID NO: 13322 - protein, 582 aa, Artificial Sequence
  Synthetic polypeptide
GTGFISLGSARQWAQVDSYDVTVDEELGEIQLVRIEKRKYWLNDDWYLKYITLKTPHGDYIEFPCYRWITGDVEVVLRDGRAKLARDDQIHILKQHRRKELETRQKQYRWMEWNPGFPLSIDAKCHKDLPRDIQFDSEKGVDFVLNYSKAMENLFINRFMHMFQSSWNDFADFEKIFVKISNTISERVMNHWQEDLMFGYQFLNGCNPVLIRRCTELPEKLPVTTEMVECSLERQLSLEQEVQQGNIFIVDFELLDGIDANKTDPCTLQFLAAPICLLYKNLANKIVPIAIQLNQIPGDENPIFLPSDAKYDWLLAKIWVRSSDFHVHQTITHLLRTHLVSEVFGIAMYRQLPAVHPIFKLLVAHVRFTIAINTKAREQLICECGLFDKANATGGGGHVQMVQRAMKDLTYASLCFPEAIKARGMESKEDIPYYFYRDDGLLVWEAIRTFTAEVVDIYYEGDQVVEEDPELQDFVNDVYVYGMRGRKSSGFPKSVKSREQLSEYLTVVIFTASAQHAAVNFGQLFLGMYPEEHFIEKPVKEAMARFRKNLEAIVSVIAERNKKKQLPYYYLSPDRIPNSVAI

SEQ ID NO: 13323 - protein, 13 aa, Artificial Sequence
  Synthetic polypeptide
GVPDSGHRWIHTT

SEQ ID NO: 13324 - protein, 639 aa, Artificial Sequence
  Synthetic polypeptide
GTGFISLGSARQWAQVDSYDVTVDEELGEIQLVRIEKRKYWLNDDWYLKYITLKTPHGDYIEFPCYRWITGDVEVVLRDGRAKLARDDQIHILKQHRRKELETRQKQYRWMEWNPGFPLSIDAKCHKDLPRDIQFDSEKGVDFVLNYSKAMENLFINRFMHMFQSSWNDFADFEKIFVKISNTISERVMNHWQEDLMFGYQFLNGCNPVLIRRCTELPEKLPVTTEMVECSLERQLSLEQEVQQGNIFIVDFELLDGIDANKTDPCTLQFLAAPICLLYKNLANKIVPIAIQLNQIPGDENPIFLPSDAKYDWLLAKIWVRSSDFHVHQTITHLLRTHLVSEVFGIAMYRQLPAVHPIFKLLVAHVRFTIAINTKAREQLICECGLFDKANATGGGGHVQMVQRAMKDLTYASLCFPEAIKARGMESKEDIPYYFYRDDGLLVWEAIRTFTAEVVDIYYEGDQVVEEDPELQDFVNDVYVYGMRGRKSSGFPKSVKSREQLSEYLTVVIFTASAQHAAVNFGQYDWCSWIPNAPPTMRAPPPTAKGVVTIEQIVDTLPDRGRSCWHLGAVWALSQFQENELFLGMYPEEHFIEKPVKEAMARFRKNLEAIVSVIAERNKKKQLPYYYLSPDRIPNSVAI

SEQ ID NO: 13325 - protein, 54 aa, Artificial Sequence
  Synthetic polypeptide
SQLLRRQRQENGVNPGGGAFSEPRLHHCTAAWATERDSASKKRKRRFVFFSKCE

SEQ ID NO: 13326 - protein, 34 aa, Artificial Sequence
  Synthetic polypeptide
AEIAPLHCSLGNRARLCLKKKKKKICFLLKVRVT

SEQ ID NO: 13327 - protein, 805 aa, Artificial Sequence
  Synthetic polypeptide
IREAELSVSRDCTTALQPGQQSETLPQKKEKEDLFSSQSASNLKGASLLPGKLPTSVSLFDDEDEEDNLFGGTAAKKQTLSLQAQREEKAKASELSKKKASALLFSSDEEWNIPASQTHLASDSRSKGEPRDSGTLQSQEAKAVKKTSLFEEDKEDDLFAIAKDSQKKTQRVSLLFEDDVDSGGSLFGSPPTSVPPATKKKETVSEAPPLLFSDEEEKEAQLGVKSVDKKVESAKESLKFGRTDVAESEKEGLLTRSAQETVKHSDLFSSSSPWDKGTKPRTKTVLSLFDEEEDKMEDQNIIQAPQKEVGKGCDPDAHPKSTGVFQDEELLFSHKLQKDNDPDVDLFAGTKKTKLLEPSVGSLFGDDEDDDLFSSAKSQPLVQEKKRVVKKDHSVNSFKNQKHPESIQGSKEKGIWKPETPQANLAINPAALLPTAASQISEVKPVLPELAFPSSEHRRSHGLESVPVLPGSGEAGVSFDLPAQADTLHSANKSRVKMRGKRRPQTRAARRLAAQESSEAEDMSVPRGPIAQWADGAISPNGHRPQLRAASGEDSTEEALAAAAAPWEGGPVPGVDTSPFAKSLGHSRGEADLFDSGDIFSTGTGSQSVERTKPKAKIAENPANPPVGGKAKSPMFPALGEASSDDDLFQSAKPKPAKKTNPFPLLEDEDDLFTDQKVKKNETKSSSQQDVILTTQDIFEDDIFATEAIKPSQKTREKEKTLESNLFDDNIDIFADLTVKPKEKSKKKVEAKSIFDDDMDDIFSTGIQAKTTKPKSRSAQAAPEPRFEHKVSNIFDDPLNAFGGQ

SEQ ID NO: 13328 - protein, 756 aa, Artificial Sequence
  Synthetic polypeptide
IREAELSVSRDCTTALQPGQQSETLPQKKEKEDLFSSQSASNLKGASLLPGKLPTSVSLFDDEDEEDNLFGGTAAKKQTLSLQAQREEKAKASELSKKKASALLFSSDEEDQWNIPASQTHLASDSRSKGEPRDSGTLQSQEAKAVKKTSLFEEDKEDDLFAIAKDSQKKTQRVSLLFEDDVDSGGSLFGSPPTSVPPATKEGLLTRSAQETVKHSDLFSSSSPWDKGTKPRTKTVLSLFDEEEDKMEDQNIIQAPQKEVGKGCDPDAHPKSTGVFQDEELLFSHKLQKDNDPDVDLFAGTKKTKLLEPSVGSLFGDDEDDDLFSSAKSQPLVQEKKRVVKKDHSVNSFKNQKHPESIQGSKEKGIWKPETPQANLAINPAALLPTAASQISEVKPVLPELAFPSSEHRRSHGLESVPVLPGSGEAGVSFDLPAQADTLHSANKSRVKMRGKRRPQTRAARRLAAQESSEAEDMSVPRGPIAQWADGAISPNGHRPQLRAASGEDSTEEALAAAAAPWEGGPVPGVDTSPFAKSLGHSRGEADLFDSGDIFSTGTGSQSVERTKPKAKIAENPANPPVGGKAKSPMFPALGEASSDDDLFQSAKPKPAKKTNPFPLLEDEDDLFTDQKVKKNETKSSSQQDVILTTQDIFEDDIFATEAIKPSQKTREKEKTLESNLFDDNIDIFADLTVKPKEKSKKKVEAKSIFDDDMDDIFSTGIQAKTTKPKSRSAQAAPEPRFEHKVSNIFDDPLNAFGGQ

SEQ ID NO: 13329 - protein, 766 aa, Artificial Sequence
  Synthetic polypeptide
IREAELSVSRDCTTALQPGQQSETLPQKKEKEDLFSSQSASNLKGASLLPGKLPTSVSLFDDEDEEDNLFGGTAAKKQTLSLQAQREEKAKASELSKKKASALLFSSDEEDQWNIPASQTHLASDSRSKGEPRDSGTLQSQEAKAVKKTSLFEEDKEDDLFAIAKDSQKKTQRVSLLFEDDVDSGGSLFGSPPTSVPPATKKKETVSEAPPLLFSDEEEKEAQLGVKSVDKKVESAKESLKFGRTDVAESEKEGLLTRSAQETVKHSDLFSSSSPWDKGTKPRTKTVLSLFDEEEDKMEDQNIIQAPQKEVGKGCDPDAHPKSTGVFQDEELLFSHKLQKDNDPDVDLFAGTKKTKLLEPSVGSLFGDDEDDDLFSSAKSQPLANLAINPAALLPTAASQISEVKPVLPELAFPSSEHRRSHGLESVPVLPGSGEAGVSFDLPAQADTLHSANKSRVKMRGKRRPQTRAARRLAAQESSEAEDMSVPRGPIAQWADGAISPNGHRPQLRAASGEDSTEEALAAAAAPWEGGPVPGVDTSPFAKSLGHSRGEADLFDSGDIFSTGTGSQSVERTKPKAKIAENPANPPVGGKAKSPMFPALGEASSDDDLFQSAKPKPAKKTNPFPLLEDEDDLFTDQKVKKNETKSSSQQDVILTTQDIFEDDIFATEAIKPSQKTREKEKTLESNLFDDNIDIFADLTVKPKEKSKKKVEAKSIFDDDMDDIFSTGIQAKTTKPKSRSAQAAPEPRFEHKVSNIFDDPLNAFGGQ

SEQ ID NO: 13330 - protein, 807 aa, Artificial Sequence
  Synthetic polypeptide
IREAELSVSRDCTTALQPGQQSETLPQKKEKEDLFSSQSASNLKGASLLPGKLPTSVSLFDDEDEEDNLFGGTAAKKQTLSLQAQREEKAKASELSKKKASALLFSSDEEDQWNIPASQTHLASDSRSKGEPRDSGTLQSQEAKAVKKTSLFEEDKEDDLFAIAKDSQKKTQRVSLLFEDDVDSGGSLFGSPPTSVPPATKKKETVSEAPPLLFSDEEEKEAQLGVKSVDKKVESAKESLKFGRTDVAESEKEGLLTRSAQETVKHSDLFSSSSPWDKGTKPRTKTVLSLFDEEEDKMEDQNIIQAPQKEVGKGCDPDAHPKSTGVFQDEELLFSHKLQKDNDPDVDLFAGTKKTKLLEPSVGSLFGDDEDDDLFSSAKSQPLVQEKKRVVKKDHSVNSFKNQKHPESIQGSKEKGIWKPETPQANLAINPAALLPTAASQISEVKPVLPELAFPSSEHRRSHGLESVPVLPGSGEAGVSFDLPAQADTLHSANKSRVKMRGKRRPQTRAARRLAAQESSEAEDMSVPRGPIAQWADGAISPNGHRPQLRAASGEDSTEEALAAAAAPWEGGPVPGVDTSPFAKSLGHSRGEADLFDSGDIFSTGTGSQSVERTKPKAKIAENPANPPVGGKAKSPMFPALGEASSDDDLFQSAKPKPAKKTNPFPLLEDEDDLFTDQKVKKNETKSSSQQDVILTTQDIFEDDIFATEAIKPSQKTREKEKTLESNLFDDNIDIFADLTVKPKEKSKKKVEAKSIFDDDMDDIFSTGIQAKTTKPKSRSAQAAPEPRFEHKVSNIFDDPLNAFGGQ

SEQ ID NO: 13331 - protein, 24 aa, Artificial Sequence
  Synthetic polypeptide
WDLGQVSFKCDLGDTSSYHTKRCR

SEQ ID NO: 13332 - protein, 529 aa, Artificial Sequence
  Synthetic polypeptide
GTLGKSVLSVTLEIPHHITQRDADRSLSIPDEQLHSFAVSTVHIMKKRNGGGSLNNYSSSIPSTPSTSQEDPQFSVPPTANTPTPVCKRSMRWSNLFTSEKGSDPDKERKAPENHADTIGSGRAIPIKQGMLLKRSGKWLKTWKKKYVTLCSNGVLTYYSSLGDYMKNIHKKEIDLQTSTIKVPGKWPSLATSACTPISTSKSNGLSKDMDTGLGDSICFSPSISSTTSPKLNPPPSPHANKKKHLKKKSTNNFMIVSATGQTWHFEATTYEERDAWVQAIQSQILASLQSCESSKSKSQLTSQSKAMALQSIQNMRGNAHCVDCETQNPKWASLNLGVLMCIECSGIHRSLGTRLSRVRSLELDDWPVELRKVMSSIGNDLANSIWEGSSQGQTKPSEKSTREEKERWIRSKYEEKLFLAPLPCTELSLGQQLLRATADEDLQTAILLLAHGSREEVNETCGEGDGCTALHLACRKGNVVLAQLLIWYGVDVMARDAHGNTALTYARQASSQECINVLLQYGCPDKCV

SEQ ID NO: 13333 - protein, 21 aa, Artificial Sequence
  Synthetic polypeptide
WDLGQVSFKCDLGDTSSYHTK

SEQ ID NO: 13334 - protein, 20 aa, Artificial Sequence
  Synthetic polypeptide
GTLGKSVLSVTLEIPHHITQ

SEQ ID NO: 13335 - protein, 38 aa, Artificial Sequence
  Synthetic polypeptide
DLMVLYMFDSCSFTCSHSLCGHHGSRTCPSAMIRQPRV

SEQ ID NO: 13336 - protein, 66 aa, Artificial Sequence
  Synthetic polypeptide
QLLLHMFPLSVRPPWKSDLPFCHDSSASSLTSSRGRCVPLNLRSMRQELGTGWQERPWLLLYSLLR

SEQ ID NO: 13337 - protein, 24 aa, Artificial Sequence
  Synthetic polypeptide
WDLGQVSFKCDLGDTSSYHTKRCR

SEQ ID NO: 13338 - protein, 529 aa, Artificial Sequence; identical to SEQ ID NO: 13332
  Synthetic polypeptide

SEQ ID NO: 13339 - protein, 21 aa, Artificial Sequence
  Synthetic polypeptide
WDLGQVSFKCDLGDTSSYHTK

SEQ ID NO: 13340 - protein, 20 aa, Artificial Sequence
  Synthetic polypeptide
GTLGKSVLSVTLEIPHHITQ

SEQ ID NO: 13341 - protein, 38 aa, Artificial Sequence
  Synthetic polypeptide
DLMVLYMFDSCSFTCSHSLCGHHVSRTCPSAMIRQPRV

SEQ ID NO: 13342 - protein, 66 aa, Artificial Sequence
  Synthetic polypeptide
QLLLHMFPLSVRPPCKSDLPFCHDSSASSLTSSRGRCVPLNLRSMRQELGTGWQERPWLLLYSLLR

SEQ ID NO: 13343 - protein, 24 aa, Artificial Sequence
  Synthetic polypeptide
WDLGQVSFKCDLGDTSSYHTKRCR

SEQ ID NO: 13344 - protein, 529 aa, Artificial Sequence; identical to SEQ ID NO: 13332
  Synthetic polypeptide

SEQ ID NO: 13345 - protein, 21 aa, Artificial Sequence
  Synthetic polypeptide
WDLGQVSFKCDLGDTSSYHTK

SEQ ID NO: 13346 - protein, 20 aa, Artificial Sequence
  Synthetic polypeptide
GTLGKSVLSVTLEIPHHITQ

SEQ ID NO: 13347 - protein, 87 aa, Artificial Sequence
  Synthetic polypeptide
DLMVLYMFDSCSFTCSHSLCGHHVSRTCPSAMIVSFLKDFPLCHDSSASSLTSSRGRCVPLNLRSMRQELRTGWQERPWLLLYSLLR

SEQ ID NO: 13348 - protein, 13 aa, Artificial Sequence
  Synthetic polypeptide
RTSPSAMIRQPRV

SEQ ID NO: 13349 - protein, 52 aa, Artificial Sequence
  Synthetic polypeptide
DLMVLYMFDSCSFTCSHSLCGHHVSRTCPSAMIELRTGWQERPWLLLYSLLR

SEQ ID NO: 13350 - protein, 38 aa, Artificial Sequence; identical to SEQ ID NO: 13341
  Synthetic polypeptide

SEQ ID NO: 13351 - protein, 66 aa, Artificial Sequence
  Synthetic polypeptide
QLLLHMFPLSVRPPCKSDLPFCHDSSASSLTSSRGRCVPLNLRSMRQELRTGWQERPWLLLYSLLR

SEQ ID NO: 13352 - protein, 31 aa, Artificial Sequence
  Synthetic polypeptide
GQVRWLTPVIPALRRPRQADHGVRRSRPSWY

SEQ ID NO: 13353 - protein, 31 aa, Artificial Sequence
  Synthetic polypeptide
SQHFGGQGRQITGSGDRDHPGTDAYRCQLWV

SEQ ID NO: 13354 - protein, 688 aa, Artificial Sequence
  Synthetic polypeptide
PGAVAHACNPSTSEAKAGRSRGQEIETILVLMLIDASFGFEMEMFEFLNICQAHGFPKILGVLTHLDSFKHNKQLKKTKKRLKHRFWTEVYQDKVGLTHELVQSLISTYSTIDAKMASSRVTLLSNSKPLGSEAIDNQGVSLEFDQQQGSVCPSESEIYEAGAEDRMAGAPMAAAVQPAEVTVEVGEDLHMHQVRDREMPEVVEIRRSNCTNHCDLGDTSSYHTKVSTVHIMKKRNGGGSLNNYSSSIPPTPSTSQEDPQFSVPPTANTPTPVCKLSMRWSNLFTSEKGSDPDKERKAPENHADTIGSGRAIPIKQGMLLKRSGKWLKTWKKKYVTLCSNGVLTYYSSLGDYMKNIHKKEIDLRTSTIKVPGKWPSLATSACAPISSSKSNGLSKDMDTGLGDSICFSPGISSTTSPKLNPPPSPHANKKKHLKKKSTNNFMIVSATGQTWHFEATTYEERDAWVQAIQSQILASLQSCKSSKSKSQLTSQSEAMALQSIQNMRGNAHCVDCETQNPKWASLNLGVLMCIECSGIHRSFGTRLSRVRSLELDDWPVELRKVMSSIGNELANSIWEGSSQGQTKPSIKSTREEKEWWIRSKYEEKLFLAPLPCTELSLGQQLLRATTDEDLQTAILLLAHGSREEVNETCGEGDGCTALHLACRKGNVVLEQLLTGWTSWPEMPTGTQR

SEQ ID NO: 13355 - protein, 34 aa, Artificial Sequence
  Synthetic polypeptide
AEIAPLHCSLGNRARLRLKKKKKKICFLLKVRVS

SEQ ID NO: 13356 - protein, 54 aa, Artificial Sequence; identical to SEQ ID NO: 13325
  Synthetic polypeptide

SEQ ID NO: 13357 - protein, 828 aa, Artificial Sequence
  Synthetic polypeptide
IREAELSVSRDCTTALQPGQQSETPPQKKEKEDLFSSQSASKLKGASLLPGKLPTSVSLFDDEDEEDNLFGGTAAKKQTLCLQAQREEKAKASELSKKKASALLFSSDEEDQWNIPASQTHLASDSRSKGEPRDSGTLQSQEAKAVKKTSLFEEDEEDDLFAIAKDSQKKTQRVSLLFEDDVDSRGSLFGSPPTSVPPATKKKETVSEAPPLLFSDEEEKEAQLGVKSVDKKVESAKESLKFGRTDVAESEKEGLLTRSAQETVKHSDLFSSSSPWDKGTKPRTKTVLSLFDEEEDKMEDQNIIQAPQKEVGKGRDPDAHPKSTGVFQDEELLFSHKLQKDNDPDVDLFAGTKKTKLLEPSVGSLFGDDEDDDLFSSAKSQPLVQEKKRVVKKDHSVDSFKNQKHPESIQGSKEKGIWKPETPQDSSGLAPFKTKEPSTRIGKIQANLAINPAALLPTAASQISEVKPVLPELAFPSSEHRRSHGLESVPVLPGSGEAGVSFDLPAQADTLHSANKSRVKMRGKRRPQTRAARRLAAQESSETEDMSVPRGPIAQWADGAISPNGHRPQLRAASGEDSTEEALAAAAAPWEGGPVPGVDRSPFAKSLGHSRGEADLFDSGDIFSTGTGSQSVERTKPKAKIAENPANPPVGGKAKSPMFPALGEASSDDDLFQSAKPKPAKKTNTFPLLEDEDDLFTDQKVKKNETKSNSQQDVILTTQDIFEDDIFATEAIKPSQKTREKEKTLESNLFDDNIDIFADLTVKPKEKSKKKVEAKSIFDDDMDDIFSSGIQAKTTKPKSRSAQAAPEPRFEHKVSNIFDDPLNAFGGQ

SEQ ID NO: 13358 - protein, 807 aa, Artificial Sequence
  Synthetic polypeptide
IREAELSVSRDCTTALQPGQQSETPPQKKEKEDLFSSQSASKLKGASLLPGKLPTSVSLFDDEDEEDNLFGGTAAKKQTLCLQAQREEKAKASELSKKKASALLFSSDEEDQWNIPASQTHLASDSRSKGEPRDSGTLQSQEAKAVKKTSLFEEDEEDDLFAIAKDSQKKTQRVSLLFEDDVDSRGSLFGSPPTSVPPATKKKETVSEAPPLLFSDEEEKEAQLGVKSVDKKVESAKESLKFGRTDVAESEKEGLLTRSAQETVKHSDLFSSSSPWDKGTKPRTKTVLSLFDEEEDKMEDQNIIQAPQKEVGKGRDPDAHPKSTGVFQDEELLFSHKLQKDNDPDVDLFAGTKKTKLLEPSVGSLFGDDEDDDLFSSAKSQPLVQEKKRVVKKDHSVDSFKNQKHPESIQGSKEKGIWKPETPQANLAINPAALLPTAASQISEVKPVLPELAFPSSEHRRSHGLESVPVLPGSGEAGVSFDLPAQADTLHSANKSRVKMRGKRRPQTRAARRLAAQESSETEDMSVPRGPIAQWADGAISPNGHRPQLRAASGEDSTEEALAAAAAPWEGGPVPGVDRSPFAKSLGHSRGEADLFDSGDIFSTGTGSQSVERTKPKAKIAENPANPPVGGKAKSPMFPALGEASSDDDLFQSAKPKPAKKTNTFPLLEDEDDLFTDQKVKKNETKSNSQQDVILTTQDIFEDDIFATEAIKPSQKTREKEKTLESNLFDDNIDIFADLTVKPKEKSKKKVEAKSIFDDDMDDIFSSGIQAKTTKPKSRSAQAAPEPRFEHKVSNIFDDPLNAFGGQ

SEQ ID NO: 13359 - protein, 31 aa, Artificial Sequence; identical to SEQ ID NO: 13352
  Synthetic polypeptide

SEQ ID NO: 13360 - protein, 31 aa, Artificial Sequence; identical to SEQ ID NO: 13353
  Synthetic polypeptide

SEQ ID NO: 13361 - protein, 688 aa, Artificial Sequence
  Synthetic polypeptide
PGAVAHACNPSTSEAKAGRSRGQEIETILVLMLIDASFGFEMEMFEFLNICQAHGFPKILGVLTHLDSFKHNKQLKKTKKRLKHRFWTEVYQDKVGLTHELVQSLISTYSTIDAKMASSRVTLLSNSKPLGSEAIDNQGVSLEFDQQQGSVCPSESEIYEAGAEDRMAGAPMAAAVQPAEVTVEVGEDLHMHQVRDREMPEVVEIRRSNCTNHCDLGDTSSYHTKVSTVHIMKKRNGGGSLNNYSSSIPPTPSTSQEDPQFSVPPTANTPTPVCKRSMRWSNLFTSEKGSDPDKERKAPENHADTIGSGRAIPIKQGMLLKRSGKWLKTWKKKYVTLCSNGVLTYYSSLGDYMKNIHKKEIDLRTSTIKVPGKWPSLATSACAPISSSKSNGLSKDMDTGLGDSICFSPGISSTTSPKLNPPPSPHANKKKHLKKKSTNNFMIVSATGQTWHFEATTYEERDAWVQAIQSQILASLQSCKSSKSKSQLTSQSEAMALQSIQNMRGNAHCVDCETQNPKWASLNLGVLMCIECSGIHRSFGTRLSRVRSLELDDWPVELRKVMSSIGNELANSIWEGSSQGQTKPSIKSTREEKEWWIRSKYEEKLFLAPLPCTELSLGQQLLRATTDEDLQTAILLLAHGSREEVNETCGEGDGCTALHLACRKGNVVLEQLLTGWTSWPEMPTGTQR

SEQ ID NO: 13362 - protein, 38 aa, Artificial Sequence; identical to SEQ ID NO: 13341
  Synthetic polypeptide

SEQ ID NO: 13363 - protein, 66 aa, Artificial Sequence; identical to SEQ ID NO: 13351
  Synthetic polypeptide

SEQ ID NO: 13364 - protein, 87 aa, Artificial Sequence; identical to SEQ ID NO: 13347
  Synthetic polypeptide

SEQ ID NO: 13365 - protein, 13 aa, Artificial Sequence
  Synthetic polypeptide
RTSPSAMIRQPRV

SEQ ID NO: 13366 - protein, 25 aa, Artificial Sequence
  Synthetic polypeptide
DRLSSGVQDQPGFSRESDRGSERGH

SEQ ID NO: 13367 - protein, 189 aa, Artificial Sequence
  Synthetic polypeptide
AQEFKTSQASPGKVTEAVKEAIDAGYRHFDCAYFYHNEREVGAGIRCKIKEGAVRREDLFIATKLWCTCHKKSLVETACRKSLKALKLNYLDLYLIHWPMGFKPPHPEWIMSCSELSFCLSHPRVQDLPLDESNMVIPSDTDFLDTWEAMEDLVITGLVKNIGVSNFNHEQLERLLNKPGLRFKPLTNQ

SEQ ID NO: 13368 - protein, 35 aa, Artificial Sequence
  Synthetic polypeptide
PGVGCGLVIPALWEAEAVGSPELRSSRPARLLQGK

SEQ ID NO: 13369 - protein, 302 aa, Artificial Sequence
  Synthetic polypeptide
AQEFKTSQASPGKVTEAVKEAIDAGYRHFDCAYFYHNEREVGAGIRCKIKEGAVRREDLFIATKLWCTCHKKSLVETACRKSLKALKLNYLDLYLIHWPMGFKPPHPEWIMSCSELSFCLSHPRVQDLPLDESNMVIPSDTDFLDTWEAMEDLVITGLVKNIGVSNFNHEQLERLLNKPGLRFKPLTNQIECHPYLTQKNLISFCQSRDVSVTAYRPLGGSCEGVDLIDNPVIKRIAKEHGKSPAQILIRFQIQRNVIVIPGSITPSHIKENIQVFDFELTQHDMDNILSLNRNLRLAMFPM

SEQ ID NO: 13370 - protein, 315 aa, Artificial Sequence
  Synthetic polypeptide
AQEFKTSQASPGKVTEAVKEAIDAGYRHFDCAYFYHNEREVGAGIRCKIKEGAVRREDLFIATKLWCTCHKKSLVETACRKSLKALKLNYLDLYLIHWPMGFKPPHPEWIMSCSELSFCLSHPRVQDLPLDESNMVIPSDTDFLDTWEAMEDLVITGLVKNIGVSNFNHEQLERLLNKPGLRFKPLTNQIECHPYLTQKNLISFCQSRDVSVTAYRPLGGSCEGVDLIDNPVIKRIAKEHGKSPAQILIRFQIQRNVIVIPGSITPSHIKENIQVFDFELTQHDMDNILSLNRNLRLAMFPITKNHKDYPFHIEY

SEQ ID NO: 13371 - protein, 245 aa, Artificial Sequence
  Synthetic polypeptide
AQEFKTSQASPGKVTEAVKEAIDAGYRHFDCAYFYHNEREVGAGIRCKIKEGAVRREDLFIATKLWCTCHKKSLVETACRKSLKALKLNYLDLYLIHWPMGFKPPHPEWIMSCSELSFCLSHPRVQDLPLDESNMVIPSDTDFLDTWEAMEDLVITGLVKNIGVSNFNHEQLERLLNKPGLRFKPLTNQILIRFQIQRNVIVIPGSITPSHIKENIQVFDFELTQHDMDNILSLNRNLRLAMFPM

SEQ ID NO: 13372 - protein, 258 aa, Artificial Sequence
  Synthetic polypeptide
AQEFKTSQASPGKVTEAVKEAIDAGYRHFDCAYFYHNEREVGAGIRCKIKEGAVRREDLFIATKLWCTCHKKSLVETACRKSLKALKLNYLDLYLIHWPMGFKPPHPEWIMSCSELSFCLSHPRVQDLPLDESNMVIPSDTDFLDTWEAMEDLVITGLVKNIGVSNFNHEQLERLLNKPGLRFKPLTNQILIRFQIQRNVIVIPGSITPSHIKENIQVFDFELTQHDMDNILSLNRNLRLAMFPITKNHKDYPFHIEY

SEQ ID NO: 13373 - protein, 217 aa, Artificial Sequence
  Synthetic polypeptide
AQEFKTSQASPGKVTEAVKEAIDAGYRHFDCAYFYHNEREVGAGIRCKIKEGAVRREDLFIATKLWCTCHKKSLVETACRKSLKALKLNYLDLYLIHWPMGFKPPHPEWIMSCSELSFCLSHPRVQDLPLDESNMVIPSDTDFLDTWEILIRFQIQRNVIVIPGSITPSHIKENIQVFDFELTQHDMDNILSLNRNLRLAMFPITKNHKDYPFHIEY

SEQ ID NO: 13374 - protein, 48 aa, Artificial Sequence
  Synthetic polypeptide
DRLSSGVQDQPGQHGETLFLQKMNKSAGLGGARLWSQLLRRLRLLQGK

SEQ ID NO: 13375 - protein, 242 aa, Artificial Sequence
  Synthetic polypeptide
PGVGCGLVIPALWEAEAVGSPELRSSRPARSTWRNPVSTKNEQISWAWGCAPVVPATQEAEASPGKVTEAVKEAIDAGYRHFDCAYFYHNEREVGAGIRCKIKEGAVRREDLFIATKLWCTCHKKSLVETACRKSLKALKLNYLDLYLIHWPMGFKPPHPEWIMSCSELSFCLSHPRVQDLPLDESNMVIPSDTDFLDTWEAMEDLVITGLVKNIGVSNFNHEQLERLLNKPGLRFKPLTNQ

SEQ ID NO: 13376 - protein, 355 aa, Artificial Sequence
  Synthetic polypeptide
PGVGCGLVIPALWEAEAVGSPELRSSRPARSTWRNPVSTKNEQISWAWGCAPVVPATQEAEASPGKVTEAVKEAIDAGYRHFDCAYFYHNEREVGAGIRCKIKEGAVRREDLFIATKLWCTCHKKSLVETACRKSLKALKLNYLDLYLIHWPMGFKPPHPEWIMSCSELSFCLSHPRVQDLPLDESNMVIPSDTDFLDTWEAMEDLVITGLVKNIGVSNFNHEQLERLLNKPGLRFKPLTNQIECHPYLTQKNLISFCQSRDVSVTAYRPLGGSCEGVDLIDNPVIKRIAKEHGKSPAQILIRFQIQRNVIVIPGSITPSHIKENIQVFDFELTQHDMDNILSLNRNLRLAMFPM

SEQ ID NO: 13377 - protein, 368 aa, Artificial Sequence
  Synthetic polypeptide
PGVGCGLVIPALWEAEAVGSPELRSSRPARSTWRNPVSTKNEQISWAWGCAPVVPATQEAEASPGKVTEAVKEAIDAGYRHFDCAYFYHNEREVGAGIRCKIKEGAVRREDLFIATKLWCTCHKKSLVETACRKSLKALKLNYLDLYLIHWPMGFKPPHPEWIMSCSELSFCLSHPRVQDLPLDESNMVIPSDTDFLDTWEAMEDLVITGLVKNIGVSNFNHEQLERLLNKPGLRFKPLTNQIECHPYLTQKNLISFCQSRDVSVTAYRPLGGSCEGVDLIDNPVIKRIAKEHGKSPAQILIRFQIQRNVIVIPGSITPSHIKENIQVFDFELTQHDMDNILSLNRNLRLAMFPITKNHKDYPFHIEY

SEQ ID NO: 13378 - protein, 298 aa, Artificial Sequence
  Synthetic polypeptide
PGVGCGLVIPALWEAEAVGSPELRSSRPARSTWRNPVSTKNEQISWAWGCAPVVPATQEAEASPGKVTEAVKEAIDAGYRHFDCAYFYHNEREVGAGIRCKIKEGAVRREDLFIATKLWCTCHKKSLVETACRKSLKALKLNYLDLYLIHWPMGFKPPHPEWIMSCSELSFCLSHPRVQDLPLDESNMVIPSDTDFLDTWEAMEDLVITGLVKNIGVSNFNHEQLERLLNKPGLRFKPLTNQILIRFQIQRNVIVIPGSITPSHIKENIQVFDFELTQHDMDNILSLNRNLRLAMFPM

SEQ ID NO: 13379 - protein, 311 aa, Artificial Sequence
  Synthetic polypeptide
PGVGCGLVIPALWEAEAVGSPELRSSRPARSTWRNPVSTKNEQISWAWGCAPVVPATQEAEASPGKVTEAVKEAIDAGYRHFDCAYFYHNEREVGAGIRCKIKEGAVRREDLFIATKLWCTCHKKSLVETACRKSLKALKLNYLDLYLIHWPMGFKPPHPEWIMSCSELSFCLSHPRVQDLPLDESNMVIPSDTDFLDTWEAMEDLVITGLVKNIGVSNFNHEQLERLLNKPGLRFKPLTNQILIRFQIQRNVIVIPGSITPSHIKENIQVFDFELTQHDMDNILSLNRNLRLAMFPITKNHKDYPFHIEY

SEQ ID NO: 13380 - protein, 270 aa, Artificial Sequence
  Synthetic polypeptide
PGVGCGLVIPALWEAEAVGSPELRSSRPARSTWRNPVSTKNEQISWAWGCAPVVPATQEAEASPGKVTEAVKEAIDAGYRHFDCAYFYHNEREVGAGIRCKIKEGAVRREDLFIATKLWCTCHKKSLVETACRKSLKALKLNYLDLYLIHWPMGFKPPHPEWIMSCSELSFCLSHPRVQDLPLDESNMVIPSDTDFLDTWEILIRFQIQRNVIVIPGSITPSHIKENIQVFDFELTQHDMDNILSLNRNLRLAMFPITKNHKDYPFHIEY

SEQ ID NO: 13381 - protein, 52 aa, Artificial Sequence
  Synthetic polypeptide
GSCGPGGYRGLWGPSLCVQCLQCLTQSRCCSIFAVTLRAWRDSSQEVSCSLC

SEQ ID NO: 13382 - protein, 34 aa, Artificial Sequence
  Synthetic polypeptide
DRVAREDTEDCGARRCVSSVCSVSHRADVAQYLQ

SEQ ID NO: 13383 - protein, 484 aa, Artificial Sequence
  Synthetic polypeptide
IVWPGRIQRTVGPVAVCPVSAVSHTEQMLLNICSDSQGLEGLLSGSELQSLLIATTCLREHSCCFWKEPTFCVLRAISKAQNLSIIQYLQATDCVRLSLQNLSRLTDTLPAPEVSEAVSLILGFVKDSYPVSSALFLEFENSEGYPLLLKVLLRYDGLTQSEVDPHLEELLGLVVWLTTCGRSELKVFDSITYPQLEGFKFHHEASGVTVKNLQAFQVLQNVFHKASDSVLCIQVLSVIRTMWAWNARNFFLLEWTLQPISQFVEIMPLKPAPVQEHFFQLLEALVFELHYVPHEILRKVQHLIKESPGPSCTLMALQSILSIAGGDPLFTDIFRDSGLLGLLLAQLRKQAKIMRKSGNKVSTPGVQDPERELTCVMLRIVVTLLKGSVRNAVVLKDHGMVPFIKIFLDDECYREASLSILEQLSAINAEEYMSIIVGALCSSTQGELQLKLDLLKVISSPPLRLASLWICTKRSTFAQAFVFM

SEQ ID NO: 13384 - protein, 3014 aa, Artificial Sequence
  Synthetic polypeptide
IVWPGRIQRTVGPVAVCPVSAVSHTEQMLLNICSDSQGLEGLLSGSELQSLLIATTCLREHSCCFWKEPTFCVLRAISKAQNLSIIQYLQATDCVRLSLQNLSRLTDTLPAPEVSEAVSLILGFVKDSYPVSSALFLEFENSEGYPLLLKVLLRYDGLTQSEVDPHLEELLGLVVWLTTCGRSELKVFDSITYPQLEGFKFHHEASGVTVKNLQAFQVLQNVFHKASDSVLCIQVLSVIRTMWAWNARNFFLLEWTLQPISQFVEIMPLKPAPVQEHFFQLLEALVFELHYVPHEILRKVQHLIKESPGPSCTLMALQSILSIAGGDPLFTDIFRDSGLLGLLLAQLRKQAKIMRKSGNKVSTPGVQDPERELTCVMLRIVVTLLKGSVRNAVVLKDHGMVPFIKIFLDDECYREASLSILEQLSAINAEEYMSIIVGALCSSTQGELQLKLDLLKSLLRILVTPKGRAAFRVSSGFNGLLSLLSDLEGSLQEPPLQAWGAVSPRQTLELVLYTLCAVSAALHWDPVNGYFFRRNGLFEKLAEDLCLLGCFGALEEEGNLLRSWVDTKARPFADLLGTAFSSSGSLPPRIQSCLQILGFLDSMASGTLHLRGDLKESLRTKQGPVVDVQKGETGSDPQRNFKQWPDLEERMDEGDAAIMHPGVVCIMVRLLPRLYHEDHPQLSEEIQCSLASHIQSLVKSEKNRQVMCEAGLLGTLMASCHRALVTSGSPLHSRLIRIFEKLASQAIEPDVLRQFLGLGIPSSLSATTKILDSSHTHRGNPGCSGSQTAQGLAEGPWPAAPDAGLHPGVTQAPQPLGESQDSTTALQTALSLISMTSPRNLQPQRAALAPSFVEFDMSVEGYGCLFIPTLSTVMGTSTEYSVSGGIGTGATRPFPPPGGLTFSCWFLISRHGAATEGHPLRFLTLVRHLARTEQPFVCFSVSLCPDDLSLVVSTEEKEFQPLDVMEPEDDSEPSAGCQLQVRCGQLLACGQWHHLAVVVTKEMKRHCTVSTCLDGQVIGSAKMLYIQALPGPFLSMDPSAFVDVYGYIATPRVWKQKSSLIWRLGPTYLFEEAISMETLEVINKLGPRYCGNFQAVHVQGEDLDSEATPFVAEERVSFGLHIASSSITSVADIRNAYNEVDSRLIAKEMNISSRDNAMPVFLLRNCAGHLSGSLRTIGAVAVGQLGVRVFHSSPAASSLDFIGGPAILLGLISLATDDHTMYAAVKVLHSVLTSNAMCDFLMQHICGYQIMAFLLRKKASLLNHRIFQLILSVAGTVELGFRSSAITNTGVFQHILCNFELWMNTADNLELSLFSHLLEILQSPREGPRNAEAAHQAQLIPKLIFLFNEPSLIPSKISTIIGILACQLRGHFSTQDLLRIGLFVVYTLKPSSVNERQICMDGALDPSLPAGSQTSGKTIWLRNQLLEMLLSVISSPQLHLSSESKEEMFLKLGPDWFLLLLQGHLHASTTVLALKLLLYFLASPSLRTRFRDGLCAGSWVERSTEGVDIVMDNLKSQSPLPEQSPCLLPGFRVLNDFLAHHVHIPEVYLIVSTFFLQTPLTELMDGPKDSLDAMLQWLLQRHHQEEVLQAGLCTEGALLLLEMLKATMSQPLAGSEDGAWAQTFPASVLQFLSLVHRTYPQDPAWRAPEFLQTLAIAAFPLGAQKGVGAESTRNTSSPEAAAEGDSTVEGLQAPTKAHPARRKLREFTQLLLRELLLGASSPKQWLPLEVLLEASPDHATSQQKRDFQSEVLLSAMELFHMTSGGDAAMFRDGKEPQPSAEAAAAPSLANISCFTQKLVEKLYSGMFSADPRHILLFILEHIMVVIETASSQRDTVLSTLYSSLNKVILYCLSKPQQSLSECLGLLSILGFLQEHWDVVFATYNSNISFLLCLMHCLLLLNERSYPEGFGLEPKPRMSTYHQVFLSPNEDVKEKREDLPSLSDVQHNIQKTVQTLWQQLVAQRQQTLEDAFKIDLSVKPGEREVKIEEVTPLWEETMLKAWQHYLASEKKSLASRSNVAHHSKVTLWSGSLSSAMKLMPGRQAKDPECKTEDFVSCIENYRRRGQELYASLYKDHVQRRKCGNIKAANAWARIQEQLFGELGLWSQGEETKPCSPWELDWREGPARMRKRIKRLSPLEALSSGRHKESQDKNDHISQTNAENQDELTLREAEGEPDEVGVDCTQLTFFPALHESLHSEDFLELCRERQVILQELLDKEKVTQKFSLVIVQGHLVSEGVLLFGHQHFYICENFTLSPTGDVYCTRHCLSNISDPFIFNLCSKDRSTDHYSCQCHSYADMRELRQARFLLQDIALEIFFHNGYSKFLVFYNNDRSKAFKSFCSFQPSLKGKATSEDTLSLRRYPGSDRIMLQKWQKRDISNFEYLMYLNTAAGRTCNDYMQYPVFPWVLADYTSETLNLANPKIFRDLSKPMGAQTKERKLKFIQRFKEVEKTEGDMTVQCHYYTHYSSAIIVASYLVRMPPFTQAFCALQGGSFDVADRMFHSVKSTWESASRENMSDVRELTPEFFYLPEFLTNCNGVEFGCMQDGTVLGDVQLPPWADGDPRKFISLHRKALESDFVSANLHHWIDLIFGYKQQGPAAVDAVNIFHPYFYGDRMDLSSITDPLIKSTILGFVSNFGQVPKQLFTKPHPARTAAGKPLPGKDVSTPVSLPGHPQPFFYSLQSLRPSQVTVKDMYLFSLGSESPKGAIGHIVSTEKTILAVERNKVLLPPLWNRTFSWGFDDFSCCLGSYGSDKVLMTFENLAAWGRCLCAVCPSPTTIVTSGTSTVVCVWELSMTKGRPRGLRLRQALYGHTQAVTCLAASVTFSLLVSGSQDCTCILWDLDHLTHVTRLPAHREGISAITISDVSGTIVSCAGAHLSLWNVNGQPLASITTAWGPEGAITCCCLMEGPAWDTSQIIITGSQDGMVRVWKTEDVKMSVPGRPAGEEPPAQPPSPRGHKWEKNLALSRELDVSIALTGKPSKTSPAVTALAVSRNHTKLLVGDERGRIFCWSADG

SEQ ID NO: 13385 - protein, 872 aa, Artificial Sequence
  Synthetic polypeptide
IVWPGRIQRTVGPVAVCPVSAVSHTEQMLLNICSDSQGLEGLLSGSELQSLLIATTCLREHSCCFWKEPTFCVLRAISKAQNLSIIQYLQATDCVRLSLQNLSRLTDTLPAPEVSEAVSLILGFVKDSYPVSSALFLEFENSEGYPLLLKVLLRYDGLTQSEVDPHLEELLGLVVWLTTCGRSELKVFDSITYPQLEGFKFHHEASGVTVKNLQAFQVLQNVFHKASDSVLCIQVLSVIRTMWAWNARNFFLLEWTLQPISQFVEIMPLKPAPVQEHFFQLLEALVFELHYVPHEILRKVQHLIKESPGPSCTLMALQSILSIAGGDPLFTDIFRDSGLLGLLLAQLRKQAKIMRKSGNKVSTPGVQDPERELTCVMLRIVVTLLKGSVRNAVVLKDHGMVPFIKIFLDDECYREASLSILEQLSAINAEEYMSIIVGALCSSTQGELQLKLDLLKSLLRILVTPKGRAAFRVSSGFNGLLSLLSDLEGSLQEPPLQAWGAVSPRQTLELVLYTLCAVSAALHWDPVNGYFFRRNGLFEKLAEDLCLLGCFGALEEEGNLLRSWVDTKARPFADLLGTAFSSSGSLPPRIQSCLQILGFLDSMASGTLHLRGDLKESLRTKQGPVVDVQKGETGSDPQRNFKQWPDLEERMDEGDAAIMHPGVVCIMVRLLPRLYHEDHPQLSEEIQCSLASHIQSLVKSEKNRQVMCEAGLLGTLMASCHRALVTSGSPLHSRLIRIFEKLASQAIEPDVLRQFLGLGIPSSLSATTKILDSSHTHRGNPGCSGSQTAQGLAEGPWPAAPDAGLHPGVTQAPQPLGESQDSTTALQTALSLISMTSPHIWKPNIWKDNLAQKPVAGDAAQCNIFPPASSVL

SEQ ID NO: 13386 - protein, 55 aa, Artificial Sequence
  Synthetic polypeptide
CLIDVCTFLELGAGADTQCYTSRLYQGLSFLWIHPHLWMFMDILLLLESGNKSLH

SEQ ID NO: 13387 - protein, 65 aa, Artificial Sequence
  Synthetic polypeptide
VLLMFVPSLNLAQGLTHNVIHPGSTRAFPFYGSIRICGCLWIYCYSSSLETKVFINLASWPHIPL

SEQ ID NO: 13388 - protein, 1994 aa, Artificial Sequence
  Synthetic polypeptide
HTMLYIQALPGPFLSMDPSAFVDVYGYIATPRVWKQKSSLIWRLGPTYLFEEAISMETLEVINKLGPRYCGNFQAVHVQGEDLDSEATPFVAEERVSFGLHIASSSITSVADIRNAYNEVDSRLIAKEMNISSRDNAMPVFLLRNCAGHLSGSLRTIGAVAVGQLGVRVFHSSPAASSLDFIGGPAILLGLISLATDDHTMYAAVKVLHSVLTSNAMCDFLMQHICGYQIMAFLLRKKASLLNHRIFQLILSVAGTVELGFRSSAITNTGVFQHILCNFELWMNTADNLELSLFSHLLEILQSPREGPRNAEAAHQAQLIPKLIFLFNEPSLIPSKISTIIGILACQLRGHFSTQDLLRIGLFVVYTLKPSSVNERQICMDGALDPSLPAGSQTSGKTIWLRNQLLEMLLSVISSPQLHLSSESKEEMFLKLGPDWFLLLLQGHLHASTTVLALKLLLYFLASPSLRTRFRDGLCAGSWVERSTEGVDIVMDNLKSQSPLPEQSPCLLPGFRVLNDFLAHHVHIPEVYLIVSTFFLQTPLTELMDGPKDSLDAMLQWLLQRHHQEEVLQAGLCTEGALLLLEMLKATMSQPLAGSEDGAWAQTFPASVLQFLSLVHRTYPQDPAWRAPEFLQTLAIAAFPLGAQKGVGAESTRNTSSPEAAAEGDSTVEGLQAPTKAHPARRKLREFTQLLLRELLLGASSPKQWLPLEVLLEASPDHATSQQKRDFQSEVLLSAMELFHMTSGGDAAMFRDGKEPQPSAEAAAAPSLANISCFTQKLVEKLYSGMFSADPRHILLFILEHIMVVIETASSQRDTVLSTLYSSLNKVILYCLSKPQQSLSECLGLLSILGFLQEHWDVVFATYNSNISFLLCLMHCLLLLNERSYPEGFGLEPKPRMSTYHQVFLSPNEDVKEKREDLPSLSDVQHNIQKTVQTLWQQLVAQRQQTLEDAFKIDLSVKPGEREVKIEEVTPLWEETMLKAWQHYLASEKKSLASRSNVAHHSKVTLWSGSLSSAMKLMPGRQAKDPECKTEDFVSCIENYRRRGQELYASLYKDHVQRRKCGNIKAANAWARIQEQLFGELGLWSQGEETKPCSPWELDWREGPARMRKRIKRLSPLEALSSGRHKESQDKNDHISQTNAENQDELTLREAEGEPDEVGVDCTQLTFFPALHESLHSEDFLELCRERQVILQELLDKEKVTQKFSLVIVQGHLVSEGVLLFGHQHFYICENFTLSPTGDVYCTRHCLSNISDPFIFNLCSKDRSTDHYSCQCHSYADMRELRQARFLLQDIALEIFFHNGYSKFLVFYNNDRSKAFKSFCSFQPSLKGKATSEDTLSLRRYPGSDRIMLQKWQKRDISNFEYLMYLNTAAGRTCNDYMQYPVFPWVLADYTSETLNLANPKIFRDLSKPMGAQTKERKLKFIQRFKEVEKTEGDMTVQCHYYTHYSSAIIVASYLVRMPPFTQAFCALQGGSFDVADRMFHSVKSTWESASRENMSDVRELTPEFFYLPEFLTNCNGVEFGCMQDGTVLGDVQLPPWADGDPRKFISLHRKALESDFVSANLHHWIDLIFGYKQQGPAAVDAVNIFHPYFYGDRMDLSSITDPLIKSTILGFVSNFGQVPKQLFTKPHPARTAAGKPLPGKDVSTPVSLPGHPQPFFYSLQSLRPSQVTVKDMYLFSLGSESPKGAIGHIVSTEKTILAVERNKVLLPPLWNRTFSWGFDDFSCCLGSYGSDKVLMTFENLAAWGRCLCAVCPSPTTIVTSGTSTVVCVWELSMTKGRPRGLRLRQALYGHTQAVTCLAASVTFSLLVSGSQDCTCILWDLDHLTHVTRLPAHREGISAITISDVSGTIVSCAGAHLSLWNVNGQPLASITTAWGPEGAITCCCLMEGPAWDTSQIIITGSQDGMVRVWKTEDVKMSVPGRPAGEEPPAQPPSPRGHKWEKNLALSRELDVSIALTGKPSKTSPAVTALAVSRNHTKLLVGDERGRIFCWSADG

SEQ ID NO: 13389 - protein, 121 aa, Artificial Sequence
  Synthetic polypeptide
GSVLSVVSGILGISWNVSPEGFCVMYRELQKKRTRAICIFIQRPCAKAKMWQHQGSQRLGQDPGAAFWGAGLVEPGGRNQALFPMGTRLERRTSSNEETHQTLVSFGGPELRKAQGKPRQK

SEQ ID NO: 13390 - protein, 989 aa, Artificial Sequence
  Synthetic polypeptide
KNSIYRVQYYLWFQAFLEYLGTCPLKDFVSCIENYRRRGQELYASLYKDHVQRRKCGNIKAANAWARIQEQLFGELGLWSQGEETKPCSPWELDWREGPARMRKRIKRLSPLEALSSGRHKESQDKNDHISQTNAENQDELTLREAEGEPDEVGVDCTQLTFFPALHESLHSEDFLELCRERQVILQELLDKEKVTQKFSLVIVQGHLVSEGVLLFGHQHFYICENFTLSPTGDVYCTRHCLSNISDPFIFNLCSKDRSTDHYSCQCHSYADMRELRQARFLLQDIALEIFFHNGYSKFLVFYNNDRSKAFKSFCSFQPSLKGKATSEDTLSLRRYPGSDRIMLQKWQKRDISNFEYLMYLNTAAGRTCNDYMQYPVFPWVLADYTSETLNLANPKIFRDLSKPMGAQTKERKLKFIQRFKEVEKTEGDMTVQCHYYTHYSSAIIVASYLVRMPPFTQAFCALQGGSFDVADRMFHSVKSTWESASRENMSDVRELTPEFFYLPEFLTNCNGVEFGCMQDGTVLGDVQLPPWADGDPRKFISLHRKALESDFVSANLHHWIDLIFGYKQQGPAAVDAVNIFHPYFYGDRMDLSSITDPLIKSTILGFVSNFGQVPKQLFTKPHPARTAAGKPLPGKDVSTPVSLPGHPQPFFYSLQSLRPSQVTVKDMYLFSLGSESPKGAIGHIVSTEKTILAVERNKVLLPPLWNRTFSWGFDDFSCCLGSYGSDKVLMTFENLAAWGRCLCAVCPSPTTIVTSGTSTVVCVWELSMTKGRPRGLRLRQALYGHTQAVTCLAASVTFSLLVSGSQDCTCILWDLDHLTHVTRLPAHREGISAITISDVSGTIVSCAGAHLSLWNVNGQPLASITTAWGPEGAITCCCLMEGPAWDTSQIIITGSQDGMVRVWKTEDVKMSVPGRPAGEEPPAQPPSPRGHKWEKNLALSRELDVSIALTGKPSKTSPAVTALAVSRNHTKLLVGDERGRIFCWSADG

SEQ ID NO: 13391 - protein, 8 aa, Artificial Sequence
  Synthetic polypeptide
PLTGLVTR

SEQ ID NO: 13392 - protein, 40 aa, Artificial Sequence
  Synthetic polypeptide
PGDAEVLPGDCAGPPGVRRGPAFWPPTLLHLRELHTVSHG

SEQ ID NO: 13393 - protein, 802 aa, Artificial Sequence
  Synthetic polypeptide
TYRPSDQVTQKFSLVIVQGHLVSEGVLLFGHQHFYICENFTLSPTGDVYCTRHCLSNISDPFIFNLCSKDRSTDHYSCQCHSYADMRELRQARFLLQDIALEIFFHNGYSKFLVFYNNDRSKAFKSFCSFQPSLKGKATSEDTLSLRRYPGSDRIMLQKWQKRDISNFEYLMYLNTAAGRTCNDYMQYPVFPWVLADYTSETLNLANPKIFRDLSKPMGAQTKERKLKFIQRFKEVEKTEGDMTVQCHYYTHYSSAIIVASYLVRMPPFTQAFCALQGGSFDVADRMFHSVKSTWESASRENMSDVRELTPEFFYLPEFLTNCNGVEFGCMQDGTVLGDVQLPPWADGDPRKFISLHRKALESDFVSANLHHWIDLIFGYKQQGPAAVDAVNIFHPYFYGDRMDLSSITDPLIKSTILGFVSNFGQVPKQLFTKPHPARTAAGKPLPGKDVSTPVSLPGHPQPFFYSLQSLRPSQVTVKDMYLFSLGSESPKGAIGHIVSTEKTILAVERNKVLLPPLWNRTFSWGFDDFSCCLGSYGSDKVLMTFENLAAWGRCLCAVCPSPTTIVTSGTSTVVCVWELSMTKGRPRGLRLRQALYGHTQAVTCLAASVTFSLLVSGSQDCTCILWDLDHLTHVTRLPAHREGISAITISDVSGTIVSCAGAHLSLWNVNGQPLASITTAWGPEGAITCCCLMEGPAWDTSQIIITGSQDGMVRVWKTEDVKMSVPGRPAGEEPPAQPPSPRGHKWEKNLALSRELDVSIALTGKPSKTSPAVTALAVSRNHTKLLVGDERGRIFCWSADG

SEQ ID NO: 13394 - protein, 308 aa, Artificial Sequence
  Synthetic polypeptide
GLHSHTFCTACGTVPKSKALEAVKLAIEAGFHHIDSAHVYNNEEQVGLAIRSKIADGSVKREDIFYTSKLWSNSHRPELVRPALERSLKNLQLDYVDLYLIHFPVSVKPGEEVIPKDENGKILFDTVDLCATWEAMEKCKDAGLAKSIGVSNFNHRLLEMILNKPGLKYKPVCNQVECHPYFNQRKLLDFCKSKDIVLVAYSALGSHREEPWVDPNSPVLLEDPVLCALAKKHKRTPALIALRYQLQRGVVVLAKSYNEQRIRQNVQVFEFQLTSEEMKAIDGLNRNVRYLTLDIFAGPPNYPFSDEY

SEQ ID NO: 13395 - protein, 36 aa, Artificial Sequence
  Synthetic polypeptide
IYACFPFAFLRDCKFPEASTAILSVQPVELFLKVKL

SEQ ID NO: 13396 - protein, 68 aa, Artificial Sequence
  Synthetic polypeptide
LLSCCSHHMVLLRSSCLKVCSTSTFFLSLSLSCQQCEYMLASPLPSSVIVSFLRPPQPYFLYSLWNCS

SEQ ID NO: 13397 - protein, 282 aa, Artificial Sequence
  Synthetic polypeptide
GLHSHTFCTACGTVPKSKALEAVKLAIEAGFHHIDSAHVYNNEEQVGLAIRSKIADGSVKREDIFYTSKLWSNSHRPELVRPALERSLKNLQLDYVDLYLIHFPVSVKAMEKCKDAGLAKSIGVSNFNHRLLEMILNKPGLKYKPVCNQVECHPYFNQRKLLDFCKSKDIVLVAYSALGSHREEPWVDPNSPVLLEDPVLCALAKKHKRTPALIALRYQLQRGVVVLAKSYNEQRIRQNVQVFEFQLTSEEMKAIDGLNRNVRYLTLDIFAGPPNYPFSDEY

SEQ ID NO: 13398 - protein, 185 aa, Artificial Sequence
  Synthetic polypeptide
GLHSHTFCTACGTVPKSKALEAVKLAIEAGFHHIDSAHVYNNEEQVGLAIRSKIADGSVKREDIFYTSKLWSNSHRPELVRPALERSLKNLQLDYVDLYLIHFPVSVKPGEEVIPKDENGKILFDTVDLCATWEAMEKCKDAGLAKSIGVSNFNHRLLEMILNKPGLKYKPVCNQVECHPYFNQR

SEQ ID NO: 13399 - protein, 124 aa, Artificial Sequence
  Synthetic polypeptide
GLHSHTFCTACGTVPKSKALEAVKLAIEAGFHHIDSAHVYNNEEQVGLAIRSKIADGSVKREDIFYTSKLWSNSHRPELVRPALERSLKNLQLDYVDLYLIHFPVSVKEDIGILTWKKSPKHNS

SEQ ID NO: 13400 - protein, 64 aa, Artificial Sequence
  Synthetic polypeptide
RHAYFPFTFLHDAGWTGHPKQDCRWQCEERRHILHFKALEQFPSTRVGPTSLGKVTEKSSIGLC

SEQ ID NO: 13401 - protein, 297 aa, Artificial Sequence
  Synthetic polypeptide
KCVAPPPSLSLSLSLSCQPSEDMLTSPSPSFMMQVGLAIRSKIADGSVKREDIFYTSKLWSNSHRPELVRPALERSLKNLQLDYVDLYLIHFPVSVKPGEEVIPKDENGKILFDTVDLCATWEAMEKCKDAGLAKSIGVSNFNHRLLEMILNKPGLKYKPVCNQVECHPYFNQRKLLDFCKSKDIVLVAYSALGSHREEPWVDPNSPVLLEDPVLCALAKKHKRTPALIALRYQLQRGVVVLAKSYNEQRIRQNVQVFEFQLTSEEMKAIDGLNRNVRYLTLDIFAGPPNYPFSDEY

SEQ ID NO: 13402 - protein, 271 aa, Artificial Sequence
  Synthetic polypeptide
KCVAPPPSLSLSLSLSCQPSEDMLTSPSPSFMMQVGLAIRSKIADGSVKREDIFYTSKLWSNSHRPELVRPALERSLKNLQLDYVDLYLIHFPVSVKAMEKCKDAGLAKSIGVSNFNHRLLEMILNKPGLKYKPVCNQVECHPYFNQRKLLDFCKSKDIVLVAYSALGSHREEPWVDPNSPVLLEDPVLCALAKKHKRTPALIALRYQLQRGVVVLAKSYNEQRIRQNVQVFEFQLTSEEMKAIDGLNRNVRYLTLDIFAGPPNYPFSDEY

SEQ ID NO: 13403 - protein, 174 aa, Artificial Sequence
  Synthetic polypeptide
KCVAPPPSLSLSLSLSCQPSEDMLTSPSPSFMMQVGLAIRSKIADGSVKREDIFYTSKLWSNSHRPELVRPALERSLKNLQLDYVDLYLIHFPVSVKPGEEVIPKDENGKILFDTVDLCATWEAMEKCKDAGLAKSIGVSNFNHRLLEMILNKPGLKYKPVCNQVECHPYFNQR

SEQ ID NO: 13404 - protein, 113 aa, Artificial Sequence
  Synthetic polypeptide
KCVAPPPSLSLSLSLSCQPSEDMLTSPSPSFMMQVGLAIRSKIADGSVKREDIFYTSKLWSNSHRPELVRPALERSLKNLQLDYVDLYLIHFPVSVKEDIGILTWKKSPKHNS

SEQ ID NO: 13405 - protein, 1050 aa, Artificial Sequence
  Synthetic polypeptide
GREWWLTPAILALWKARQADHLRRWNKLRLQDKEKRLKLEDDSEESDAEFDEGFKVPGFLFKKLFKYQQTGVRWLWELHCQQAGGILGDEMGLGKTIQIIAFLAGLSYSKIRTRGSNYRFEGLGPTVIVCPTTVMHQWVKEFHTWWPPFRVAILHETGSYTHKKEKLIRDVAHCHGILITSYSYIRLMQDDISRYDWHYVILDEGHKIRNPNAAVTLACKQFRTPHRIILSGSPMQNNLRELWSLFDFIFPGKLGTLPVFMEQFSVPITMGGYSNASPVQVKTAYKCACVLRDTINPYLLRRMKSDVKMSLSLPDKNEQVLFCRLTDEQHKVYQNFVDSKEVYRILNGEMQIFSGLIALRKICNHPDLFSGGPKNLKGLPDDELEEDQFGYWKRSGKMIVVESLLKIWHKQGQRVLLFSQSRQMLDILEVFLRAQKYTYLKMDGTTTIASRQPLITRYNEDTSIFVFLLTTRVGGLGVNLTGANRVVIYDPDWNPSTDTQARERAWRIGQKKQVTVYRLLTAGTIEEKIYHRQIFKQFLTNRVLKDPKQRRFFKSNDLYELFTLTSPDASQSTETSAIFAGTGSDVQTPKCHLKRRIQPAFGADHDVPKRKKFPASNISVNDATSSEEKSEAKGAEVNAVTSNRSDPLKDDPHMSSNVTSNDRLGEETNAVSGPEELSVISGNGECSNSSGTGKTSMPSGDESIDEKLGLSYKRERPSQAQTEAFWENKQMENNFYKHKSKTKHHSVAEEETLEKHLRPKQKPKNSKHCRDAKFEGTRIPHLVKKRRYQKQDSENKSEAKEQSNDDYVLEKLFKKSVGVHSVMKHDAIMDGASPDYVLVEAEANRVAQDALKALRLSRQRCLGAVSGVPTWTGHRGISGAPAGKKSRFGKKRNSNFSVQHPSSTSPTEKCQDGIMKKEGKDNVPEHFSGRAEDADSSSGPLASSSLLAKMRARNHLILPERLESESGHLQEASALLPTTEHDDLLVEMRNFIAFQAHTDGQASTREILQEFESKLSASQSCVFRELLRNLCTFHRTSGGEGIWKLKPEYC

SEQ ID NO: 13406 - protein, 25 aa, Artificial Sequence
  Synthetic polypeptide
SGMVAHACNPSTLEGKAGRSLEEME

SEQ ID NO: 13407 - protein, 18 aa, Artificial Sequence
  Synthetic polypeptide
CLPSHVKLLHQPGLAGHD

SEQ ID NO: 13408 - protein, 379 aa, Artificial Sequence
  Synthetic polypeptide
NYSTNRDSLDMIERCICLVCLDAPGGVELSDTHRALQLLHGGGYSKNGANRWYDKSLQFVVGRDGTCGVVCEHSPFDGIVLVQCTEHLLKHVTQSSRKLIRADSVSELPAPRRLRWKCSPEIQGHLASSAEKLQRIVKNLDFIVYKFDNYGKTFIKKQKCSPDAFIQVALQLAFYRLHRRLVPTYESASIRRFQEGRVDNIRSATPEALAFVRAVTDHKAAVPASEKLLLLKDAIRAQTAYTVMAITGMAIDNHLLALRELARAMCKELPEMFMDETYLMSNRFVLSTSQVPTTTEMFCCYGPVVPNGYGACYNPQPETILFCISSFHSCKETSSSKFAKAVEESLIDMRDLCSLLPPTESKPLATKEKATRPSQGHQP

SEQ ID NO: 13409 - protein, 59 aa, Artificial Sequence
  Synthetic polypeptide
VPRRSDGLKVLGSPPLVLCLSCCHGKKVLASPSRSAMIVNFLMPPQPRETTPPTGTRWT

SEQ ID NO: 13410 - protein, 294 aa, Artificial Sequence
  Synthetic polypeptide
NYSTNRDSLDMIERCICLVCLDAPGGVELSDTHRALQLLHGGGYSKNGANRWYDKSLQFVVGRDGTCGVVCEHSPFDGIVLVQCTEHLLKHVTQSSRKLIRADSVSELPAPRRLRWKCSPEIQGHLASSAEKLQRIVKNLDFIVYKFDNYGKTFIKKQKCSPDAFIQVALQLAFYRLHRRLVPTYESASIRRFQEGRVDNIRSATPEALAFVRAVTDHKAAVPASEKLLLLKDAIRAQTAYTVMAITGMAIDNHLLALRELARAMCKELPEMFMDETYLMSNRFVLSTSQLCWP

SEQ ID NO: 13411 - protein, 24 aa, Artificial Sequence
  Synthetic polypeptide
WDLGQVSFKCDLGDTSSYHTKRCR

SEQ ID NO: 13412 - protein, 529 aa, Artificial Sequence
  Synthetic polypeptide
GTLGKSVLSVTLEIPHHITQRDADRSLSIPDEQLHSFAVSTVHIMKKRNGGGSLNNYSSSIPSTPSTSQEDPQFSVPPTANTPTPVCKRSMRWSNLFTSEKGSDPDKERKAPENHADTIGSGRAIPIKQGMLLKRSGKWLKTWKKKYVTLCSNGVLTYYSSLGDYMKNIHKKEIDLQTSTIKVPGKWPSLATSACTPISSSKSNGLSKDMDTGLGDSICFSPSISSTTSPKLNPPPSPHANKKKHLKKKSTNNFMIVSATGQTWHFEATTYEERDAWVQAIQSQILASLQSCESSKSKSQLTSQSEAMALQSIQNMRGNAHCVDCETQNPKWASLNLGVLMCIECSGIHHSLGTRLSRVRSLELDDWPVELRKVMSSIGNDLANSIWEGSSQGQTKPSEKSTREEKERWIRSKYEEKLFLAPLPCTELSLGQQLLWATADEDLQTAILLLAHGSREEVNETCGEGDGCTALHLACRKGNVVLAQLLIWYGVDVMARDAHGNTALTYARQASSQECINVLLQYGCPDECV

SEQ ID NO: 13413 - protein, 24 aa, Artificial Sequence
  Synthetic polypeptide
GTLGKSVLSVTLEIPHHITQRDAD

SEQ ID NO: 13414 - protein, 80 aa, Artificial Sequence
  Synthetic polypeptide
DLMVLYMFDSCSFTCSHSLCGHHVSRTCPSAMILWSLTFLPIQRQAQYSRGTLKQMLWSLTLLPIQRQAQYSRGTLKQML

SEQ ID NO: 13415 - protein, 636 aa, Artificial Sequence
  Synthetic polypeptide
QLLLHMFPLSVRPPCKSDLPFCHDSLEFNLSANPEASTIFQRNSQTDALEFNPSANPEASTIFQRNSQTDVVEIRRSNCTNHVSTVRFSQQYSLCSTIFLDDSTAIQHYLTMTIISVTLEIPHHITQRDADRSLSIPDEQLHSFAVSTVHIMKKRNGGGSLNNYSSSIPSTPSTSQEDPQFSVPPTANTPTPVCKRSMRWSNLFTSEKGSDPDKERKAPENHADTIGSGRAIPIKQGMLLKRSGKWLKTWKKKYVTLCSNGVLTYYSSLGDYMKNIHKKEIDLQTSTIKVPGKWPSLATSACTPISSSKSNGLSKDMDTGLGDSICFSPSISSTTSPKLNPPPSPHANKKKHLKKKSTNNFMIVSATGQTWHFEATTYEERDAWVQAIQSQILASLQSCESSKSKSQLTSQSEAMALQSIQNMRGNAHCVDCETQNPKWASLNLGVLMCIECSGIHHSLGTRLSRVRSLELDDWPVELRKVMSSIGNDLANSIWEGSSQGQTKPSEKSTREEKERWIRSKYEEKLFLAPLPCTELSLGQQLLWATADEDLQTAILLLAHGSREEVNETCGEGDGCTALHLACRKGNVVLAQLLIWYGVDVMARDAHGNTALTYARQASSQECINVLLQYGCPDECV

SEQ ID NO: 13416 - protein, 97 aa, Artificial Sequence
  Synthetic polypeptide
QLLLHMFPLSVRPPCKSDLPFCHDSLEFNLSANPEASTIFQRNSQTDALEFNPSANPEASTIFQRNSQTDVVEIRRSNCTNHCDLGDTSSYHTKRCR

SEQ ID NO: 13417 - protein, 38 aa, Artificial Sequence; identical to SEQ ID NO: 13341
  Synthetic polypeptide

SEQ ID NO: 13418 - protein, 66 aa, Artificial Sequence; identical to SEQ ID NO: 13342
  Synthetic polypeptide

SEQ ID NO: 13419 - protein, 45 aa, Artificial Sequence
  Synthetic polypeptide
VDVTSIQSKSQELRHQRTSLVDSISQIRCWRKSEFREVKLWRSQN

SEQ ID NO: 13420 - protein, 16 aa, Artificial Sequence
  Synthetic polypeptide
TAFPKYDVGGSLSSEK

SEQ ID NO: 13421 - protein, 24 aa, Artificial Sequence
  Synthetic polypeptide
WDLGQVSFKCDLGDTSSYHTKRCR

SEQ ID NO: 13422 - protein, 529 aa, Artificial Sequence; identical to SEQ ID NO: 13412
  Synthetic polypeptide

SEQ ID NO: 13423 - protein, 24 aa, Artificial Sequence
  Synthetic polypeptide
GTLGKSVLSVTLEIPHHITQRDAD

SEQ ID NO: 13424 - protein, 24 aa, Artificial Sequence
  Synthetic polypeptide
WDLGQVSFKCDLGDTSSYHTKRCR

SEQ ID NO: 13425 - protein, 529 aa, Artificial Sequence
  Synthetic polypeptide
GTLGKSVLSVTLEIPHHITQRDADRSLSIPDEQLHSFAVSTVHITKNRNGGGSLNNYSSSIPSTPSTSQEDPQFSVPPTANTPTPVCKRSMRWSNLFTSEKGSDPDKERKAPENHADTIGSGRAIPIKQGMLLKRSGKWLKTWKKKYVTLCSNGVLTYYSSLGDYMKYIHKKEIDLQTSTIKVPGKWPSLATLACTPISSSKSDGLSKDMDTGLGDSICFSPSISSTTIPKLNPPPSPHANKKKHLKKKSTNNFMIVSATGQTWHFEATTYEERDAWVQAIQSQILASLQSCESSKSKSQLTSQSEAMALQSIQNMRGNAHCVDCETQNPKWASLNLGVLMCIECSGIHRSLGTRLSRVRSLELDDWPVELRKVMSSIGNDLANSIWEGSSQGRTKPTEKSTREEKERWIRSKYEEKLFLAPLPCTELSLGQQLLRATADEDLQTAILLLAHGSREEVNETCGEGDGCTALHLACRKGNVVLAQLLIWYGVDVMARDAHGNTALTYARQASSQECINVLLQYGCPDECV

SEQ ID NO: 13426 - protein, 80 aa, Artificial Sequence
  Synthetic polypeptide
DLMVLYLFDSCSFTCSHSLCGHHVSRTCPSAMILWSLTFLPIQSQAQYSRGTLKQKLWSLTLLPIQRQAQYSRGTLKQML

SEQ ID NO: 13427 - protein, 636 aa, Artificial Sequence
  Synthetic polypeptide
QLLLHMFPLSVRPPCKSDLPFCHDSLEFNLSANPESSTIFQRNSQTEALEFNPSANPEASTIFQRNSQTDVVEIRRSNCTNHVSAVRFSQQYSLCSTIFLDDSTAIQHYLTMTIISVTLEIPHHITQRDADRTLSIPDEQLHSFAVSTVHIMKKRNGGGSLNNYSSSIPSTPSTSQEDPQFSVPPTANTPTPVCKRSMRWSNLFTSEKGSDPDKERKAPENHADTIGSGRAIPIKQGMLLKRSGKWLKTWKKKYVTLCSNGMLTYYSSLGDYMKNIHKKEIDLQTSTIKVPGKWPSLATSACTPISSSKSNGLSKDMDTGLGDSICFSPSISSTTSPKLNPPPSPHANKKKHLKKKSTNNFMIVSATGQTWHFEATTYEERDAWVQAIQSQILASLQSCESSKSKSQLTSQSEAMALQSIQNMRGNAHCVDCETQNPKWASLNLGVLMCIECSGIHRSLGPHLSRVRSLELDDWPVELRKVMSSIVNDLANSIWEGSSQGQTKPSEKSTREEKERWIRSKYEEKLFLAPLPCTELSLGQQLLRATADEDLQTAILLLAHGSCEEVNETCGEGDGCTALHLACRKGNVVLAQLLIWYGVDVMARDAHGNTALTYARQASSQECINVLLQYGCPDECV

SEQ ID NO: 13428 - protein, 13 aa, Artificial Sequence
  Synthetic polypeptide
RTSPSAMIRQPRV

SEQ ID NO: 13429 - protein, 87 aa, Artificial Sequence
  Synthetic polypeptide
DLMVLYLFDSCSFTCSHSLCGHHVSRTCPSAMIVSFLKDFPLCHDSSASSLTSSRGRCVPLNLRPMRQELGTGWQERPWLLLYSLLR

SEQ ID NO: 13430 - protein, 657 aa, Artificial Sequence
  Synthetic polypeptide
DLMVLYLFDSCSFTCSHSLCGHHVSRTCPSAMIVSFLKDFPLCHDSLEFNLSANPESSTIFQRNSQTEALEFNPSANPEASTIFQRNSQTDVVEIRRSNCTNHVSAVRFSQQYSLCSTIFLDDSTAIQHYLTMTIISVTLEIPHHITQRDADRTLSIPDEQLHSFAVSTVHIMKKRNGGGSLNNYSSSIPSTPSTSQEDPQFSVPPTANTPTPVCKRSMRWSNLFTSEKGSDPDKERKAPENHADTIGSGRAIPIKQGMLLKRSGKWLKTWKKKYVTLCSNGMLTYYSSLGDYMKNIHKKEIDLQTSTIKVPGKWPSLATSACTPISSSKSNGLSKDMDTGLGDSICFSPSISSTTSPKLNPPPSPHANKKKHLKKKSTNNFMIVSATGQTWHFEATTYEERDAWVQAIQSQILASLQSCESSKSKSQLTSQSEAMALQSIQNMRGNAHCVDCETQNPKWASLNLGVLMCIECSGIHRSLGPHLSRVRSLELDDWPVELRKVMSSIVNDLANSIWEGSSQGQTKPSEKSTREEKERWIRSKYEEKLFLAPLPCTELSLGQQLLRATADEDLQTAILLLAHGSCEEVNETCGEGDGCTALHLACRKGNVVLAQLLIWYGVDVMARDAHGNTALTYARQASSQECINVLLQYGCPDECV

SEQ ID NO: 13431 - protein, 55 aa, Artificial Sequence
  Synthetic polypeptide
RTSPSAMILWSLTFLPIQSQAQYSRGTLKQKLWSLTLLPIQRQAQYSRGTLKQML

SEQ ID NO: 13432 - protein, 24 aa, Artificial Sequence
  Synthetic polypeptide
WDLGQVSFKCDLGDTSSYHTKRCR

SEQ ID NO: 13433 - protein, 529 aa, Artificial Sequence
  Synthetic polypeptide
GTLGKSVLSVTLEIPHHITQRDADRTLSIPDEQLHSFAVSTVHIMKKRNGGGSLNNYSSSIPSTPSTSQEDPQFSVPPTANTPTPVCKRSMRWSNLFTSEKGSDPDKERKAPENHADTIGSGRAIPIKQGMLLKRSGKWLKTWKKKYVTLCSNGMLTYYSSLGDYMKNIHKKEIDLQTSTIKVPGKWPSLATSACTPISSSKSNGLSKDMDTGLGDSICFSPSISSTTSPKLNPPPSPHANKKKHLKKKSTNNFMIVSATGQTWHFEATTYEERDAWVQAIQSQILASLQSCESSKSKSQLTSQSEAMALQSIQNMRGNAHCVDCETQNPKWASLNLGVLMCIECSGIHRSLGPHLSRVRSLELDDWPVELRKVMSSIVNDLANSIWEGSSQGQTKPSEKSTREEKERWIRSKYEEKLFLAPLPCTELSLGQQLLRATADEDLQTAILLLAHGSCEEVNETCGEGDGCTALHLACRKGNVVLAQLLIWYGVDVMARDAHGNTALTYARQASSQECINVLLQYGCPDECV

SEQ ID NO: 13434 - protein, 34 aa, Artificial Sequence; identical to SEQ ID NO: 13355
  Synthetic polypeptide

SEQ ID NO: 13435 - protein, 54 aa, Artificial Sequence; identical to SEQ ID NO: 13325
  Synthetic polypeptide

SEQ ID NO: 13436 - protein, 766 aa, Artificial Sequence
  Synthetic polypeptide
IREAELSVSRDCTTALQPGQQSETPPQKKEKEDLFSSQSASKLKGASLLPGKLPTLVSLFDDEDEEDNLFGGTAAKKQTLCLQAQREEKAKASELSKKKASALLFSSDEEDQWNIPASQTHLASDSRSKGEPRDSGTLQSQEAKAVKKTSLFEEDEEDDLFAIAKDSQKKTQRVSLLFEDDVDSGGSLFGSPPTSVPPATKKKETVSEAPPLLFSDEEEKEAQLGVKSVDKKVESAKESLKFGRTDVAESEKEGLLTRSAQETVKHSDLFSSSSPWDKGTKPRTKTVLSLFDEEEDKMEDQNIIQAPQKEVGKGRDPDAHPKSTGVFQDEELLFSHKLQKDNDPDVDLFAGTKKTKLLEPSVGSLFGDDEDDDLFSSAKSQPLANLAINPAALLPTAASQISEVKPVLPELAFPSSEHRRSHGLESVPVLPGSGEAGVSFDLPAQADTLHSANKSRVKMRGKRRPQTRAARRLAAQESSETEDMSVPRGPIAQWADGAISPNGHRPQLRAASGEDSTEEALAAAAAPWEGGPVPGVDRSPFAKSLGHSRGEADLFDSGDIFSTGTGSQSVERTKPKAKIAENPANPPVGGKAKSPMFPALGEASSDDDLFQSAKPKPAKKTNPFPLLEDEDDLFTDQKVKKNETKSNSQQDVILTTQDIFEDDIFATEAIKPSQKTREKEKTLESNLFDDNIDIFADLTVKPKEKSKKKVEAKSIFDDDMDDIFSSGIQAKTTKPKSRSAQAAPEPRFEHKVSNIFDDPLNAFGGQ

SEQ ID NO: 13437 - protein, 807 aa, Artificial Sequence
  Synthetic polypeptide
IREAELSVSRDCTTALQPGQQSETPPQKKEKEDLFSSQSASKLKGASLLPGKLPTLVSLFDDEDEEDNLFGGTAAKKQTLCLQAQREEKAKASELSKKKASALLFSSDEEDQWNIPASQTHLASDSRSKGEPRDSGTLQSQEAKAVKKTSLFEEDEEDDLFAIAKDSQKKTQRVSLLFEDDVDSGGSLFGSPPTSVPPATKKKETVSEAPPLLFSDEEEKEAQLGVKSVDKKVESAKESLKFGRTDVAESEKEGLLTRSAQETVKHSDLFSSSSPWDKGTKPRTKTVLSLFDEEEDKMEDQNIIQAPQKEVGKGRDPDAHPKSTGVFQDEELLFSHKLQKDNDPDVDLFAGTKKTKLLEPSVGSLFGDDEDDDLFSSAKSQPLVQEKKRVVKKDHSVDSFKNQKHPESIQGSKEKGIWKPETPQANLAINPAALLPTAASQISEVKPVLPELAFPSSEHRRSHGLESVPVLPGSGEAGVSFDLPAQADTLHSANKSRVKMRGKRRPQTRAARRLAAQESSETEDMSVPRGPIAQWADGAISPNGHRPQLRAASGEDSTEEALAAAAAPWEGGPVPGVDRSPFAKSLGHSRGEADLFDSGDIFSTGTGSQSVERTKPKAKIAENPANPPVGGKAKSPMFPALGEASSDDDLFQSAKPKPAKKTNPFPLLEDEDDLFTDQKVKKNETKSNSQQDVILTTQDIFEDDIFATEAIKPSQKTREKEKTLESNLFDDNIDIFADLTVKPKEKSKKKVEAKSIFDDDMDDIFSSGIQAKTTKPKSRSAQAAPEPRFEHKVSNIFDDPLNAFGGQ

SEQ ID NO: 13438 - protein, 828 aa, Artificial Sequence
  Synthetic polypeptide
IREAELSVSRDCTTALQPGQQSETPPQKKEKEDLFSSQSASKLKGASLLPGKLPTLVSLFDDEDEEDNLFGGTAAKKQTLCLQAQREEKAKASELSKKKASALLFSSDEEDQWNIPASQTHLASDSRSKGEPRDSGTLQSQEAKAVKKTSLFEEDEEDDLFAIAKDSQKKTQRVSLLFEDDVDSGGSLFGSPPTSVPPATKKKETVSEAPPLLFSDEEEKEAQLGVKSVDKKVESAKESLKFGRTDVAESEKEGLLTRSAQETVKHSDLFSSSSPWDKGTKPRTKTVLSLFDEEEDKMEDQNIIQAPQKEVGKGRDPDAHPKSTGVFQDEELLFSHKLQKDNDPDVDLFAGTKKTKLLEPSVGSLFGDDEDDDLFSSAKSQPLVQEKKRVVKKDHSVDSFKNQKHPESIQGSKEKGIWKPETPQDSSGLAPFKTKEPSTRIGKIQANLAINPAALLPTAASQISEVKPVLPELAFPSSEHRRSHGLESVPVLPGSGEAGVSFDLPAQADTLHSANKSRVKMRGKRRPQTRAARRLAAQESSETEDMSVPRGPIAQWADGAISPNGHRPQLRAASGEDSTEEALAAAAAPWEGGPVPGVDRSPFAKSLGHSRGEADLFDSGDIFSTGTGSQSVERTKPKAKIAENPANPPVGGKAKSPMFPALGEASSDDDLFQSAKPKPAKKTNPFPLLEDEDDLFTDQKVKKNETKSNSQQDVILTTQDIFEDDIFATEAIKPSQKTREKEKTLESNLFDDNIDIFADLTVKPKEKSKKKVEAKSIFDDDMDDIFSSGIQAKTTKPKSRSAQAAPEPRFEHKVSNIFDDPLNAFGGQ

SEQ ID NO: 13439 - protein, 15 aa, Artificial Sequence
  Synthetic polypeptide
SDSQKPGCRGHQSGY

SEQ ID NO: 13440 - protein, 129 aa, Artificial Sequence
  Synthetic polypeptide
LLLTAYDQTPKSQAAEATKVAIDVGFRHIDSAYLYQNEEEVGQAIWEKIADGTVKREEIFYTIKLWATFFRAELVHPALERSLKKLGPDYVDLFIIHVPFAMKPGKELLPKDASGEIILETVELCDTWE

SEQ ID NO: 13441 - protein, 20 aa, Artificial Sequence
  Synthetic polypeptide
QPMIRLPKARLPRPPKWLLT

SEQ ID NO: 13442 - protein, 106 aa, Artificial Sequence
  Synthetic polypeptide
LLLTAYDQTPKSQAAEATKVAIDVGFRHIDSAYLYQNEEEVGQAIWEKIADGTVKREEIFYTIKLWATFFRAELVHPALERSLKKLGPDYVDLFIIHVPFAMKGSS

SEQ ID NO: 13443 - protein, 21 aa, Artificial Sequence
  Synthetic polypeptide
FLYSLQNDSQKPGCRGHQSGY

SEQ ID NO: 13444 - protein, 139 aa, Artificial Sequence
  Synthetic polypeptide
ALTKTKCWCHDFCTVCKMTPKSQAAEATKVAIDVGFRHIDSAYLYQNEEEVGQAIWEKIADGTVKREEIFYTIKLWATFFRAELVHPALERSLKKLGPDYVDLFIIHVPFAMKPGKELLPKDASGEIILETVELCDTWE

SEQ ID NO: 13445 - protein, 116 aa, Artificial Sequence
  Synthetic polypeptide
ALTKTKCWCHDFCTVCKMTPKSQAAEATKVAIDVGFRHIDSAYLYQNEEEVGQAIWEKIADGTVKREEIFYTIKLWATFFRAELVHPALERSLKKLGPDYVDLFIIHVPFAMKGSS

SEQ ID NO: 13446 - protein, 36 aa, Artificial Sequence
  Synthetic polypeptide
KPLGKTGLILCLRSACTGFLICDSQKPGCRGHQSGY

SEQ ID NO: 13447 - protein, 123 aa, Artificial Sequence
  Synthetic polypeptide
SVTPKSQAAEATKVAIDVGFRHIDSAYLYQNEEEVGQAIWEKIADGTVKREEIFYTIKLWATFFRAELVHPALERSLKKLGPDYVDLFIIHVPFAMKPGKELLPKDASGEIILETVELCDTWE

SEQ ID NO: 13448 - protein, 100 aa, Artificial Sequence
  Synthetic polypeptide
SVTPKSQAAEATKVAIDVGFRHIDSAYLYQNEEEVGQAIWEKIADGTVKREEIFYTIKLWATFFRAELVHPALERSLKKLGPDYVDLFIIHVPFAMKGSS

SEQ ID NO: 13449 - protein, 34 aa, Artificial Sequence
  Synthetic polypeptide
GLSSHMELPTMKMENILSGKVQEGTPSLSSAKER

SEQ ID NO: 13450 - protein, 21 aa, Artificial Sequence
  Synthetic polypeptide
DVPFTFHHDCEASPATWNYPL

SEQ ID NO: 13451 - protein, 478 aa, Artificial Sequence
  Synthetic polypeptide
LCLTRSDDFIRGFPFCLTLILSCLPPCETCLSPFIMTVRPLQPHGTTHYENGEYIIRQGARGDTFFIISKGTVNVTREDSPSEDPVFLRTLGKGDWFGEKALQGEDVRTANVIAAEAVTCLVIDRDSFKHLIGGLDDVSNKAYEDAEAKAKYEAEAAFFANLKLSDFNIIDTLGVGGFGRVELVQLKSEESKTFAMKILKKRHIVDTRQQEHIRSEKQIMQGAHSDFIVRLYRTFKDSKYLYMLMEACLGGELWTILRDRGSFEDSTTRFYTACVVEAFAYLHSKGIIYRDLKPENLILDHRGYAKLVDFGFAKKIGFGKKTWTFCGTPEYVAPEIILNKGHDISADYWSLGILMYELLTGSPPFSGPDPMKTYNIILRGIDMIEFPKKIAKNAANLIKKLCRDNPSERLGNLKNGVKDIQKHKWFEGFNWEGLRKGTLTPPIIPSVASPTDTSNFDSFPEDNDEPPPDDNSGWDIDF

SEQ ID NO: 13452 - protein, 115 aa, Artificial Sequence
  Synthetic polypeptide
LCLTRSDDFIRGFPFCLTLILSCLPPCETCLSPFIMTVRPLQPHGTTHYENGEYIIRQGARGDTFFIISKGTVNVTREDSPSEDPVFLRTLGKGDWFGEKALQGWTWNLFEYVVE

SEQ ID NO: 13453 - protein, 38 aa, Artificial Sequence
  Synthetic polypeptide
GEGRAEREMFPSERQLLHILNTWPQLGLHFEKKTQRER

SEQ ID NO: 13454 - protein, 561 aa, Artificial Sequence
  Synthetic polypeptide
GRGGPNGRCSLRRGSSFTFLTPGPNWDFTLKRKRREKDDDVVSLSSLDLKEPSNKRVRPLARVTSLANLISPVRNGAVRRFGQTIQSFTLRGDHRSPASAQKFSSRSTVPTPAKRRSSALWSEMLDITMKESLTTREIRRQEAIYEMSRGEQDLIEDLKLARKAYHDPMLKLSIMSEEELTHIFGDLDSYIPLHEDLLTRIGEATKPDGTVEQIGHILVSWLPRLNAYRGYCSNQLAAKALLDQKKQDPRVQDFLQRCLESPFSRKLDLWSFLDIPRSRLVKYPLLLKEILKHTPKEHPDVQLLEDAILIIQGVLSDINLKKGESECQYYIDKLEYLDEKQRDPRIEASKVLLCHGELRSKSGHKLYIFLFQDILVLTRPVTRNERHSYQVYRQPIPVQELVLEDLQDGDVRMGGSFRGAFSNSEKAKNIFRIRFHDPSPAQSHTLQANDVFHKQQWFNCIRAAIAPFQSAGSPPELQGLPELHEECEGNHPSARKLTAQRRASTVSSVTQVEVDENAYRCGSGMQMAEDSKSLKTHQTQPGIRRARDKALSGGKRKETLV

SEQ ID NO: 13455 - protein, 19 aa, Artificial Sequence
  Synthetic polypeptide
GGEGRTGDVPFGEAAPSHS

SEQ ID NO: 13456 - protein, 33 aa, Artificial Sequence
  Synthetic polypeptide
ASILRASQKGITYFLRWDPDGPAPFTLPPRAAP

SEQ ID NO: 13457 - protein, 78 aa, Artificial Sequence
  Synthetic polypeptide
AMSIHFESITERHYILFEMGSGRASTVHSSTPSSSLAERRMLLTITREAVTLWGRRSSTLCWRGPGSWQNSVVDFRDF

SEQ ID NO: 13458 - protein, 56 aa, Artificial Sequence
  Synthetic polypeptide
ASILRASQKGITYFLRISWKMQKWSTQMHLSIPSSVRQELGSMCLEHSSWTWSQLL

SEQ ID NO: 13459 - protein, 423 aa, Artificial Sequence
  Synthetic polypeptide
AMSIHFESITERHYILFEDQLENAKMEHTNASFDTFFCETRAGKHVPRALFVDLEPTVIDGIRTGQHRSLFHPEQLLSGKEDAANNYARGRYSVGSEVIDLVLERTRKLAEQCGGLQGFLIFRSFGGGTGSGFTSLLMERLTGEYSRKTKLEFSVYPAPRISTAVVEPYNSVLTTHSTTEHTDCTFMVDNEAVYDICHRKLGVECPSHASINRLVVQVVSSITASLRFEGPLNVDLIEFQTNLVPYPRIHFPMTAFAPIVSADKAYHEQFSVSDITTACFESSNQLVKCDPRLGKYMACCLLYRGDVVPKEVNAAIAATKSRHSVQFVDWCPTGFKVGINNRPPTVMPGGDLAKVHRSICMLSNTTAIVEAWARLDHKFDLMYAKRAFLHWYLREGMEEAEFLEAREDLAALERDYEEVAQSF

SEQ ID NO: 13460 - protein, 417 aa, Artificial Sequence
  Synthetic polypeptide
LTTGIPALWKPEDQLENAKMEHTNASFDTFFCETRAGKHVPRALFVDLEPTVIDGIRTGQHRSLFHPEQLLSGKEDAANNYARGRYSVGSEVIDLVLERTRKLAEQCGGLQGFLIFRSFGGGTGSGFTSLLMERLTGEYSRKTKLEFSVYPAPRISTAVVEPYNSVLTTHSTTEHTDCTFMVDNEAVYDICHRKLGVECPSHASINRLVVQVVSSITASLRFEGPLNVDLIEFQTNLVPYPRIHFPMTAFAPIVSADKAYHEQFSVSDITTACFESSNQLVKCDPRLGKYMACCLLYRGDVVPKEVNAAIAATKSRHSVQFVDWCPTGFKVGINNRPPTVMPGGDLAKVHRSICMLSNTTAIVEAWARLDHKFDLMYAKRAFLHWYLREGMEEAEFLEAREDLAALERDYEEVAQSF

SEQ ID NO: 13461 - protein, 57 aa, Artificial Sequence
  Synthetic polypeptide
TGHGDSQLESQHFGNPRISWKMQKWSTQMHLSIPSSVRQELGSMCLEHSSWTWSQLL

SEQ ID NO: 13462 - protein, 36 aa, Artificial Sequence
  Synthetic polypeptide
PGTVTHNWNPSTLETRGSAGKCKNGAHKCIFRYLLL

SEQ ID NO: 13463 - protein, 457 aa, Artificial Sequence
  Synthetic polypeptide
LTTGIPALWKPERECLSIHIGQAGIQIGDACWELYCLEHGIQPNGVVLDTQQDQLENAKMEHTNASFDTFFCETRAGKHVPRALFVDLEPTVIDGIRTGQHRSLFHPEQLLSGKEDAANNYARGRYSVGSEVIDLVLERTRKLAEQCGGLQGFLIFRSFGGGTGSGFTSLLMERLTGEYSRKTKLEFSVYPAPRISTAVVEPYNSVLTTHSTTEHTDCTFMVDNEAVYDICHRKLGVECPSHASINRLVVQVVSSITASLRFEGPLNVDLIEFQTNLVPYPRIHFPMTAFAPIVSADKAYHEQFSVSDITTACFESSNQLVKCDPRLGKYMACCLLYRGDVVPKEVNAAIAATKSRHSVQFVDWCPTGFKVGINNRPPTVMPGGDLAKVHRSICMLSNTTAIVEAWARLDHKFDLMYAKRAFLHWYLREGMEEAEFLEAREDLAALERDYEEVAQSF

SEQ ID NO: 13464 - protein, 97 aa, Artificial Sequence
  Synthetic polypeptide
TGHGDSQLESQHFGNPRGSAFPSTSVKLASRLGTPAGNSIAWNMESSQMALFLTLNRISWKMQKWSTQMHLSIPSSVRQELGSMCLEHSSWTWSQLL

SEQ ID NO: 13465 - protein, 52 aa, Artificial Sequence
  Synthetic polypeptide
PGTVTHNWNPSTLETREGVPFHPHRSSWHPDWGRLLGTLLPGTWNPAKWRCS

SEQ ID NO: 13466 - protein, 2387 aa, Artificial Sequence
  Synthetic polypeptide
RNHTERPQELDFKYVMKVSSLKKRLPEAAFRKQNYLEEKVCFQDLCFNLYEVELSNRQGENIDKLTECIKNKQLAIIKCLEDRGFFILLTSSALLSEPDFGGKQMGLHGLHLFRSPLSTGVKDLKVEDDISMKVIPILSTLNCALLETKKSLPEERIHPNTLVKRHFQELYKADRSPSLSVAPQDRMKDPTFLGKLPSGFDLIPPAEKCPSESLTQLNSYFSDPSAYILEVSTALDLLAEHPQSPCVSDGICDAGFSLVMTPDPEFLVSEAEVRKETETKKDSEEMLKAKKRVFPLSPASNLRVQPKRKASMPHMVQSKKVNLCRPFPKRTASRADNSSDSPTTLKLVKGQFPQKRKRGAEVLTAQFVQKTKLDRKNQEAPISKDVPVPTNAKRARKQEKSPVKTVPRAKPPVKKSPQKQRVNIVKGNENPRNRKQLQPVKGETASKLQSEISRGCQEDGISINSVQPENTTAAHNDLPENSIVNYDSQALNMLADLALSSATSSTPVSEARNLHCSSELPQNDVLLSKENSLRGTSDHEYHRGVKTQKGELLPNPSSDRKSNSGSDLTVSQDEESLVPCSQAPAKAQSALTEEMLESSDASQSSSVSVEHSYALLLTEHSKKHLQEREILSPLFPRNGTKSPEAATPVGKVMPFRHQPGLLLQQKPPDDPVVKPKDRPPSARVKKSSCSRIVLSCDDSVKITFKCETEYAFSLDSKYTNNPLEKTVVRALHGPWNTDLPDNVEEVKLLLHMWVALFYSNQNKIIRSSRKVVEHSNPAKYVSINSTLESCELREIEESLGLEKCSADSLLETNEISRAHAAEVSFRDPNCLLPFIKTPLTQGLELCVQNEQKKTFARECDPDTQEDQNFICSYNNEVTGEEAKQESLETSNLVLSGIGSTQTNGPSVPSEEEIVQPLDSTRVASYSGTVTQATFTRTYDGPGSQPVICQSSVYGTLENKVDILDAAVQTKTGTLQDLIQHGSPINNECHPSLERKDDNMGCAVINPEPITLTFEKNAHVPIQTEGVNTADERTTFKKELIKQVSPAASLRHPVSTSENARTQGLRDIPSLVVAGQKGTKYLCASSVGGETLDKAVCSLQKETPLPVSLPSDKTMVMEALSLAKSSSHLSPSEEVRCTQDFLSQTQSLLGLSSEGLLELTQVEVDSSSASTTLGRQCSLNCISSGCHTSGDSLELRKNHKNGPNTENMNLEAFDSVFIKQTSLSVSREVSLELSEEDSDIDLALTISPPTSPREEMPAGEIEQFEEAPFSNLELQDVAEEIGEPEEVALTESREVSSADNVSVYPSVSEEPVENKERKGDNLQPVTLILSKENCTLEIAEEINVTSDFPFDSVIEEVSPASSPEPPVPVKETRPYQAVTPCILKLHGTQCEKSNQISQCESEDLGITEKENVFVGPTHPVGQDNFTQVQQMQVSAEMPLILTDHPGRTGRPTLPGKVTEEIVSSEHDEGLSFSGKVQCYGRELNQPASAAKCTGDFSPSPEKLVKSGNPLQPVSIENRNLDLKHLVLESSEPPFGPRNVIENKSLSDTLVSTTAPSGIVNVSVKQQTSPKSSQNHLFPGDLKTDEGIYLQVKSLTAASVDGAYSTQGCMCSVVPTLCSSSDNATLTHYVRPINAEPVFQAQEIPAGRMASLLKNGEPEAELHKETTGPGTAGPQSNTTSSLKGERKAIHTLQDVSTCETKELLNVGVSSLCAGPYQNTADTKENLSKEPLASFVSESFDTSVCGIATEHVEIENSGEGLRAEAGSETLGRDGEVGVNSDMHYELSGDSDLDLLGDCRNPRLDLEDSYTLRGSYTRKKDVPTDGYESSLNFHNNNQEDWGCSSWVPGMETSLPPGHWTAAVKKEEKCVPPYVQIRDLHGILRTYANFSITKELKDTMRTSHGLRRHPSFSANCGLPSSWTSTWQVADDLTQNTLDLEYLRFAHKLKQTIKNGDSQHSASSANVFPKESPTQISIGAFPSTKISEAPFLHPAPRSRSPLLVTVVESDPRPQGQPRRGYTASSLDSSSSWRERCSHNRDLRNSQRNHTVSFHLNKLKYNSTVKESRNDISLILNEYAEFNKVMKNSNQFIFQDKELNDVSGEATAQEMYLPFPGRSASYEDIIIDVCTNLHVKLRSVVKEACKSTFLFYLVETEDKSFFVRTKNLLRKGGHTEIEPQHFCQAFHRENDTLIIIIRNEDISSHLHQIPSLLKLKHFPSVIFAGVDSPGDVLDHTYQELFRAGGFVISDDKILEAVTLVQLKEIIKILEKLNGNGRWKWLLHYRENKKLKEDERVDSTAHKKNIMLKSFQSANIIELLHYHQCDSRSSTKAEILKCLLNLQIQHIDARFAVLLTDKPTIPREVFENSGILVTDVNNFIENIEKIAAPFRSSYW

SEQ ID NO: 13467 - protein, 13 aa, Artificial Sequence
  Synthetic polypeptide
FLFKGITQRDRRN

SEQ ID NO: 13468 - protein, 15 aa, Artificial Sequence
  Synthetic polypeptide
SCLKESHRETAGTRF

SEQ ID NO: 13469 - protein, 60 aa, Artificial Sequence
  Synthetic polypeptide
TLVLTPLVCQGLSGLQPQIEGCAVGFPTFEALELKLSHSWLPRASACRWLIMELHLVIVN

SEQ ID NO: 13470 - protein, 168 aa, Artificial Sequence
  Synthetic polypeptide
GFGTQTEPLLASSRLSLQMAYHGTSPCDRELSDLQRDPPAHCSAGPVGDDLFHWQATIMGPPDSAYQGGVFFLTVHFPTDYPFKPPKIAFTTKIYHPNINSNGSICLDILRSQWSPALTVSKVLLSICSLLCDPNPDDPLVPDIAQIYKSDKEKYNRHAREWTQKYAM

SEQ ID NO: 13471 - protein, 924 aa, Artificial Sequence
  Synthetic polypeptide
CTLETQKAGKQERAAAEGKGRSGEDFFQKIMEETNTQIAWPSKLKIGAKSKKDPHIKVSGKKEDVKEAKEMIMSVLDTKSNRVTLKMDVSHTEHSHVIGKGGNNIKKVMEETGCHIHFPDSNRNNQAEKSNQVSIAGQPAGVESARVRIRELLPLVLMFELPIAGILQPVPDPNSPSIQHISQTYNISVSFKQRSRMYGATVIVRGSQNNTSAVKEGTAMLLEHLAGSLASAIPVSTQLDIAAQHHLFMMGRNGSNIKHIMQRTGAQIHFPDPSNPQKKSTVYLQGTIESVCLARQYLMGCLPLVLMFDMKEEIEVDPQFIAQLMEQLDVFISIKPKPKQPSKSVIVKSVERNALNMYEARKCLLGLESSGVTIATSPSPASCPAGLACPSLDILASAGLGLTGLGLLGPTTLSLNTSTTPNSLLNALNSSVSPLQSPSSGTPSPTLWAPPLANTSSATGFSAIPHLMIPSTAQATLTNILLSGVPTYGHTAPSPPPGLTPVDVHINSMQTEGKKISAALNGHAQSPDIKYGAISTSSLGEKVLSANHGDPSIQTSGSEQTSPKSSPTEGCNDAFVEVGMPRSPSHSGNAGDLKQMMCPSKVSCAKRQTVELLQGTKNSHLHSTDRLLSDPELSATESPLADKKAPGSERAAERAAAAQQNSERAHLAPRSSYVNMQAFDYEQKKLLATKAMLKKPVVTEVRTPTNTWSGLGFSKSMPAETIKELRRANHVSYKPTMTTTYEGSSMSLSRSNSREHLGGGSESDNWRDRNGIGPGSHSEFAASIGSPKRKQNKSTEHYLSSSNYMDCISSLTGSNGCNLNSSFKGSDLPELFSKLGLGKYTDVFQQQEIDLQTFLTLTDQDLKELGITTFGARRKMLLAISELNKNRRKLFESPNARTSFLEGGASGRLPRQYHSDIASVSGRW

SEQ ID NO: 13472 - protein, 73 aa, Artificial Sequence
  Synthetic polypeptide
FWNQNLNPTCSHLQVVSKLMDMQGHTEWYNVHWRLRRLASRRELLLKGKAEVGKTFFKRSWRKQIRRLLGHQN

SEQ ID NO: 13473 - protein, 39 aa, Artificial Sequence
  Synthetic polypeptide
IQHVLIYRWFLSLWICKGIQSGIMYIGDSEGWQAGESCC

SEQ ID NO: 13474 - protein, 932 aa, Artificial Sequence
  Synthetic polypeptide
AERASSTRSHMTWILAGLCHISVCHITFLNPNFHSYTIMEETNTQIAWPSKLKIGAKSKKDPHIKVSGKKEDVKEAKEMIMSVLDTKSNRVTLKMDVSHTEHSHVIGKGGNNIKKVMEETGCHIHFPDSNRNNQAEKSNQVSIAGQPAGVESARVRIRELLPLVLMFELPIAGILQPVPDPNSPSIQHISQTYNISVSFKQRSRMYGATVIVRGSQNNTSAVKEGTAMLLEHLAGSLASAIPVSTQLDIAAQHHLFMMGRNGSNIKHIMQRTGAQIHFPDPSNPQKKSTVYLQGTIESVCLARQYLMGCLPLVLMFDMKEEIEVDPQFIAQLMEQLDVFISIKPKPKQPSKSVIVKSVERNALNMYEARKCLLGLESSGVTIATSPSPASCPAGLACPSLDILASAGLGLTGLGLLGPTTLSLNTSTTPNSLLNALNSSVSPLQSPSSGTPSPTLWAPPLANTSSATGFSAIPHLMIPSTAQATLTNILLSGVPTYGHTAPSPPPGLTPVDVHINSMQTEGKKISAALNGHAQSPDIKYGAISTSSLGEKVLSANHGDPSIQTSGSEQTSPKSSPTEGCNDAFVEVGMPRSPSHSGNAGDLKQMMCPSKVSCAKRQTVELLQGTKNSHLHSTDRLLSDPELSATESPLADKKAPGSERAAERAAAAQQNSERAHLAPRSSYVNMQAFDYEQKKLLATKAMLKKPVVTEVRTPTNTWSGLGFSKSMPAETIKELRRANHVSYKPTMTTTYEGSSMSLSRSNSREHLGGGSESDNWRDRNGIGPGSHSEFAASIGSPKRKQNKSTEHYLSSSNYMDCISSLTGSNGCNLNSSFKGSDLPELFSKLGLGKYTDVFQQQEIDLQTFLTLTDQDLKELGITTFGARRKMLLAISELNKNRRKLFESPNARTSFLEGGASGRLPRQYHSDIASVSGRW

SEQ ID NO: 13475 - protein, 22 aa, Artificial Sequence
  Synthetic polypeptide
ILIFTAIQSWRKQIRRLLGHQN

SEQ ID NO: 13476 - protein, 32 aa, Artificial Sequence
  Synthetic polypeptide
FSQLYNHGGNKYADCLAIKTEDRSQIQERSPY

SEQ ID NO: 13477 - protein, 44 aa, Artificial Sequence
  Synthetic polypeptide
IKLNKNRRKLFESPNARTSFLEGGASGRLPRQYHSDIASVSGRW

SEQ ID NO: 13478 - protein, 42 aa, Artificial Sequence
  Synthetic polypeptide
ASTMPETARATPSPPPSQPTQREDNRDEDFLMIHLHLMNKTK

SEQ ID NO: 13479 - protein, 38 aa, Artificial Sequence
  Synthetic polypeptide
TLNKWLMTKMVSRHCIWQPRKITWKLSSFFLTMVQARA

SEQ ID NO: 13480 - protein, 23 aa, Artificial Sequence
  Synthetic polypeptide
LKWFHAIVYGSPGKSPGSCQVSS

SEQ ID NO: 13481 - protein, 23 aa, Artificial Sequence
  Synthetic polypeptide
DFEVALDQIIHEALESLMPMQVT

SEQ ID NO: 13482 - protein, 13 aa, Artificial Sequence
  Synthetic polypeptide
ILRWLWIRLFTKL

SEQ ID NO: 13483 - protein, 44 aa, Artificial Sequence
  Synthetic polypeptide
GRARWLTPVIPAFWEAEAVDHEVRRSRASWLIRFHQSKKKNKRL

SEQ ID NO: 13484 - protein, 20 aa, Artificial Sequence
  Synthetic polypeptide
YGFIRARKRTRDFNKPEKHP

SEQ ID NO: 13485 - protein, 754 aa, Artificial Sequence
  Synthetic polypeptide
PGAVAHACNPSILGGRGGGSRGQEIESILANTVSSEQEKEQETLISQKSIPEPLPAADMKKKIEGYQEFSAKPLASRVDPEKDNETDQGSNSEKVAEEAGEKGPTPPLPSAPLAPEKDSALVPGASKQPLTSPSALVDSKQESKLCCFTESPESEPQEASFPSFPTTQPPLANQNETEDDKLPAMADYIANCTVKVDQLGSDDIHNALKQTPKVLVVQSFDMFKDKDLTGPMNENHGLNYTPLLYSRGNPGIMSPLAKKKLLSQVSGASLSSSYPYGSPPPLISKKKLIARDDLCSSLSQTHHGQSTDHMAVSRPSVIQHVQSFRSKPSEERKTINDIFKHEKLSRSDPHRCSFSKHHLNPLADSYVLKQEIQEGKDKLLEKRALPHSHMPSFLADFYSSPHLHSLYRHTEHHLHNEQTSKYPSRDMYRESENSSFPSHRHQEKLHVNYLTSLHLQDKKSAAAEAPTDDQPTDLSLPKNPHKPTGKVLGLAHSTTGPQESKGISQFQVLGSQSRDCHPKACRVSPMTMSGPKKYPESLSRSGKPHHVRLENFRKMEGMVHPILHRKMSPQNIGAARPIKRSLEDLDLVIAGKKARAVSPLDPSKEVSGKEKASEQESEGSKAAHGGHSGGGSEGHKLPLSSPIFPGLYSGSLCNSGLNSRLPAGYSHSLQYLKNQTVLSPLMQPLAFHSLVMQRGIFTSPTNSQQLYRHLAAATPVGSSYGDLLHNSIYPLAAINPQAAFPSSQLSSVHPSTKL

SEQ ID NO: 13486 - protein, 14 aa, Artificial Sequence
  Synthetic polypeptide
TRSCHIQPFPGSGS

SEQ ID NO: 13487 - protein, 183 aa, Artificial Sequence
  Synthetic polypeptide
HVRDDFASPSPSAMTMRPPQSCEPEVVTFNHFLEAAAEKEVQGKARLQDFIENLLQRVELAEKQLEYYQSQQASGFVRDLSGHVLTDISSNRKPKCLSRGHPHSVCNHPDLKAHFHPKGRNHLKKAKDDRASMQPAKAIHEQAESSRDLCRPPKKGELLGFGRKGNIRPKMAKKKPTAIVNII

SEQ ID NO: 13488 - protein, 41 aa, Artificial Sequence
  Synthetic polypeptide
GLPSHVNQKLSHSTISWKRQLRRRFKGKPGSRTLLRICYSG

SEQ ID NO: 13489 - protein, 109 aa, Artificial Sequence
  Synthetic polypeptide
HVRDDFASPSPSAMTMRPPQSCEPEVVTFNHFLEAAAEKEVQGKARLQDFIENLLQRVELAEKQLEYYQSQQASGFVRDLSGHVSWKGAGEARLVCQNDLELEESAIVE

SEQ ID NO: 13490 - protein, 238 aa, Artificial Sequence
  Synthetic polypeptide
HVRDDFASPSPSAMTMRPPQSCEPEVVTFNHFLEAAAEKEVQGKARLQDFIENLLQRVELAEKQLEYYQSQQASGFVRDLSGHVSWKGAGEARLVCQNDLELEIFGHINHHLSGLKDSHCLVFLQAPPVPWIILASFLWILGNPWTSSTATAGFSQIWVLFPFCGGTFHHNEKDVLGLQDFERESVSTSQSRNISLLTLGQLQNCVIGKLTIIDLLTEHLLGVRHGVICFPWGLPSSS

SEQ ID NO: 13491 - protein, 55 aa, Artificial Sequence
  Synthetic polypeptide
CSLPSQDSAQSPQQQEGPHQIQPLDLGLLSLHNRAGIQRGTKQIKILACTELTFS

SEQ ID NO: 13492 - protein, 60 aa, Artificial Sequence
  Synthetic polypeptide
EEEERPELAHSVPLLCDVLYHLRTLHRVPNSKKALTRYSPLTWDFSASITVLEYREEPNR

SEQ ID NO: 13493 - protein, 12 aa, Artificial Sequence
  Synthetic polypeptide
DLLSPAELFLAI

SEQ ID NO: 13494 - protein, 95 aa, Artificial Sequence
  Synthetic polypeptide
GAFPHLHSVLLSFFSFLPPSEEGCVCFPFCHDCKLSETSSALRNYFWPYKPPSFGVERFSLSSFSASPTCALDHFSQLSLDSRKSLDVFHGYCRI

SEQ ID NO: 13495 - protein, 183 aa, Artificial Sequence
  Synthetic polypeptide
WIYKGLSPTFTRYFSHSSPSCHQAKKDVFASPSAMIVSFLRPPQPCGTIFGHINHHLSGLKDSHCLVFLQAPPVPWIILASFLWILGNPWTSSTATAGFSQIWVLFPFCGGTFHHNEKDVLGLQDFERESVSTSQSRNISLLTLGQLQNCVIGKLTIIDLLTEHLLGVRHGVICFPWGLPSSS

SEQ ID NO: 13496 - protein, 2511 aa, Artificial Sequence
  Synthetic polypeptide
CLSFQIDCELLKDKGPISRTLQDVTHIVYVEFDDLEWDKREWVKVYEDFSTFLVEYHLIWAKRNDPSQTQGSKSKQIQWPALTFKPLVERNIPSSVTAVEFLVDKQLDFLTEDSAFQPYQDDIDSLNPVLRDNPQLHEEVKVWVKEQKVQEIFMQGPYSLNGYRVRVYRQDSATQWFTGIITHHDLFTRTMIVMNDQVLEPQNVDPSMVQMTFLDDVVHSLLKGENIGITSRRRSRANQNVNAVHSHYTRAQANSPRPAMNSQAAVPKQNTHQQQQQRSIRPNKRKGSDSSIPDEEKMKEEKYDYISRGENPKGKNKHLMNKRRKPEEDEKKLNMKRLRTDNVSDFSESSDSENSNKRIIDNSSEQKPENELKNKNTSKINGEEGKPHNNEKAGEETLKNSQPPWDQIQEDKKHEEAEKRKSVDTQLQEDMIIHSSEQSTVSDHNSNDLLPQECNMDKTHTMELLPKEKFVSRPPTPKCVIDITNDTNLEKVAQENSSTFGLQTLQKMDPNVSDSKHSIANAKFLETAKKDSDQSWVSDVVKVDLTQSSVTNASSGNDHLNMEKEKYVSYISPLSAVSVMEDKLHKRSPPPETIKSKLNTSVDTHKIKSSPSPEVVKPKITHSPDSVKSKATYVNSQATGERRLANKIEHELSRCSFHPIPTRSSTLETTKSPLIIDKNEHFTVYRDPALIGSETGANHISPFLSQHPFPLHSSSHRTCLNPGTHHPALTPAPHLLAGSSSQTPLPTINTHPLTSGPHHAVHHPHLLPTVLPGVPTASLLGGHPRLESAHASSLSHLALAHQQQQQLLQHQSPHLLGQAHPSASYNQLGLYPIIWQYPNGTHAYSGLGLPSSKWVHPENAVNAEASLRRNSPSPWLHQPTPVTSADGIGLLSHIPVRPSSAEPHRPLKITAHSSPPLTKTLVDHHKEELERKAFMEPLRSVASTSAKNDLDLNRSQTGKDCHLHRHFVDPVLNQLQRPPQETGERLNKYKEEHRRILQESIDVAPFTTKIKGLEGERENYSRVASSSSSPKSHIIKQDMDVERSVSDLYKMKHSVPQSLPQSNYFTTLSNSVVNEPPRSYPSKEVSNIYGDKQSNALAAAAANPQTLTSFITSLSKPPPLIKHQPESEGLVGKIPEHLPHQIASHSVTTFRNDCRSPTHLTVSSTNTLRSMPALHRAPVFHPPIHHSLERKEGSYSSLSPPTLTPVMPVNAGGKVQESQKPPTLIPEPKDSQANFKSSSEQSLTEMWRPNNNLSKEKTEWHVEKSSGKLQAAMASVIVRPSSSTKTDSMPAMQLASKDRVSERSSAGAHKTDCLKLAEAGETGRIILPNVNSDSVHTKSEKNFQAVSQGSVPSSVMSAVNTMCNTKTDVITSAADTTSVSSWGGSEVISSLSNTILASTSSECVSSKSVSQPVAQKQECKVSTTAPVTLASSKTGSVVQPSSGFSGTTDFIHLKKHKAALAAAQYKSSNASETEPNAIKNQTLSASLPLDSTVICSTINKANSVGNGQASQTSQPNYHTKLKKAWLTRHSEEDKNTNKMENSGNSVSEIIKPCSVNLIASTSSDIQNSVDSKIIVDKYVKDDKVNRRKAKRTYESGSESGDSDESESKSEQRTKRQPKPTYKKKQNDLQKRKGEIEEDLKPNGVLSRSAKERSKLKLQSNSNTGIPRSVLKDWRKVKKLKQTGESFLQDDSCCEIGPNLQKCRECRLIRSKKGEEPAHSPVFCRFYYFRRLSFSKNGVVRIDGFSSPDQYDDEAMSLWTHENFEDDELDIETSKYILDIIGDKFCQLVTSEKTALSWVKKDAKIAWKRAVRGVREMCDACEATLFNIHWVCQKCGFVVCLDCYKAKERKSSRDKELYAWMKCVKGQPHDHKHLMPTQIIPGSVLTDLLDAMHTLREKYGIKSHCHCTNKQNLQVGNFPTMNGVSQVLQNVLNHSNKISLCMPESQQQNTPPKSEKNGGSSPESDVGTDNKLTPPESQSPLHWLADLAEQKAREEKKENKELTLENQIKEEREQDNSESPNGRTSPLVSQNNEQGSTLRDLLTTTAGKLRVGSTDAGIAFAPVYSMGAPSSKSGRTMPNILDDIIASVVENKIPPSKTSKINVKPELKEEPEESIISAVDENNKLYSDIPHSWICEKHILWLKDYKNSSNWKLFKECWKQGQPAVVSGVHKKMNISLWKAESISLDFGDHQADLLNCKDSIISNANVKEFWDGFEEVSKRQKNKSGETVVLKLKDWPSGEDFKTMMPARYEDLLKSLPLPEYCNPEGKFNLASHLPGFFVRPDLGPRLCSAYGVVAAKDHDIGTTNLHIEVSDVVNILVYVGIAKGNGILSKAGILKKFEEEDLDDILRKRLKDSSEIPGALWHIYAGKDVDKIREFLQKISKEQGLEVLPEHDPIRDQSWYVNKKLRQRLLEEYGVRTCTLIQFLGDAIVLPAGALHQVQNFHSCIQVTEDFVSPEHLVESFHLTQELRLLKEEINYDDKLQVKNILYHAVKEMVRALKIHEDEVEDMEEN

SEQ ID NO: 13497 - protein, 18 aa, Artificial Sequence
  Synthetic polypeptide
RSYLQNLAGCDPHSVCGI

SEQ ID NO: 13498 - protein, 18 aa, Artificial Sequence
  Synthetic polypeptide
SPGWCLECFILHIIHTKL

SEQ ID NO: 13499 - protein, 74 aa, Artificial Sequence
  Synthetic polypeptide
SGLFSISNLCLYLPAAIITPATVISNTVEICDLQAGVWNALSCILFIQSCENKKREGICSMDDVLDCFCSLYCD

SEQ ID NO: 13500 - protein, 255 aa, Artificial Sequence
  Synthetic polypeptide
SPTQWRSVISRLVFGMLYPAYYSYKAVKTKNVKEYVRWMMYWIVFALYTVIETVADQTVAWFPLYYELKIAFVIWLLSPYTKGASLIYRKFLHPLLSSKEREIDDYIVQAKERGYETMVNFGRQGLNLAATAAVTAAVKSQGAITERLRSFSMHDLTTIQGDEPVGQRPYQPLPEAKKKSKPAPSESAGYGIPLKDGDEKTDEEAEGPYSDNEMLTHKGLRRSQSMKSVKTTKGRKEVRYGSLKYKVKKRPQVYF

SEQ ID NO: 13501 - protein, 133 aa, Artificial Sequence
  Synthetic polypeptide
GWAWWLTPVIPALWEAESQGAITERLRSFSMHDLTTIQGDEPVGQRPYQPLPEAKKKSKPAPSESAGYGIPLKDGDEKTDEEAEGPYSDNEMLTHKGLRRSQSMKSVKTTKGRKEVRYGSLKYKVKKRPQVYF

SEQ ID NO: 13502 - protein, 12 aa, Artificial Sequence
  Synthetic polypeptide
SQHFGRPRAKEQ

SEQ ID NO: 13503 - protein, 22 aa, Artificial Sequence
  Synthetic polypeptide
MGVVAHTCNPSTLGGREPRSNN

SEQ ID NO: 13504 - protein, 112 aa, Artificial Sequence
  Synthetic polypeptide
LLLDGELHKNTEYKGEYWAEHPTIKIFWEVFHELPLEKKKQFLLFLTGSDRIPILGMKSLKLVIQSTGGGEEYLPVSHTCFNLLDLPKYTEKETLRSKLIQAIDHNEGFSLI

SEQ ID NO: 13505 - protein, 20 aa, Artificial Sequence
  Synthetic polypeptide
TVSSTRIQNTKGNIGQNILR

SEQ ID NO: 13506 - protein, 42 aa, Artificial Sequence
  Synthetic polypeptide
APQEYRIQRGILGRTSYDKNFLGSISRITIGKEETVSVIFDR

SEQ ID NO: 13507 - protein, 703 aa, Artificial Sequence
  Synthetic polypeptide
PNDSEEYFCVKRIFSGGDQSFSHYSSPQNCGPPDDFRCPNPTKQIWTVNEALIQKWLSYPSGRFPVEIANEIDGTFSSSGCLNGSFLAVSNDDHYRTGTRFSGVDMNAARLLFHKLIQPDHPQISQQVAASLEKNLIPKLTSSLPDVEALRFYLTLPECPLMSDSNNFTTIAIPFGTALVNLEKAPLKVLENWWSVLEPPLFLKIVELFKEVVVHLLKLYKIGIPPSERRIFNSFLHTALKVLEILHRVNEKMGQIIQYDKFYIHEVQELIDIRNDYINWVQQQAYGMDVNHGLTELADIPVTICTYPFVFDAQAKTTLLQTDAVLQMQMAIDQAHRQNVSSLFLPVIESVNPCLILVVRRENIVGDAMEVLRKTKNIDYKKPLKVIFVGEDAVDAGGVRKEFFLLIMRELLDPKYGMFRYYEDSRLIWFSDKTFEDSDLFHLIGVICGLAIYNCTIVDLHFPLALYKKLLKKKPSLDDLKELMPDVGRSMQQLLDYPEDDIEETFCLNFTITVENFGATEVKELVLNGADTAVNKQNRQEFVDAYVDYIFNKSVASLFDAFHAGFHKVCGGKVLLLFQPNELQAMVIGNTNYDWKELEKNTEYKGEYWAEHPTIKIFWEVFHELPLEKKKQFLLFLTGSDRIPILGMKSLKLVIQSTGGGEEYLPVSHTCFNLLDLPKYTEKETLRSKLIQAIDHNEGFSLI

SEQ ID NO: 13508 - protein, 11 aa, Artificial Sequence
  Synthetic polypeptide
NNQMILKNISV

SEQ ID NO: 13509 - protein, 625 aa, Artificial Sequence
  Synthetic polypeptide
PNDSEEYFCVKRIFSGGDQSFSHYSSPQNCGPPDDFRCPNPTKQIWTVNEALIQKWLSYPSGRFPVEIANEIDGTFSSSGCLNGSFLAVSNDDHYRTGTRFSGVDMNAARLLFHKLIQPDHPQISQQVAASLEKNLIPKLTSSLPDVEALRFYLTLPECPLMSDSNNFTTIAIPFGTALVNLEKAPLKVLENWWSVLEPPLFLKIVELFKEVVVHLLKLYKIGIPPSERRIFNSFLHTALKVLEILHRVNEKMGQIIQYDKFYIHEVQELIDIRNDYINWVQQQAYGMDVNHGLTELADIPVTICTYPFVFDAQAKTTLLQTDAVLQMQMAIDQAHRQNVSSLFLPVIESVNPCLILVVRRENIVGDAMEVLRKTKNIDYKKPLKVIFVGEDAVDAGGVRKEFFLLIMRELLDPKYGMFRYYEDSRLIWFSDKITVENFGATEVKELVLNGADTAVNKQNRQEFVDAYVDYIFNKSVASLFDAFHAGFHKVCGGKVLLLFQPNELQAMVIGNTNYDWKELEKNTEYKGEYWAEHPTIKIFWEVFHELPLEKKKQFLLFLTGSDRIPILGMKSLKLVIQSTGGGEEYLPVSHTCFNLLDLPKYTEKETLRSKLIQAIDHNEGFSLI

SEQ ID NO: 13510 - protein, 695 aa, Artificial Sequence
  Synthetic polypeptide
PNDSEEYFCVKRIFSGGDQSFSHYSSPQNCGPPDDFRCPNPTKQIWTVNEALIQKWLSYPSGRFPVEIANEIDGTFSSSGCLNGSFLAVSNDDHYRTGTRFSGVDMNAARLLFHKLIQPDHPQISQQVAASLEKNLIPKLTSSLPDVEALRFYLTLPECPLMSDSNNFTTIAIPFGTALVNLEKAPLKVLENWWSVLEPPLFLKIVELFKEVVVHLLKLYKIGIPPSERRIFNSFLHTALKVLEILHRVNEKMGQIIQYDKFYIHEVQELIDIRNDYINWVQQQAYGMLADIPVTICTYPFVFDAQAKTTLLQTDAVLQMQMAIDQAHRQNVSSLFLPVIESVNPCLILVVRRENIVGDAMEVLRKTKNIDYKKPLKVIFVGEDAVDAGGVRKEFFLLIMRELLDPKYGMFRYYEDSRLIWFSDKTFEDSDLFHLIGVICGLAIYNCTIVDLHFPLALYKKLLKKKPSLDDLKELMPDVGRSMQQLLDYPEDDIEETFCLNFTITVENFGATEVKELVLNGADTAVNKQNRQEFVDAYVDYIFNKSVASLFDAFHAGFHKVCGGKVLLLFQPNELQAMVIGNTNYDWKELEKNTEYKGEYWAEHPTIKIFWEVFHELPLEKKKQFLLFLTGSDRIPILGMKSLKLVIQSTGGGEEYLPVSHTCFNLLDLPKYTEKETLRSKLIQAIDHNEGFSLI

SEQ ID NO: 13511 - protein, 927 aa, Artificial Sequence
  Synthetic polypeptide
SQHFGRPRWADHLSSGVQDQPGQHASEVFCWGQNKYGQLGLGTDCKKQTSPQLLKSLLGIPFMQVAAGGAHSFVLTLSGAIFGWGRNKFGQLGLNDENDRYVPNLLKSLRSQKIVYICCGEDHTAALTKEGGVFTFGAGGYGQLGHNSTSHEINPRKVFELMGSIVTEIACGRQHTSAFVPSSGRIYSFGLGGNGQLGTGSTSNRKSPFTVKGNWYPYNGQCLPDIDSEEYFCVKRIFSGGDQSFSHYSSPQNCGPPDDFRCPNPTKQIWTVNEALIQKWLSYPSGRFPVEIANEIDGTFSSSGCLNGSFLAVSNDDHYRTGTRFSGVDMNAARLLFHKLIQPDHPQISQQVAASLEKNLIPKLTSSLPDVEALRFYLTLPECPLMSDSNNFTTIAIPFGTALVNLEKAPLKVLENWWSVLEPPLFLKIVELFKEVVVHLLKLYKIGIPPSERRIFNSFLHTALKVLEILHRVNEKMGQIIQYDKFYIHEVQELIDIRNDYINWVQQQAYGMDVNHGLTELADIPVTICTYPFVFDAQAKTTLLQTDAVLQMQMAIDQAHRQNVSSLFLPVIESVNPCLILVVRRENIVGDAMEVLRKTKNIDYKKPLKVIFVGEDAVDAGGVRKEFFLLIMRELLDPKYGMFRYYEDSRLIWFSDKTFEDSDLFHLIGVICGLAIYNCTIVDLHFPLALYKKLLKKKPSLDDLKELMPDVGRSMQQLLDYPEDDIEETFCLNFTITVENFGATEVKELVLNGADTAVNKQNRQEFVDAYVDYIFNKSVASLFDAFHAGFHKVCGGKVLLLFQPNELQAMVIGNTNYDWKELEKNTEYKGEYWAEHPTIKIFWEVFHELPLEKKKQFLLFLTGSDRIPILGMKSLKLVIQSTGGGEEYLPVSHTCFNLLDLPKYTEKETLRSKLIQAIDHNEGFSLI

SEQ ID NO: 13512 - protein, 27 aa, Artificial Sequence
  Synthetic polypeptide
VQEFKTSLANMQVKSSVGDRINMANWV

SEQ ID NO: 13513 - protein, 34 aa, Artificial Sequence
  Synthetic polypeptide
WAQWLTPVIPALWEAEMGRSPEFRSSRPAWPTCK

SEQ ID NO: 13514 - protein, 849 aa, Artificial Sequence
  Synthetic polypeptide
SQHFGRPRWADHLSSGVQDQPGQHASEVFCWGQNKYGQLGLGTDCKKQTSPQLLKSLLGIPFMQVAAGGAHSFVLTLSGAIFGWGRNKFGQLGLNDENDRYVPNLLKSLRSQKIVYICCGEDHTAALTKEGGVFTFGAGGYGQLGHNSTSHEINPRKVFELMGSIVTEIACGRQHTSAFVPSSGRIYSFGLGGNGQLGTGSTSNRKSPFTVKGNWYPYNGQCLPDIDSEEYFCVKRIFSGGDQSFSHYSSPQNCGPPDDFRCPNPTKQIWTVNEALIQKWLSYPSGRFPVEIANEIDGTFSSSGCLNGSFLAVSNDDHYRTGTRFSGVDMNAARLLFHKLIQPDHPQISQQVAASLEKNLIPKLTSSLPDVEALRFYLTLPECPLMSDSNNFTTIAIPFGTALVNLEKAPLKVLENWWSVLEPPLFLKIVELFKEVVVHLLKLYKIGIPPSERRIFNSFLHTALKVLEILHRVNEKMGQIIQYDKFYIHEVQELIDIRNDYINWVQQQAYGMDVNHGLTELADIPVTICTYPFVFDAQAKTTLLQTDAVLQMQMAIDQAHRQNVSSLFLPVIESVNPCLILVVRRENIVGDAMEVLRKTKNIDYKKPLKVIFVGEDAVDAGGVRKEFFLLIMRELLDPKYGMFRYYEDSRLIWFSDKITVENFGATEVKELVLNGADTAVNKQNRQEFVDAYVDYIFNKSVASLFDAFHAGFHKVCGGKVLLLFQPNELQAMVIGNTNYDWKELEKNTEYKGEYWAEHPTIKIFWEVFHELPLEKKKQFLLFLTGSDRIPILGMKSLKLVIQSTGGGEEYLPVSHTCFNLLDLPKYTEKETLRSKLIQAIDHNEGFSLI

SEQ ID NO: 13515 - protein, 272 aa, Artificial Sequence
  Synthetic polypeptide
SQHFGRPRWADHLSSGVQDQPGQHASEVFCWGQNKYGQLGLGTDCKKQTSPQLLKSLLGIPFMQVAAGGAHSFVLTLSGAIFGWGRNKFGQLGLNDENDRYVPNLLKSLRSQKIVYICCGEDHTAALTKEGGVFTFGAGGYGQLGHNSTSHEINPRKVFELMGSIVTEIACGRQHTSAFVPSSGRIYSFGLGGNGQLGTGSTSNRKSPFTVKGNWYPYNGQCLPDIEARSCHVVQAGLELLGSSDPPTLASQSAGITVNEHQCLLPPQKRTQ

SEQ ID NO: 13516 - protein, 41 aa, Artificial Sequence
  Synthetic polypeptide
SQHFGRPRWADHLSSGVQDQPGQHASEVFCWGQNKYGQLGL

SEQ ID NO: 13517 - protein, 919 aa, Artificial Sequence
  Synthetic polypeptide
SQHFGRPRWADHLSSGVQDQPGQHASEVFCWGQNKYGQLGLGTDCKKQTSPQLLKSLLGIPFMQVAAGGAHSFVLTLSGAIFGWGRNKFGQLGLNDENDRYVPNLLKSLRSQKIVYICCGEDHTAALTKEGGVFTFGAGGYGQLGHNSTSHEINPRKVFELMGSIVTEIACGRQHTSAFVPSSGRIYSFGLGGNGQLGTGSTSNRKSPFTVKGNWYPYNGQCLPDIDSEEYFCVKRIFSGGDQSFSHYSSPQNCGPPDDFRCPNPTKQIWTVNEALIQKWLSYPSGRFPVEIANEIDGTFSSSGCLNGSFLAVSNDDHYRTGTRFSGVDMNAARLLFHKLIQPDHPQISQQVAASLEKNLIPKLTSSLPDVEALRFYLTLPECPLMSDSNNFTTIAIPFGTALVNLEKAPLKVLENWWSVLEPPLFLKIVELFKEVVVHLLKLYKIGIPPSERRIFNSFLHTALKVLEILHRVNEKMGQIIQYDKFYIHEVQELIDIRNDYINWVQQQAYGMLADIPVTICTYPFVFDAQAKTTLLQTDAVLQMQMAIDQAHRQNVSSLFLPVIESVNPCLILVVRRENIVGDAMEVLRKTKNIDYKKPLKVIFVGEDAVDAGGVRKEFFLLIMRELLDPKYGMFRYYEDSRLIWFSDKTFEDSDLFHLIGVICGLAIYNCTIVDLHFPLALYKKLLKKKPSLDDLKELMPDVGRSMQQLLDYPEDDIEETFCLNFTITVENFGATEVKELVLNGADTAVNKQNRQEFVDAYVDYIFNKSVASLFDAFHAGFHKVCGGKVLLLFQPNELQAMVIGNTNYDWKELEKNTEYKGEYWAEHPTIKIFWEVFHELPLEKKKQFLLFLTGSDRIPILGMKSLKLVIQSTGGGEEYLPVSHTCFNLLDLPKYTEKETLRSKLIQAIDHNEGFSLI

SEQ ID NO: 13518 - protein, 86 aa, Artificial Sequence
  Synthetic polypeptide
SQHFGRPRWADHLSSGVQDQPGQHASEVFCWGQNKYGQLGLGTDCKKQTSPQLLKSLLGIPFMQVAAGGAHSFVLTLSGAIFGWGR

SEQ ID NO: 13519 - protein, 991 aa, Artificial Sequence
  Synthetic polypeptide
QCKEQCLAYEQVVALDAQNIVAVSCGEAHTLALNDKGQVYAWGLDSDGQLGLVGSEECIRVPRNIKSLSDIQIVQVACGYYHSLALSKASEVFCWGQNKYGQLGLGTDCKKQTSPQLLKSLLGIPFMQVAAGGAHSFVLTLSGAIFGWGRNKFGQLGLNDENDRYVPNLLKSLRSQKIVYICCGEDHTAALTKEGGVFTFGAGGYGQLGHNSTSHEINPRKVFELMGSIVTEIACGRQHTSAFVPSSGRIYSFGLGGNGQLGTGSTSNRKSPFTVKGNWYPYNGQCLPDIDSEEYFCVKRIFSGGDQSFSHYSSPQNCGPPDDFRCPNPTKQIWTVNEALIQKWLSYPSGRFPVEIANEIDGTFSSSGCLNGSFLAVSNDDHYRTGTRFSGVDMNAARLLFHKLIQPDHPQISQQVAASLEKNLIPKLTSSLPDVEALRFYLTLPECPLMSDSNNFTTIAIPFGTALVNLEKAPLKVLENWWSVLEPPLFLKIVELFKEVVVHLLKLYKIGIPPSERRIFNSFLHTALKVLEILHRVNEKMGQIIQYDKFYIHEVQELIDIRNDYINWVQQQAYGMDVNHGLTELADIPVTICTYPFVFDAQAKTTLLQTDAVLQMQMAIDQAHRQNVSSLFLPVIESVNPCLILVVRRENIVGDAMEVLRKTKNIDYKKPLKVIFVGEDAVDAGGVRKEFFLLIMRELLDPKYGMFRYYEDSRLIWFSDKTFEDSDLFHLIGVICGLAIYNCTIVDLHFPLALYKKLLKKKPSLDDLKELMPDVGRSMQQLLDYPEDDIEETFCLNFTITVENFGATEVKELVLNGADTAVNKQNRQEFVDAYVDYIFNKSVASLFDAFHAGFHKVCGGKVLLLFQPNELQAMVIGNTNYDWKELEKNTEYKGEYWAEHPTIKIFWEVFHELPLEKKKQFLLFLTGSDRIPILGMKSLKLVIQSTGGGEEYLPVSHTCFNLLDLPKYTEKETLRSKLIQAIDHNEGFSLI

SEQ ID NO: 13520 - protein, 13 aa, Artificial Sequence
  Synthetic polypeptide
RMSRLLPWMPKIL

SEQ ID NO: 13521 - protein, 913 aa, Artificial Sequence
  Synthetic polypeptide
QCKEQCLAYEQVVALDAQNIVAVSCGEAHTLALNDKGQVYAWGLDSDGQLGLVGSEECIRVPRNIKSLSDIQIVQVACGYYHSLALSKASEVFCWGQNKYGQLGLGTDCKKQTSPQLLKSLLGIPFMQVAAGGAHSFVLTLSGAIFGWGRNKFGQLGLNDENDRYVPNLLKSLRSQKIVYICCGEDHTAALTKEGGVFTFGAGGYGQLGHNSTSHEINPRKVFELMGSIVTEIACGRQHTSAFVPSSGRIYSFGLGGNGQLGTGSTSNRKSPFTVKGNWYPYNGQCLPDIDSEEYFCVKRIFSGGDQSFSHYSSPQNCGPPDDFRCPNPTKQIWTVNEALIQKWLSYPSGRFPVEIANEIDGTFSSSGCLNGSFLAVSNDDHYRTGTRFSGVDMNAARLLFHKLIQPDHPQISQQVAASLEKNLIPKLTSSLPDVEALRFYLTLPECPLMSDSNNFTTIAIPFGTALVNLEKAPLKVLENWWSVLEPPLFLKIVELFKEVVVHLLKLYKIGIPPSERRIFNSFLHTALKVLEILHRVNEKMGQIIQYDKFYIHEVQELIDIRNDYINWVQQQAYGMDVNHGLTELADIPVTICTYPFVFDAQAKTTLLQTDAVLQMQMAIDQAHRQNVSSLFLPVIESVNPCLILVVRRENIVGDAMEVLRKTKNIDYKKPLKVIFVGEDAVDAGGVRKEFFLLIMRELLDPKYGMFRYYEDSRLIWFSDKITVENFGATEVKELVLNGADTAVNKQNRQEFVDAYVDYIFNKSVASLFDAFHAGFHKVCGGKVLLLFQPNELQAMVIGNTNYDWKELEKNTEYKGEYWAEHPTIKIFWEVFHELPLEKKKQFLLFLTGSDRIPILGMKSLKLVIQSTGGGEEYLPVSHTCFNLLDLPKYTEKETLRSKLIQAIDHNEGFSLI

SEQ ID NO: 13522 - protein, 336 aa, Artificial Sequence
  Synthetic polypeptide
QCKEQCLAYEQVVALDAQNIVAVSCGEAHTLALNDKGQVYAWGLDSDGQLGLVGSEECIRVPRNIKSLSDIQIVQVACGYYHSLALSKASEVFCWGQNKYGQLGLGTDCKKQTSPQLLKSLLGIPFMQVAAGGAHSFVLTLSGAIFGWGRNKFGQLGLNDENDRYVPNLLKSLRSQKIVYICCGEDHTAALTKEGGVFTFGAGGYGQLGHNSTSHEINPRKVFELMGSIVTEIACGRQHTSAFVPSSGRIYSFGLGGNGQLGTGSTSNRKSPFTVKGNWYPYNGQCLPDIEARSCHVVQAGLELLGSSDPPTLASQSAGITVNEHQCLLPPQKRTQ

SEQ ID NO: 13523 - protein, 983 aa, Artificial Sequence
  Synthetic polypeptide
QCKEQCLAYEQVVALDAQNIVAVSCGEAHTLALNDKGQVYAWGLDSDGQLGLVGSEECIRVPRNIKSLSDIQIVQVACGYYHSLALSKASEVFCWGQNKYGQLGLGTDCKKQTSPQLLKSLLGIPFMQVAAGGAHSFVLTLSGAIFGWGRNKFGQLGLNDENDRYVPNLLKSLRSQKIVYICCGEDHTAALTKEGGVFTFGAGGYGQLGHNSTSHEINPRKVFELMGSIVTEIACGRQHTSAFVPSSGRIYSFGLGGNGQLGTGSTSNRKSPFTVKGNWYPYNGQCLPDIDSEEYFCVKRIFSGGDQSFSHYSSPQNCGPPDDFRCPNPTKQIWTVNEALIQKWLSYPSGRFPVEIANEIDGTFSSSGCLNGSFLAVSNDDHYRTGTRFSGVDMNAARLLFHKLIQPDHPQISQQVAASLEKNLIPKLTSSLPDVEALRFYLTLPECPLMSDSNNFTTIAIPFGTALVNLEKAPLKVLENWWSVLEPPLFLKIVELFKEVVVHLLKLYKIGIPPSERRIFNSFLHTALKVLEILHRVNEKMGQIIQYDKFYIHEVQELIDIRNDYINWVQQQAYGMLADIPVTICTYPFVFDAQAKTTLLQTDAVLQMQMAIDQAHRQNVSSLFLPVIESVNPCLILVVRRENIVGDAMEVLRKTKNIDYKKPLKVIFVGEDAVDAGGVRKEFFLLIMRELLDPKYGMFRYYEDSRLIWFSDKTFEDSDLFHLIGVICGLAIYNCTIVDLHFPLALYKKLLKKKPSLDDLKELMPDVGRSMQQLLDYPEDDIEETFCLNFTITVENFGATEVKELVLNGADTAVNKQNRQEFVDAYVDYIFNKSVASLFDAFHAGFHKVCGGKVLLLFQPNELQAMVIGNTNYDWKELEKNTEYKGEYWAEHPTIKIFWEVFHELPLEKKKQFLLFLTGSDRIPILGMKSLKLVIQSTGGGEEYLPVSHTCFNLLDLPKYTEKETLRSKLIQAIDHNEGFSLI

SEQ ID NO: 13524 - protein, 174 aa, Artificial Sequence
  Synthetic polypeptide
QCKEQCLAYEQVVALDAQNIVAVSCGEAHTLALNDKGQVYAWGLDSDGQLGLVGSEECIRVPSCFPKIMCVDSLVRICSGLSYGRIRNIKSLSDIQIVQVACGYYHSLALSKASEVFCWGQNKYGQLGLGTDCKKQTSPQLLKSLLGIPFMQVAAGGAHSFVLTLSGAIFGWGR

SEQ ID NO: 13525 - protein, 595 aa, Artificial Sequence
  Synthetic polypeptide
GRAWWLITVIPALWEAKAGGLLETRSSRSAWETWPSDNSKDNSTCNIEVVKPMDIEESIWSPRFGLKGKIDVTVGVKIHRGYKTKYKIMPLELKTGKESNSIEHRSQVVLYTLLSQERRADPEAGLLLYLKTGQMYPVPANHLDKRELLKLRNQMAFSLFHRISKSATRQKTQLASLPQIIEEEKTCKYCSQIGNCALYSRAVEQQMDCSSVPIVMLPKIEEETQHLKQTHLEYFSLWCLMLTLESQSKDNKKNHQNIWLMPASEMEKSGSCIGNLIRMEHVKIVCDGQYLHNFQCKHGAIPVTNLMAGDRVIVSGEERSLFALSRGYVKEINMTTVTCLLDRNLSVLPESTLFRLDQEEKNCDIDTPLGNLSKLMENTFVSKKLRDLIIDFREPQFISYLSSVLPHDAKDTVACILKGLNKPQRQAMKKVLLSKDYTLIVGMPGTGKTTTICTLVPAPEQVEKGGVSNVTEAKLIVFLTSIFVKAGCSPSDIGIIAPYRQQLKIINDLLARSIGMVEVNTVDKYQGRDKSIVLVSFVRSNKDGTVGELLKDWRRLNVAITRAKHKLILLGCVPSLNCYPPLEKLLNHLNSEKLI

SEQ ID NO: 13526 - protein, 40 aa, Artificial Sequence
  Synthetic polypeptide
SQHFGRRKQEDCLRPGVRDQPGKHGQVIIVRIIQHVTLKS

SEQ ID NO: 13527 - protein, 13 aa, Artificial Sequence
  Synthetic polypeptide
DQEFEISLGNMAK

SEQ ID NO: 13528 - protein, 616 aa, Artificial Sequence
  Synthetic polypeptide
GRAWWLITVIPALWEAKAGGLLETRSSRSAWETWPSDNSKDNSTCNIEVVKPMDIEESIWSPRFGLKGKIDVTVGVKIHRGYKTKYKIMPLELKTGKESNSIEHRSQVVLYTLLSQERRADPEAGLLLYLKTGQMYPVPANHLDKRELLKLRNQMAFSLFHRISKSATRQKTQLASLPQIIEEEKTCKYCSQIGNCALYSRAVEQQMDCSSVPIVMLPKIEEETQHLKQTHLEYFSLWCLMLTLESQSKDNKKNHQNIWLMPASEMEKSGSCIGNLIRMEHVKIVCDGQYLHNFQCKHGAIPVTNLMAGDRVIVSGEERSLFALSRGYVKEINMTTVTCLLDRNLSVLPESTLFRLDQEEKNCDIDTPLGNLSKLMENTFVSKKLRDLIIDFREPQFISYLSSVLPHDAKDTVACILKGLNKPQRQAMKKVLLSKDYTLIVGMPGTGKTTTICTLVPAPEQVEKGGVSNVTEAKLIVFLTSIFVKAGCSPSDIGIIAPYRQQLKIINDLLARSIGMVEVNTVDKYQGRDKSIVLVSFVRSNKDGTVGELLKDWRRLNVAITRAKHKLILLGCVPSLNCYPPLEKLLNHLNSEKLIIDLPSREHESLCHILGDFQRE

SEQ ID NO: 13529 - protein, 854 aa, Artificial Sequence
  Synthetic polypeptide
GRAWWLITVIPALWEAKAGGLLETRSSRSAWETWPSDNSKDNSTCNIEVVKPMDIEESIWSPRFGLKGKIDVTVGVKIHRGYKTKYKIMPLELKTGKESNSIEHRSQVVLYTLLSQERRADPEAGLLLYLKTGQMYPVPANHLDKRELLKLRNQMAFSLFHRISKSATRQKTQLASLPQIIEEEKTCKYCSQIGNCALYSRAVEQQMDCSSVPIVMLPKIEEETQHLKQTHLEYFSLWCLMLTLESQSKDNKKNHQNIWLMPASEMEKSGSCIGNLIRMEHVKIVCDGQYLHNFQCKHGAIPVTNLMAGDRVIVSGEERSLFALSRGYVKEINMTTVTCLLDRNLSVLPESTLFRLDQEEKNCDIDTPLGNLSKLMENTFVSKKLRDLIIDFREPQFISYLSSVLPHDAKDTVACILKGLNKPQRQAMKKVLLSKDYTLIVGMPGTGKTTTICTLVRILYACGFSVLLTSYTHSAVDNILLKLAKFKIGFLRLGQIQKVHPAIQQFTEQEICRSKSIKSLALLEELYNSQLIVATTCMGINHPIFSRKIFDFCIVDEASQISQPICLGPLFFSRRFVLVGDHQQLPPLVLNREARALGMSESLFKRLEQNKSAVVQLTVQYRMNSKIMSLSNKLTYEGKLECGSDKVANAVINLRHFKDVKLELEFYADYSDNPWLMGVFEPNNPVCFLNTDKVPAPEQVEKGGVSNVTEAKLIVFLTSIFVKAGCSPSDIGIIAPYRQQLKIINDLLARSIGMVEVNTVDKYQGRDKSIVLVSFVRSNKDGTVGELLKDWRRLNVAITRAKHKLILLGCVPSLNCYPPLEKLLNHLNSEKLIIDLPSREHESLCHILGDFQRE

SEQ ID NO: 13530 - protein, 57 aa, Artificial Sequence
  Synthetic polypeptide
GQVQWVTPVIPALWEAETGGSRGQEFETSLANMEYFLHCVLFLKKKDSLDCIKEMVQ

SEQ ID NO: 13531 - protein, 42 aa, Artificial Sequence
  Synthetic polypeptide
SQHFGRPRRVDHEVRSLRPAWPTWSIFCIACCSSKRRIPWIV

SEQ ID NO: 13532 - protein, 264 aa, Artificial Sequence
  Synthetic polypeptide
DQPGQHGVFSALRAVPQKEGFLGLYKGNGAMMIRIFPYGAIQFMAFEHYKTLITTKLGISGHVHRLMAGSMAGMTAVICTYPLDMVRVRLAFQVKGEHSYTGIIHAFKTIYAKEGGFFGFYRGLMPTILGMAPYAGVSFFTFGTLKSVGLSHAPTLLGRPSSDNPNVLVLKTHVNLLCGGVAGAIAQTISYPFDVTRRRMQLGTVLPEFEKCLTMRDTMKYVYGHHGIRKGLYRGLSLNYIRCIPSQAVAFTTYELMKQFFHLN

SEQ ID NO: 13533 - protein, 105 aa, Artificial Sequence
  Synthetic polypeptide
AKIAPPHSSLAALGVQQPSLLGASPTIYTQQTALAAAGLTTQTPANYQLTQTAALQQQAAAAAAALQQQYSQPQQALYSVQQQLQQPQQTLLTQPAVALPTSLSL

SEQ ID NO: 13534 - protein, 78 aa, Artificial Sequence
  Synthetic polypeptide
QAWWHATVVPVAGDAEARGLLEPGVQGCSELRLHHRIPAWLHWVFNSHHSLEHLLPFIHSKLHWQQQALPHKLQQTIS

SEQ ID NO: 13535 - protein, 76 aa, Artificial Sequence
  Synthetic polypeptide
DCTTAFQPGCTGCSTAITPWSISYHLYTANCIGSSRPYHTNSSKLSVNTNCCIAATSRSCSSCITTAIFTTSAGPV

SEQ ID NO: 13536 - protein, 1121 aa, Artificial Sequence
  Synthetic polypeptide
AKIAPPHSSLAALGVQQPSLLGASPTIYTQQTALAAAGLTTQTPANYQLTQTAALQQQAAAAAAALQQLQQPQQTLLTQPAVALPTSLSLSTPQPTAQITVSYPTPRSSQQQTQPQKQRVFTGVVTKLHDTFGFVDEDVFFQLSAVKGKTPQVGDRVLVEATYNPNMPFKWNAQRIQTLPNQNQSQTQPLLKTPPAVLQPIAPQTTFGVQTQPQPQSLLQAQISAASITPLLQTQPQPLLQQPQQKAGLLQPPVRIVSQPQPARRLDPPSRFSGRNDRGDQVPNRKDDRSRERERERRRSRERSPQRKRSRERSPRRERERSPRRVRRVVPRYTVQFSKFSLDCPSCDMMELRRRYQNLYIPSDFFDAQFTWVDAFPLSRPFQLGNYCNFYVMHREVESLEKNMAILDPPDADHLYSAKVMLMASPSMEDLYHKSCALAEDPQELRDGFQHPARLVKFLVGMKGKDEAMAIGGHWSPSLDGPDPEKDPSVLIKTAIRCCKALTGIDLSVCTQWYRFAEIRYHRPEETHKGRTVPAHVETVVLFFPDVWHCLPTRSEWETLSRGYKQQLVEKLQGERKEADGEQDEEEKDDGEAKEISTPTHWSKLDPKTMKVNDLRKELESRALSSKGLKSQLIARLTKQLKVEEQKEEQKELEKSEKEEDEDDDRKSEDDKEEEERKRQEEIERQRRERRYILPDEPAIIVHPNWAAKSGKFDCSIMSLSVLLDYRLEDNKEHSFEVSLFAELFNEMLQRDFGVRIYKSLLSLPEKEDKKEKDKKSKKDERKDKKEERDDETDEPKPKRRKSGDDKDKKEDRDERKKEDKRKDDSKDDDETEEDNNQDEYDPMEAEEAEDEEDDRDEEEMTKRDDKRDINRYCKERPSKDKEKEKTQMITINRDLLMAFVYFDQSHCGYLLEKDLEEILYTLGLHLSRAQVKKLLNKVVLRESCFYRKLTDTSKDEENHEESESLQEDMLGNRLLLPTPTVKQESKDVEENVGLIVYNGAMVDVGSLLQKLEKSEKVRAEVEQKLQLLEEKTDEDEKTILNLENSNKSLSGELREVKKDLSQLQENLKISENMNLQFENQMNKTIRNLSTVMDEIHTVLKKDNVKNEDKDQKSKENGASV

SEQ ID NO: 13537 - protein, 86 aa, Artificial Sequence
  Synthetic polypeptide
DCTTAFQPGCTGCSTAITPWSISYHLYTANCIGSSRPYHTNSSKLSVNTNCCIAATSRSCSSCITTVTATPANPLNTASCCTAYKP

SEQ ID NO: 13538 - protein, 1136 aa, Artificial Sequence
  Synthetic polypeptide
AKIAPPHSSLAALGVQQPSLLGASPTIYTQQTALAAAGLTTQTPANYQLTQTAALQQQAAAAAAALQQQYSQPQQALYSVQQQLQQPQQTLLTQPAVALPTSLSLSTPQPTAQITVSYPTPRSSQQQTQPQKQRVFTGVVTKLHDTFGFVDEDVFFQLSAVKGKTPQVGDRVLVEATYNPNMPFKWNAQRIQTLPNQNQSQTQPLLKTPPAVLQPIAPQTTFGVQTQPQPQSLLQAQISAASITPLLQTQPQPLLQQPQQKAGLLQPPVRIVSQPQPARRLDPPSRFSGRNDRGDQVPNRKDDRSRERERERRRSRERSPQRKRSRERSPRRERERSPRRVRRVVPRYTVQFSKFSLDCPSCDMMELRRRYQNLYIPSDFFDAQFTWVDAFPLSRPFQLGNYCNFYVMHREVESLEKNMAILDPPDADHLYSAKVMLMASPSMEDLYHKSCALAEDPQELRDGFQHPARLVKFLVGMKGKDEAMAIGGHWSPSLDGPDPEKDPSVLIKTAIRCCKALTGIDLSVCTQWYRFAEIRYHRPEETHKGRTVPAHVETVVLFFPDVWHCLPTRSEWETLSRGYKQQLVEKLQGERKEADGEQDEEEKDDGEAKEISTPTHWSKLDPKTMKVNDLRKELESRALSSKGLKSQLIARLTKQLKVEEQKEEQKELEKSEKEEDEDDDRKSEDDKEEEERKRQEEIERQRRERRYILPDEPAIIVHPNWAAKSGKFDCSIMSLSVLLDYRLEDNKEHSFEVSLFAELFNEMLQRDFGVRIYKSLLSLPEKEDKKEKDKKSKKDERKDKKEERDDETDEPKPKRRKSGDDKDKKEDRDERKKEDKRKDDSKDDDETEEDNNQDEYDPMEAEEAEDEEDDRDEEEMTKRDDKRDINRYCKERPSKDKEKEKTQMITINRDLLMAFVYFDQSHCGYLLEKDLEEILYTLGLHLSRAQVKKLLNKVVLRESCFYRKLTDTSKDEENHEESESLQEDMLGNRLLLPTPTVKQESKDVEENVGLIVYNGAMVDVGSLLQKLEKSEKVRAEVEQKLQLLEEKTDEDEKTILNLENSNKSLSGELREVKKDLSQLQENLKISENMNLQFENQMNKTIRNLSTVMDEIHTVLKKDNVKNEDKDQKSKENGASV

SEQ ID NO: 13539 - protein, 157 aa, Artificial Sequence
  Synthetic polypeptide
AKIAPPHSSLAALGVQQPSLLGASPTIYTQQTALAAAGLTTQTPANYQLTQTAALQQQAAAAAAALQQQYSQPQQALYSVQQQLQQPQQTLLTQPAVALPTSLSLSTPQPTAQITVSYPTPRSSQQQTQPQKQRVFTGVVTKLHDTFGFVDEDVFFQ

SEQ ID NO: 13540 - protein, 554 aa, Artificial Sequence
  Synthetic polypeptide
AKIAPPHSSLAALGVQQPSLLGASPTIYTQQTALAAAGLTTQTPANYQLTQTAALQQQAAAAAAALQQQYSQPQQALYSVQQQLQQPQQTLLTQPAVALPTSLSLSTPQPTAQITVSYPTPRSSQQQTQPQKQRVFTGVVTKLHDTFGFVDEDVFFQLSAVKGKTPQVGDRVLVEATYNPNMPFKWNAQRIQTLPNQNQSQTQPLLKTPPAVLQPIAPQTTFGVQTQPQPQSLLQAQISAASITPLLQTQPQPLLQQPQQKAGLLQPPVRIVSQPQPARRLDPPSRFSGRNDRGDQVPNRKDDRSRERERERRRSRERSPQRKRSRERSPRRERERSPRRVRRVVPRYTVQFSKFSLDCPSCDMMELRRRYQNLYIPSDFFDAQFTWVDAFPLSRPFQLGNYCNFYVMHREVESLEKNMAILDPPDADHLYSAKVMLMASPSMEDLYHKSCALAEDPQELRDGFQHPARLVKFLVGMKGKDEAMAIGGHWSPSLDGPDPEKDPSVLIKTAIRCCKALTGIDLSVCTQWMKKRRMMVKLKKFLHLPIGLNLIQRQ

SEQ ID NO: 13541 - protein, 70 aa, Artificial Sequence
  Synthetic polypeptide
AKIAPPHSSLAALGVQQPSLLGASPTIYTQQTALAAAGLTTQTPANYQLTQTAALQQQAAAAAAALQQHK

SEQ ID NO: 13542 - protein, 69 aa, Artificial Sequence
  Synthetic polypeptide
DCTTAFQPGCTGCSTAITPWSISYHLYTANCIGSSRPYHTNSSKLSVNTNCCIAATSRSCSSCITTAQI

SEQ ID NO: 13543 - protein, 1029 aa, Artificial Sequence
  Synthetic polypeptide
AKIAPPHSSLAALGVQQPSLLGASPTIYTQQTALAAAGLTTQTPANYQLTQTAALQQQAAAAAAALQQLQQPQQTLLTQPAVALPTSLSLSTPQPTAQITVSYPTPRSSQQQTQPQKQRVFTGVVTKLHDTFGFVDEDVFFQLSAVKGKTPQVGDRVLVEATYNPNMPFKWNAQRIQTLPNQNQSQTQPLLKTPPAVLQPIAPQTTFGVQTQPQPQSLLQAQISAASITPLLQTQPQPLLQQPQQKAGLLQPPVRIVSQPQPARRLDPPSRFSGRNDRGDQVPNRKDDRSRERERERRRSRERSPQRKRSRERSPRRERERSPRRVRRVVPRYTVQFSKFSLDCPSCDMMELRRRYQNLYIPSDFFDAQFTWVDAFPLSRPFQLGNYCNFYVMHREVESLEKNMAILDPPDADHLYSAKVMLMASPSMEDLYHKSCALAEDPQELRDGFQHPARLVKFLVGMKGKDEAMAIGGHWSPSLDGPDPEKDPSVLIKTAIRCCKALTGIDLSVCTQWYRFAEIRYHRPEETHKGRTVPAHVETVVLFFPDVWHCLPTRSEWETLSRGYKQQLVEKLQGERKEADGEQDEEEKDDGEAKEISTPTHWSKLDPKTMKVNDLRKELESRALSSKGLKSQLIARLTKQLKVEEQKEEQKELEKSEKEEDEDDDRKSEDDKEEEERKRQEEIERQRRERRYILPDEPAIIVHPNWAAKSGKFDCSIMSLSVLLDYRLEDNKEHSFEVSLFAELFNEMLQRDFGVRIYKSLLSLPEKEDKKEKDKKSKKDERKDKKEERDDETDEPKPKRRKSGDDKDKKEDRDERKKEDKRKDDSKDDDETEEDNNQDEYDPMEAEEAEDEEDDRDEEEMTKRDDKRDINRYCKERPSKDKEKEKTQMITINRDLLMAFVYFDQSHCGYLLEKDLEEILYTLGLHLSRAQVKKLLNKVVLRESCFYRKLTDTSKDEENHEESESLQEDMLGNRLLLPTPTVKQESKDVEENVGLIVYNGAMVDVGSLLQKLEKSEKVRAEVEQKLQLL

SEQ ID NO: 13544 - protein, 758 aa, Artificial Sequence
  Synthetic polypeptide
AKIAPPHSSLAALGVQQPSLLGASPTIYTQQTALAAAGLTTQTPANYQLTQTAALQQQAAAAAAALQQPAVALPTSLSLSTPQPTAQITVSYPTPRSSQQQTQPQKQRVFTGVVTKLHDTFGFVDEDVFFQLSAVKGKTPQVGDRVLVEATYNPNMPFKWNAQRIQTLPNQNQSQTQPLLKTPPAVLQPIAPQTTFGVQTQPQPQSLLQAQISAASITPLLQTQPQPLLQQPQQKAGLLQPPVRIVSQPQPARRLDPPSRFSGRNDRGDQVPNRKDDRSRERERERRRSRERSPQRKRSRERSPRRERERSPRRVRRVVPRYTVQFSKFSLDCPSCDMMELRRRYQNLYIPSDFFDAQFTWVDAFPLSRPFQLGNYCNFYVMHREVESLEKNMAILDPPDADHLYSAKVMLMASPSMEDLYHKSCALAEDPQELRDGFQHPARLVKFLVGMKGKDEAMAIGGHWSPSLDGPDPEKDPSVLIKTAIRCCKALTGIDLSVCTQWYRFAEIRYHRPEETHKGRTVPAHVETVVLFFPDVWHCLPTRSEWETLSRGYKQQLVEKLQGERKEADGEQDEEEKDDGEAKEISTPTHWSKLDPKTMKVNDLRKELESRALSSKGLKSQLIARLTKQLKVEEQKEEQKELEKSEKEEDEDDDRKSEDDKEEEERKRQEEIERQRRERRYILPDEPAIIVHPNWAAKSGKFDCSIMSLSVLLDYRLEDNKEHSFEVSLFAELFNEMLQRDFGVRIYKSLLSLPEKED

SEQ ID NO: 13545 - protein, 75 aa, Artificial Sequence
  Synthetic polypeptide
DCTTAFQPGCTGCSTAITPWSISYHLYTANCIGSSRPYHTNSSKLSVNTNCCIAATSRSCSSCITTASCCTAYKP

SEQ ID NO: 13546 - protein, 22 aa, Artificial Sequence
  Synthetic polypeptide
AKIAPPHSSLAALGVQQPSLLG

SEQ ID NO: 13547 - protein, 51 aa, Artificial Sequence
  Synthetic polypeptide
QAWWHATVVPVAGDAEARGLLEPGVQGCSELRLHHRIPAWLHWVFNSHHSL

SEQ ID NO: 13548 - protein, 20 aa, Artificial Sequence
  Synthetic polypeptide
DCTTAFQPGCTGCSTAITPW

SEQ ID NO: 13549 - protein, 42 aa, Artificial Sequence
  Synthetic polypeptide
GWVQWLMSAILSLWEAKARGLLELRSSRLPWATYYSNPSKPS

SEQ ID NO: 13550 - protein, 53 aa, Artificial Sequence
  Synthetic polypeptide
AGCSGSCLQYCHFGRPRQEDCLSSGVQDYPGQHITATPANPLNTASCCTAYKP

SEQ ID NO: 13551 - protein, 33 aa, Artificial Sequence
  Synthetic polypeptide
AQEFKTTLGNILQQPQQTLLTQPAVALPTSLSL

SEQ ID NO: 13552 - protein, 1064 aa, Artificial Sequence
  Synthetic polypeptide
AQEFKTTLGNILQQPQQTLLTQPAVALPTSLSLSTPQPTAQITVSYPTPRSSQQQTQPQKQRVFTGVVTKLHDTFGFVDEDVFFQLSAVKGKTPQVGDRVLVEATYNPNMPFKWNAQRIQTLPNQNQSQTQPLLKTPPAVLQPIAPQTTFGVQTQPQPQSLLQAQISAASITPLLQTQPQPLLQQPQQKAGLLQPPVRIVSQPQPARRLDPPSRFSGRNDRGDQVPNRKDDRSRERERERRRSRERSPQRKRSRERSPRRERERSPRRVRRVVPRYTVQFSKFSLDCPSCDMMELRRRYQNLYIPSDFFDAQFTWVDAFPLSRPFQLGNYCNFYVMHREVESLEKNMAILDPPDADHLYSAKVMLMASPSMEDLYHKSCALAEDPQELRDGFQHPARLVKFLVGMKGKDEAMAIGGHWSPSLDGPDPEKDPSVLIKTAIRCCKALTGIDLSVCTQWYRFAEIRYHRPEETHKGRTVPAHVETVVLFFPDVWHCLPTRSEWETLSRGYKQQLVEKLQGERKEADGEQDEEEKDDGEAKEISTPTHWSKLDPKTMKVNDLRKELESRALSSKGLKSQLIARLTKQLKVEEQKEEQKELEKSEKEEDEDDDRKSEDDKEEEERKRQEEIERQRRERRYILPDEPAIIVHPNWAAKSGKFDCSIMSLSVLLDYRLEDNKEHSFEVSLFAELFNEMLQRDFGVRIYKSLLSLPEKEDKKEKDKKSKKDERKDKKEERDDETDEPKPKRRKSGDDKDKKEDRDERKKEDKRKDDSKDDDETEEDNNQDEYDPMEAEEAEDEEDDRDEEEMTKRDDKRDINRYCKERPSKDKEKEKTQMITINRDLLMAFVYFDQSHCGYLLEKDLEEILYTLGLHLSRAQVKKLLNKVVLRESCFYRKLTDTSKDEENHEESESLQEDMLGNRLLLPTPTVKQESKDVEENVGLIVYNGAMVDVGSLLQKLEKSEKVRAEVEQKLQLLEEKTDEDEKTILNLENSNKSLSGELREVKKDLSQLQENLKISENMNLQFENQMNKTIRNLSTVMDEIHTVLKKDNVKNEDKDQKSKENGASV

SEQ ID NO: 13553 - protein, 85 aa, Artificial Sequence
  Synthetic polypeptide
AQEFKTTLGNILQQPQQTLLTQPAVALPTSLSLSTPQPTAQITVSYPTPRSSQQQTQPQKQRVFTGVVTKLHDTFGFVDEDVFFQ

SEQ ID NO: 13554 - protein, 482 aa, Artificial Sequence
  Synthetic polypeptide
AQEFKTTLGNILQQPQQTLLTQPAVALPTSLSLSTPQPTAQITVSYPTPRSSQQQTQPQKQRVFTGVVTKLHDTFGFVDEDVFFQLSAVKGKTPQVGDRVLVEATYNPNMPFKWNAQRIQTLPNQNQSQTQPLLKTPPAVLQPIAPQTTFGVQTQPQPQSLLQAQISAASITPLLQTQPQPLLQQPQQKAGLLQPPVRIVSQPQPARRLDPPSRFSGRNDRGDQVPNRKDDRSRERERERRRSRERSPQRKRSRERSPRRERERSPRRVRRVVPRYTVQFSKFSLDCPSCDMMELRRRYQNLYIPSDFFDAQFTWVDAFPLSRPFQLGNYCNFYVMHREVESLEKNMAILDPPDADHLYSAKVMLMASPSMEDLYHKSCALAEDPQELRDGFQHPARLVKFLVGMKGKDEAMAIGGHWSPSLDGPDPEKDPSVLIKTAIRCCKALTGIDLSVCTQWMKKRRMMVKLKKFLHLPIGLNLIQRQ

SEQ ID NO: 13555 - protein, 972 aa, Artificial Sequence
  Synthetic polypeptide
AQEFKTTLGNILQQPQQTLLTQPAVALPTSLSLSTPQPTAQITVSYPTPRSSQQQTQPQKQRVFTGVVTKLHDTFGFVDEDVFFQLSAVKGKTPQVGDRVLVEATYNPNMPFKWNAQRIQTLPNQNQSQTQPLLKTPPAVLQPIAPQTTFGVQTQPQPQSLLQAQISAASITPLLQTQPQPLLQQPQQKAGLLQPPVRIVSQPQPARRLDPPSRFSGRNDRGDQVPNRKDDRSRERERERRRSRERSPQRKRSRERSPRRERERSPRRVRRVVPRYTVQFSKFSLDCPSCDMMELRRRYQNLYIPSDFFDAQFTWVDAFPLSRPFQLGNYCNFYVMHREVESLEKNMAILDPPDADHLYSAKVMLMASPSMEDLYHKSCALAEDPQELRDGFQHPARLVKFLVGMKGKDEAMAIGGHWSPSLDGPDPEKDPSVLIKTAIRCCKALTGIDLSVCTQWYRFAEIRYHRPEETHKGRTVPAHVETVVLFFPDVWHCLPTRSEWETLSRGYKQQLVEKLQGERKEADGEQDEEEKDDGEAKEISTPTHWSKLDPKTMKVNDLRKELESRALSSKGLKSQLIARLTKQLKVEEQKEEQKELEKSEKEEDEDDDRKSEDDKEEEERKRQEEIERQRRERRYILPDEPAIIVHPNWAAKSGKFDCSIMSLSVLLDYRLEDNKEHSFEVSLFAELFNEMLQRDFGVRIYKSLLSLPEKEDKKEKDKKSKKDERKDKKEERDDETDEPKPKRRKSGDDKDKKEDRDERKKEDKRKDDSKDDDETEEDNNQDEYDPMEAEEAEDEEDDRDEEEMTKRDDKRDINRYCKERPSKDKEKEKTQMITINRDLLMAFVYFDQSHCGYLLEKDLEEILYTLGLHLSRAQVKKLLNKVVLRESCFYRKLTDTSKDEENHEESESLQEDMLGNRLLLPTPTVKQESKDVEENVGLIVYNGAMVDVGSLLQKLEKSEKVRAEVEQKLQLL

SEQ ID NO: 13556 - protein, 31 aa, Artificial Sequence
  Synthetic polypeptide
RSYRKKFEATSGGFMRFKESNHLLKIGMRKK

SEQ ID NO: 13557 - protein, 10 aa, Artificial Sequence
  Synthetic polypeptide
GLRKATISLR

SEQ ID NO: 13558 - protein, 5 aa, Artificial Sequence
  Synthetic polypeptide
RDLNT

SEQ ID NO: 13559 - protein, 614 aa, Artificial Sequence
  Synthetic polypeptide
GDDEETLTREQKEGAFSNFPISEETIKLLKGRGVTYLFPIQVKTFGPVYEGKDLIAQARTGTGKTFSFAIPLIERLQRNQETIKKSRSPKVLVLAPTRELANQVAKDFKDITRKLSVACFYGGTSYQSQINHIRNGIDILVGTPGRIKDHLQSGRLDLSKLRHVVLDEVDQMLDLGFAEQVEDIIHESYKTDSEDNPQTLLFSATCPQWVYKVAKKYMKSRYEQVDLVGKMTQKAATTVEHLAIQCHWSQRPAVIGDVLQVYSGSEGRAIIFCETKKNVTEMAMNPHIKQNAQCLHGDIAQSQREITLKGFREGSFKVLVATNVAARGLDIPEVDLVIQSSPPQDVESYIHRSGRTGRAGRTGICICFYQPRERGQLRYVEQKAGITFKRVGVPSTMDLVKSKSMDAIRSLASVSYAAVDFFRPSAQRLIEEKGAVDALAAALAHISGASSFEPRSLITSDKGFVTMTLESLEEIQDVSCAWKELNRKLSSNAVSQITRMCLLKGNMGVCFDVPTTESERLQAEWHDSDWILSVPAKLPEIEEYYDGNTSSNSRQRSGWSSGRSGRSGRSGGRSGGRSGRQSRQGSRSGSRQDGRRRSGNRNRSRSGGHKRSFD

SEQ ID NO: 13560 - protein, 16 aa, Artificial Sequence
  Synthetic polypeptide
GILLKGIYPKEMMKRP

SEQ ID NO: 13561 - protein, 767 aa, Artificial Sequence
  Synthetic polypeptide
SQHFGRPRRADHEKEKKEKPKSDKTEEIAEEEETVFPKAKQVKKKAEPSEVDMNSPKSKKAKKKEEPSQNDISPKTKSLRKKKEPIEKKVVSSKTKKVTKNEEPSEEEIDAPKPKKMKKEKEMNGETREKSPKLKNGFPHPEPDCNPSEAASEESNSEIEQEIPVEQKEGAFSNFPISEETIKLLKGRGVTFLFPIQAKTFHHVYSGKDLIAQARTGTGKTFSFAIPLIEKLHGELQDRKRGRAPQVLVLAPTRELANQVSKDFSDITKKLSVACFYGGTPYGGQFERMRNGIDILVGTPGRIKDHIQNGKLDLTKLKHVVLDEVDQMLDMGFADQVEEILSVAYKKDSEDNPQTLLFSATCPHWVFNVAKKYMKSTYEQVDLIGKKTQKTAITVEHLAIKCHWTQRAAVIGDVIRVYSGHQGRTIIFCETKKEAQELSQNSAIKQDAQSLHGDIPQKQREITLKGFRNGSFGVLVATNVAARGLDIPEVDLVIQSSPPKDVESYIHRSGRTGRAGRTGVCICFYQHKEEYQLVQVEQKAGIKFKRIGVPSATEIIKASSKDAIRLLDSVPPTAISHFKQSAEKLIEEKGAVEALAAALAHISGATSVDQRSLINSNVGFVTMILQCSIEMPNISYAWKELKEQLGEEIDSKVKGMVFLKGKLGVCFDVPTASVTEIQEKWHDSRRWQLSVATEQPELEGPREGYGGFRGQREGSRGFRGQRDGNRRFRGQREGSRGPRGQRSGGGNKSNRSQNKGQKRSFSKAFGQ

SEQ ID NO: 13562 - protein, 36 aa, Artificial Sequence
  Synthetic polypeptide
PGAVAHACNPNTLGGRGGRIMRKRKKRSQNLIRLKR

SEQ ID NO: 13563 - protein, 63 aa, Artificial Sequence
  Synthetic polypeptide
SQLSIRLRQEDHLSPGVQGCKPRSDLPISYTSKDIPSCLQREGLNCTGTDRNWEDILLCHPFD

SEQ ID NO: 13564 - protein, 588 aa, Artificial Sequence
  Synthetic polypeptide
AQEFKAASRGVTFLFPIQAKTFHHVYSGKDLIAQARTGTGKTFSFAIPLIEKLHGELQDRKRGRAPQVLVLAPTRELANQVSKDFSDITKKLSVACFYGGTPYGGQFERMRNGIDILVGTPGRIKDHIQNGKLDLTKLKHVVLDEVDQMLDMGFADQVEEILSVAYKKDSEDNPQTLLFSATCPHWVFNVAKKYMKSTYEQVDLIGKKTQKTAITVEHLAIKCHWTQRAAVIGDVIRVYSGHQGRTIIFCETKKEAQELSQNSAIKQDAQSLHGDIPQKQREITLKGFRNGSFGVLVATNVAARGLDIPEVDLVIQSSPPKDVESYIHRSGRTGRAGRTGVCICFYQHKEEYQLVQVEQKAGIKFKRIGVPSATEIIKASSKDAIRLLDSVPPTAISHFKQSAEKLIEEKGAVEALAAALAHISGATSVDQRSLINSNVGFVTMILQCSIEMPNISYAWKELKEQLGEEIDSKVKGMVFLKGKLGVCFDVPTASVTEIQEKWHDSRRWQLSVATEQPELEGPREGYGGFRGQREGSRGFRGQRDGNRRFRGQREGSRGPRGQRSGGGNKSNRSQNKGQKRSFSKAFGQ

SEQ ID NO: 13565 - protein, 29 aa, Artificial Sequence
  Synthetic polypeptide
WLAPVIPAVHQAEAGGSLEPRSSRLQAEE

SEQ ID NO: 13566 - protein, 496 aa, Artificial Sequence
  Synthetic polypeptide
DRARWLTPVIPALWEAENNLGILWSEREEIETAQAYLESSEALYNQYMKEVGSPPLDPTERFLPEEEKLTEQERSKRFEKVYTHNLYYLAQVYQHLEMFEKAAHYCHSTLKRQLEHNAYHPIEWAINAATLSQFYINKLCFMEARHCLSAANVIFGQTGKISATEDTPEAEGEVPELYHQRKGEIARCWIKYCLTLMQNAQLSMQDNIGELDLDKQSELRALRKKELDEEESIRKKAVQFGTGELCDAISAVEEKVSYLRPLDFEEARELFLLGQHYVFEAKEFFQIDGYVTDHIEVVQDHSALFKVLAFFETDMERRCKMHKRRIAMLEPLTVDLNPQYYLLVNRQIQFEIAHAYYDMMDLKVAIADRLRDPDSHIVKKINNLNKSALKYYQLFLDSLRDPNKVFPEHIGEDVLRPAMLAKFRVARLYGKIITADPKKELENLATSLEHYKFIVDYCEKHPEAAQEIEVELELSKEMVSLLPTKMERFRTKMALT

SEQ ID NO: 13567 - protein, 27 aa, Artificial Sequence
  Synthetic polypeptide
SQHFGRLRITWVSCGLKEKKLKLHRLT

SEQ ID NO: 13568 - protein, 128 aa, Artificial Sequence
  Synthetic polypeptide
TSDRLALLQVRRILQQLGLDSTCEDSIVVKEVCGAVSRRAAQLCGAGLAAIVEKRREDQGLEHLRITVGVDGTLYKLHPHFSRILQETVKELAPRCDVTFMLSEDGSGKGAALITAVAKRLQQAQKEN

SEQ ID NO: 13569 - protein, 58 aa, Artificial Sequence
  Synthetic polypeptide
TSVSCFITEIIALLLNPQDCSEDQEGNVLELAIGWPFSRSGGFCSSWAWTARVRTASW

SEQ ID NO: 13570 - protein, 41 aa, Artificial Sequence
  Synthetic polypeptide
AVERALGLEPGQPGLSSGMAASELCVPKHGPSLSGPGLSDH

SEQ ID NO: 13571 - protein, 212 aa, Artificial Sequence
  Synthetic polypeptide
KEHWAWNQDSQVSAQAWRHQSCVSPSTAPASQGLGCLTIDFLNDNIRRGIENYYDDLDFKNIMDFVQKKFKCCGGEDYRDWSKNQYHDCSAPGPLACGVPYTCCIRNTTEVVNTMCGYKTIDKERFSVQDVIYVRGCTNAVIIWFMDNYTIMAGILLGILLPQFLGVLLTLLYITRVEDIIMEHSVTDGLLGPGAKPSVEAAGTGCCLCYPN

SEQ ID NO: 13572 - protein, 169 aa, Artificial Sequence
  Synthetic polypeptide
KEHWAWNQDSQVSAQAWRHQSCVSPSTAPASQGLGCLTIDFLNDNIRRGIENYYDDLDFKNIMDFVQKKFKCCGGEDYRDWSKNQYHDCSAPGPLACGVPYTCCIRNTTEVVNTMCGYKTIDKERFSVQDVIYVRGCTNAVIIWFMDNYTIMAGILLGILLPQITGVSD

SEQ ID NO: 13573 - protein, 97 aa, Artificial Sequence
  Synthetic polypeptide
VRHSIYSAWVTSVNITDCKPPSISGAAHQGPTAPGRMVRILANGEIVQDDDPRVRTTTQPPRGSIPRQSFFNRGHGAPPGGPGPRQQQAGARLGAAQ

SEQ ID NO: 13574 - protein, 18 aa, Artificial Sequence
  Synthetic polypeptide
GLSETQHLLSVGHLCEHH

SEQ ID NO: 13575 - protein, 6 aa, Artificial Sequence
  Synthetic polypeptide
QYSTKA

SEQ ID NO: 13576 - protein, 48 aa, Artificial Sequence
  Synthetic polypeptide
MEYGVLDWILELKKDISGKTSATHVNEFCSSLNNSILPRHNHQQHPGQ

SEQ ID NO: 13577 - protein, 98 aa, Artificial Sequence
  Synthetic polypeptide
KRTLVEKLVQLMSMSSVVHLITVFYQGIITSNTRDNNTGATYPHLNFSIPITVLQPALQQYSQTQDLGGLRELDRAAEPVRVVWRLQRPLAEAPRSKL

SEQ ID NO: 13578 - protein, 36 aa, Artificial Sequence
  Synthetic polypeptide
KRTLVEKLVQLMSMSSVVHLITVFYQGIITSNTRDN

SEQ ID NO: 13579 - protein, 119 aa, Artificial Sequence
  Synthetic polypeptide
KKRKENTKSTLERPGRYHLSQVIKVNVRSTPYRHQIAETLGRTHGFYGIITSNTRDNNTGATYPHLNFSIPITVLQPALQQYSQTQDLGGLRELDRAAEPVRVVWRLQRPLAEAPRSKL

SEQ ID NO: 13580 - protein, 12 aa, Artificial Sequence
  Synthetic polypeptide
LRHWEGHMAFMA

SEQ ID NO: 13581 - protein, 19 aa, Artificial Sequence
  Synthetic polypeptide
DTGKDTWLLWHNHQQHPGQ

SEQ ID NO: 13582 - protein, 57 aa, Artificial Sequence
  Synthetic polypeptide
KKRKENTKSTLERPGRYHLSQVIKVNVRSTPYRHQIAETLGRTHGFYGIITSNTRDN

SEQ ID NO: 13583 - protein, 67 aa, Artificial Sequence
  Synthetic polypeptide
AGCSGSCLESQHFGRLSALPPVERASSSGRWCAGPTPTASGIARGIGQTLSRSAACPPVEEITRTPR

SEQ ID NO: 13584 - protein, 260 aa, Artificial Sequence
  Synthetic polypeptide
WMQWLMPGIPTLWEAECSATCGEGIQQRQVVCRTNANSLGHCEGDRPDTVQVCSLPACGGNHQNSTVRADVWELGTPEGQWVPQSEPLHPINKISSTEPCTGDRSVFCQMEVLDRYCSIPGYHRLCCVSCIKKASGPNPGPDPGPTSLPPFSTPGSPLPGPQDPADAAEPPGKPTGSEDHQHGRATQLPGALDTSSPGTQHPFAPETPIPGASWSISPTTPGGLPWGWTQTPTPVPEDKGQPGEDLRHPGTSLPAASPVT

SEQ ID NO: 13585 - protein, 938 aa, Artificial Sequence
  Synthetic polypeptide
VCPKKNLAEKSSDEFPIPTGTDSGSEVLPDSFPSAPAEPLPYFLQEPQDAYIVKNKPVELRCRAFPATQIYFKCNGEWVSQNDHVTQEGLDEATGLRVREVQIEVSRQQVEELFGLEDYWCQCVAWSSAGTTKSRRAYVRIAYLRKNFDQEPLGKEVPLDHEVLLQCRPPEGVPVAEVEWLKNEDVIDPTQDTNFLLTIDHNLIIRQARLSDTANYTCVAKNIVAKRRSTTATVIVYVNGGWSSWAEWSPCSNRCGRGWQKRTRTCTNPAPLNGGAFCEGQAFQKTACTTICPVDGAWTEWSKWSACSTECAHWRSRECMAPPPQNGGRDCSGTLLDSKNCTDGLCMQNKKTLSDPNSHLLEASGDAALYAGLVVAIFVVVAILMAVGVVVYRRNCRDFDTDITDSSAALTGGFHPVNFKTARPSNPQLLHPSVPPDLTASAGIYRGPVYALQDSTDKIPMTNSPLLDPLPSLKVKVYSSSTTGSGPGLADGADLLGVLPPGTYPSDFARDTHFLHLRSASLGSQQLLGLPRDPGSSVSGTFGCLGGRLSIPGTGVSLLVPNGAIPQGKFYEMYLLINKAESTLPLSEGTQTVLSPSVTCGPTGLLLCRPVILTMPHCAEVSARDWIFQLKTQAHQGHWEEVVTLDEETLNTPCYCQLEPRACHILLDQLGTYVFTGESYSRSAVKRLQLAVFAPALCTSLEYSLRVYCLEDTPVALKEVLELERTLGGYLVEEPKPLMFKDSYHNLRLSLHDLPHAHWRSKLLAKYQEIPFYHIWSGSQKALHCTFTLERHSLASTELTCKICVRQVEGEGQIFQLHTTLAETPAGSLDTLCSAPGSTVTTQLGPYAFKIPLSIRQKICNSLDAPNSRGNDWRMLAQKLSMDRYLNYFATKASPTGVILDLWEALQQDDGDLNSLASALEEMGKSEMLVAVATDGDC

SEQ ID NO: 13586 - protein, 61 aa, Artificial Sequence
  Synthetic polypeptide
VRKAFLTIRSVRRRTWLRKAVMNSPSPQALILAARCSLTPSRQRQQSRCPTSCRSHRTPTL

SEQ ID NO: 13587 - protein, 7 aa, Artificial Sequence
  Synthetic polypeptide
IPHPHRH

SEQ ID NO: 13588 - protein, 927 aa, Artificial Sequence
  Synthetic polypeptide
VCPKKNLAEKSSDEFPIPTGTDSGSEVLPDSFPSAPAEPLPYFLQEPQDAYIVKNKPVELRCRAFPATQIYFKCNGEWVSQNDHVTQEGLDEATGLRVREVQIEVSRQQVEELFGLEDYWCQCVAWSSAGTTKSRRAYVRIAYLRKNFDQEPLGKEVPLDHEVLLQCRPPEGVPVAEVEWLKNEDVIDPTQDTNFLLTIDHNLIIRQARLSDTANYTCVAKNIVAKRRSTTATVIVYVNGGWSSWAEWSPCSNRCGRGWQKRTRTCTNPAPLNGGAFCEGQAFQKTACTTICPVDGAWTEWSKWSACSTECAHWRSRECMAPPPQNGGRDCSGTLLDSKNCTDGLCMQMLEASGDAALYAGLVVAIFVVVAILMAVGVVVYRRNCRDFDTDITDSSAALTGGFHPVNFKTARPSNPQLLHPSVPPDLTASAGIYRGPVYALQDSTDKIPMTNSPLLDPLPSLKVKVYSSSTTGSGPGLADGADLLGVLPPGTYPSDFARDTHFLHLRSASLGSQQLLGLPRDPGSSVSGTFGCLGGRLSIPGTGVSLLVPNGAIPQGKFYEMYLLINKAESTLPLSEGTQTVLSPSVTCGPTGLLLCRPVILTMPHCAEVSARDWIFQLKTQAHQGHWEEVVTLDEETLNTPCYCQLEPRACHILLDQLGTYVFTGESYSRSAVKRLQLAVFAPALCTSLEYSLRVYCLEDTPVALKEVLELERTLGGYLVEEPKPLMFKDSYHNLRLSLHDLPHAHWRSKLLAKYQEIPFYHIWSGSQKALHCTFTLERHSLASTELTCKICVRQVEGEGQIFQLHTTLAETPAGSLDTLCSAPGSTVTTQLGPYAFKIPLSIRQKICNSLDAPNSRGNDWRMLAQKLSMDRYLNYFATKASPTGVILDLWEALQQDDGDLNSLASALEEMGKSEMLVAVATDGDC

SEQ ID NO: 13589 - protein, 751 aa, Artificial Sequence
  Synthetic polypeptide
CYAIKEKYTDWTEFLIRDLTGSRTAPANLLEGPLRGKGPIDLITVGSLIELQDSQNPFQYWIVSVIENVGGRLRLRYVGLEDTESYDQWLFYLDYRLRPVGWCQENKYRMDPPSEIYPLKMASEWKCTLEKSLIDAAKFPLPMEVFKDHADLRSHFFTVGMKLETVNMCEPFYISPASVTKVFNNHFFQVTIDDLRPEPSKLSMLCHADSLGILPVQWCLKNGVSLTPPKGYSGQDFDWADYHKQHGAQEAPPFCFRNTSFSRGFTKNMKLEAVNPRNPGELCVASVVSVKGRLMWLHLEGLQTPVPEVIVDVESMDIFPVGWCEANSYPLTAPHKTVSQKKRKIAVVQPEKQLPPTVPVKKIPHDLCLFPHLDTTGTVNGKYCCPQLFINHRCFSGPYLNKGRIAELPQSVGPGKCVLVLKEVLSMIINAAYKPGRVLRELQLVEDPHWNFQEETLKAKYRGKTYRAVVKIVRTSDQVANFCRRVCAKLECCPNLFSPVLISENCPENCSIHTKTKYTYYYGKRKKISKPPIGESNPDSGHPKPARRRKRRKSIFVQKKRRSSAVDFTAGSGEESEEEDADAMDDDTASEETGSELRDDQTDTSSAEVPSARPRRAVTLRSGSEPVRRPPPERTRRGRGAPAASSAEEGEKCPPTKPEGTEDTKQEEEERLVLESNPLEWTVTDVVRFIKLTDCAPLAKIFQEQDIDGQALLLLTLPTVQECMELKLGPAIKLCHQIERVKVAFYAQYAN

SEQ ID NO: 13590 - protein, 20 aa, Artificial Sequence
  Synthetic polypeptide
ANVMQSKRSTQTGQNFSYVT

SEQ ID NO: 13591 - protein, 18 aa, Artificial Sequence
  Synthetic polypeptide
LMLCNQREVHRLDRISHT

SEQ ID NO: 13592 - protein, 43 aa, Artificial Sequence
  Synthetic polypeptide
CYAIKEKYTDWTEFLIRDLTGSRTAPANLLEGVCIVVIHLMYL

SEQ ID NO: 13593 - protein, 28 aa, Artificial Sequence
  Synthetic polypeptide
GVPPSGSHPVWEVRSVSARPAAPSGREL

SEQ ID NO: 13594 - protein, 74 aa, Artificial Sequence
  Synthetic polypeptide
GASPPGQPPRLGGSSSRPGPWTERMHQGLGSVVPECEDGVRLRGSEALPADRLEQANSEIPSLRHMQRRCHRSW

SEQ ID NO: 13595 - protein, 540 aa, Artificial Sequence
  Synthetic polypeptide
EVRSPSLRQPPRLGSEERLRQASRPVWEGALAGPVLGLKECTRGSAVWCQNVKTASDCGAVKHCLQTVWNKPTVKSLPCDICKDVVTAAGDMLKDNATEEEILVYLEKTCDWLPKPNMSASCKEIVDSYLPVILDIIKGEMSRPGEVCSALNLCESLQKHLAELNHQKQLESNKIPELDMTEVVAPFMANIPLLLYPQDGPRSKPQPKDNGDVCQDCIQMVTDIQTAVRTNSTFVQALVEHVKEECDRLGPGMADICKNYISQYSEIAIQMMMHMQPKEICALVGFCDEVKEMPMQTLVPAKVASKNVIPALELVEPIKKHEVPAKSDVYCEVCEFLVKEVTKLIDNNKTEKEILDAFDKMCSKLPKSLSEECQEVVDTYGSSILSILLEEVSPELVCSMLHLCSGTRLPALTVHVTQPKDGGFCEVCKKLVGYLDRNLEKNSTKQEILAALEKGCSFLPDPYQKQCDQFVAEYEPVLIEILVEVMDPSFVCLKIGACPSAHKPLLGTEKCIWGPSYWCQNTETAAQCNAVEHCKRHVWN

SEQ ID NO: 13596 - protein, 542 aa, Artificial Sequence
  Synthetic polypeptide
EVRSPSLRQPPRLGSEERLRQASRPVWEGALAGPVLGLKECTRGSAVWCQNVKTASDCGAVKHCLQTVWNKPTVKSLPCDICKDVVTAAGDMLKDNATEEEILVYLEKTCDWLPKPNMSASCKEIVDSYLPVILDIIKGEMSRPGEVCSALNLCESLQKHLAELNHQKQLESNKIPELDMTEVVAPFMANIPLLLYPQDGPRSKPQPKDNGDVCQDCIQMVTDIQTAVRTNSTFVQALVEHVKEECDRLGPGMADICKNYISQYSEIAIQMMMHMLQQPKEICALVGFCDEVKEMPMQTLVPAKVASKNVIPALELVEPIKKHEVPAKSDVYCEVCEFLVKEVTKLIDNNKTEKEILDAFDKMCSKLPKSLSEECQEVVDTYGSSILSILLEEVSPELVCSMLHLCSGTRLPALTVHVTQPKDGGFCEVCKKLVGYLDRNLEKNSTKQEILAALEKGCSFLPDPYQKQCDQFVAEYEPVLIEILVEVMDPSFVCLKIGACPSAHKPLLGTEKCIWGPSYWCQNTETAAQCNAVEHCKRHVWN

SEQ ID NO: 13597 - protein, 8 aa, Artificial Sequence
  Synthetic polypeptide
PPEDGSWG

SEQ ID NO: 13598 - protein, 201 aa, Artificial Sequence
  Synthetic polypeptide
TSDLQKMDHGVDSSIFQNPKKLHLTIGMLVLLSEEEIQQTCEMLQQCKEEFINDISGGKPLEVEMAGIEYMNDDPGMVDVLYAKVHMKDGSNRLQELVDRVLERFQASGLIVKEWNSVKLHATVMNTLFRKDPNAEGRYNLYTAEGKYIFKERESFDGRNILKLFENFYFGSLKLNSIHISQRFTVDSFGNYASCGQIDFS

SEQ ID NO: 13599 - protein, 50 aa, Artificial Sequence
  Synthetic polypeptide
PLEARKLKEVICPGASARNAALLTHVRLLTSRRWIMGLTAAFSRILKSFI

SEQ ID NO: 13600 - protein, 216 aa, Artificial Sequence
  Synthetic polypeptide
TSDLQKMDHGVDSSIFQNPKKLHLTIGMLVLLSEEEIQQTCEMLQQCKEEFINDISGGKPLEVEMAGIEYMNDDPGMVDVLYAKVHMKDGSNRLQELVDRVLERFQASGLIVKEWNSVKLHATVMNTLFRKDPNAEGRYNLYTAEGKYIFKERESFDGRNILKSFALLPRLEYNDAISAHCNLCLPGSSDSPASASQVAGITGVSDAYSQSLPGKS

SEQ ID NO: 13601 - protein, 204 aa, Artificial Sequence
  Synthetic polypeptide
TSDLQKMDHGVDSSIFQNPKKLHLTIGMLVLLSEEEIQQTCEMLQQCKEEFINDISGGKPLEVEMAGIEYMNDDPGMVDVLYAKVHMKDGSNRLQELVDRVLERFQASGLIVKEWNSVKLHATVMNTLFRKDPNAEGRYNLYTAEGKYIFKERESFDGRNILKSFALLPRLEYNDAISAHCNLCLPGSSDSPASASQVAGITVV

SEQ ID NO: 13602 - protein, 123 aa, Artificial Sequence
  Synthetic polypeptide
TSDLQKMDHGVDSSIFQNPKKLHLTIGMLVLLSEEEIQQTCEMLQQCKEEFIKLQELVDRVLERFQASGLIVKEWNSVKLHATVMNTLFRKDPNAEGRYNLYTAEGKYIFKERESFDGRNILK

SEQ ID NO: 13603 - protein, 49 aa, Artificial Sequence
  Synthetic polypeptide
TSDLQKMDHGVDSSIFQNPKKLHLTIGMLVLLSEEEIQQTCEMLQQCKE

SEQ ID NO: 13604 - protein, 347 aa, Artificial Sequence
  Synthetic polypeptide
ICQYLPLFYSCLYYLLQEHVVQVCSLGAIGHTICPRYVVGCTISVCVHQRIASWQNLGAVYCSTVVPSDDVTVVYQNGLPVISVRLPSRRERCQFTLKPISDSVGVFLRQLQEEDRGIDRVAIYSPDGVRVAASTGIDLLLLDDFKLVINDLTYHVRPPKRDLLSHENAATLNDVKTLVQQLYTTLCIEQHQLNKERELIERLEDLKEQLAPLEKVRIEISRKAEKRTTLVLWGGLAYMATQFGILARLTWWEYSWDIMEPVTYFITYGSAMAMYAYFVMTRQEYVYPEARDRQYLLFFHKGAKKSRFDLEKYNQLKDAIAQAEMDLKRLRDPLQVHLPLRQIGEKD

SEQ ID NO: 13605 - protein, 41 aa, Artificial Sequence
  Synthetic polypeptide
AVPSQFVYTRGSLPGRIWELFIAALLCPLMMLQWFIKMGYL

SEQ ID NO: 13606 - protein, 32 aa, Artificial Sequence
  Synthetic polypeptide
ICSRLYHLSLCTPEDRFLAEFGSCLLQHCCAL

SEQ ID NO: 13607 - protein, 326 aa, Artificial Sequence
  Synthetic polypeptide
ICQYLPLFYSCLYYLLQEHVVQVCSLGAIGHTICPRYVVGCTISVCVHQRIASWQNLGAVYCSTVVPSDDVTVVYQNGLPVISVRLPSRRERCQFTLKPISDSVGVFLRQLQEEDRGIDRVAIYSPDGVRVAASTGIDLLLLDDFKLVINDLTYHVRPPKRVEMGFCHVGQNGFELLTSSYLPASASQSAEIIAVRIEISRKAEKRTTLVLWGGLAYMATQFGILARLTWWEYSWDIMEPVTYFITYGSAMAMYAYFVMTRQEYVYPEARDRQYLLFFHKGAKKSRFDLEKYNQLKDAIAQAEMDLKRLRDPLQVHLPLRQIGEKD

SEQ ID NO: 13608 - protein, 91 aa, Artificial Sequence
  Synthetic polypeptide
ICQYLPLFYSCLYYLLQEHVVQVCSLGAIGHTICPRYVVGCTISVCVHQRIASWQNLGAVYCSTVVPSDGECYSGLSKWVTCDICEATIPA

SEQ ID NO: 13609 - protein, 160 aa, Artificial Sequence
  Synthetic polypeptide
AVPSQFVYTRGSLPGRIWELFIAALLCPLMVNVTVVYQNGLPVISVRLPSRRERCQFTLKPISDSVGVFLRQLQEEDRGIDRVAIYSPDGVRVAASTGIDLLLLDDFKLVINDLTYHVRPPKRDLLSHENAATLNDVKTLVQQLYTTLCIEQHQLNKERE

SEQ ID NO: 13610 - protein, 40 aa, Artificial Sequence
  Synthetic polypeptide
KVGKAERNKEQQKWNMFIQKPETDNTYYFSIKEPKSHVLT

SEQ ID NO: 13611 - protein, 139 aa, Artificial Sequence
  Synthetic polypeptide
DILVVKLQKPKPNGKILKAAKERKKFAFKGVPVRLNADFSIAAMKAKDNGIVSSISRKKITVILDFYTQQKISFQNKDIFRQRICHHQICTKGDTERCSLGRRKIITREKSEKQKGIKSNKNGICLSRSQRQTILTIFP

SEQ ID NO: 13612 - protein, 69 aa, Artificial Sequence
  Synthetic polypeptide
RATKMEYVYPEARDRQYLLFFHKGAKKSRFDLEKYNQLKDAIAQAEMDLKRLRDPLQVHLPLRQIGEKD

SEQ ID NO: 13613 - protein, 150 aa, Artificial Sequence
  Synthetic polypeptide
PTWRNPVSTKKYKKISWAWWHMTVIPATRQAEVANYGVGGQYEPHFDFARKDEPDAFKELGTGNRIATWLFYMSDVSAGGATVFPEVGASVWPKKGTAVFWYNLFASGEGDYSTRHAACPVLVGNKWVSNKWLHERGQEFRRPCTLSELE

SEQ ID NO: 13614 - protein, 8 aa, Artificial Sequence
  Synthetic polypeptide
FQLLGRLR

SEQ ID NO: 13615 - protein, 9 aa, Artificial Sequence
  Synthetic polypeptide
LMGTRSKCH

SEQ ID NO: 13616 - protein, 489 aa, Artificial Sequence
  Synthetic polypeptide
WELDQNATEKVQTMFTAIDELLYEQKLSVHTKSLQEECQQWTASFPHLRILGRQIITPSEGYRLYPRSPSAVSASYETTLSQERDSTIFGIRGKKLHFSSSYAHKASSIAKSSSFCSMERDEEDSIIVSEGIIEEYLAFDHIDIEEGFHGKKSEAATEKQKLGYPPIAPFYCMKEDVLAYVFDSVWCKVVSCMEQLTRSHWEGFASDDESNVAVTRPDSESSCVLSELHPLVLPRVPQSKVLYITSNPMSLCQASRHQPNVNDLLVHGMPLQPRNLSLMDKLLDLDDKLLMRPGSSTILSTRNWPNRAVEFSTSSLSYTVQSTRRRNPPPRTLHPISTSHSCAETPRSVEEILRGARVPVAPDSLSSPSPTPLSRNNLLPPIGTAEVEHVSTVGPQRQMKPHGDSSRAQSAVVDEPNYQQPQERLLLPDFFPRPNTTQSFLLDTQYRRSCAVEYPHQARPGRGSAGPQLHGSTKSQSGGRPVSRTRQGP

SEQ ID NO: 13617 - protein, 39 aa, Artificial Sequence
  Synthetic polypeptide
QGRGREENQKLINGNSIKMPLKKSRQCSQPLMNSCMSRS

SEQ ID NO: 13618 - protein, 435 aa, Artificial Sequence
  Synthetic polypeptide
WELDQNATEKVQTMFTAIDELLYEQKLSVHTKSLQEECQQWTASFPHLRILGRQIITPSEGYRLYPRSPSAVSASYETTLSQERDSTIFGIRGKKLHFSSSYAHKASSIAKSSSFCSMERDEEDSIIVSEGIIEEYLAFDHIDIEEGFHGKKSEAATEKQKLGYPPIAPFYCMKEDVLAYVFDSVWCKVVSCMEQLTRSHWEGFASDDESNVAVTRPDSESSCVLSELHPLVLPRVPQSKMSLCQASRHQPNVNDLLVHGMPLQPRNLSLMDKLLDLDDKLLMRPGSSTILSTRNWPNRAVEFSTSSLSYTVQSTRRRNPPPRTLHPISTSHSCAETPRSVEEILRGARVPVAPDSLSSPSPTPLSRNNLLPPIGTAEVEHVSTVGPQRQMKPHGDSSRAQSAVVDEPNYQQPQERLLLPDFFPRPNTTQSFLVE

SEQ ID NO: 13619 - protein, 21 aa, Artificial Sequence
  Synthetic polypeptide
SPMLEIWYKGKEVTFFIFLCS

SEQ ID NO: 13620 - protein, 10 aa, Artificial Sequence
  Synthetic polypeptide
IVIPNARDLV

SEQ ID NO: 13621 - protein, 22 aa, Artificial Sequence
  Synthetic polypeptide
GQEFDTSLGNIARPPSLQNLPQ

SEQ ID NO: 13622 - protein, 35 aa, Artificial Sequence
  Synthetic polypeptide
QDPRLYKTCHSDSGHSRNYPTSCQLRCYKRCRNSS

SEQ ID NO: 13623 - protein, 353 aa, Artificial Sequence
  Synthetic polypeptide
FQHFGRPRQGDHLRPRIRYQPGQHSKTPVSTKPATVTQVTQGTIRPAANFDAIRDAEILRKAMKGFGTDEQAIVDVVANRSNDQRQKIKAAFKTSYGKDLIKDLKSELSGNMEELILALFMPPTYYDAWSLRKAMQGAGTQERVLIEILCTRTNQEIREIVRCYQSEFGRDLEKDIRSDTSGHFERLLVSMCQGNRDENQSINHQMAQEDAQRLYQAGEGRLGTDESCFNMILATRSFPQLRATMEAYSRMANRDLLSSVSREFSGYVESGLKTILQCALNRPAFFAERLYYAMKGAGTDDSTLVRIVVTRSEIDLVQIKQMFAQMYQKTLGTMIAGDTSGDYRRLLLAIVGQ

SEQ ID NO: 13624 - protein, 77 aa, Artificial Sequence
  Synthetic polypeptide
FTSVIPAILEAKVRGLHEPRSLRPAWTTWESLTSFSVVVKKCFHLTLSAVLWQRLSRMNNVSSWELWMMLQSALKTS

SEQ ID NO: 13625 - protein, 9 aa, Artificial Sequence
  Synthetic polypeptide
DQPGQHGNL

SEQ ID NO: 13626 - protein, 1615 aa, Artificial Sequence
  Synthetic polypeptide
AQEFETSLDNMGIFNQFQCSSEKVLPSDTLRSALAKTFQDEQRFQLGIMDDAAECFENLLMRIHFHIADETKEDICTAQHCISHQKFAMTLFEQCVCTSCGATSDPLPFIQMVHYISTTSLCNQAICMLERREKPSPSMFGELLQNASTMGDLRNCPSNCGERIRIRRVLMNAPQIITIGLVWDSDHSDLAEDVIHSLGTCLKLGDLFFRVTDDRAKQSELYLVGMICYYGKHYSTFFFQTKIRKWMYFDDAHVKEIGPKWKDVVTKCIKGHYQPLLLLYADPQGTPVSTQDLPPQAEFQSYSRTCYDSEDSGREPSISSDTRTDSSTESYPYKHSHHESVVSHFSSDSQGTVIYNVENDSMSQSSRDTGHLTDSECNQKHTSKKGSLIERKRSSGRVRRKGDEPQASGYHSEGETLKEKQAPRNASKPSSSTNRLRDFKETVSNMIHNRPSLASQTNVGSHCRGRGGDQPDKKPPRTLPLHSRDWEIESTSSESKSSSSSKYRPTWRPKRESLNIDSIFSKDKRKHCGYTQLSPFSEDSAKEFIPDEPSKPPSYDIKFGGPSPQYKRWGPARPGSHLLEQHPRLIQRMESGYESSERNSSSPVSLDAALPESSNVYRDPSAKRSAGLVPSWRHIPKSHSSSILEVDSTASMGGWTKSQPFSGEEISSKSELDELQEEVARRAQEQELRRKREKELEAAKGFNPHPSRFMDLDELQNQGRSDGFERSLQEAESVFEESLHLEQKGDCAAALALCNEAISKLRLALHGASCSTHSRALVDKKLQISIRKARSLQDRMQQQQSPQQPSQPSACLPTQAGTLSQPTSEQPIPLQVLLSQEAQLESGMDTEFGASSFFHSPASCHESHSSLSPESSAPQHSSPSRSALKLLTSVEVDNIEPSAFHRQGLPKAPGWTEKNSHHSWEPLDAPEGKLQGSRCDNSSCSKLPPQEGRGIAQEQLFQEKKDPANPSPVMPGIATSERGDEHSLGCSPSNSSAQPSLPLYRTCHPIMPVASSFVLHCPDPVQKTNQCLQGQSLKTSLTLKVDRGSEETYRPEFPSTKGLVRSLAEQFQRMQGVSMRDSTGFKDRSLSGSLRKNSSPSDSKPPFSQGQEKGHWPWAKQQSSLEGGDRPLSWEESTEHSSLALNSGLPNGETSSGGQPRLAEPDIYQEKLSQVRDVRSKDLGSSTDLGTSLPLDSWVNITRFCDSQLKHGAPRPGMKSSPHDSHTCVTYPERNHILLHPHWNQDTEQETSELESLYQASLQASQAGCSGWGQQDTAWHPLSQTGSADGMGRRLHSAHDPGLSKTSTAEMEHGLHEARTVRTSQATPCRGLSRECGEDEQYSAENLRRISRSLSGTVVSEREEAPVSSHSFDSSNVRKPLETGHRCSSSSSLPVIHDPSVFLLGPQLYLPQPQFLSPDVLMPTMAGEPNRLPGTSRSVQQFLAMCDRGETSQGAKYTGRTLNYQSLPHRSRTDNSWAPWSETNQHIGTRFLTTPGCNPQLTYTATLPERSKGLQVPHTQSWSDLFHSPSHPPIVHPVYPPSSSLHVPLRSAWNSDPVPGSRTPGPRRVDMPPDDDWRQSSYASHSGHRRTVGEGFLFVLSDAPRREQIRARVLQHSQW

SEQ ID NO: 13627 - protein, 78 aa, Artificial Sequence
  Synthetic polypeptide
FTSVIPAILEAKVRGLHEPRSLRPAWTTWESLTSFSVVVKKCFHLTLSAVLWQRLSRMNNVSSWELWMMLQSAFCFSE

SEQ ID NO: 13628 - protein, 1465 aa, Artificial Sequence
  Synthetic polypeptide
AQEFETSLDNMGIFNQFQCSSEKVLPSDTLRSALAKTFQDEQRFQLGIMDDAAECFLFFRVTDDRAKQSELYLVGMICYYGKHYSTFFFQTKIRKWMYFDDAHVKEIGPKWKDVVTKCIKGHYQPLLLLYADPQGTPVSTQDLPPQAEFQSYSRTCYDSEDSGREPSISSDTRTDSSTESYPYKHSHHESVVSHFSSDSQGTVIYNVENDSMSQSSRDTGHLTDSECNQKHTSKKGSLIERKRSSGRVRRKGDEPQASGYHSEGETLKEKQAPRNASKPSSSTNRLRDFKETVSNMIHNRPSLASQTNVGSHCRGRGGDQPDKKPPRTLPLHSRDWEIESTSSESKSSSSSKYRPTWRPKRESLNIDSIFSKDKRKHCGYTQLSPFSEDSAKEFIPDEPSKPPSYDIKFGGPSPQYKRWGPARPGSHLLEQHPRLIQRMESGYESSERNSSSPVSLDAALPESSNVYRDPSAKRSAGLVPSWRHIPKSHSSSILEVDSTASMGGWTKSQPFSGEEISSKSELDELQEEVARRAQEQELRRKREKELEAAKGFNPHPSRFMDLDELQNQGRSDGFERSLQEAESVFEESLHLEQKGDCAAALALCNEAISKLRLALHGASCSTHSRALVDKKLQISIRKARSLQDRMQQQQSPQQPSQPSACLPTQAGTLSQPTSEQPIPLQVLLSQEAQLESGMDTEFGASSFFHSPASCHESHSSLSPESSAPQHSSPSRSALKLLTSVEVDNIEPSAFHRQGLPKAPGWTEKNSHHSWEPLDAPEGKLQGSRCDNSSCSKLPPQEGRGIAQEQLFQEKKDPANPSPVMPGIATSERGDEHSLGCSPSNSSAQPSLPLYRTCHPIMPVASSFVLHCPDPVQKTNQCLQGQSLKTSLTLKVDRGSEETYRPEFPSTKGLVRSLAEQFQRMQGVSMRDSTGFKDRSLSGSLRKNSSPSDSKPPFSQGQEKGHWPWAKQQSSLEGGDRPLSWEESTEHSSLALNSGLPNGETSSGGQPRLAEPDIYQEKLSQVRDVRSKDLGSSTDLGTSLPLDSWVNITRFCDSQLKHGAPRPGMKSSPHDSHTCVTYPERNHILLHPHWNQDTEQETSELESLYQASLQASQAGCSGWGQQDTAWHPLSQTGSADGMGRRLHSAHDPGLSKTSTAEMEHGLHEARTVRTSQATPCRGLSRECGEDEQYSAENLRRISRSLSGTVVSEREEAPVSSHSFDSSNVRKPLETGHRCSSSSSLPVIHDPSVFLLGPQLYLPQPQFLSPDVLMPTMAGEPNRLPGTSRSVQQFLAMCDRGETSQGAKYTGRTLNYQSLPHRSRTDNSWAPWSETNQHIGTRFLTTPGCNPQLTYTATLPERSKGLQVPHTQSWSDLFHSPSHPPIVHPVYPPSSSLHVPLRSAWNSDPVPGSRTPGPRRVDMPPDDDWRQSSYASHSGHRRTVGEGFLFVLSDAPRREQIRARVLQHSQW

SEQ ID NO: 13629 - protein, 675 aa, Artificial Sequence
  Synthetic polypeptide
AQEFETSLDNMGIFNQFQCSSEKVLPSDTLRSALAKTFQDEQRFQLGIMDDAAECFENLLMRIHFHIADETKEDICTAQHCISHQKFAMTLFEQCVCTSCGATSDPLPFIQMVHYISTTSLCNQAICMLERREKPSPSMFGELLQNASTMGDLRNCPSNCGERIRIRRVLMNAPQIITIGLVWDSDHSDLAEDVIHSLGTCLKLGDLFFRVTDDRAKQSELYLVGMICYYGKHYSTFFFQTKIRKWMYFDDAHVKEIGPKWKDVVTKCIKGHYQPLLLLYADPQGTPVSTQDLPPQAEFQSYSRTCYDSEDSGREPSISSDTRTDSSTESYPYKHSHHESVVSHFSSDSQGTVIYNVENDSMSQSSRDTGHLTDSECNQKHTSKKGSLIERKRSSGRVRRKGDEPQASGYHSEGETLKEKQAPRNASKPSSSTNRLRDFKETVSNMIHNRPSLASQTNVGSHCRGRGGDQPDKKPPRTLPLHSRDWEIESTSSESKSSSSSKYRPTWRPKRESLNIDSIFSKDKRKHCGYTQLSPFSEDSAKEFIPDEPSKPPSYDIKFGGPSPQYKRWGPARPGSHLLEQHPRLIQRMESGYESSERNSSSPVSLDAALPESSNVYRYCLAFEQQHCLLQQCEPPTWGFQAWLRQVEGWPLLLSLCALSTSYNNSTLCWKNRGT

SEQ ID NO: 13630 - protein, 74 aa, Artificial Sequence
  Synthetic polypeptide
AQEFETSLDNMGIFNQFQCSSEKVLPSDTLRSALAKTFQDEQRFQLGIMDDAAECFLFFRVTDDRAKQSELYLV

SEQ ID NO: 13631 - protein, 84 aa, Artificial Sequence
  Synthetic polypeptide
AQEFETSLDNMGIFNQFQCSSEKVLPSDTLRSALAKTFQDEQRFQLGIMDDAAECFENLLMRIHFHIADETKEDICTAQHCISH

SEQ ID NO: 13632 - protein, 24 aa, Artificial Sequence
  Synthetic polypeptide
WDLGQVSFKCDLGDTSSYHTKRCR

SEQ ID NO: 13633 - protein, 529 aa, Artificial Sequence
  Synthetic polypeptide
GTLGKSVLSVTLEIPHHITQRDADRSLSIPDEQLHSFAVSTVHITKNRNGGGSLNNYSSSIPSTPSTSQEDPQFSVPPTANTPTPVCKRSMRWSNLFTSEKGSHPDKERKAPENHADTIGSGRAIPIKQGMLLKRSGKWLKTWKKKYVTLCSNGVLTYYSSLGDYMKNIHKKEIDLRTSTIKVPGKWPSLATSACAPISSSKSNGLSKDMDTGLGDSICFSPSISSTTSPKLNPPPSPHANKKKHLKKKSTNNFMIVSATGQTWHFEATTYEERDAWVQAIQSQILASLQSCESSKSKSQLTSQSEAMALQSIQNMRGNAHCVDYETQNPKWASLNLGVLMCIECSGIHRSLGTRLSRVRSLELDDWPVELRKVMSSIGNDLANSIWEGSSQGQTKPSVKSTREEKERWIRSKYEEKLFLAPLPCTELSLGQHLLRATADEDLQTAILLLAHGSREEVNETCGEGDGCTALHLACRKGNVVLAQLLIWYGVDVMARDAHGNTALTYARQASSQECINVLLQYGCPDECV

SEQ ID NO: 13634 - protein, 38 aa, Artificial Sequence
  Synthetic polypeptide
DLMVLYMFDSCSFTCCHSLCGHHVSRTCPSAMIRQPRV

SEQ ID NO: 13635 - protein, 66 aa, Artificial Sequence
  Synthetic polypeptide
QLLLHMLPLSVRPPCKSDLPFCHDSSASSLTSNRGRCVPLNLRSMRQELGTGWQERPWLLLCSLLR

SEQ ID NO: 13636 - protein, 28 aa, Artificial Sequence
  Synthetic polypeptide
DLMVLYMFDSCSFTCCHSLCGHHRQPRV

SEQ ID NO: 13637 - protein, 695 aa, Artificial Sequence
  Synthetic polypeptide
WFYTCLTVAPSHVATLCAATIVSLEFDQQQGSVCPSESEIYEAGAGDRMAGAPMAAAVQPAEVTVEVGEDLHMHHIRDQEMPEALEFSLSANPEASTIFQRNSQTDALEFNPSANPEASTIFQRNSQTDVVEIRRSNCTNHVSTERFSQQYSSCSTIFLDDSTASQHYLTMTIISVTLEIPHHITQRDADRSLSIPDEQLHSFAVSTVHITKNRNGGGSLNNYSSSIPSTPSTSQEDPQFSVPPTANTPTPVCKRSMRWSNLFTSEKGSHPDKERKAPENHADTIGSGRAIPIKQGMLLKRSGKWLKTWKKKYVTLCSNGVLTYYSSLGDYMKNIHKKEIDLRTSTIKVPGKWPSLATSACAPISSSKSNGLSKDMDTGLGDSICFSPSISSTTSPKLNPPPSPHANKKKHLKKKSTNNFMIVSATGQTWHFEATTYEERDAWVQAIQSQILASLQSCESSKSKSQLTSQSEAMALQSIQNMRGNAHCVDYETQNPKWASLNLGVLMCIECSGIHRSLGTRLSRVRSLELDDWPVELRKVMSSIGNDLANSIWEGSSQGQTKPSVKSTREEKERWIRSKYEEKLFLAPLPCTELSLGQHLLRATADEDLQTAILLLAHGSREEVNETCGEGDGCTALHLACRKGNVVLAQLLIWYGVDVMARDAHGNTALTYARQASSQECINVLLQYGCPDECV

SEQ ID NO: 13638 - protein, 56 aa, Artificial Sequence
  Synthetic polypeptide
QLLLHMLPLSVRPPSSASSLTSNRGRCVPLNLRSMRQELGTGWQERPWLLLCSLLR

SEQ ID NO: 13639 - protein, 672 aa, Artificial Sequence
  Synthetic polypeptide
WFYTCLTVAPSHVATLCAATIVSLEFDQQQGSVCPSESEIYEAGAGDRMAGAPMAAAVQPAEVTVEVGEDLHMHHIRDQEMPEALEFNPSANPEASTIFQRNSQTDVVEIRRSNCTNHVSTERFSQQYSSCSTIFLDDSTASQHYLTMTIISVTLEIPHHITQRDADRSLSIPDEQLHSFAVSTVHITKNRNGGGSLNNYSSSIPSTPSTSQEDPQFSVPPTANTPTPVCKRSMRWSNLFTSEKGSHPDKERKAPENHADTIGSGRAIPIKQGMLLKRSGKWLKTWKKKYVTLCSNGVLTYYSSLGDYMKNIHKKEIDLRTSTIKVPGKWPSLATSACAPISSSKSNGLSKDMDTGLGDSICFSPSISSTTSPKLNPPPSPHANKKKHLKKKSTNNFMIVSATGQTWHFEATTYEERDAWVQAIQSQILASLQSCESSKSKSQLTSQSEAMALQSIQNMRGNAHCVDYETQNPKWASLNLGVLMCIECSGIHRSLGTRLSRVRSLELDDWPVELRKVMSSIGNDLANSIWEGSSQGQTKPSVKSTREEKERWIRSKYEEKLFLAPLPCTELSLGQHLLRATADEDLQTAILLLAHGSREEVNETCGEGDGCTALHLACRKGNVVLAQLLIWYGVDVMARDAHGNTALTYARQASSQECINVLLQYGCPDECV

SEQ ID NO: 13640 - protein, 9 aa, Artificial Sequence
  Synthetic polypeptide
AKILDSLLG

SEQ ID NO: 13641 - protein, 1069 aa, Artificial Sequence
  Synthetic polypeptide
NTRGNDEPRYWTVCWVENACTKLVQAAQMLQSDPYSVPARDYLIDGSRGILSGTSDLLLTFDEAEVRKIIRVCKGILEYLTVAEVVETMEDLVTYTKNLGPGMTKMAKMIDERQQELTHQEHRVMLVNSMNTVKELLPVLISAMKIFVTTKNSKNQGIEEALKNRNFTVEKMSAEINEIIRVLQLTSWDEDAWASKDTEAMKRALASIDSKLNQAKGWLRDPSASPGDAGEQAIRQILDEAGKVGELCAGKERREILGTCKMLGQMTDQVADLRARGQGSSPVAMQKAQQVSQGLDVLTAKVENAARKLEAMTNSKQSIAKKIDAAQNWLADPNGGPEGEEQIRGALAEARKIAELCDDPKERDDILRSLGEISALTSKLADLRRQGKGDSPEARALAKQVATALQNLQTKTNRAVANSRPAKAAVHLEGKIEQAQRWIDNPTVDDRGVGQAAIRGLVAEGHRLANVMMGPYRQDLLAKCDRVDQLTAQLADLAARGEGESPQARALASQLQDSLKDLKARMQEAMTQEVSDVFSDTTTPIKLLAVAATAPPDAPNREEVFDERAANFENHSGKLGATAEKAAAVGTANKSTVEGIQASVKTARELTPQVVSAARILLRNPGNQAAYEHFETMKNQWIDNVEKMTGLVDEAIDTKSLLDASEEAIKKDLDKCKVAMANIQPQMLVAGATSIARRANRILLVAKREVENSEDPKFREAVKAASDELSKTISPMVMDAKAVAGNISDPGLQKSFLDSGYRILGAVAKVREAFQPQEPDFPPPPPDLEQLRLTDELAPPKPPLPEGEVPPPRPPPPEEKDEEFPEQKAGEVINQPMMMAARQLHDEARKWSSKPGIPAAEVGIGVVAEADAADAAGFPVPPDMEDDYEPELLLMPSNQPVNQPILAAAQSLHREATKWSSKGNDIIAAAKRMALLMAEMSRLVRGGSGTKRALIQCAKDIAKASDEVTRLAKEVAKQCTDKRIRTNLLQVCERIPTISTQLKILSTVKATMLGRTNISDEESEQATEMLVHNAQNLMQSVKETVREAEAASIKIRTDAGFTLRWVRKTPWYQ

SEQ ID NO: 13642 - protein, 82 aa, Artificial Sequence
  Synthetic polypeptide
GQNRHYQTKTDTFCHQQTFTRGNPKECTSDKSADPRCKPEIQEGMMSQDTGQFVGLRMLAPSLSRQLRCFSQTLTQCLLEII

SEQ ID NO: 13643 - protein, 1001 aa, Artificial Sequence
  Synthetic polypeptide
NTRGNDEPRYWTVCWVENACTKLVQAAQMLQSDPYSVPARDYLIDGSRGILSGTSDLLLTFDEAEVRKIIRVCKGILEYLTVAEVVETMEDLVTYTKNLGPGMTKMAKMIDERQQELTHQEHRVMLVNSMNTVKELLPVLISAMKIFVTTKNSKNQGIEEALKNRNFTVEKMSAEINEIIRVLQLTSWDEDAWASKDTEAMKRALASIDSKLNQAKGWLRDPSASPGDAGEQAIRQILDEAGKVGELCAGKERREILGTCKMLGQMTDQVADLRARGQGSSPVAMQKAQQVSQGLDVLTAKVENAARKLEAMTNSKQSIAKKIDAAQNWLADPNGGPEGEEQIRGALAEARKIAELCDDPKERDDILRSLGEISALTSKLADLRRQGKGDSPEARALAKQVATALQNLQTKTNRAVANSRPAKAAVHLEGKIEQAQRWIDNPTVDDRGVGQAAIRGLVAEGHRLANVMMGPYRQDLLAKCDRVDQLTAQLADLAARGEGESPQARALASQLQDSLKDLKARMQEAMTQEVSDVFSDTTTPIKLLAVAATAPPDAPNREEVFDERAANFENHSGKLGATAEKAAAVGTANKSTVEGIQASVKTARELTPQVVSAARILLRNPGNQAAYEHFETMKNQWIDNVEKMTGLVDEAIDTKSLLDASEEAIKKDLDKCKVAMANIQPQMLVAGATSIARRANRILLVAKREVENSEDPKFREAVKAASDELSKTISPMVMDAKAVAGNISDPGLQKSFLDSGYRILGAVAKVREAFQPQEPDFPPPPPDLEQLRLTDELAPPKPPLPEGEVPPPRPPPPEEKDEEFPEQKAGEVINQPMMMAARQLHDEARKWSSKGNDIIAAAKRMALLMAEMSRLVRGGSGTKRALIQCAKDIAKASDEVTRLAKEVAKQCTDKRIRTNLLQVCERIPTISTQLKILSTVKATMLGRTNISDEESEQATEMLVHNAQNLMQSVKETVREAEAASIKIRTDAGFTLRWVRKTPWYQ

SEQ ID NO: 13644 - protein, 262 aa, Artificial Sequence
  Synthetic polypeptide
NTRGNDEPRYWTVCWVENACTKLVQAAQMLQSDPYSVPARDYLIDGSRGILSGTSDLLLTFDEAEVPPPRPPPPEEKDEEFPEQKAGEVINQPMMMAARQLHDEARKWSSKGNDIIAAAKRMALLMAEMSRLVRGGSGTKRALIQCAKDIAKASDEVTRLAKEVAKQCTDKRIRTNLLQVCERIPTISTQLKILSTVKATMLGRTNISDEESEQATEMLVHNAQNLMQSVKETVREAEAASIKIRTDAGFTLRWVRKTPWYQ

SEQ ID NO: 13645 - protein, 108 aa, Artificial Sequence
  Synthetic polypeptide
ESSEKVVKNADPLTPPQTYLIGIAFDGGKEILQRLEPWPNRWPRPCRTCRPKPTGLWPTADRPKQLYTLRARLSKHSGGLIIPQWMTVESVRLPSGGLWPKGIVWLML

SEQ ID NO: 13646 - protein, 48 aa, Artificial Sequence
  Synthetic polypeptide
LESLLMGERRFSRGSSLGQTGGHGPAEPADQNQPGCGQQQTGQSSCTP

SEQ ID NO: 13647 - protein, 38 aa, Artificial Sequence
  Synthetic polypeptide
EPFPPLSKILHLHHPSSVCITSFFLDTGQELRTHGVQV

SEQ ID NO: 13648 - protein, 319 aa, Artificial Sequence
  Synthetic polypeptide
RGEILPDFREKRWLDFGEETTAVLQGRPPTLPVPSPAPLSTESHFHRSVKFSTFTILQVSASLPSSWILDKNSEPTECRFDELVKKFKVEYHAGGSTQNSIKVAQWMIQQPHKAATFFGCIGIDKFGEILKRKAAEAHVDAHYYEQNEQPTGTCAACITGDNRSLIANLAAANCYKKEKHLDLEKNWMLVEKARVCYIAEAATFAREQGFETKDIKEIAKKTQALPKMNSKRQRIVIFTQGRDDTIMATESEVTAFAVLDQDQKEIIDTNGAGDAFVGGFLSQLVSDKPLTECIRAGHYAASIIIRRTGCTFPEKPDFH

SEQ ID NO: 13649 - protein, 34 aa, Artificial Sequence
  Synthetic polypeptide
NSPPSPSFKCLHHFLLLGYWTRTQNPRSAGLMNL

SEQ ID NO: 13650 - protein, 376 aa, Artificial Sequence
  Synthetic polypeptide
RGEILPDFREKRWLDFGEETTAVLQGRPPTLPVPSPAPLSTESHFHRSVKFSTFTILQVSASLPSSWILDKNSEPTECRFDELVKKFKVEYHAGGSTQNSIKVAQWMIQQPHKAATFFGCIGIDKFGEILKRKAAEAHVDAHYYEQNEQPTGTCAACITGDNRSLIANLAAANCYKKEKHLDLEKNWMLVEKARVCYIAGFFLTVSPESVLKVAHHASENNRIFTLNLSAPFISQFYKESLMKVMPYVDILFGNETEAATFAREQGFETKDIKEIAKKTQALPKMNSKRQRIVIFTQGRDDTIMATESEVTAFAVLDQDQKEIIDTNGAGDAFVGGFLSQLVSDKPLTECIRAGHYAASIIIRRTGCTFPEKPDFH

SEQ ID NO: 13651 - protein, 33 aa, Artificial Sequence
  Synthetic polypeptide
EELQSAAPSKTNTEVDDSTATQSSNIFWMHWDR

SEQ ID NO: 13652 - protein, 233 aa, Artificial Sequence
  Synthetic polypeptide
RWPNRKSSSLQLPARPTQKWMIQQPHKAATFFGCIGIDKFGEILKRKAAEAHVDAHYYEQNEQPTGTCAACITGDNRSLIANLAAANCYKKEKHLDLEKNWMLVEKARVCYIAEAATFAREQGFETKDIKEIAKKTQALPKMNSKRQRIVIFTQGRDDTIMATESEVTAFAVLDQDQKEIIDTNGAGDAFVGGFLSQLVSDKPLTECIRAGHYAASIIIRRTGCTFPEKPDFH

SEQ ID NO: 13653 - protein, 20 aa, Artificial Sequence
  Synthetic polypeptide
DGRIGRAPVCSSQQDQHRSG

SEQ ID NO: 13654 - protein, 290 aa, Artificial Sequence
  Synthetic polypeptide
RWPNRKSSSLQLPARPTQKWMIQQPHKAATFFGCIGIDKFGEILKRKAAEAHVDAHYYEQNEQPTGTCAACITGDNRSLIANLAAANCYKKEKHLDLEKNWMLVEKARVCYIAGFFLTVSPESVLKVAHHASENNRIFTLNLSAPFISQFYKESLMKVMPYVDILFGNETEAATFAREQGFETKDIKEIAKKTQALPKMNSKRQRIVIFTQGRDDTIMATESEVTAFAVLDQDQKEIIDTNGAGDAFVGGFLSQLVSDKPLTECIRAGHYAASIIIRRTGCTFPEKPDFH

SEQ ID NO: 13655 - protein, 8 aa, Artificial Sequence
  Synthetic polypeptide
FLHFQLSG

SEQ ID NO: 13656 - protein, 242 aa, Artificial Sequence
  Synthetic polypeptide
DGRIGRAPVCSSQQDQHRRWVISAFPTKWMIQQPHKAATFFGCIGIDKFGEILKRKAAEAHVDAHYYEQNEQPTGTCAACITGDNRSLIANLAAANCYKKEKHLDLEKNWMLVEKARVCYIAEAATFAREQGFETKDIKEIAKKTQALPKMNSKRQRIVIFTQGRDDTIMATESEVTAFAVLDQDQKEIIDTNGAGDAFVGGFLSQLVSDKPLTECIRAGHYAASIIIRRTGCTFPEKPDFH

SEQ ID NO: 13657 - protein, 299 aa, Artificial Sequence
  Synthetic polypeptide
DGRIGRAPVCSSQQDQHRRWVISAFPTKWMIQQPHKAATFFGCIGIDKFGEILKRKAAEAHVDAHYYEQNEQPTGTCAACITGDNRSLIANLAAANCYKKEKHLDLEKNWMLVEKARVCYIAGFFLTVSPESVLKVAHHASENNRIFTLNLSAPFISQFYKESLMKVMPYVDILFGNETEAATFAREQGFETKDIKEIAKKTQALPKMNSKRQRIVIFTQGRDDTIMATESEVTAFAVLDQDQKEIIDTNGAGDAFVGGFLSQLVSDKPLTECIRAGHYAASIIIRRTGCTFPEKPDFH

SEQ ID NO: 13658 - protein, 189 aa, Artificial Sequence
  Synthetic polypeptide
LCFLRPPQPCRTGFFLTVSPESVLKVAHHASENNRIFTLNLSAPFISQFYKESLMKVMPYVDILFGNETEAATFAREQGFETKDIKEIAKKTQALPKMNSKRQRIVIFTQGRDDTIMATESEVTAFAVLDQDQKEIIDTNGAGDAFVGGFLSQLVSDKPLTECIRAGHYAASIIIRRTGCTFPEKPDFH

SEQ ID NO: 13659 - protein, 19 aa, Artificial Sequence
  Synthetic polypeptide
GLPSHAELAFFLQFPQSQY

SEQ ID NO: 13660 - protein, 57 aa, Artificial Sequence
  Synthetic polypeptide
VFDSSSLMCPLSPAAMYDMPASPSAMIVFPEASPAMQNWLFSYSFPRVSIKGGSPCF

SEQ ID NO: 13661 - protein, 20 aa, Artificial Sequence
  Synthetic polypeptide
ARKLPLLLESKALRLKTLKR

SEQ ID NO: 13662 - protein, 7 aa, Artificial Sequence
  Synthetic polypeptide
PGSCHFC

SEQ ID NO: 13663 - protein, 121 aa, Artificial Sequence
  Synthetic polypeptide
QEAATFAREQGFETKDIKEIAKKTQALPKMNSKRQRIVIFTQGRDDTIMATESEVTAFAVLDQDQKEIIDTNGAGDAFVGGFLSQLVSDKPLTECIRAGHYAASIIIRRTGCTFPEKPDFH

SEQ ID NO: 13664 - protein, 84 aa, Artificial Sequence
  Synthetic polypeptide
TLSLNYIVACPRILESEVTAFAVLDQDQKEIIDTNGAGDAFVGGFLSQLVSDKPLTECIRAGHYAASIIIRRTGCTFPEKPDFH

SEQ ID NO: 13665 - protein, 50 aa, Artificial Sequence
  Synthetic polypeptide
ITLWLAQGFLKVKSLLLLSWIKTRKKLLIPMELEMHLLEVFCLNWSLTSL

SEQ ID NO: 13666 - protein, 9 aa, Artificial Sequence
  Synthetic polypeptide
NWQKSTTLA

SEQ ID NO: 13667 - protein, 43 aa, Artificial Sequence
  Synthetic polypeptide
GYWKVACLERALKLCPFLCFALYISSSVSFVISFIKTGKSQQL

SEQ ID NO: 13668 - protein, 43 aa, Artificial Sequence
  Synthetic polypeptide
YPLLKLAKVNNSSLIGVGYTQTLRPGVKLTLSALVDGKSINAG

SEQ ID NO: 13669 - protein, 55 aa, Artificial Sequence
  Synthetic polypeptide
YPLLKLAKVNNSSLIGVGYTQTLRPGVKLTLSALVDGKSINAGGHKVGLALELEA

SEQ ID NO: 13670 - protein, 45 aa, Artificial Sequence
  Synthetic polypeptide
RGAFCHDCKFPEASSAMQICVLGKCRYVYYGKNSEGNRFIRDDQL

SEQ ID NO: 13671 - protein, 55 aa, Artificial Sequence
  Synthetic polypeptide
HSFSLLLPCEEVPSAMIVSFLRPPQPCRSVSWGSVATFTMGKTQRATGLSEMTSS

SEQ ID NO: 13672 - protein, 30 aa, Artificial Sequence
  Synthetic polypeptide
GLLSHADLCPGEVSLRLLWEKLRGQQVYPR

SEQ ID NO: 13673 - protein, 16 aa, Artificial Sequence
  Synthetic polypeptide
DLGHYREGAVPTTPPH

SEQ ID NO: 13674 - protein, 1797 aa, Artificial Sequence
  Synthetic polypeptide
TSGTTGKAPSPPPLLTDQQVNEKVENLSIQLRLMTRERNELRKRLAFATHGTAFDKRPYHRLNPDYERLKIQCVRAMSDLQSLQNQHTNALKRCEEVAKETDFYHTLHSRLLSDQTRLKDDVDMLRRENGQLLRERNLLQQSWEDMKRLHEEDQKEIGDLRAQQQQVLKHNGSSEILNKLYDTAMDKLEVVKKDYDALRKRYSEKVAIHNADLSRLEQLGEENQRLLKQTEMLTQQRDTAIQLQHQCALSLRRFEAIHHELNKATAQNKDLQWEMELLQSELTELRTTQVKTAKESEKYREERDAVYSEYKLIMSERDQVISELDKLQTEVELAESKLKSSTSEKKAANEEMEALRQIKDTVTMDAGRANKEVEILRKQCKALCQELKEALQEADVAKCRRDWAFQERDKIVAERDSIRTLCDNLRRERDRAVSELAEALRSLDDTRKQKNDVSRELKELKEQMESQLEKEARFRQLMAHSSHDSAIDTDSMEWETEVVEFERETEDIDLKALGFDMAEGVNEPCFPGDCGIFVTKVDKGSIADGRLRVNDWLLRINDVDLINKDKKQAIKALLNGEGAINMVVRRRKSLGGKVVTPLHINLSGQKDSGISLENGVYAAAVLPGSPAAKEGSLAVGDRIVAINGIALDNKSLNECESLLRSCQDSLTLSLLKVFPQSSSWSGQNIFENIKDSDKMLSFRAHGPEVQAHNKRNLIQHNNSTQTDIFYTDRLEDRKEPGPPGGSSSFLHKPFPGGPLQVCPQACPSASERSLSSFRSDASGDRGFGLVDVRGRRPLLPFETEVGPCGVGEASLDKADSEGSNSGGTWPKAMLSSTAVPEKLSVYKKPKQRKSIFDPNTFKRPQTPPKIDYLLPGPGPAHSPQPSKRAGPLTPPKPPRRSDSIKFQHRLETSSESEATLVGSSPSTSPPSALPPDVDPGEPMHASPPRKARVRIASSYYPEGDGDSSHLPAKKSCDEDLTSQKVDELGQKRRRPKSAPSFRPKLAPVVIPAQFLEEQKCVPASGELSPELQEWAPYSPGHSSRHSNPPLYPSRPSVGTVPRSLTPSTTVSSILRNPIYTVRSHRVGPCSSPPAARDAGPQGLHPSVQHQGRLSLDLSHRTCSDYSEMRATHGSNSLPSSARLGSSSNLQFKAERIKIPSTPRYPRSVVGSERGSVSHSECSTPPQSPLNIDTLSSCSQSQTSASTLPRIAVNPASLGERRKDRPYVEEPRHVKVQKGSEPLGISIVSGEKGGIYVSKVTVGSIAHQAGLEYGDQLLEFNGINLRSATEQQARLIIGQQCDTITILAQYNPHVHQLSSHSRSSSHLDPAGTHSTLQGSGTTTPEHPSVIDPLMEQDEGPSTPPAKQSSSRIAGDANKKTLEPRVVFIKKSQLELGVHLCGGNLHGVFVAEVEDDSPAKGPDGLVPGDLILEYGSLDVRNKTVEEVYVEMLKPRDGVRLKVQYRPEEFTKAKGLPGDSFYIRALYDRLADVEQELSFKKDDILYVDDTLPQGTFGSWMAWQLDENAQKIQRGQIPSKYVMDQEFSRRLSMSEVKDDNSATKTLSAAARRSFFRRKHKHKRSGSKDGKDLLALDAFSSDSIPLFEDSVSLAYQRVQKVDCTALRPVLILGPLLDVVKEMLVNEAPGKFCRCPLEVMKASQQAIERGVKDCLFVDYKRRSGHFDVTTVASIKEITEKNRHCLLDIAPHAIERLHHMHIYPIVIFIHYKSAKHIKEQRDPIYLRDKVTQRHSKEQFEAAQKLEQEYSRYFTGVIQGGALSSICTQILAMVNQEQNKVLWIPACPL

SEQ ID NO: 13675 - protein, 19 aa, Artificial Sequence
  Synthetic polypeptide
PRALPGRRRPHHPSSLTSK

SEQ ID NO: 13676 - protein, 1457 aa, Artificial Sequence
  Synthetic polypeptide
TSGTTGKAPSPPPLLTDQQVNEKVENLSIQLRLMTRERNELRKRLAFATHGTAFDKRPYHRLNPDYERLKIQCVRAMSDLQSLQNQHTNALKRCEEVAKETDFYHTLHSRLLSDQTRLKDDVDMLRRENGQLLRERNLLQQSWEDMKRLHEEDQKEIGDLRAQQQQVLKHNGSSEILNKLYDTAMDKLEVVKKDYDALRKRYSEKVAIHNADLSRLEQLGEENQRLLKQTEMLTQQRDTAIQLQHQCALSLRRFEAIHHELNKATAQNKDLQWEMELLQSELTELRTTQVKTAKESEKYREERDAVYSEYKLIMSERDQVISELDKLQTEVELAESKLKSSTSEKKAANEEMEALRQIKDTVTMDAGRANKEVEILRKQCKALCQELKEALQEADVAKCRRDWAFQERDKIVAERDSIRTLCDNLRRERDRAVSELAEALRSLDDTRKQKNDVSRELKELKEQMESQLEKEARFRQLMAHSSHDSAIDTDSMEWETEVVEFERETEDIDLKALGFDMAEGVNEPCFPGDCGIFVTKVDKGSIADGRLRVNDWLLRINDVDLINKDKKQAIKALLNGEGAINMVVRRRKSLGGKVVTPLHINLSGQKDSGISLENGVYAAAVLPGSPAAKEGSLAVGDRIVAINGIALDNKSLNECESLLRSCQDSLTLSLLKEQKCVPASGELSPELQEWAPYSPGHSSRHSNPPLYPSRPSVGTVPRSLTPSTTVSSILRNPIYTVRSHRVGPCSSPPAARDAGPQGLHPSVQHQGRLSLDLSHRTCSDYSEMRATHGSNSLPSSARLGSSSNLQFKAERIKIPSTPRYPRSVVGSERGSVSHSECSTPPQSPLNIDTLSSCSQSQTSASTLPRIAVNPASLGERRKDRPYVEEPRHVKVQKGSEPLGISIVSGEKGGIYVSKVTVGSIAHQAGLEYGDQLLEFNGINLRSATEQQARLIIGQQCDTITILAQYNPHVHQLSSHSRSSSHLDPAGTHSTLQGSGTTTPEHPSVIDPLMEQDEGPSTPPAKQSSSRIAGDANKKTLEPRVVFIKKSQLELGVHLCGGNLHGVFVAEVEDDSPAKGPDGLVPGDLILEYGSLDVRNKTVEEVYVEMLKPRDGVRLKVQYRPEEFTKAKGLPGDSFYIRALYDRLADVEQELSFKKDDILYVDDTLPQGTFGSWMAWQLDENAQKIQRGQIPSKYVMDQEFSRRLSMSEVKDDNSATKTLSAAARRSFFRRKHKHKRSGSKDGKDLLALDAFSSDSIPLFEDSVSLAYQRVQKVDCTALRPVLILGPLLDVVKEMLVNEAPGKFCRCPLEVMKASQQAIERGVKDCLFVDYKRRSGHFDVTTVASIKEITEKNRHCLLDIAPHAIERLHHMHIYPIVIFIHYKSAKHIKEQRDPIYLRDKVTQRHSKEQFEAAQKLEQEYSRYFTGVIQGGALSSICTQILAMVNQEQNKVLWIPACPL

SEQ ID NO: 13677 - protein, 167 aa, Artificial Sequence
  Synthetic polypeptide
TSGTTGKAPSPPPLLTDQQVNEKVENLSIQLRLMTRERNELRKRLAFATHGTAFDKRPYHRLNPDYERLKIQCVRAMSDLQSLQNQHTNALKRCEEVAKETDFYHTLHSRLLSDQTRLKDDVDMLRRENGQLLRERNLLQQSWEDMKRLHEEDQKEIGDLRAQQQQS

SEQ ID NO: 13678 - protein, 2 aa, Artificial Sequence
  Synthetic polypeptide
PG

SEQ ID NO: 13679 - protein, 1046 aa, Artificial Sequence
  Synthetic polypeptide
KPCLYQKYKKLARSGGRRLWSQLLGRLRWKDCLSMEGGGCEPRSRQCTLAWVNKANINFLRKLVQNGPEVHPGANFIQQRHTQMKRFLKYGNREKMAQELKYGDIVERHLIDGDVVLFNRQPSLHKLSIMAHLARVKPHRTFRFNECVCTPYNADFDGDEMNLHLPQTEEAKAEALVLMGTKANLVTPRNGEPLIAAIQDFLTGAYLLTLKDTFFDRAKACQIIASILVGKDEKIKVRLPPPTILKPVTLWTGKQIFSVILRPSDDNPVRANLRTKGKQYCGKGEDLCANDSYVTIQNSELMSGSMDKGTLGSGSKNNIFYILLRDWGQNEAADAMSRLARLAPVYLSNRGFSIGIGDVTPGQGLLKAKYELLNAGYKKCDEYIEALNTGKLQQQPGCTAEETLEALILKELSVIRDHAGSACLRELDKSNSPLTMALCGSKGSFINISQMIACVGQQAISGSRVPDGFENRSLPHFEKHSKLPAAKGFVANSFYSGLTPTEFFFHTMAGREGLVDTAVKTAETGYMQRRLVKSLEDLCSQYDLTVRSSTGDIIQFIYGGDGLDPAAMEGKDEPLEFKRVLDNIKAVFPCPSEPALSKNELILTTESIMKKSEFLCCQDSFLQEIKKFIKGVSEKIKKTRDKYGINDNGTTEPRVLYQLDRITPTQVEKFLETCRDKYMRAQMEPGSAVGALCAQSIGEPGTQMTLKTFHFAGVASMNITLGVPRIKEIINASKAISTPIITAQLDKDDDADYARLVKGRIEKTLLGEISEYIEEVFLPDDCFILVKLSLERIRLLRLEVNAETVRYSICTSKLRVKPGDVAVHGEAVVCVTPRENSKSSMYYVLQFLKEDLPKVVVQGIPEVSRAVIHIDEQSGKEKYKLLVEGDNLRAVMATHGVKGTRTTSNNTYEVEKTLGIEAARTTIINEIQYTMVNHGMSIDRRHVMLLSDLMTYKGEVLGITRFGLAKMKESVLMLASFEKTADHLFDAAYFGQKDSVCGVSECIIMGIPMNIGTGLFKLLHKADRDPNPPKRPLIFDTNEFHIPLVT

SEQ ID NO: 13680 - protein, 27 aa, Artificial Sequence
  Synthetic polypeptide
AKITSMHSSLGKQSKHQFLEETGSKRP

SEQ ID NO: 13681 - protein, 32 aa, Artificial Sequence
  Synthetic polypeptide
DFWPWGLAGYPGLRPCAPVGLSFPIFHVGMRR

SEQ ID NO: 13682 - protein, 189 aa, Artificial Sequence
  Synthetic polypeptide
FLALGPGWVPWSASLCPCGPQFPHLSCGNEALSNSVYKGASPYGSLNNIADGLSSLTEHFSDLTLTSEARKPSKRPPPNYLCHLCFNKGHYIKDCPQARPKGEGLTPYQGKKRCFGEYKCPKCKRKWMSGNSWANMGQECIKCHINVYPHKQRPLEKPDGLDVSDQSKEHPQHLCEKCKVLGYYCRRVQ

SEQ ID NO: 13683 - protein, 22 aa, Artificial Sequence
  Synthetic polypeptide
RAPVIPATQEAEMRKLILRDSE

SEQ ID NO: 13684 - protein, 8 aa, Artificial Sequence
  Synthetic polypeptide
SQLLRRLR

SEQ ID NO: 13685 - protein, 13 aa, Artificial Sequence
  Synthetic polypeptide
RAPVIPATQEAEM

SEQ ID NO: 13686 - protein, 13 aa, Artificial Sequence
  Synthetic polypeptide
RAPVIPATQEAEA

SEQ ID NO: 13687 - protein, 47 aa, Artificial Sequence
  Synthetic polypeptide
SQLLRRLRHKGITSGRAQLLWFLQTFFFGIASLTILIAYKRKRQKQT

SEQ ID NO: 13688 - protein, 45 aa, Artificial Sequence
  Synthetic polypeptide
GWAQWLTPVIPALWEAEAGGSFEVRSSRPAWPTREILQGITGRFC

SEQ ID NO: 13689 - protein, 42 aa, Artificial Sequence
  Synthetic polypeptide
SQHFGRLRQVDHLRSGVRDQPGQQGRYFRGLPEDSAEDLWWQ

SEQ ID NO: 13690 - protein, 30 aa, Artificial Sequence
  Synthetic polypeptide
GQEFETSLANKGDTSGDYRKILLKICGGND

SEQ ID NO: 13691 - protein, 67 aa, Artificial Sequence
  Synthetic polypeptide
VSRDLMWVYQGFLLLLLPHFLLPPPCKKSLSPPTMILRLPHPCETDFPGPVQTSGNVLWHCPGFCCI

SEQ ID NO: 13692 - protein, 351 aa, Artificial Sequence
  Synthetic polypeptide
GFPIHVKLTFQDLSKQVEMSYGTVRDSAVYEYFRAKGTNPLEQDSTFAELWRTISKNGGADNCVSSPSEGIRKAKKGNYAFLWDVAVVEYAALTDDDCSVTVIGNSISSKGYGIALQHGSPYRDLFSQRILELQDTGDLDVLKQKWWPHMGRCDLTSHASAQADGKSLKLHSFAGVFCILAIGLLLACLVAALELWWNSNRCHQETPKEDKEVNLEQVHRRMNSLMDEDIAHKQISPASIELSALEMGGLAPTQTLEPTREYQNTQLSVSTFLPEQSSHGTSRTLSSGPSSNLPLPLSSSATMPSMQCKHRSPNGGLFRQSPVKTPIPMSFQPVPGGVLPEALDTSHGTSI

SEQ ID NO: 13693 - protein, 97 aa, Artificial Sequence
  Synthetic polypeptide
GFPIHVKLTFQDLSKQVEMSYGTVRDSAVYEYFRAKGTNPLEQDSTFAELWRTISKNGGADNCVSSPSEGIRKDPGAAGHRGPGCAEAEVVAAHGPL

SEQ ID NO: 13694 - protein, 59 aa, Artificial Sequence
  Synthetic polypeptide
GMLPHTCNSSTLGGQDQCNHCAGISARRRLFNNDRDAQKIFEFYESHLCCWNNWPEIYL

SEQ ID NO: 13695 - protein, 68 aa, Artificial Sequence
  Synthetic polypeptide
ACCLTPVIPALWEAKINVTTVREYLPEGDFSIMTEMLKKFLSFMNLTCAVGTTGQKSISRVIEYLEHC

SEQ ID NO: 13696 - protein, 10 aa, Artificial Sequence
  Synthetic polypeptide
FQHFGRPRSM

SEQ ID NO: 13697 - protein, 89 aa, Artificial Sequence
  Synthetic polypeptide
GRKNNTALQHAGKHMEDCIVASYTALLLGCLCQESPINVTTVREYLPEGDFSIMTEMLKKFLSFMNLTCAVGTTGQKSISRVIEYLEHC

SEQ ID NO: 13698 - protein, 61 aa, Artificial Sequence
  Synthetic polypeptide
SPPSIHVGSTSTESANHKSKIFEEEKIIQPFSMPANTWRIALWPPTQHYFLGVSARKVQSM

SEQ ID NO: 13699 - protein, 75 aa, Artificial Sequence
  Synthetic polypeptide
YSPSACRQTHGGLHCGLLHSTTSWVSLPGKSNQCNHCAGISARRRLFNNDRDAQKIFEFYESHLCCWNNWPEIYL

SEQ ID NO: 13700 - protein, 1047 aa, Artificial Sequence
  Synthetic polypeptide
SQHFGRQGGWITRSGVRNQPDQHDKVENFHEEHEKNSHHIHKNADDSTKKPNAETTVASEIKETNDTWNSQFGKRPESPSEISPIKGSVRTGLFEWDNDFEDIRSEDCILSLDSDPLLEMKDDDFKNRLENLNEAIEEDIVQSVLRPTNCRTYCRANKTKSSQGASNFDKLMDGTSQALAKANSESSKDGLNQAKKGGVSCGTSFRGTVGRTRDYTVLHPSCLSVCNVTIQDTMERSMDEFTASTPADLGEAGRLRKKADIATSKTTTRFRPSNTKSKKDVKLEFFGFEDHETGGDEGGSGSSNYKIKYFGFDDLSESEDDEDDDCQVERKTSKKRTKTAPSPSLQPPPESNDNSQDSQSGTNNAENLDFTEDLPGVPESVKKPINKQGDKSKENTRKIFSGPKRSPTKAVYNARHWNHPDSEELPGPPVVKPQSVTVRLSSKEPNQKDDGVFKAPAPPSKVIKTVTIPTQPYQDIVTALKCRREDKELYTVVQHVKHFNDVVEFGENQEFTDDIEYLLSGLKSTQPLNTRCLSVISLATKCAMPSFRMHLRAHGMVAMVFKTLDDSQHHQNLSLCTAALMYILSRDRLNMDLDRASLDLMIRLLELEQDASSAKLLNEKDMNKIKEKIRRLCETVHNKHLDLENITTGHLAMETLLSLTSKRAGDWFKEELRLLGGLDHIVDKVKECVDHLSRDEDEEKLVASLWGAERCLRVLESVTVHNPENQSYLIAYKDSQLIVSSAKALQHCEELIQQYNRAEDSICLADSKPLPHQNVTNHVGKAVEDCMRAIIGVLLNLTNDNEWGSTKTGEQDGLIGTALNCVLQVPKYLPQEQRFDIRVLGLGLLINLVEYSARNRHCLVNMETSCSFDSSICSGEGDDSLRIGGQVHAVQALVQLFLERERAAQLAESKTDELIKDAPTTQHDKSGEWQETSGEIQWVSTEKTDGTEEKHKKEEEDEELDLNKALQHAGKHMEDCIVASYTALLLGCLCQESPINVTTVREYLPEGDFSIMTEMLKKFLSFMNLTCAVGTTGQKSISRVIEYLEHC

SEQ ID NO: 13701 - protein, 118 aa, Artificial Sequence
  Synthetic polypeptide
PGAVAHTCNPNTLGGKAGGSRGQEFETSLTNMIKWRIFMKNMKRIVTIFTKMLMTVLRNPMQKLQWLLKSRKQMILGTPSLGKGQNHHQKYLQSRDLLELVCLNGIMILKISDQKTVF

SEQ ID NO: 13702 - protein, 21 aa, Artificial Sequence
  Synthetic polypeptide
THREPAEIHQCSLSGPPCEQE

SEQ ID NO: 13703 - protein, 607 aa, Artificial Sequence
  Synthetic polypeptide
HIENQQKSTNVVYQAHHVSRNKRGQVVGTRGGFRGCTVWLTGLSGAGKTTISFALEEYLVSHAIPCYSLDGDNVRHGLNRNLGFSPGDREENIRRIAEVAKLFADAGLVCITSFISPFAKDRENARKIHESAGLPFFEIFVDAPLNICESRDVKGLYKRARAGEIKGFTGIDSDYEKPETPERVLKTNLSTVSDCVHQVVELLQEQNIVPYTIIKDIHELFVPENKLDHVRAEAETLPSLSITKLDLQWVQVLSEGWATPLKGFMREKEYLQVMHFDTLLDDGVINMSIPIVLPVSAEDKTRLEGCSKFVLAHGGRRVAILRDAEFYEHRKEERCSRVWGTTCTKHPHIKMVMESGDWLVGGDLQVLEKIRWNDGLDQYRLTPLELKQKCKEMNADAVFAFQLRNPVHNGHALLMQDTRRRLLERGYKHPVLLLHPLGGWTKDDDVPLDWRMKQHAAVLEEGVLDPKSTIVAIFPSPMLYAGPTEVQWHCRSRMIAGANFYIVGRDPAGMPHPETKKDLYEPTHGGKVLSMAPGLTSVEIIPFRVAAYNKAKKAMDFYDPARHNEFDFISGTRMRKLAREGENPPDGFMAPKAWKVLTDYYRSLEKN

SEQ ID NO: 13704 - protein, 612 aa, Artificial Sequence
  Synthetic polypeptide
HIENQQKSTNVVYQAHHVSRNKRGQVVGTRGGFRGCTVWLTGLSGAGKTTISFALEEYLVSHAIPCYSLDGDNVRHGLNRNLGFSPGDREENIRRIAEVAKLFADAGLVCITSFISPFAKDRENARKIHESAGLPFFEIFVDAPLNICESRDVKGLYKRARAGEIKGFTGIDSDYEKPETPERVLKTNLSTVSDCVHQVVELLQEQNIVPYTIIKDIHELFVPENKLDHVRAEAETLPSLSITKLDLQWVQVLSEGWATPLKGFMREKEYLQVMHFDTLLDGMALPDGVINMSIPIVLPVSAEDKTRLEGCSKFVLAHGGRRVAILRDAEFYEHRKEERCSRVWGTTCTKHPHIKMVMESGDWLVGGDLQVLEKIRWNDGLDQYRLTPLELKQKCKEMNADAVFAFQLRNPVHNGHALLMQDTRRRLLERGYKHPVLLLHPLGGWTKDDDVPLDWRMKQHAAVLEEGVLDPKSTIVAIFPSPMLYAGPTEVQWHCRSRMIAGANFYIVGRDPAGMPHPETKKDLYEPTHGGKVLSMAPGLTSVEIIPFRVAAYNKAKKAMDFYDPARHNEFDFISGTRMRKLAREGENPPDGFMAPKAWKVLTDYYRSLEKN

SEQ ID NO: 13705 - protein, 29 aa, Artificial Sequence
  Synthetic polypeptide
DLGLGFDGDGKWGLAGWWRPSGAGENKME

SEQ ID NO: 13706 - protein, 272 aa, Artificial Sequence
  Synthetic polypeptide
EESGLQESEIWVLALMVMESGDWLVGGDLQVLEKIRWNDGLDQYRLTPLELKQKCKEMNADAVFAFQLRNPVHNGHALLMQDTRRRLLERGYKHPVLLLHPLGGWTKDDDVPLDWRMKQHAAVLEEGVLDPKSTIVAIFPSPMLYAGPTEVQWHCRSRMIAGANFYIVGRDPAGMPHPETKKDLYEPTHGGKVLSMAPGLTSVEIIPFRVAAYNKAKKAMDFYDPARHNEFDFISGTRMRKLAREGENPPDGFMAPKAWKVLTDYYRSLEKN

SEQ ID NO: 13707 - protein, 48 aa, Artificial Sequence
  Synthetic polypeptide
GWAQRLTPVIPVLWEAEAGGSQGQEIETILANQHGSNYSQSEALCVLL

SEQ ID NO: 13708 - protein, 264 aa, Artificial Sequence
  Synthetic polypeptide
SQYFGRPRRADHKVKRSRPSWPTNMGVTIPSQRRYVYYYSYLLKNHLDYRPVALLFHKMMFETIPMFSGGTCNPQFVVCQLKVKIYSSNSGPTRREDKFMYFEFPQPLPVCGDIKVEFFHKQNKMLKKDKMFHFWVNTFFIPGPEETSEKVENGSLCDQEIDSICSIERADNDKEYLVLTLTKNDLDKANKDKANRYFSPNFKVKLYFTKTVEEPSNPEASSSTSVTPDVSDNEPDHYRYSDTTDSDPENEPFDEDQHTQITKV

SEQ ID NO: 13709 - protein, 35 aa, Artificial Sequence
  Synthetic polypeptide
MGTAAHACNPSTLGGRGGRITRSRDRDHPGQPTWE

SEQ ID NO: 13710 - protein, 44 aa, Artificial Sequence
  Synthetic polypeptide
RAVVHMLSCLPPRKSCLCSFFVFHRDCEAFPACGTSHQKLGLPS

SEQ ID NO: 13711 - protein, 64 aa, Artificial Sequence
  Synthetic polypeptide
WFCKGQLYICCLACHHVSHAFALSLSSTVIVRPFQHVELVIRNWAFPRDSHHCPIWSYILGTQH

SEQ ID NO: 13712 - protein, 81 aa, Artificial Sequence
  Synthetic polypeptide
GSFPCSCLLSLACCHVRHASSPFAMSLSFLRPPQPCRTIQKFLSGIISGTALEMEPLKIGYGPNGFPLLGISRSSSPSEQL

SEQ ID NO: 13713 - protein, 15 aa, Artificial Sequence
  Synthetic polypeptide
GLPSHAELFRNSFLG

SEQ ID NO: 13714 - protein, 81 aa, Artificial Sequence
  Synthetic polypeptide
VLTISDGFIRQFSLLLLALSRLLPCKTRLFPFCHEFKFLEASPAMQNYSEIPFWDNFWHCFGDGAPENWLWTKWIPTLGDL

SEQ ID NO: 13715 - protein, 199 aa, Artificial Sequence
  Synthetic polypeptide
CITRKTNTEKCLKDLMELKAKAQELREECRSLRSRCSQLGERDLVKCENKKNATPRTNLKFPISDDRNSSVKKEQKVAIRPSSKKTYSLRSQASIIGVNLATKKKEGTLQKFGDFLQHSPSILQSKAKKIIETMSSSKLSNVEASKENVSQPKRAKRKLYTSEISSPIDISGQVILMDQKMKESDHQIIKRRLRTKTAK

SEQ ID NO: 13716 - protein, 26 aa, Artificial Sequence
  Synthetic polypeptide
KPRLKNYVKNAEASGADAVNWEKGTW

SEQ ID NO: 13717 - protein, 20 aa, Artificial Sequence
  Synthetic polypeptide
RMQKPQEPMQSTGRKGLGEM

SEQ ID NO: 13718 - protein, 72 aa, Artificial Sequence
  Synthetic polypeptide
CITRKTNTEKCLKDLMELKAKAQELREECRSLRSRCSQLGERMIEILLSKRNKRLPYVHHLRKHILYGVRHP

SEQ ID NO: 13719 - protein, 24 aa, Artificial Sequence
  Synthetic polypeptide
KPRLKNYVKNAEASGADAVNWEKG

SEQ ID NO: 13720 - protein, 150 aa, Artificial Sequence
  Synthetic polypeptide
RMQKPQEPMQSTGRKDDRNSSVKKEQKVAIRPSSKKTYSLRSQASIIGVNLATKKKEGTLQKFGDFLQHSPSILQSKAKKIIETMSSSKLSNVEASKENVSQPKRAKRKLYTSEISSPIDISGQVILMDQKMKESDHQIIKRRLRTKTAK

SEQ ID NO: 13721 - protein, 3 aa, Artificial Sequence
  Synthetic polypeptide
PDL

SEQ ID NO: 13722 - protein, 232 aa, Artificial Sequence
  Synthetic polypeptide
TMIMPLPSSLDDQICKTCIVQHFEDSNDCPRCGNQVHETNPLEMLRLDNTLEEIIFKLVPGLREQELERESEFWKKNKPQENGQDDTSKADKPKVDEEGDENEDDKDYHRSDPQIAICLDCLRNNGQSGDNVVKGLMKKFIRCSTRVTVGTIKKFLSLKLKLPSSYELDVLCNGEIMGKDHTMEFIYMTRWRLRGENFRCLNCSASQVCSQDGPLYQSYPMVLQYRPRIDFG

SEQ ID NO: 13723 - protein, 39 aa, Artificial Sequence
  Synthetic polypeptide
SCHCPPAWMTRSVRLVLFSTLKIAMIAQGVATKFMRQIH

SEQ ID NO: 13724 - protein, 32 aa, Artificial Sequence
  Synthetic polypeptide
RRTCLQFSFCHDWFGQRSQRPNFHFQQFYFSC

SEQ ID NO: 13725 - protein, 763 aa, Artificial Sequence
  Synthetic polypeptide
GDFPSFVQHFSFLLPCEEGRVCSSPSAMIGLDRGAKGQISTFSSFISAVSPKKEAAENRSSPAHLVFPNIKNVREPPPICLDVRQKQRTSMDASSSEMKAPVLPEPILPIQPKTVKDFQEDVEKVKSSGDWKAVHDFYLTTFDSFPELNAAFKKDATASFNTIEDSGINAKFVNAVYDTLLNTPQDVQKTVLKGIINSLLREWKGPRTKDDLRAYFILLQNPQFNNTSTYVIYAHLLRQIATLVEADHHFLVHWFKKQYSRLSQKRFKQLVERLLQFISLRLFPAKPEEFPPITKCSWWIPSAAKVLALLNTANNLVHPPLIPYTDFYNSTLDHIDLMEEYHTWQNFGNSHRFSFCQYPFVISVAAKKIIIQRDSEQQMINIARQSLVDKVSRRQRPDMNILFLNMKVRRTHLVSDSLDELTRKRADLKKKLKVTFVGEAGLDMGGLTKEWFLLLIRQIFHPDYGMFTYHKDSHCHWFSSFKCDNYSEFRLVGILMGLAVYNSITLDIRFPPCCYKKLLSPPIIPSDQNIPVGICNVTVDDLCQIMPELAHGLSELLSHEGNVEEDFYSTFQVFQEEFGIIKSYNLKPGGDKISVTNQNRKEYVQLYTDFLLNKSIYKQFAAFYYGFHSVCASNALMLLRPEEVEILVCGSPDLDMHALQRSTQYDGYAKTDLTIKYFWDVVLGFPLDLQKKLLHFTTGSDRVPVGGMADLNFKISKNETSTNCLPVAHTCFNQLCLPPYKSKKDLKQKLIIGISNSEGFGLE

SEQ ID NO: 13726 - protein, 190 aa, Artificial Sequence
  Synthetic polypeptide
GDFPSFVQHFSFLLPCEEGRVCSSPSAMIGLDRGAKGQISTFSSFISAVSPKKEAAENRSSPAHLVFPNIKNVREPPPICLDVRQKQRTSMDASSSEMKAPVLPEPILPIQPKTVKDFQEDVEKVKSSGDWKAVHDFYLTTFDSFPELNAAFKKDATASFNTIEDSGINAKFVNAVYDTLLNTVSIMTCK

SEQ ID NO: 13727 - protein, 759 aa, Artificial Sequence
  Synthetic polypeptide
GDFPSFVQHFSFLLPCEEGRVCSSPSAMIGLDRGAKGQISTFSSFISAVSPKKEAAENRSSPAHLVFPNIKNVREPPPICLDVRQKQRTSMDASSSEMKAPVLPEPILPIQPKTVKDFQEDVEKVKSSGDWKAVHDFYLTTFDSFPELNAAFKKDATASFNTIEDSGINAKFVNAVYDTLLNTPQDVQKTVLKGIINSLLREWKGPRTKDDLRAYFILLQNPQFNNTSTYVIYAHLLRQIATLVEADHHFLVHWFKKLSQKRFKQLVERLLQFISLRLFPAKPEEFPPITKCSWWIPSAAKVLALLNTANNLVHPPLIPYTDFYNSTLDHIDLMEEYHTWQNFGNSHRFSFCQYPFVISVAAKKIIIQRDSEQQMINIARQSLVDKVSRRQRPDMNILFLNMKVRRTHLVSDSLDELTRKRADLKKKLKVTFVGEAGLDMGGLTKEWFLLLIRQIFHPDYGMFTYHKDSHCHWFSSFKCDNYSEFRLVGILMGLAVYNSITLDIRFPPCCYKKLLSPPIIPSDQNIPVGICNVTVDDLCQIMPELAHGLSELLSHEGNVEEDFYSTFQVFQEEFGIIKSYNLKPGGDKISVTNQNRKEYVQLYTDFLLNKSIYKQFAAFYYGFHSVCASNALMLLRPEEVEILVCGSPDLDMHALQRSTQYDGYAKTDLTIKYFWDVVLGFPLDLQKKLLHFTTGSDRVPVGGMADLNFKISKNETSTNCLPVAHTCFNQLCLPPYKSKKDLKQKLIIGISNSEGFGLE

SEQ ID NO: 13728 - protein, 44 aa, Artificial Sequence
  Synthetic polypeptide
RRTCLQFSFCHDCKFPEASPTMLNWFGQRSQRPNFHFQQFYFSC

SEQ ID NO: 13729 - protein, 735 aa, Artificial Sequence
  Synthetic polypeptide
TGLDRGAKGQISTFSSFISAVSPKKEAAENRSSPAHLVFPNIKNVREPPPICLDVRQKQRTSMDASSSEMKAPVLPEPILPIQPKTVKDFQEDVEKVKSSGDWKAVHDFYLTTFDSFPELNAAFKKDATASFNTIEDSGINAKFVNAVYDTLLNTPQDVQKTVLKGIINSLLREWKGPRTKDDLRAYFILLQNPQFNNTSTYVIYAHLLRQIATLVEADHHFLVHWFKKQYSRLSQKRFKQLVERLLQFISLRLFPAKPEEFPPITKCSWWIPSAAKVLALLNTANNLVHPPLIPYTDFYNSTLDHIDLMEEYHTWQNFGNSHRFSFCQYPFVISVAAKKIIIQRDSEQQMINIARQSLVDKVSRRQRPDMNILFLNMKVRRTHLVSDSLDELTRKRADLKKKLKVTFVGEAGLDMGGLTKEWFLLLIRQIFHPDYGMFTYHKDSHCHWFSSFKCDNYSEFRLVGILMGLAVYNSITLDIRFPPCCYKKLLSPPIIPSDQNIPVGICNVTVDDLCQIMPELAHGLSELLSHEGNVEEDFYSTFQVFQEEFGIIKSYNLKPGGDKISVTNQNRKEYVQLYTDFLLNKSIYKQFAAFYYGFHSVCASNALMLLRPEEVEILVCGSPDLDMHALQRSTQYDGYAKTDLTIKYFWDVVLGFPLDLQKKLLHFTTGSDRVPVGGMADLNFKISKNETSTNCLPVAHTCFNQLCLPPYKSKKDLKQKLIIGISNSEGFGLE

SEQ ID NO: 13730 - protein, 51 aa, Artificial Sequence
  Synthetic polypeptide
GLPNHAELVWTEEPKAKFPLSAVLFQLLARRKKLLKTEVHLHILFSLTSRM

SEQ ID NO: 13731 - protein, 162 aa, Artificial Sequence
  Synthetic polypeptide
TGLDRGAKGQISTFSSFISAVSPKKEAAENRSSPAHLVFPNIKNVREPPPICLDVRQKQRTSMDASSSEMKAPVLPEPILPIQPKTVKDFQEDVEKVKSSGDWKAVHDFYLTTFDSFPELNAAFKKDATASFNTIEDSGINAKFVNAVYDTLLNTVSIMTCK

SEQ ID NO: 13732 - protein, 731 aa, Artificial Sequence
  Synthetic polypeptide
TGLDRGAKGQISTFSSFISAVSPKKEAAENRSSPAHLVFPNIKNVREPPPICLDVRQKQRTSMDASSSEMKAPVLPEPILPIQPKTVKDFQEDVEKVKSSGDWKAVHDFYLTTFDSFPELNAAFKKDATASFNTIEDSGINAKFVNAVYDTLLNTPQDVQKTVLKGIINSLLREWKGPRTKDDLRAYFILLQNPQFNNTSTYVIYAHLLRQIATLVEADHHFLVHWFKKLSQKRFKQLVERLLQFISLRLFPAKPEEFPPITKCSWWIPSAAKVLALLNTANNLVHPPLIPYTDFYNSTLDHIDLMEEYHTWQNFGNSHRFSFCQYPFVISVAAKKIIIQRDSEQQMINIARQSLVDKVSRRQRPDMNILFLNMKVRRTHLVSDSLDELTRKRADLKKKLKVTFVGEAGLDMGGLTKEWFLLLIRQIFHPDYGMFTYHKDSHCHWFSSFKCDNYSEFRLVGILMGLAVYNSITLDIRFPPCCYKKLLSPPIIPSDQNIPVGICNVTVDDLCQIMPELAHGLSELLSHEGNVEEDFYSTFQVFQEEFGIIKSYNLKPGGDKISVTNQNRKEYVQLYTDFLLNKSIYKQFAAFYYGFHSVCASNALMLLRPEEVEILVCGSPDLDMHALQRSTQYDGYAKTDLTIKYFWDVVLGFPLDLQKKLLHFTTGSDRVPVGGMADLNFKISKNETSTNCLPVAHTCFNQLCLPPYKSKKDLKQKLIIGISNSEGFGLE

SEQ ID NO: 13733 - protein, 289 aa, Artificial Sequence
  Synthetic polypeptide
GQAQWVMPVIPAFGSLRWADHLRSCWVCFATDEDDRTAEWVRPCRCRGSTKWVHQACLQRWVDEKQRGNSTARVACPQCNAEYLIVFPKLGPVVYVLDLADRLISKACPFAAAGIMVGSIYWTAVTYGAVTVMQVVGHKEGLDVMERADPLFLLIGLPTIPVMLILGKMIRWEDYVLRLWRKYSNKLQILNSIFPGIGCPVPRIPAEANPLADHVSATRILCGALVFPTIATIVGKLMFSSVNSNLQRTILGGIAFVAIKGAFKVYFKQQQYLRQAHRKILNYPEQEEA

SEQ ID NO: 13734 - protein, 30 aa, Artificial Sequence
  Synthetic polypeptide
PGAVGHACNPSIWEPEVGRSLEKLLGLFCY

SEQ ID NO: 13735 - protein, 44 aa, Artificial Sequence
  Synthetic polypeptide
GRARWLTPIIPALWEAAAGGSPEVRSSRPDWPTWLYRLQRATSS

SEQ ID NO: 13736 - protein, 214 aa, Artificial Sequence
  Synthetic polypeptide
SQHFGRLRRVDHLRSGVQDQTGQHGYIVFSGPRRANGIQGLRFIIQSEKPPHYLESRVEAFLITMEKSIEDMTEEAFQKHIQALAIRRLDKPKKLSAECAKYWGEIISQQYNFDRDNTEVAYLKTLTKEDIIKFYKEMLAVDAPRRHKVSVHVLAREMDSCPVVGEFPCQNDINLSQAPALPQPEVIQNMTEFKRGLPLFPLVKPHINFMAAKL

SEQ ID NO: 13737 - protein, 27 aa, Artificial Sequence
  Synthetic polypeptide
GQEFKTRLANMAISSSAGHVELMAYRA

SEQ ID NO: 13738 - protein, 468 aa, Artificial Sequence
  Synthetic polypeptide
LTPVILTFWEAEAGRSLEPRSSRPAWTTHPFAYVDPLHCNMAYLYLELLKDSLNEYAYAAELAGLSYDLQNTIYGMYLSVKGYNDKQPILLKKIIEKMATFEIDEKRFEIIKEAYMRSLNNFRAEQPHQHAMYYLRLLMTEVAWTKDELKEALDDVTLPRLKAFIPQLLSRLHIEALLHGNITKQAALGIMQMVEDTLIEHAHTKPLLPSQLVRYREVQLPDRGWFVYQQRNEVHNNCGIEIYYQTDMQSTSENMFLELFCQIISEPCFNTLRTKEQLGYIVFSGPRRANGIQGLRFIIQSEKPPHYLESRVEAFLITMEKSIEDMTEEAFQKHIQALAIRRLDKPKKLSAECAKYWGEIISQQYNFDRDNTEVAYLKTLTKEDIIKFYKEMLAVDAPRRHKVSVHVLAREMDSCPVVGEFPCQNDINLSQAPALPQPEVIQNMTEFKRGLPLFPLVKPHINFMAAKL

SEQ ID NO: 13739 - protein, 55 aa, Artificial Sequence
  Synthetic polypeptide
HFGKPRQEDRLSLGVRDQPGQHTHLLMWTPCTVTWPICTLSSSKTHSTSMHMQQS

SEQ ID NO: 13740 - protein, 19 aa, Artificial Sequence
  Synthetic polypeptide
EFETSLDNTPICLCGPLAL

SEQ ID NO: 13741 - protein, 989 aa, Artificial Sequence
  Synthetic polypeptide
PTSFQKKTYSKMNNPAIKRIGNHITKSPEDKREYRGLELANGIKVLLISDPTTDKSSAALDVHIGSLSDPPNIAGLSHFCEHMLFLGTKKYPKENEYSQFLSEHAGSSNAFTSGEHTNYYFDVSHEHLEGALDRFAQFFLCPLFDESCKDREVNAVDSEHEKNVMNDAWRLFQLEKATGNPKHPFSKFGTGNKYTLETRPNQEGIDVRQELLKFHSAYYSSNLMAVCVLGRESLDDLTNLVVKLFSEVENKNVPLPEFPEHPFQEEHLKQLYKIVPIKDIRNLYVTFPIPDLQKYYKSNPGHYLGHLIGHEGPGSLLSELKSKGWVNTLVGGQKEGARGFMFFIINVDLTEEGLLHVEDIILHMFQYIQKLRAEGPQEWVFQECKDLNAVAFRFKDKERPRGYTSKIAGILHYYPLEEVLTAEYLLEEFRPDLIEMVLDKLRPENVRVAIVSKSFEGKTDRTEEWYGTQYKQEAIPDEVIKKWQNADLNGKFKLPTKNEFIPTNFEILPLEKEATPYPALIKDTAMSKLWFKQDDKFFLPKACLNFEFFSPFAYVDPLHCNMAYLYLELLKDSLNEYAYAAELAGLSYDLQNTIYGMYLSVKGYNDKQPILLKKIIEKMATFEIDEKRFEIIKEAYMRSLNNFRAEQPHQHAMYYLRLLMTEVAWTKDELKEALDDVTLPRLKAFIPQLLSRLHIEALLHGNITKQAALGIMQMVEDTLIEHAHTKPLLPSQLVRYREVQLPDRGWFVYQQRNEVHNNCGIEIYYQTDMQSTSENMFLELFCQIISEPCFNTLRTKEQLGYIVFSGPRRANGIQGLRFIIQSEKPPHYLESRVEAFLITMEKSIEDMTEEAFQKHIQALAIRRLDKPKKLSAECAKYWGEIISQQYNFDRDNTEVAYLKTLTKEDIIKFYKEMLAVDAPRRHKVSVHVLAREMDSCPVVGEFPCQNDINLSQAPALPQPEVIQNMTEFKRGLPLFPLVKPHINFMAAKL

SEQ ID NO: 13742 - protein, 33 aa, Artificial Sequence
  Synthetic polypeptide
SQHFGRMRQVDHLQSGVQDQPDQQVSKKRLTAK

SEQ ID NO: 13743 - protein, 27 aa, Artificial Sequence
  Synthetic polypeptide
GRWITCSQEFRTSLTNKFPKKDLQQNE

SEQ ID NO: 13744 - protein, 241 aa, Artificial Sequence
  Synthetic polypeptide
PTSFQKKTYSKMNNPAIKRIGNHITKSPEDKREYRGLELANGIKVLLISDPTTDKSSAALDVHIGSLSDPPNIAGLSHFCEHMLFLGTKKYPKENEYSQFLSEHAGSSNAFTSGEHTNYYFDVSHEHLEGALDRFAQFFLCPLFDESCKDREVNAVDSEHEKNVMNDAWRLFQLEKATGNPKHPFSKFGTGNKYTLETRPNQEGIDVRQELLKFHSAYYSSNLMAVCVLGRESLDDLTNLV

SEQ ID NO: 13745 - protein, 51 aa, Artificial Sequence
  Synthetic polypeptide
VHVLCRDMDEGGNHHSQQTITRTENQTPHVLTHRWELNNENIWTQATEQHA

SEQ ID NO: 13746 - protein, 1043 aa, Artificial Sequence
  Synthetic polypeptide
TMRTFGHRPQNSMPDIIIWMIRGEKRLAYARIPAHQVLYSTSGENASGKYCGKTQTIFLKYPQEKNNGPKVPVELRVNIWLGLSAVEKKFNSFAEGTFTVFAEMYENQALMFGKWGTSGLVGRHKFSDVTGKIKLKREFFLPPKGWEWEGEWIVDPERSLLTEADAGHTEFTDEVYQNESRYPGGDWKPAEDTYTDANGDKAASPSELTCPPGWEWEDDAWSYDINRAVDEKGWEYGITIPPDHKPKSWVAAEKMYHTHRRRRLVRKRKKDLTQTASSTARAMEELQDQEGWEYASLIGWKFHWKQRSSDTFRRRRWRRKMAPSETHGAAAIFKLEGALGADTTEDGDEKSLEKQKHSATTVFGANTPIVSCNFDRVYIYHLRCYVYQARNLLALDKDSFSDPYAHICFLHRSKTTEIIHSTLNPTWDQTIIFDEVEIYGEPQTVLQNPPKVIMELFDNDQVGKDEFLGRSIFSPVVKLNSEMDITPKLLWHPVMNGDKACGDVLVTAELILRGKDGSNLPILPPQRAPNLYMVPQGIRPVVQLTAIEILAWGLRNMKNFQMASITSPSLVVECGGERVESVVIKNLKKTPNFPSSVLFMKVFLPKEELYMPPLVIKVIDHRQFGRKPVVGQCTIERLDRFRCDPYAGKEDIVPQLKASLLSAPPCRDIVIEMEDTKPLLASKCLSSMSTALSKMASPATVHLTEKEEEIVDWWSKFYASSGEHEKCGQYIQKGYSKLKIYNCELENVAEFEGLTDFSDTFKLYRGKSDENEDPSVVGEFKGSFRIYPLPDDPSVPAPPRQFRELPDSVPQECTVRIYIVRGLELQPQDNNGLCDPYIKITLGKKVIEDRDHYIPNTLNPVFGRMYELSCYLPQEKDLKISVYDYDTFTRDEKVGETIIDLENRFLSRFGSHCGIPEEYCVSGVNTWRDQLRPTQLLQNVARFKGFPQPILSEDGSRIRYGGRDYSLDEFEANKILHQHLGAPEERLALHILRTQGLVPEHVETRTLHSTFQPNISQILPACDHLEHQGRYLGREKHHRRGNE

SEQ ID NO: 13747 - protein, 17 aa, Artificial Sequence
  Synthetic polypeptide
EHLDTGHRTACLTSSSG

SEQ ID NO: 13748 - protein, 1302 aa, Artificial Sequence
  Synthetic polypeptide
TMRTFGHRPQNSMPDIIIWMIRGEKRLAYARIPAHQVLYSTSGENASGKYCGKTQTIFLKYPQEKNNGPKVPVELRVNIWLGLSAVEKKFNSFAEGTFTVFAEMYENQALMFGKWGTSGLVGRHKFSDVTGKIKLKREFFLPPKGWEWEGEWIVDPERSLLTEADAGHTEFTDEVYQNESRYPGGDWKPAEDTYTDANGDKAASPSELTCPPGWEWEDDAWSYDINRAVDEKGWEYGITIPPDHKPKSWVAAEKMYHTHRRRRLVRKRKKDLTQTASSTARAMEELQDQEGWEYASLIGWKFHWKQRSSDTFRRRRWRRKMAPSETHGAAAIFKLEGALGADTTEDGDEKSLEKQKHSATTVFGANTPIVSCNFDRVYIYHLRCYVYQARNLLALDKDSFSDPYAHICFLHRSKTTEIIHSTLNPTWDQTIIFDEVEIYGEPQTVLQNPPKVIMELFDNDQVGKDEFLGRSIFSPVVKLNSEMDITPKLLWHPVMNGDKACGDVLVTAELILRGKDGSNLPILPPQRAPNLYMVPQGIRPVVQLTAIEILAWGLRNMKNFQMASITSPSLVVECGGERVESVVIKNLKKTPNFPSSVLFMKVFLPKEELYMPPLVIKVIDHRQFGRKPVVGQCTIERLDRFRCDPYAGKEDIVPQLKASLLSAPPCRDIVIEMEDTKPLLASKLTEKEEEIVDWWSKFYASSGEHEKCGQYIQKGYSKLKIYNCELENVAEFEGLTDFSDTFKLYRGKSDENEDPSVVGEFKGSFRIYPLPDDPSVPAPPRQFRELPDSVPQECTVRIYIVRGLELQPQDNNGLCDPYIKITLGKKVIEDRDHYIPNTLNPVFGRMYELSCYLPQEKDLKISVYDYDTFTRDEKVGETIIDLENRFLSRFGSHCGIPEEYCVSGVNTWRDQLRPTQLLQNVARFKGFPQPILSEDGSRIRYGGRDYSLDEFEANKILHQHLGAPEERLALHILRTQGLVPEHVETRTLHSTFQPNISQGKLQMWVDVFPKSLGPPGPPFNITPRKAKKYYLRVIIWNTKDVILDEKSITGEEMSDIYVKGWIPGNEENKQKTDVHYRSLDGEGNFNWRFVFPFDYLPAEQLCIVAKKEHFWSIDQTEFRIPPRLIIQIWDNDKFSLDDYLGFLELDLRHTIIPAKSPEKCRLDMIPDLKAMNPLKAKTASLFEQKSMKGWWPCYAEKDGARVMAGKVEMTLEILNEKEADERPAGKGRDEPNMNPKLDLPNRPETSFLWFTNPCKTMKFIVWRRFKWVIIGLLFLLILLLFVAVLLYSLPNYLSMKIVKPNV

SEQ ID NO: 13749 - protein, 1302 aa, Artificial Sequence
  Synthetic polypeptide
TMRTFGHRPQNSMPDIIIWMIRGEKRLAYARIPAHQVLYSTSGENASGKYCGKTQTIFLKYPQEKNNGPKVPVELRVNIWLGLSAVEKKFNSFAEGTFTVFAEMYENQALMFGKWGTSGLVGRHKFSDVTGKIKLKREFFLPPKGWEWEGEWIVDPERSLLTEADAGHTEFTDEVYQNESRYPGGDWKPAEDTYTDANGDKAASPSELTCPPGWEWEDDAWSYDINRAVDEKGWEYGITIPPDHKPKSWVAAEKMYHTHRRRRLVRKRKKDLTQTASSTARAMEELQDQEGWEYASLIGWKFHWKQRSSDTFRRRRWRRKMAPSETHGAAAIFKLEGALGADTTEDGDEKSLEKQKHSATTVFGANTPIVSCNFDRVYIYHLRCYVYQARNLLALDKDSFSDPYAHICFLHRSKTTEIIHSTLNPTWDQTIIFDEVEIYGEPQTVLQNPPKVIMELFDNDQVGKDEFLGRSIFSPVVKLNSEMDITPKLLWHPVMNGDKACGDVLVTAELILRGKDGSNLPILPPQRAPNLYMVPQGIRPVVQLTAIEILAWGLRNMKNFQMASITSPSLVVECGGERVESVVIKNLKKTPNFPSSVLFMKVFLPKEELYMPPLVIKVIDHRQFGRKPVVGQCTIERLDRFRCDPYAGKEDIVPQLKASLLSAPPCRDIVIEMEDTKPLLASKLVSIEEEIVDWWSKFYASSGEHEKCGQYIQKGYSKLKIYNCELENVAEFEGLTDFSDTFKLYRGKSDENEDPSVVGEFKGSFRIYPLPDDPSVPAPPRQFRELPDSVPQECTVRIYIVRGLELQPQDNNGLCDPYIKITLGKKVIEDRDHYIPNTLNPVFGRMYELSCYLPQEKDLKISVYDYDTFTRDEKVGETIIDLENRFLSRFGSHCGIPEEYCVSGVNTWRDQLRPTQLLQNVARFKGFPQPILSEDGSRIRYGGRDYSLDEFEANKILHQHLGAPEERLALHILRTQGLVPEHVETRTLHSTFQPNISQGKLQMWVDVFPKSLGPPGPPFNITPRKAKKYYLRVIIWNTKDVILDEKSITGEEMSDIYVKGWIPGNEENKQKTDVHYRSLDGEGNFNWRFVFPFDYLPAEQLCIVAKKEHFWSIDQTEFRIPPRLIIQIWDNDKFSLDDYLGFLELDLRHTIIPAKSPEKCRLDMIPDLKAMNPLKAKTASLFEQKSMKGWWPCYAEKDGARVMAGKVEMTLEILNEKEADERPAGKGRDEPNMNPKLDLPNRPETSFLWFTNPCKTMKFIVWRRFKWVIIGLLFLLILLLFVAVLLYSLPNYLSMKIVKPNV

SEQ ID NO: 13750 - protein, 1292 aa, Artificial Sequence
  Synthetic polypeptide
TMRTFGHRPQNSMPDIIIWMIRGEKRLAYARIPAHQVLYSTSGENASGKYCGKTQTIFLKYPQEKNNGPKVPVELRVNIWLGLSAVEKKFNSFAEGTFTVFAEMYENQALMFGKWGTSGLVGRHKFSDVTGKIKLKREFFLPPKGWEWEGEWIVDPERSLLTEADAGHTEFTDEVYQNESRYPGGDWKPAEDTYTDANGDKAASPSELTCPPGWEWEDDAWSYDINRAVDEKGWEYGITIPPDHKPKSWVAAEKMYHTHRRRRLVRKRKKDLTQTASSTARAMEELQDQEGWEYASLIGWKFHWKQRSSDTFRRRRWRRKMAPSETHGAAAIFKLEGALGADTTEDGDEKSLEKQKHSATTVFGANTPIVSCNFDRVYIYHLRCYVYQARNLLALDKDSFSDPYAHICFLHRSKTTEIIHSTLNPTWDQTIIFDEVEIYGEPQTVLQNPPKVIMELFDNDQVGKDEFLGRSIFSPVVKLNSEMDITPKLLWHPVMNGDKACGDVLVTAELILRGKDGSNLPILPPQRAPNLYMVPQGIRPVVQLTAIEILAWGLRNMKNFQMASITSPSLVVECGGERVESVVIKNLKKTPNFPSSVLFMKVFLPKEELYMPPLVIKVIDHRQFGRKPVVGQCTIERLDRFRCDPYAGKEDIVPQLKASLLSAPPCRDIVIEMEDTKPLLASKCLSSMSTALSKMASPATVHVLDEEEEIVDWWSKFYASSGEHEKCGQYIQKGYSKLKIYNCELENVAEFEGLTDFSDTFKLYRGKSDENEDPSVVGEFKGSFRIYPLPDDPSVPAPPRQFRELPDSVPQECTVRIYIVRGLELQPQDNNGLCDPYIKITLGKKVIEDRDHYIPNTLNPVFGRMYELSCYLPQEKDLKISVYDYDTFTRDEKVGETIIDLENRFLSRFGSHCGIPEEYCVSGVNTWRDQLRPTQLLQNVARFKGFPQPILSEDGSRIRYGGRDYSLDEFEANKILHQHLGAPEERLALHILRTQGLVPEHVETRTLHSTFQPNISQRYYLRVIIWNTKDVILDEKSITGEEMSDIYVKGWIPGNEENKQKTDVHYRSLDGEGNFNWRFVFPFDYLPAEQLCIVAKKEHFWSIDQTEFRIPPRLIIQIWDNDKFSLDDYLGFLELDLRHTIIPAKSPEKCRLDMIPDLKAMNPLKAKTASLFEQKSMKGWWPCYAEKDGARVMAGKVEMTLEILNEKEADERPAGKGRDEPNMNPKLDLPNRPETSFLWFTNPCKTMKFIVWRRFKWVIIGLLFLLILLLFVAVLLYSLPNYLSMKIVKPNV

SEQ ID NO: 13751 - protein, 45 aa, Artificial Sequence
  Synthetic polypeptide
VHVLCRDMDEGGNHHSQQTITRTENQTPHVLTHSHRTACLTSSSG

SEQ ID NO: 13752 - protein, 63 aa, Artificial Sequence
  Synthetic polypeptide
MIDWIKKMWHIYTMDYYAAIKKDEYMSFAGTWMKVETIILSKLSQGQKTKHRMFSLIATEQHA

SEQ ID NO: 13753 - protein, 42 aa, Artificial Sequence
  Synthetic polypeptide
SQHFGRLSKHRRNRGRLCSNVWTLLPESLWKPQRVHGIPRPL

SEQ ID NO: 13754 - protein, 28 aa, Artificial Sequence
  Synthetic polypeptide
SGAAREAWTGRRVEFLPGTATSLLYFGV

SEQ ID NO: 13755 - protein, 2024 aa, Artificial Sequence
  Synthetic polypeptide
VARQGKPGLAGELSSYQAPPRACCILEFDLRGIPLDFSSSLGIIVKDFETIGQNKLIGTATVALKDLTGDQSRSLPYKLISLLNEKGQDTGATIDLVIGYDPPSAPHPNDLSGPSVPGMGGDGEEDEGDEDRLDNAVRGPGPKGPVGTVSEAQLARRLTKVKNSRRMLSNKPQDFQIRVRVIEGRQLSGNNIRPVVKVHVCGQTHRTRIKRGNNPFFDELFFYNVNMTPSELMDEIISIRVYNSHSLRADCLMGEFKIDVGFVYDEPGHAVMRKWLLLNDPEDTSSGSKGYMKVSMFVLGTGDEPPPERRDRDNDSDDVESNLLLPAGIALRWVTFLLKIYRAEDIPQMDDAFSQTVKEIFGGNADKKNLVDPFVEVSFAGKKVCTNIIEKNANPEWNQVVNLQIKFPSVCEKIKLTIYDWDRLTKNDVVGTTYLHLSKIAASGGEVEVNTGETEVGFVPTFGPCYLNLYGSPREYTGFPDPYDELNTGKGEGVAYRGRILVELATFLEKTPPDKKLEPISNDDLLVVEKYQRRRKYSLSAVFHSATMLQDVGEAIQFEVSIGNYGNKFDTTCKPLASTTQYSRAVFDGNYYYYLPWAHTKPVVTLTSYWEDISHRLDAVNTLLAMAERLQTNIEALKSGIQGKIPANQLAELWLKLIDEVIEDTRYTLPLTEGKANVTVLDTQIRKLRSRSLSQIHEAAVRMRSEATDVKSTLAEIEDWLDKLMQLTEEPQNSMPDIIIWMIRGEKRLAYARIPAHQVLYSTSGENASGKYCGKTQTIFLKYPQEKNNGPKVPVELRVNIWLGLSAVEKKFNSFAEGTFTVFAEMYENQALMFGKWGTSGLVGRHKFSDVTGKIKLKREFFLPPKGWEWEGEWIVDPERSLLTEADAGHTEFTDEVYQNESRYPGGDWKPAEDTYTDANGDKAASPSELTCPPGWEWEDDAWSYDINRAVDEKGWEYGITIPPDHKPKSWVAAEKMYHTHRRRRLVRKRKKDLTQTASSTARAMEELQDQEGWEYASLIGWKFHWKQRSSDTFRRRRWRRKMAPSETHGAAAIFKLEGALGADTTEDGDEKSLEKQKHSATTVFGANTPIVSCNFDRVYIYHLRCYVYQARNLLALDKDSFSDPYAHICFLHRSKTTEIIHSTLNPTWDQTIIFDEVEIYGEPQTVLQNPPKVIMELFDNDQVGKDEFLGRSIFSPVVKLNSEMDITPKLLWHPVMNGDKACGDVLVTAELILRGKDGSNLPILPPQRAPNLYMVPQGIRPVVQLTAIEILAWGLRNMKNFQMASITSPSLVVECGGERVESVVIKNLKKTPNFPSSVLFMKVFLPKEELYMPPLVIKVIDHRQFGRKPVVGQCTIERLDRFRCDPYAGKEDIVPQLKASLLSAPPCRDIVIEMEDTKPLLASKLTEKEEEIVDWWSKFYASSGEHEKCGQYIQKGYSKLKIYNCELENVAEFEGLTDFSDTFKLYRGKSDENEDPSVVGEFKGSFRIYPLPDDPSVPAPPRQFRELPDSVPQECTVRIYIVRGLELQPQDNNGLCDPYIKITLGKKVIEDRDHYIPNTLNPVFGRMYELSCYLPQEKDLKISVYDYDTFTRDEKVGETIIDLENRFLSRFGSHCGIPEEYCVSGVNTWRDQLRPTQLLQNVARFKGFPQPILSEDGSRIRYGGRDYSLDEFEANKILHQHLGAPEERLALHILRTQGLVPEHVETRTLHSTFQPNISQGKLQMWVDVFPKSLGPPGPPFNITPRKAKKYYLRVIIWNTKDVILDEKSITGEEMSDIYVKGWIPGNEENKQKTDVHYRSLDGEGNFNWRFVFPFDYLPAEQLCIVAKKEHFWSIDQTEFRIPPRLIIQIWDNDKFSLDDYLGFLELDLRHTIIPAKSPEKCRLDMIPDLKAMNPLKAKTASLFEQKSMKGWWPCYAEKDGARVMAGKVEMTLEILNEKEADERPAGKGRDEPNMNPKLDLPNRPETSFLWFTNPCKTMKFIVWRRFKWVIIGLLFLLILLLFVAVLLYSLPNYLSMKIVKPNV

SEQ ID NO: 13756 - protein, 16 aa, Artificial Sequence
  Synthetic polypeptide
VLTRHRHELAVFWSLT

SEQ ID NO: 13757 - protein, 2037 aa, Artificial Sequence
  Synthetic polypeptide
VARQGKPGLAGELSSYQAPPRACCILEFDLRGIPLDFSSSLGIIVKDFETIGQNKLIGTATVALKDLTGDQSRSLPYKLISLLNEKGQDTGATIDLVIGYDPPSAPHPNDLSGPSVPGMGGDGEEDEGDEDRLDNAVRGPGPKGPVGTVSEAQLARRLTKVKNSRRMLSNKPQDFQIRVRVIEGRQLSGNNIRPVVKVHVCGQTHRTRIKRGNNPFFDELFFYNVNMTPSELMDEIISIRVYNSHSLRADCLMGEFKIDVGFVYDEPGHAVMRKWLLLNDPEDTSSGSKGYMKVSMFVLGTGDEPPPERRDRDNDSDDVESNLLLPAGIALRWVTFLLKIYRAEDIPQMDDAFSQTVKEIFGGNADKKNLVDPFVEVSFAGKKVCTNIIEKNANPEWNQVVNLQIKFPSVCEKIKLTIYDWDRLTKNDVVGTTYLHLSKIAASGGEVEDFSSSGTGAASYTVNTGETEVGFVPTFGPCYLNLYGSPREYTGFPDPYDELNTGKGEGVAYRGRILVELATFLEKTPPDKKLEPISNDDLLVVEKYQRRRKYSLSAVFHSATMLQDVGEAIQFEVSIGNYGNKFDTTCKPLASTTQYSRAVFDGNYYYYLPWAHTKPVVTLTSYWEDISHRLDAVNTLLAMAERLQTNIEALKSGIQGKIPANQLAELWLKLIDEVIEDTRYTLPLTEGKANVTVLDTQIRKLRSRSLSQIHEAAVRMRSEATDVKSTLAEIEDWLDKLMQLTEEPQNSMPDIIIWMIRGEKRLAYARIPAHQVLYSTSGENASGKYCGKTQTIFLKYPQEKNNGPKVPVELRVNIWLGLSAVEKKFNSFAEGTFTVFAEMYENQALMFGKWGTSGLVGRHKFSDVTGKIKLKREFFLPPKGWEWEGEWIVDPERSLLTEADAGHTEFTDEVYQNESRYPGGDWKPAEDTYTDANGDKAASPSELTCPPGWEWEDDAWSYDINRAVDEKGWEYGITIPPDHKPKSWVAAEKMYHTHRRRRLVRKRKKDLTQTASSTARAMEELQDQEGWEYASLIGWKFHWKQRSSDTFRRRRWRRKMAPSETHGAAAIFKLEGALGADTTEDGDEKSLEKQKHSATTVFGANTPIVSCNFDRVYIYHLRCYVYQARNLLALDKDSFSDPYAHICFLHRSKTTEIIHSTLNPTWDQTIIFDEVEIYGEPQTVLQNPPKVIMELFDNDQVGKDEFLGRSIFSPVVKLNSEMDITPKLLWHPVMNGDKACGDVLVTAELILRGKDGSNLPILPPQRAPNLYMVPQGIRPVVQLTAIEILAWGLRNMKNFQMASITSPSLVVECGGERVESVVIKNLKKTPNFPSSVLFMKVFLPKEELYMPPLVIKVIDHRQFGRKPVVGQCTIERLDRFRCDPYAGKEDIVPQLKASLLSAPPCRDIVIEMEDTKPLLASKLTEKEEEIVDWWSKFYASSGEHEKCGQYIQKGYSKLKIYNCELENVAEFEGLTDFSDTFKLYRGKSDENEDPSVVGEFKGSFRIYPLPDDPSVPAPPRQFRELPDSVPQECTVRIYIVRGLELQPQDNNGLCDPYIKITLGKKVIEDRDHYIPNTLNPVFGRMYELSCYLPQEKDLKISVYDYDTFTRDEKVGETIIDLENRFLSRFGSHCGIPEEYCVSGVNTWRDQLRPTQLLQNVARFKGFPQPILSEDGSRIRYGGRDYSLDEFEANKILHQHLGAPEERLALHILRTQGLVPEHVETRTLHSTFQPNISQGKLQMWVDVFPKSLGPPGPPFNITPRKAKKYYLRVIIWNTKDVILDEKSITGEEMSDIYVKGWIPGNEENKQKTDVHYRSLDGEGNFNWRFVFPFDYLPAEQLCIVAKKEHFWSIDQTEFRIPPRLIIQIWDNDKFSLDDYLGFLELDLRHTIIPAKSPEKCRLDMIPDLKAMNPLKAKTASLFEQKSMKGWWPCYAEKDGARVMAGKVEMTLEILNEKEADERPAGKGRDEPNMNPKLDLPNRPETSFLWFTNPCKTMKFIVWRRFKWVIIGLLFLLILLLFVAVLLYSLPNYLSMKIVKPNV

SEQ ID NO: 13758 - protein, 2037 aa, Artificial Sequence
  Synthetic polypeptide
VARQGKPGLAGELSSYQAPPRACCILEFDLRGIPLDFSSSLGIIVKDFETIGQNKLIGTATVALKDLTGDQSRSLPYKLISLLNEKGQDTGATIDLVIGYDPPSAPHPNDLSGPSVPGMGGDGEEDEGDEDRLDNAVRGPGPKGPVGTVSEAQLARRLTKVKNSRRMLSNKPQDFQIRVRVIEGRQLSGNNIRPVVKVHVCGQTHRTRIKRGNNPFFDELFFYNVNMTPSELMDEIISIRVYNSHSLRADCLMGEFKIDVGFVYDEPGHAVMRKWLLLNDPEDTSSGSKGYMKVSMFVLGTGDEPPPERRDRDNDSDDVESNLLLPAGIALRWVTFLLKIYRAEDIPQMDDAFSQTVKEIFGGNADKKNLVDPFVEVSFAGKKVCTNIIEKNANPEWNQVVNLQIKFPSVCEKIKLTIYDWDRLTKNDVVGTTYLHLSKIAASGGEVEDFSSSGTGAASYTVNTGETEVGFVPTFGPCYLNLYGSPREYTGFPDPYDELNTGKGEGVAYRGRILVELATFLEKTPPDKKLEPISNDDLLVVEKYQRRRKYSLSAVFHSATMLQDVGEAIQFEVSIGNYGNKFDTTCKPLASTTQYSRAVFDGNYYYYLPWAHTKPVVTLTSYWEDISHRLDAVNTLLAMAERLQTNIEALKSGIQGKIPANQLAELWLKLIDEVIEDTRYTLPLTEGKANVTVLDTQIRKLRSRSLSQIHEAAVRMRSEATDVKSTLAEIEDWLDKLMQLTEEPQNSMPDIIIWMIRGEKRLAYARIPAHQVLYSTSGENASGKYCGKTQTIFLKYPQEKNNGPKVPVELRVNIWLGLSAVEKKFNSFAEGTFTVFAEMYENQALMFGKWGTSGLVGRHKFSDVTGKIKLKREFFLPPKGWEWEGEWIVDPERSLLTEADAGHTEFTDEVYQNESRYPGGDWKPAEDTYTDANGDKAASPSELTCPPGWEWEDDAWSYDINRAVDEKGWEYGITIPPDHKPKSWVAAEKMYHTHRRRRLVRKRKKDLTQTASSTARAMEELQDQEGWEYASLIGWKFHWKQRSSDTFRRRRWRRKMAPSETHGAAAIFKLEGALGADTTEDGDEKSLEKQKHSATTVFGANTPIVSCNFDRVYIYHLRCYVYQARNLLALDKDSFSDPYAHICFLHRSKTTEIIHSTLNPTWDQTIIFDEVEIYGEPQTVLQNPPKVIMELFDNDQVGKDEFLGRSIFSPVVKLNSEMDITPKLLWHPVMNGDKACGDVLVTAELILRGKDGSNLPILPPQRAPNLYMVPQGIRPVVQLTAIEILAWGLRNMKNFQMASITSPSLVVECGGERVESVVIKNLKKTPNFPSSVLFMKVFLPKEELYMPPLVIKVIDHRQFGRKPVVGQCTIERLDRFRCDPYAGKEDIVPQLKASLLSAPPCRDIVIEMEDTKPLLASKLVSIEEEIVDWWSKFYASSGEHEKCGQYIQKGYSKLKIYNCELENVAEFEGLTDFSDTFKLYRGKSDENEDPSVVGEFKGSFRIYPLPDDPSVPAPPRQFRELPDSVPQECTVRIYIVRGLELQPQDNNGLCDPYIKITLGKKVIEDRDHYIPNTLNPVFGRMYELSCYLPQEKDLKISVYDYDTFTRDEKVGETIIDLENRFLSRFGSHCGIPEEYCVSGVNTWRDQLRPTQLLQNVARFKGFPQPILSEDGSRIRYGGRDYSLDEFEANKILHQHLGAPEERLALHILRTQGLVPEHVETRTLHSTFQPNISQGKLQMWVDVFPKSLGPPGPPFNITPRKAKKYYLRVIIWNTKDVILDEKSITGEEMSDIYVKGWIPGNEENKQKTDVHYRSLDGEGNFNWRFVFPFDYLPAEQLCIVAKKEHFWSIDQTEFRIPPRLIIQIWDNDKFSLDDYLGFLELDLRHTIIPAKSPEKCRLDMIPDLKAMNPLKAKTASLFEQKSMKGWWPCYAEKDGARVMAGKVEMTLEILNEKEADERPAGKGRDEPNMNPKLDLPNRPETSFLWFTNPCKTMKFIVWRRFKWVIIGLLFLLILLLFVAVLLYSLPNYLSMKIVKPNV

SEQ ID NO: 13759 - protein, 2027 aa, Artificial Sequence
  Synthetic polypeptide
VARQGKPGLAGELSSYQAPPRACCILEFDLRGIPLDFSSSLGIIVKDFETIGQNKLIGTATVALKDLTGDQSRSLPYKLISLLNEKGQDTGATIDLVIGYDPPSAPHPNDLSGPSVPGMGGDGEEDEGDEDRLDNAVRGPGPKGPVGTVSEAQLARRLTKVKNSRRMLSNKPQDFQIRVRVIEGRQLSGNNIRPVVKVHVCGQTHRTRIKRGNNPFFDELFFYNVNMTPSELMDEIISIRVYNSHSLRADCLMGEFKIDVGFVYDEPGHAVMRKWLLLNDPEDTSSGSKGYMKVSMFVLGTGDEPPPERRDRDNDSDDVESNLLLPAGIALRWVTFLLKIYRAEDIPQMDDAFSQTVKEIFGGNADKKNLVDPFVEVSFAGKKVCTNIIEKNANPEWNQVVNLQIKFPSVCEKIKLTIYDWDRLTKNDVVGTTYLHLSKIAASGGEVEDFSSSGTGAASYTVNTGETEVGFVPTFGPCYLNLYGSPREYTGFPDPYDELNTGKGEGVAYRGRILVELATFLEKTPPDKKLEPISNDDLLVVEKYQRRRKYSLSAVFHSATMLQDVGEAIQFEVSIGNYGNKFDTTCKPLASTTQYSRAVFDGNYYYYLPWAHTKPVVTLTSYWEDISHRLDAVNTLLAMAERLQTNIEALKSGIQGKIPANQLAELWLKLIDEVIEDTRYTLPLTEGKANVTVLDTQIRKLRSRSLSQIHEAAVRMRSEATDVKSTLAEIEDWLDKLMQLTEEPQNSMPDIIIWMIRGEKRLAYARIPAHQVLYSTSGENASGKYCGKTQTIFLKYPQEKNNGPKVPVELRVNIWLGLSAVEKKFNSFAEGTFTVFAEMYENQALMFGKWGTSGLVGRHKFSDVTGKIKLKREFFLPPKGWEWEGEWIVDPERSLLTEADAGHTEFTDEVYQNESRYPGGDWKPAEDTYTDANGDKAASPSELTCPPGWEWEDDAWSYDINRAVDEKGWEYGITIPPDHKPKSWVAAEKMYHTHRRRRLVRKRKKDLTQTASSTARAMEELQDQEGWEYASLIGWKFHWKQRSSDTFRRRRWRRKMAPSETHGAAAIFKLEGALGADTTEDGDEKSLEKQKHSATTVFGANTPIVSCNFDRVYIYHLRCYVYQARNLLALDKDSFSDPYAHICFLHRSKTTEIIHSTLNPTWDQTIIFDEVEIYGEPQTVLQNPPKVIMELFDNDQVGKDEFLGRSIFSPVVKLNSEMDITPKLLWHPVMNGDKACGDVLVTAELILRGKDGSNLPILPPQRAPNLYMVPQGIRPVVQLTAIEILAWGLRNMKNFQMASITSPSLVVECGGERVESVVIKNLKKTPNFPSSVLFMKVFLPKEELYMPPLVIKVIDHRQFGRKPVVGQCTIERLDRFRCDPYAGKEDIVPQLKASLLSAPPCRDIVIEMEDTKPLLASKCLSSMSTALSKMASPATVHVLDEEEEIVDWWSKFYASSGEHEKCGQYIQKGYSKLKIYNCELENVAEFEGLTDFSDTFKLYRGKSDENEDPSVVGEFKGSFRIYPLPDDPSVPAPPRQFRELPDSVPQECTVRIYIVRGLELQPQDNNGLCDPYIKITLGKKVIEDRDHYIPNTLNPVFGRMYELSCYLPQEKDLKISVYDYDTFTRDEKVGETIIDLENRFLSRFGSHCGIPEEYCVSGVNTWRDQLRPTQLLQNVARFKGFPQPILSEDGSRIRYGGRDYSLDEFEANKILHQHLGAPEERLALHILRTQGLVPEHVETRTLHSTFQPNISQRYYLRVIIWNTKDVILDEKSITGEEMSDIYVKGWIPGNEENKQKTDVHYRSLDGEGNFNWRFVFPFDYLPAEQLCIVAKKEHFWSIDQTEFRIPPRLIIQIWDNDKFSLDDYLGFLELDLRHTIIPAKSPEKCRLDMIPDLKAMNPLKAKTASLFEQKSMKGWWPCYAEKDGARVMAGKVEMTLEILNEKEADERPAGKGRDEPNMNPKLDLPNRPETSFLWFTNPCKTMKFIVWRRFKWVIIGLLFLLILLLFVAVLLYSLPNYLSMKIVKPNV

SEQ ID NO: 13760 - protein, 421 aa, Artificial Sequence
  Synthetic polypeptide
VARQGKPGLAGELSSYQAPPRACCILEFDLRGIPLDFSSSLGIIVKDFETIGQNKLIGTATVALKDLTGDQSRSLPYKLISLLNEKGQDTGATIDLVIGYDPPSAPHPNDLSGPSVPGMGGDGEEDEGDEDRLDNAVRGPGPKGPVGTVSEAQLARRLTKVKNSRRMLSNKPQDFQIRVRVIEGRQLSGNNIRPVVKVHVCGQTHRTRIKRGNNPFFDELFFYNVNMTPSELMDEIISIRVYNSHSLRADCLMGEFKIDVGFVYDEPGHAVMRKWLLLNDPEDTSSGSKGYMKVSMFVLGTGDEPPPERRDRDNDSDDVESNLLLPAGIALRWVTFLLKIYRAEDIPQMDDAFSQTVKEIFGGNADKKNLVDPFVEVSFAGKKVCTNIIEKNANPEWNQVVNLQIKFPSVCEKIKLTIYDW

SEQ ID NO: 13761 - protein, 136 aa, Artificial Sequence
  Synthetic polypeptide
VARQGKPGLAGELSSYQAPPRACCILEFDLRGIPLDFSSSLGIIVKDFETIGQNKLIGTATVALKDLTGDQSRSLPYKLISLLNEKGQDTGATIDLVIGYDPPSAPHPNDLSGPSVPGMGGKLTLLKAQPPPGGGC

SEQ ID NO: 13762 - protein, 2043 aa, Artificial Sequence
  Synthetic polypeptide
SQHFGRRRWADHLTSGVRDQPGQHDEKKKTKKVDNELNPVWNEILEFDLRGIPLDFSSSLGIIVKDFETIGQNKLIGTATVALKDLTGDQSRSLPYKLISLLNEKGQDTGATIDLVIGYDPPSAPHPNDLSGPSVPGMGGDGEEDEGDEDRLDNAVRGPGPKGPVGTVSEAQLARRLTKVKNSRRMLSNKPQDFQIRVRVIEGRQLSGNNIRPVVKVHVCGQTHRTRIKRGNNPFFDELFFYNVNMTPSELMDEIISIRVYNSHSLRADCLMGEFKIDVGFVYDEPGHAVMRKWLLLNDPEDTSSGSKGYMKVSMFVLGTGDEPPPERRDRDNDSDDVESNLLLPAGIALRWVTFLLKIYRAEDIPQMDDAFSQTVKEIFGGNADKKNLVDPFVEVSFAGKKVCTNIIEKNANPEWNQVVNLQIKFPSVCEKIKLTIYDWDRLTKNDVVGTTYLHLSKIAASGGEVEVNTGETEVGFVPTFGPCYLNLYGSPREYTGFPDPYDELNTGKGEGVAYRGRILVELATFLEKTPPDKKLEPISNDDLLVVEKYQRRRKYSLSAVFHSATMLQDVGEAIQFEVSIGNYGNKFDTTCKPLASTTQYSRAVFDGNYYYYLPWAHTKPVVTLTSYWEDISHRLDAVNTLLAMAERLQTNIEALKSGIQGKIPANQLAELWLKLIDEVIEDTRYTLPLTEGKANVTVLDTQIRKLRSRSLSQIHEAAVRMRSEATDVKSTLAEIEDWLDKLMQLTEEPQNSMPDIIIWMIRGEKRLAYARIPAHQVLYSTSGENASGKYCGKTQTIFLKYPQEKNNGPKVPVELRVNIWLGLSAVEKKFNSFAEGTFTVFAEMYENQALMFGKWGTSGLVGRHKFSDVTGKIKLKREFFLPPKGWEWEGEWIVDPERSLLTEADAGHTEFTDEVYQNESRYPGGDWKPAEDTYTDANGDKAASPSELTCPPGWEWEDDAWSYDINRAVDEKGWEYGITIPPDHKPKSWVAAEKMYHTHRRRRLVRKRKKDLTQTASSTARAMEELQDQEGWEYASLIGWKFHWKQRSSDTFRRRRWRRKMAPSETHGAAAIFKLEGALGADTTEDGDEKSLEKQKHSATTVFGANTPIVSCNFDRVYIYHLRCYVYQARNLLALDKDSFSDPYAHICFLHRSKTTEIIHSTLNPTWDQTIIFDEVEIYGEPQTVLQNPPKVIMELFDNDQVGKDEFLGRSIFSPVVKLNSEMDITPKLLWHPVMNGDKACGDVLVTAELILRGKDGSNLPILPPQRAPNLYMVPQGIRPVVQLTAIEILAWGLRNMKNFQMASITSPSLVVECGGERVESVVIKNLKKTPNFPSSVLFMKVFLPKEELYMPPLVIKVIDHRQFGRKPVVGQCTIERLDRFRCDPYAGKEDIVPQLKASLLSAPPCRDIVIEMEDTKPLLASKLTEKEEEIVDWWSKFYASSGEHEKCGQYIQKGYSKLKIYNCELENVAEFEGLTDFSDTFKLYRGKSDENEDPSVVGEFKGSFRIYPLPDDPSVPAPPRQFRELPDSVPQECTVRIYIVRGLELQPQDNNGLCDPYIKITLGKKVIEDRDHYIPNTLNPVFGRMYELSCYLPQEKDLKISVYDYDTFTRDEKVGETIIDLENRFLSRFGSHCGIPEEYCVSGVNTWRDQLRPTQLLQNVARFKGFPQPILSEDGSRIRYGGRDYSLDEFEANKILHQHLGAPEERLALHILRTQGLVPEHVETRTLHSTFQPNISQGKLQMWVDVFPKSLGPPGPPFNITPRKAKKYYLRVIIWNTKDVILDEKSITGEEMSDIYVKGWIPGNEENKQKTDVHYRSLDGEGNFNWRFVFPFDYLPAEQLCIVAKKEHFWSIDQTEFRIPPRLIIQIWDNDKFSLDDYLGFLELDLRHTIIPAKSPEKCRLDMIPDLKAMNPLKAKTASLFEQKSMKGWWPCYAEKDGARVMAGKVEMTLEILNEKEADERPAGKGRDEPNMNPKLDLPNRPETSFLWFTNPCKTMKFIVWRRFKWVIIGLLFLLILLLFVAVLLYSLPNYLSMKIVKPNV

SEQ ID NO: 13763 - protein, 23 aa, Artificial Sequence
  Synthetic polypeptide
RQEFETSLANMMRKRKQRKLIMN

SEQ ID NO: 13764 - protein, 2056 aa, Artificial Sequence
  Synthetic polypeptide
SQHFGRRRWADHLTSGVRDQPGQHDEKKKTKKVDNELNPVWNEILEFDLRGIPLDFSSSLGIIVKDFETIGQNKLIGTATVALKDLTGDQSRSLPYKLISLLNEKGQDTGATIDLVIGYDPPSAPHPNDLSGPSVPGMGGDGEEDEGDEDRLDNAVRGPGPKGPVGTVSEAQLARRLTKVKNSRRMLSNKPQDFQIRVRVIEGRQLSGNNIRPVVKVHVCGQTHRTRIKRGNNPFFDELFFYNVNMTPSELMDEIISIRVYNSHSLRADCLMGEFKIDVGFVYDEPGHAVMRKWLLLNDPEDTSSGSKGYMKVSMFVLGTGDEPPPERRDRDNDSDDVESNLLLPAGIALRWVTFLLKIYRAEDIPQMDDAFSQTVKEIFGGNADKKNLVDPFVEVSFAGKKVCTNIIEKNANPEWNQVVNLQIKFPSVCEKIKLTIYDWDRLTKNDVVGTTYLHLSKIAASGGEVEDFSSSGTGAASYTVNTGETEVGFVPTFGPCYLNLYGSPREYTGFPDPYDELNTGKGEGVAYRGRILVELATFLEKTPPDKKLEPISNDDLLVVEKYQRRRKYSLSAVFHSATMLQDVGEAIQFEVSIGNYGNKFDTTCKPLASTTQYSRAVFDGNYYYYLPWAHTKPVVTLTSYWEDISHRLDAVNTLLAMAERLQTNIEALKSGIQGKIPANQLAELWLKLIDEVIEDTRYTLPLTEGKANVTVLDTQIRKLRSRSLSQIHEAAVRMRSEATDVKSTLAEIEDWLDKLMQLTEEPQNSMPDIIIWMIRGEKRLAYARIPAHQVLYSTSGENASGKYCGKTQTIFLKYPQEKNNGPKVPVELRVNIWLGLSAVEKKFNSFAEGTFTVFAEMYENQALMFGKWGTSGLVGRHKFSDVTGKIKLKREFFLPPKGWEWEGEWIVDPERSLLTEADAGHTEFTDEVYQNESRYPGGDWKPAEDTYTDANGDKAASPSELTCPPGWEWEDDAWSYDINRAVDEKGWEYGITIPPDHKPKSWVAAEKMYHTHRRRRLVRKRKKDLTQTASSTARAMEELQDQEGWEYASLIGWKFHWKQRSSDTFRRRRWRRKMAPSETHGAAAIFKLEGALGADTTEDGDEKSLEKQKHSATTVFGANTPIVSCNFDRVYIYHLRCYVYQARNLLALDKDSFSDPYAHICFLHRSKTTEIIHSTLNPTWDQTIIFDEVEIYGEPQTVLQNPPKVIMELFDNDQVGKDEFLGRSIFSPVVKLNSEMDITPKLLWHPVMNGDKACGDVLVTAELILRGKDGSNLPILPPQRAPNLYMVPQGIRPVVQLTAIEILAWGLRNMKNFQMASITSPSLVVECGGERVESVVIKNLKKTPNFPSSVLFMKVFLPKEELYMPPLVIKVIDHRQFGRKPVVGQCTIERLDRFRCDPYAGKEDIVPQLKASLLSAPPCRDIVIEMEDTKPLLASKLTEKEEEIVDWWSKFYASSGEHEKCGQYIQKGYSKLKIYNCELENVAEFEGLTDFSDTFKLYRGKSDENEDPSVVGEFKGSFRIYPLPDDPSVPAPPRQFRELPDSVPQECTVRIYIVRGLELQPQDNNGLCDPYIKITLGKKVIEDRDHYIPNTLNPVFGRMYELSCYLPQEKDLKISVYDYDTFTRDEKVGETIIDLENRFLSRFGSHCGIPEEYCVSGVNTWRDQLRPTQLLQNVARFKGFPQPILSEDGSRIRYGGRDYSLDEFEANKILHQHLGAPEERLALHILRTQGLVPEHVETRTLHSTFQPNISQGKLQMWVDVFPKSLGPPGPPFNITPRKAKKYYLRVIIWNTKDVILDEKSITGEEMSDIYVKGWIPGNEENKQKTDVHYRSLDGEGNFNWRFVFPFDYLPAEQLCIVAKKEHFWSIDQTEFRIPPRLIIQIWDNDKFSLDDYLGFLELDLRHTIIPAKSPEKCRLDMIPDLKAMNPLKAKTASLFEQKSMKGWWPCYAEKDGARVMAGKVEMTLEILNEKEADERPAGKGRDEPNMNPKLDLPNRPETSFLWFTNPCKTMKFIVWRRFKWVIIGLLFLLILLLFVAVLLYSLPNYLSMKIVKPNV

SEQ ID NO: 13765 - protein, 2056 aa, Artificial Sequence
  Synthetic polypeptide
SQHFGRRRWADHLTSGVRDQPGQHDEKKKTKKVDNELNPVWNEILEFDLRGIPLDFSSSLGIIVKDFETIGQNKLIGTATVALKDLTGDQSRSLPYKLISLLNEKGQDTGATIDLVIGYDPPSAPHPNDLSGPSVPGMGGDGEEDEGDEDRLDNAVRGPGPKGPVGTVSEAQLARRLTKVKNSRRMLSNKPQDFQIRVRVIEGRQLSGNNIRPVVKVHVCGQTHRTRIKRGNNPFFDELFFYNVNMTPSELMDEIISIRVYNSHSLRADCLMGEFKIDVGFVYDEPGHAVMRKWLLLNDPEDTSSGSKGYMKVSMFVLGTGDEPPPERRDRDNDSDDVESNLLLPAGIALRWVTFLLKIYRAEDIPQMDDAFSQTVKEIFGGNADKKNLVDPFVEVSFAGKKVCTNIIEKNANPEWNQVVNLQIKFPSVCEKIKLTIYDWDRLTKNDVVGTTYLHLSKIAASGGEVEDFSSSGTGAASYTVNTGETEVGFVPTFGPCYLNLYGSPREYTGFPDPYDELNTGKGEGVAYRGRILVELATFLEKTPPDKKLEPISNDDLLVVEKYQRRRKYSLSAVFHSATMLQDVGEAIQFEVSIGNYGNKFDTTCKPLASTTQYSRAVFDGNYYYYLPWAHTKPVVTLTSYWEDISHRLDAVNTLLAMAERLQTNIEALKSGIQGKIPANQLAELWLKLIDEVIEDTRYTLPLTEGKANVTVLDTQIRKLRSRSLSQIHEAAVRMRSEATDVKSTLAEIEDWLDKLMQLTEEPQNSMPDIIIWMIRGEKRLAYARIPAHQVLYSTSGENASGKYCGKTQTIFLKYPQEKNNGPKVPVELRVNIWLGLSAVEKKFNSFAEGTFTVFAEMYENQALMFGKWGTSGLVGRHKFSDVTGKIKLKREFFLPPKGWEWEGEWIVDPERSLLTEADAGHTEFTDEVYQNESRYPGGDWKPAEDTYTDANGDKAASPSELTCPPGWEWEDDAWSYDINRAVDEKGWEYGITIPPDHKPKSWVAAEKMYHTHRRRRLVRKRKKDLTQTASSTARAMEELQDQEGWEYASLIGWKFHWKQRSSDTFRRRRWRRKMAPSETHGAAAIFKLEGALGADTTEDGDEKSLEKQKHSATTVFGANTPIVSCNFDRVYIYHLRCYVYQARNLLALDKDSFSDPYAHICFLHRSKTTEIIHSTLNPTWDQTIIFDEVEIYGEPQTVLQNPPKVIMELFDNDQVGKDEFLGRSIFSPVVKLNSEMDITPKLLWHPVMNGDKACGDVLVTAELILRGKDGSNLPILPPQRAPNLYMVPQGIRPVVQLTAIEILAWGLRNMKNFQMASITSPSLVVECGGERVESVVIKNLKKTPNFPSSVLFMKVFLPKEELYMPPLVIKVIDHRQFGRKPVVGQCTIERLDRFRCDPYAGKEDIVPQLKASLLSAPPCRDIVIEMEDTKPLLASKLVSIEEEIVDWWSKFYASSGEHEKCGQYIQKGYSKLKIYNCELENVAEFEGLTDFSDTFKLYRGKSDENEDPSVVGEFKGSFRIYPLPDDPSVPAPPRQFRELPDSVPQECTVRIYIVRGLELQPQDNNGLCDPYIKITLGKKVIEDRDHYIPNTLNPVFGRMYELSCYLPQEKDLKISVYDYDTFTRDEKVGETIIDLENRFLSRFGSHCGIPEEYCVSGVNTWRDQLRPTQLLQNVARFKGFPQPILSEDGSRIRYGGRDYSLDEFEANKILHQHLGAPEERLALHILRTQGLVPEHVETRTLHSTFQPNISQGKLQMWVDVFPKSLGPPGPPFNITPRKAKKYYLRVIIWNTKDVILDEKSITGEEMSDIYVKGWIPGNEENKQKTDVHYRSLDGEGNFNWRFVFPFDYLPAEQLCIVAKKEHFWSIDQTEFRIPPRLIIQIWDNDKFSLDDYLGFLELDLRHTIIPAKSPEKCRLDMIPDLKAMNPLKAKTASLFEQKSMKGWWPCYAEKDGARVMAGKVEMTLEILNEKEADERPAGKGRDEPNMNPKLDLPNRPETSFLWFTNPCKTMKFIVWRRFKWVIIGLLFLLILLLFVAVLLYSLPNYLSMKIVKPNV

SEQ ID NO: 13766 - protein, 2046 aa, Artificial Sequence
  Synthetic polypeptide
SQHFGRRRWADHLTSGVRDQPGQHDEKKKTKKVDNELNPVWNEILEFDLRGIPLDFSSSLGIIVKDFETIGQNKLIGTATVALKDLTGDQSRSLPYKLISLLNEKGQDTGATIDLVIGYDPPSAPHPNDLSGPSVPGMGGDGEEDEGDEDRLDNAVRGPGPKGPVGTVSEAQLARRLTKVKNSRRMLSNKPQDFQIRVRVIEGRQLSGNNIRPVVKVHVCGQTHRTRIKRGNNPFFDELFFYNVNMTPSELMDEIISIRVYNSHSLRADCLMGEFKIDVGFVYDEPGHAVMRKWLLLNDPEDTSSGSKGYMKVSMFVLGTGDEPPPERRDRDNDSDDVESNLLLPAGIALRWVTFLLKIYRAEDIPQMDDAFSQTVKEIFGGNADKKNLVDPFVEVSFAGKKVCTNIIEKNANPEWNQVVNLQIKFPSVCEKIKLTIYDWDRLTKNDVVGTTYLHLSKIAASGGEVEDFSSSGTGAASYTVNTGETEVGFVPTFGPCYLNLYGSPREYTGFPDPYDELNTGKGEGVAYRGRILVELATFLEKTPPDKKLEPISNDDLLVVEKYQRRRKYSLSAVFHSATMLQDVGEAIQFEVSIGNYGNKFDTTCKPLASTTQYSRAVFDGNYYYYLPWAHTKPVVTLTSYWEDISHRLDAVNTLLAMAERLQTNIEALKSGIQGKIPANQLAELWLKLIDEVIEDTRYTLPLTEGKANVTVLDTQIRKLRSRSLSQIHEAAVRMRSEATDVKSTLAEIEDWLDKLMQLTEEPQNSMPDIIIWMIRGEKRLAYARIPAHQVLYSTSGENASGKYCGKTQTIFLKYPQEKNNGPKVPVELRVNIWLGLSAVEKKFNSFAEGTFTVFAEMYENQALMFGKWGTSGLVGRHKFSDVTGKIKLKREFFLPPKGWEWEGEWIVDPERSLLTEADAGHTEFTDEVYQNESRYPGGDWKPAEDTYTDANGDKAASPSELTCPPGWEWEDDAWSYDINRAVDEKGWEYGITIPPDHKPKSWVAAEKMYHTHRRRRLVRKRKKDLTQTASSTARAMEELQDQEGWEYASLIGWKFHWKQRSSDTFRRRRWRRKMAPSETHGAAAIFKLEGALGADTTEDGDEKSLEKQKHSATTVFGANTPIVSCNFDRVYIYHLRCYVYQARNLLALDKDSFSDPYAHICFLHRSKTTEIIHSTLNPTWDQTIIFDEVEIYGEPQTVLQNPPKVIMELFDNDQVGKDEFLGRSIFSPVVKLNSEMDITPKLLWHPVMNGDKACGDVLVTAELILRGKDGSNLPILPPQRAPNLYMVPQGIRPVVQLTAIEILAWGLRNMKNFQMASITSPSLVVECGGERVESVVIKNLKKTPNFPSSVLFMKVFLPKEELYMPPLVIKVIDHRQFGRKPVVGQCTIERLDRFRCDPYAGKEDIVPQLKASLLSAPPCRDIVIEMEDTKPLLASKCLSSMSTALSKMASPATVHVLDEEEEIVDWWSKFYASSGEHEKCGQYIQKGYSKLKIYNCELENVAEFEGLTDFSDTFKLYRGKSDENEDPSVVGEFKGSFRIYPLPDDPSVPAPPRQFRELPDSVPQECTVRIYIVRGLELQPQDNNGLCDPYIKITLGKKVIEDRDHYIPNTLNPVFGRMYELSCYLPQEKDLKISVYDYDTFTRDEKVGETIIDLENRFLSRFGSHCGIPEEYCVSGVNTWRDQLRPTQLLQNVARFKGFPQPILSEDGSRIRYGGRDYSLDEFEANKILHQHLGAPEERLALHILRTQGLVPEHVETRTLHSTFQPNISQRYYLRVIIWNTKDVILDEKSITGEEMSDIYVKGWIPGNEENKQKTDVHYRSLDGEGNFNWRFVFPFDYLPAEQLCIVAKKEHFWSIDQTEFRIPPRLIIQIWDNDKFSLDDYLGFLELDLRHTIIPAKSPEKCRLDMIPDLKAMNPLKAKTASLFEQKSMKGWWPCYAEKDGARVMAGKVEMTLEILNEKEADERPAGKGRDEPNMNPKLDLPNRPETSFLWFTNPCKTMKFIVWRRFKWVIIGLLFLLILLLFVAVLLYSLPNYLSMKIVKPNV

SEQ ID NO: 13767 - protein, 440 aa, Artificial Sequence
  Synthetic polypeptide
SQHFGRRRWADHLTSGVRDQPGQHDEKKKTKKVDNELNPVWNEILEFDLRGIPLDFSSSLGIIVKDFETIGQNKLIGTATVALKDLTGDQSRSLPYKLISLLNEKGQDTGATIDLVIGYDPPSAPHPNDLSGPSVPGMGGDGEEDEGDEDRLDNAVRGPGPKGPVGTVSEAQLARRLTKVKNSRRMLSNKPQDFQIRVRVIEGRQLSGNNIRPVVKVHVCGQTHRTRIKRGNNPFFDELFFYNVNMTPSELMDEIISIRVYNSHSLRADCLMGEFKIDVGFVYDEPGHAVMRKWLLLNDPEDTSSGSKGYMKVSMFVLGTGDEPPPERRDRDNDSDDVESNLLLPAGIALRWVTFLLKIYRAEDIPQMDDAFSQTVKEIFGGNADKKNLVDPFVEVSFAGKKVCTNIIEKNANPEWNQVVNLQIKFPSVCEKIKLTIYDW

SEQ ID NO: 13768 - protein, 155 aa, Artificial Sequence
  Synthetic polypeptide
SQHFGRRRWADHLTSGVRDQPGQHDEKKKTKKVDNELNPVWNEILEFDLRGIPLDFSSSLGIIVKDFETIGQNKLIGTATVALKDLTGDQSRSLPYKLISLLNEKGQDTGATIDLVIGYDPPSAPHPNDLSGPSVPGMGGKLTLLKAQPPPGGGC

SEQ ID NO: 13769 - protein, 90 aa, Artificial Sequence
  Synthetic polypeptide
DRRGQHGETPYLQKKNFFKFARCMVMEAMILILVMMNAVENPAKGKKGQLKMTYCSKNHFRKKNMERWPINKLQQNCWIGKKQEIEGFIS

SEQ ID NO: 13770 - protein, 39 aa, Artificial Sequence
  Synthetic polypeptide
GGRIAQAQEFETGVGNMAKPLIYKKKIFLSLPDAWSWRL

SEQ ID NO: 13771 - protein, 318 aa, Artificial Sequence
  Synthetic polypeptide
VCQMHGHGGYDSDFSDDERCGESSKRKKRTVEDDLLLQKPFQKEKHGKVAHKQVAAELLDREEARNRRFHLIAMDAYQRHTKFVNDYILYYGGKKEDFKRLGENDKTDLDVIRENHRFLWNEEDEMDMTWEKRLAKKYYDKLFKEYCIADLSKYKENKFGFRWRVEKEVISGKGQFFCGNKYCDKKEGLKSWEVNFGYIEHGEKRNALVKLRLCQECSIKLNFHHRRKEIKSKKRKDKTKKDCEESSHKKSRLSSAEEASKKKDKGHSSSKKSEDSLLRNSDEEESASESELWKGPLPETDEKSQEEEFDEYFQDLFL

SEQ ID NO: 13772 - protein, 279 aa, Artificial Sequence
  Synthetic polypeptide
VCQMHGHGGYDSDFSDDERCGESSKRKKRTVEDDLLLQKPFQKEKHGKVAHKQVAAELLDREEARNRRFHLIAMDAYQRHTKFVNDYILYYGGKKEDFKRLGENDKTDLDVIRENHRFLWNEEDEMDMTWEKRLAKKYYDKLFKEYCIADLSKYKENKFGFRWRVEKEVISGKGQFFCGNKYCDKKEGLKSWEVNFGYIEHGEKRNALVKLRLCQECSIKLNFHHRRKEIKSKKRKDKTKKDCEESSHKKSRLSSAEEASKKKDKGHSSSKKSEDSLLN

SEQ ID NO: 13773 - protein, 316 aa, Artificial Sequence
  Synthetic polypeptide
VCQMHGHGGYDSDFSDDERCGESSKRKKRTVEDDLLLQKPFQKEKHGKVAHKQVAAELLDREEARNRRFHLIAMDAYQRHTKFVNDYILYYGGKKEDFKRLGENDKTDLDVIRENHRFLWNEEDEMDMTWEKRLAKKYYDKLFKEYCIADLSKYKENKFGFRWRVEKEVISGKGQFFCGNKYCDKKEGLKSWEVNFGYIEHGEKRNALVKLRLCQECSIKLNFHHRRKEIKSKKRKDKTKKDCEESSHKKSRLSSAEEASKKKDKGHSSSKKSEDSLLNGVMLFHPGWSAVARSQLTAAPASQVQTNNHYWRGVVC

SEQ ID NO: 13774 - protein, 295 aa, Artificial Sequence
  Synthetic polypeptide
VCQMHGHGGYDSDFSDDERCGESSKRKKRTVEDDLLLQKPFQKEKHGKVAHKQVAAELLDREEARNRRFHLIAMDAYQRHTKFVNDYILYYGGKKEDFKRLGENDKTDLDVIRENHRFLWNEEDEMDMTWEKRLAKKYYDKLFKEYCIADLSKYKENKFGFRWRVEKEVISGKGQFFCGNKYCDKKEGLKSWEVNFGYIEHGEKRNALVKLRLCQECSIKLNFHHRRKEIKSKKRKDKTKKDCEESSHKKSRLSSAEEASKKKDKGHSSSKKSEDSLLKTYFVGLLSESNEKTYM

SEQ ID NO: 13775 - protein, 362 aa, Artificial Sequence
  Synthetic polypeptide
IGTDLVCSSQCDQCRRQVISAFPTKFSKVYGPVFTVYFGMNPIVVFHGYEAVKEALIDNGEEFSGRGNSPISQRITKGLGIISSNGKRWKEIRRFSLTTLRNFGMGKRSIEDRVQEEAHCLVEELRKTKASPCDPTFILGCAPCNVICSVVFQKRFDYKDQNFLTLMKRFNENFRILNSPWIQVCNNFPLLIDCFPGTHNKVLKNVALTRSYIREKVKEHQASLDVNNPRDFIDCFLIKMEQEKDNQKSEFNIENLVGTVADLFVAGTETTSTTLRYGLLLLLKHPEVTAKVQEEIDHVIGRHRSPCMQDRSHMPYTDAVVHEIQRYSDLVPTGVPHAVTTDTKFRNYLIPKSFDNKIMLAA

SEQ ID NO: 13776 - protein, 21 aa, Artificial Sequence
  Synthetic polypeptide
FLHFQLSSQKSMVLCSPCILA

SEQ ID NO: 13777 - protein, 459 aa, Artificial Sequence
  Synthetic polypeptide
IGTDLVCSSQCDQCRRQVISAFPTKFSKVYGPVFTVYFGMNPIVVFHGYEAVKEALIDNGEEFSGRGNSPISQRITKGLGIISSNGKRWKEIRRFSLTTLRNFGMGKRSIEDRVQEEAHCLVEELRKTKASPCDPTFILGCAPCNVICSVVFQKRFDYKDQNFLTLMKRFNENFRILNSPWIQVCNNFPLLIDCFPGTHNKVLKNVALTRSYIREKVKEHQASLDVNNPRDFIDCFLIKMEQEKDNQKSEFNIENLVGTVADLFVAGTETTSTTLRYGLLLLLKHPEVTAKVQEEIDHVIGRHRSPCMQDRSHMPYTDAVVHEIQRYSDLVPTGVPHAVTTDTKFRNYLIPKGTTIMALLTSVLHDDKEFPNPNIFDPGHFLDKNGNFKKSDYFMPFSAGKRICAGEGLARMELFLFLTTILQNFNLKSVDDLKNLNTTAVTKGIVSLPPSYQICFIPV

SEQ ID NO: 13778 - protein, 40 aa, Artificial Sequence
  Synthetic polypeptide
IGTDLVCSSQCDQCRRQVISAFPTKFSKVYGPVFTVYFGM

SEQ ID NO: 13779 - protein, 33 aa, Artificial Sequence
  Synthetic polypeptide
LAPPSTMIVRPPQPCGTLRPCSASKQPCHRQRI

SEQ ID NO: 13780 - protein, 159 aa, Artificial Sequence
  Synthetic polypeptide
GHPSHVELLDHAQPPSSLVIDKESEVYKMLQEKQELNEPPKQSTSFLVLQEILESEEKGDPNKPSGFRSVKAPVTKVAASIGNAQKLPMCDKCGTGIVGVFVKLRDRHRHPECYVCTDCGTNLKQKGHFFVEDQIYCEKHARERVTPPEGYEVVTVFPK

SEQ ID NO: 13781 - protein, 20 aa, Artificial Sequence
  Synthetic polypeptide
DVTCSSFHHDCEATPAMWNS

SEQ ID NO: 13782 - protein, 32 aa, Artificial Sequence
  Synthetic polypeptide
SQYFGKSRWENCLSPGVRHQLGQHNETCQSQI

SEQ ID NO: 13783 - protein, 529 aa, Artificial Sequence
  Synthetic polypeptide
AQEFDTSLGNIMRPARAKFDFKAQTLKELPLQKGDIVYIYKQIDQNWYEGEHHGRVGIFPRTYIELLPPAEKAQPKKLTPVQVLEYGEAIAKFNFNGDTQVEMSFRKGERITLLRQVDENWYEGRIPGTSRQGIFPITYVDVIKRPLVKNPVDYMDLPFSSSPSRSATASPQFSSHSKLITPAPSSLPHSRRALSPEMHAVTSEWISLTVGVPGRRSLALTPPLPPLPEASIYNTDHLALSPRASPSLSLSLPHLSWSDRPTPRSVASPLALPSPHKTYSLAPTSQASLHMNGDGGVHTPSSGIHQDSFLQLPLGSSDSVISQLSDAFSSQSKRQPWREESGQYERKAERGAGERGPGGPKISKKSCLKPSDVVRCLSTEQRLSDLNTPEESRPGKPLGSAFPGSEAEQTERHRGGEQAGRKAARRGGSQLSHHSLRAGPDLTESEKSYVQPQAQQRRVTPDRSQTSQDLFSYQALYSYIPQNDDELELRDGDIVDVMEKCDDGWFVGTSRRTKQFGTFPGNYVKPLYL

SEQ ID NO: 13784 - protein, 251 aa, Artificial Sequence
  Synthetic polypeptide
AQEFDTSLGNIMRPARAKFDFKAQTLKELPLQKGDIVYIYKQIDQNWYEGEHHGRVGIFPRTYIELLPPAEKAQPKKLTPVQVLEYGEAIAKFNFNGDTQVEMSFRKGERITLLRQVDENWYEGRIPGTSRQGIFPITYVDVIKRPLVKNPVDYMDLPFSSSPSRSATASPQQPQAQQRRVTPDRSQTSQDLFSYQALYSYIPQNDDELELRDGDIVDVMEKCDDGWFVGTSRRTKQFGTFPGNYVKPLYL

SEQ ID NO: 13785 - protein, 271 aa, Artificial Sequence
  Synthetic polypeptide
AQEFDTSLGNIMRPARAKFDFKAQTLKELPLQKGDIVYIYKQIDQNWYEGEHHGRVGIFPRTYIELLPPAEKAQPKKLTPVQVLEYGEAIAKFNFNGDTQVEMSFRKGERITLLRQVDENWYEGRIPGTSRQGIFPITYVDVIKRPLVKNPVDYMDLPFSSSPSRSATASPQLSHHSLRAGPDLTESEKSYVQPQAQQRRVTPDRSQTSQDLFSYQALYSYIPQNDDELELRDGDIVDVMEKCDDGWFVGTSRRTKQFGTFPGNYVKPLYL

SEQ ID NO: 13786 - protein, 346 aa, Artificial Sequence
  Synthetic polypeptide
AQEFDTSLGNIMRPARAKFDFKAQTLKELPLQKGDIVYIYKQIDQNWYEGEHHGRVGIFPRTYIELLPPAEKAQPKKLTPVQVLEYGEAIAKFNFNGDTQVEMSFRKGERITLLRQVDENWYEGRIPGTSRQGIFPITYVDVIKRPLVKNPVDYMDLPFSSSPSRSATASPQPWREESGQYERKAERGAGERGPGGPKISKKSCLKPSDVVRCLSTEQRLSDLNTPEESRPGKPLGSAFPGSEAEQTERHRGGEQAGRKAARRGGSQQPQAQQRRVTPDRSQTSQDLFSYQALYSYIPQNDDELELRDGDIVDVMEKCDDGWFVGTSRRTKQFGTFPGNYVKPLYL

SEQ ID NO: 13787 - protein, 509 aa, Artificial Sequence
  Synthetic polypeptide
AQEFDTSLGNIMRPARAKFDFKAQTLKELPLQKGDIVYIYKQIDQNWYEGEHHGRVGIFPRTYIELLPPAEKAQPKKLTPVQVLEYGEAIAKFNFNGDTQVEMSFRKGERITLLRQVDENWYEGRIPGTSRQGIFPITYVDVIKRPLVKNPVDYMDLPFSSSPSRSATASPQFSSHSKLITPAPSSLPHSRRALSPEMHAVTSEWISLTVGVPGRRSLALTPPLPPLPEASIYNTDHLALSPRASPSLSLSLPHLSWSDRPTPRSVASPLALPSPHKTYSLAPTSQASLHMNGDGGVHTPSSGIHQDSFLQLPLGSSDSVISQLSDAFSSQSKRQPWREESGQYERKAERGAGERGPGGPKISKKSCLKPSDVVRCLSTEQRLSDLNTPEESRPGKPLGSAFPGSEAEQTERHRGGEQAGRKAARRGGSQQPQAQQRRVTPDRSQTSQDLFSYQALYSYIPQNDDELELRDGDIVDVMEKCDDGWFVGTSRRTKQFGTFPGNYVKPLYL

SEQ ID NO: 13788 - protein, 28 aa, Artificial Sequence
  Synthetic polypeptide
AQEFDTSLGNIMRPARAKFDFKAQTLKE

SEQ ID NO: 13789 - protein, 626 aa, Artificial Sequence
  Synthetic polypeptide
PAARLWHFRGTQQIFYRILVTNLDFHDEQKRRNLNGTLHELLRMNIVPIVNTNDAVVPPAEPNSDLQGVNVISVKDNDSLAARLAVEMKTDLLIVLSDVEGLFDSPPGSDDAKLIDIFYPGDQQSVTFGTKSRVGMGGMEAKVKAALWALQGGTSVVIANGTHPKVSGHVITDIVEGKKVGTFFSEVKPAGPTVEQQGEMARSGGRMLATLEPEQRAEIIHHLADLLTDQRDEILLANKKDLEEAEGRLAAPLLKRLSLSTSKLNSLAIGLRQIAASSQDSVGRVLRRTRIAKNLELEQVTVPIGVLLVIFESRPDCLPQVAALAIASGNGLLLKGGKEAAHSNRILHLLTQEALSIHGVKEAVQLVNTREEVEDLCRLDKMIDLIIPRGSSQLVRDIQKAAKGIPVMGHSEGICHMYVDSEASVDKVTRLVRDSKCEYPAACNALETLLIHRDLLRTPLFDQIIDMLRVEQVKIHAGPKFASYLTFSPSEVKSLRTEYGDLELCIEVVDNVQDAIDHIHKYGSSHTDVIVTEDENTAEFFLQHVDSACVFWNASTRFSDGYRFGLGAEVGISTSRIHARGPVGLEGLLTTKWLLRGKDHVVSDFSEHGSLKYLHENLPIPQRNTN

SEQ ID NO: 13790 - protein, 19 aa, Artificial Sequence
  Synthetic polypeptide
QQLDSGISEVLNKFFIEFW

SEQ ID NO: 13791 - protein, 22 aa, Artificial Sequence
  Synthetic polypeptide
TLAFQRYSTNFLSNFGDQFGFP

SEQ ID NO: 13792 - protein, 624 aa, Artificial Sequence
  Synthetic polypeptide
PAARLWHFRGTQQIFYRILVTNLDFHDEQKRRNLNGTLHELLRMNIVPIVNTNDAVVPPAEPNSDLQGVISVKDNDSLAARLAVEMKTDLLIVLSDVEGLFDSPPGSDDAKLIDIFYPGDQQSVTFGTKSRVGMGGMEAKVKAALWALQGGTSVVIANGTHPKVSGHVITDIVEGKKVGTFFSEVKPAGPTVEQQGEMARSGGRMLATLEPEQRAEIIHHLADLLTDQRDEILLANKKDLEEAEGRLAAPLLKRLSLSTSKLNSLAIGLRQIAASSQDSVGRVLRRTRIAKNLELEQVTVPIGVLLVIFESRPDCLPQVAALAIASGNGLLLKGGKEAAHSNRILHLLTQEALSIHGVKEAVQLVNTREEVEDLCRLDKMIDLIIPRGSSQLVRDIQKAAKGIPVMGHSEGICHMYVDSEASVDKVTRLVRDSKCEYPAACNALETLLIHRDLLRTPLFDQIIDMLRVEQVKIHAGPKFASYLTFSPSEVKSLRTEYGDLELCIEVVDNVQDAIDHIHKYGSSHTDVIVTEDENTAEFFLQHVDSACVFWNASTRFSDGYRFGLGAEVGISTSRIHARGPVGLEGLLTTKWLLRGKDHVVSDFSEHGSLKYLHENLPIPQRNTN

SEQ ID NO: 13793 - protein, 449 aa, Artificial Sequence
  Synthetic polypeptide
SWTFQPPELDSVTHIVAENNSGSDVLEWLQAQKVQVSSQPELLDVSWLIECIRAGKPVEMTGKHQLVVRRDYSDSTNPGPPKTPPIAVQKISQYACQRRTTLNNCNQIFTDAFDILAENCEFRENEDSCVTFMRAASVLKSLPFTIISMKDTEGIPCLGSKVKGIIEEIIEDGESSEVKAVLNDERYQSFKLFTSVFGVGLKTSEKWFRMGFRTLSKVRSDKSLKFTRMQKAGFLYYEDLVSCVTRAEAEAVSVLVKEAVWAFLPDAFVTMTGGFRRGKKMGHDVDFLITSPGSTEDEEQLLQKVMNLWEKKGLLLYYDLVESTFEKLRLPSRKVDALDHFQKCFLIFKLPRQRVDSDQSSWQEGKTWKAIRVDLVLCPYERRAFALLGWTGSRFERDLRRYATHERKMILDNHALYDKTKRIFLKAESEEEIFAHLGLDYIEPWERNA

SEQ ID NO: 13794 - protein, 38 aa, Artificial Sequence
  Synthetic polypeptide
GHTVGAIYEEWAFTGHHICRPLDHGLSSLQNLILSPTS

SEQ ID NO: 13795 - protein, 450 aa, Artificial Sequence
  Synthetic polypeptide
SWTFQPPELDSVTHIVAENNSGSDVLEWLQAQKVQVSSQPELLDVSWLIECIRAGKPVEMTGKHQLVVRRDYSDSTNPGPPKTPPIAVQKISQYACQRRTTLNNCNQIFTDAFDILAENCEFRENEDSCVTFMRAASVLKSLPFTIISMKDTEGIPCLGSKVKGIIEEIIEDGESSEVKAVLNDERYQSFKLFTSVFGVGLKTSEKWFRMGFRTLSKVRSDKSLKFTRMQKAGFLYYEDLVSCVTRAEAEAVSVLVKEAVWAFLPDAFVTMTGGFRRGKKMGHDVDFLITSPGSTEDEEQLLQKVMNLWEKKGLLLYYDLVESTFEKLRLPSRKVDALDHFQKCFLIFKLPRQRVDSDQSSWQEGKTWKAIRVDLVLCPYERRAFALLGWTGSRQFERDLRRYATHERKMILDNHALYDKTKRIFLKAESEEEIFAHLGLDYIEPWERNA

SEQ ID NO: 13796 - protein, 806 aa, Artificial Sequence
  Synthetic polypeptide
LTVRKRVPRGCDILIVYSPDAEEWCQYLQTLFLSSRQVRSQKILTHRLGPEASFSAEDLSLFLSTRCVVVLLSAELVQHFHKPALLPLLQRAFHPPHRVVRLLCGVRDSEEFLDFFPDWAHWQELTCDDEPETYVAAVKKAISEDSGCDSVTDTEPEDEKVVSYSKQQNLPTVTSPGNLMVVQPDRIRCGAETTVYVIVRCKLDDRVATEAEFSPEDSPSVRMEAKVENEYTISVKAPNLSSGNVSLKIYSGDLVVCETVISYYTDMEEIGNLLSNAANPVEFMCQAFKIVPYNTETLDKLLTESLKNNIPASGLHLFGINQLEEEDMMTNQRDEELPTLLHFAAKYGLKNLTALLLTCPGALQAYSVANKHGHYPNTIAEKHGFRDLRQFIDEYVETVDMLKSHIKEELMHGEEADAVYESMAHLSTDLLMKCSLNPGCDEDLYESMAAFVPAATEDLYVEMLQASTSNPIPGDGFSRATKDSMIRKFLEGNSMGMTNLERDQCHLGQEEDVYHTVDDDEAFSVDLASRPPVPVPRPETTAPGAHQLPDNEPYIFKVFAEKSQERPGNFYVSSESIRKGPPVRPWRDRPQSSIYDPFAGMKTPGQRQLITLQEQVKLGIVNVDEAVLHFKEWQLNQKKRSESFRFQQENLKRLRDSITRRQREKQKSGKQTDLEITVPIRHSQHLPAKVEFGVYESGPRKSVIPPRTELRRGDWKTDSTSSTASSTSNRSSTRSLLSVSSGMEGDNEDNEVPEVTRSRSPGPPQVDGTPTMSLERPPRVPPRAASQRPPTRETFHPPPPVPPRGR

SEQ ID NO: 13797 - protein, 42 aa, Artificial Sequence
  Synthetic polypeptide
QYVKGCPEDATSSSSTARMPRNGASTCRPCSCPVGRSAARRY

SEQ ID NO: 13798 - protein, 681 aa, Artificial Sequence
  Synthetic polypeptide
SQHFGRLRAIGANPLYCDCHLRWLSSWVKTGYKEPGIARCAGPQDMEGKLLLTTPAKKFECQGPPTLAVQAKCDLCLSSPCQNQGTCHNDPLEVYRCACPSGYKGRDCEVSLDSCSSGPCENGGTCHAQEGEDAPFTCSCPTGFEGPTCGVNTDDCVDHACANGGVCVDGVGNYTCQCPLQYEGKACEQLVDLCSPDLNPCQHEAQCVGTPDGPRCECMPGYAGDNCSENQDDCRDHRCQNGAQCMDEVNSYSCLCAEGYSGQLCEIPPHLPAPKSPCEGTECQNGANCVDQGNRPVCQCLPGFGGPECEKLLSVNFVDRDTYLQFTDLQNWPRANITLQVSTAEDNGILLYNGDNDHIAVELYQGHVRVSYDPGSYPSSAIYSAETINDGQFHTVELVAFDQMVNLSIDGGSPMTMDNFGKHYTLNSEAPLYVGGMPVDVNSAAFRLWQILNGTGFHGCIRNLYINNELQDFTKTQMKPGVVPGCEPCRKLYCLHGICQPNATPGPMCHCEAGWVGLHCDQPADGPCHGHKCVHGQCVPLDALSYSCQCQDGYSGALCNQAGALAEPCRGLQCLHGHCQASGTKGAHCVCDPGFSGELCEQESECRGDPVRDFHQVQRGYAICQTTRPLSWVECRGSCPGQGCCQGLRLKRRKFTFECSDGTSFAEEVEKPTKCGCALCA

SEQ ID NO: 13799 - protein, 25 aa, Artificial Sequence
  Synthetic polypeptide
QARWLTPVIPALWEAEGHWCQPPIL

SEQ ID NO: 13800 - protein, 608 aa, Artificial Sequence
  Synthetic polypeptide
SQHFGRLRAIGANPLYCDCHLRWLSSWVKTGYKEPGIARCAGPQDMEGKLLLTTPAKKFECQGPPTLAVQAKCDLCLSSPCQNQGTCHNDPLEVYRCACPSGYKGRDCEVSLDSCSSGPCENGGTCHAQEGEDAPFTCSCPTGFEGPTCGVNTDDCVDHACANGGVCVDGVGNYTCQCPLQYEGKACEQLVDLCSPDLNPCQHEAQCVGTPDGPRCECMPGYAGDNCSENQDDCRDHRCQNGAQCMDEVNSYSCLCAEGYSGQLCEIPPHLPAPKSPCEGTECQNGANCVDQGNRPVCQCLPGFGGPECEKLLSVNFVDRDTYLQFTDLQNWPRANITLQVSTAEDNGILLYNGDNDHIAVELYQGHVRVSYDPGSYPSSAIYSAETINDGQFHTVELVAFDQMVNLSIDGGSPMTMDNFGKHYTLNSEAPLYVGGMPVDVNSAAFRLWQILNGTGFHGCIRNLYINNELQDFTKTQMKPGVVPGCEPCRKLYCLHGICQPNATPGPMCHCEAGWVGLHCDQPADGPCHGHKCVHGQCVPLDALSYSCQCQDGYSGALCNQSPSAGGTLSGTFTRSRGAMPSARPRAPCHGWSAGARAQARAAARAFG

SEQ ID NO: 13801 - protein, 46 aa, Artificial Sequence
  Synthetic polypeptide
SQHFGRPRHMDRSNLGIRDQSGQHGETLRLQKVSHGPGSGRQHSGI

SEQ ID NO: 13802 - protein, 716 aa, Artificial Sequence
  Synthetic polypeptide
EFETSLGNMVKPYVYKKLAMDLAQAGSTVESKIYDTLQWQMWTLLPGFCTRPTDVAISFKGLARTLGMAISERPDLRVTVCQALRTLITKGCQAEADRAEVSRFAKNFLPILFNLYGQPVAAGDTPAPRRAVLETIRTYLTITDTQLVNSLLEKASEKVLDPASSDFTRLSVLDLVVALAPCADEAAISKLYSTIRPYLESKAHGVQKKAYRVLEEVCASPQGPGALFVQSHLEDLKKTLLDSLRSTSSPAKRPRLKCLLHIVRKLSAEHKEFITALIPEVILCTKEVSVGARKNAFALLVEMGHAFLRFGSNQEEALQCYLVLIYPGLVGAVTMVSCSILALTHLLFEFKGLMGTSTVEQLLENVCLLLASRTRDVVKSALGFIKVAVTVMDVAHLAKHVQLVMEAIGKLSDDMRRHFRMKLRNLFTKFIRKFGFELVKRLLPEEYHRVLVNIRKAEARAKRHRALSQAAVEEEEEEEEEEEPAQGKGDSIEEILADSEDEEDNEEEERSRGKEQRKLARQRSRAWLKEGGGDEPLNFLDPKVAQRVLATQPGPGRGRKKDHGFKVSADGRLIIREEADGNKMEEEEGAKGEDEEMADPMEDVIIRNKKHQKLKHQKEAEEEELEIPPQYQAGGSGIHRPVAKKAMPGAEYKAKKAKGDVKKKGRPDPYAYIPLNRSKLNRRKKMKLQGQFKGLVKAARRGSQVGHKNRRKDRRP

SEQ ID NO: 13803 - protein, 47 aa, Artificial Sequence
  Synthetic polypeptide
RDNHTYFATELWGDSSVPHRPGAPPGSRQVLDPEGCPAWSMLSPQGQ

SEQ ID NO: 13804 - protein, 1077 aa, Artificial Sequence
  Synthetic polypeptide
EIITPTLLQSCGETPVFPTGLAHLLAHGRCLIRKAAQHGVCSVLKGSEFMFEKAPAHHPAAISTAKFCIQEIEKSGGSKEATTTLHMLTLLKDLLPCFPEGLVKSCSETLLRVMTLSHVLVTACAMQAFHSLFHARPGLSTLSAELNAQIITALYDYVPSENDLQPLLAWLKVMEKAHINLVRLQWDLGLGHLPRFFGTAVTCLLSPHSQVLTAATQSLKEILKECVAPHMADIGSVTSSASGPAQSVAKMFRAVEEGLTYKFHAAWSSVLQLLCVFFEACGRQAHPVMRKCLQSLCDLRLSPHFPHTAALDQAVGAAVTSMGPEVVLQAVPLEIDGSEETLDFPRSWLLPVIRDHVQETRLGFFTTYFLPLANTLKSKAMDLAQAGSTVESKIYDTLQWQMWTLLPGFCTRPTDVAISFKGLARTLGMAISERPDLRVTVCQALRTLITKGCQAEADRAEVSRFAKNFLPILFNLYGQPVAAGDTPAPRRAVLETIRTYLTITDTQLVNSLLEKASEKVLDPASSDFTRLSVLDLVVALAPCADEAAISKLYSTIRPYLESKAHGVQKKAYRVLEEVCASPQGPGALFVQSHLEDLKKTLLDSLRSTSSPAKRPRLKCLLHIVRKLSAEHKEFITALIPEVILCTKEVSVGARKNAFALLVEMGHAFLRFGSNQEEALQCYLVLIYPGLVGAVTMVSCSILALTHLLFEFKGLMGTSTVEQLLENVCLLLASRTRDVVKSALGFIKVAVTVMDVAHLAKHVQLVMEAIGKLSDDMRRHFRMKLRNLFTKFIRKFGFELVKRLLPEEYHRVLVNIRKAEARAKRHRALSQAAVEEEEEEEEEEEPAQGKGDSIEEILADSEDEEDNEEEERSRGKEQRKLARQRSRAWLKEGGGDEPLNFLDPKVAQRVLATQPGPGRGRKKDHGFKVSADGRLIIREEADGNKMEEEEGAKGEDEEMADPMEDVIIRNKKHQKLKHQKEAEEEELEIPPQYQAGGSGIHRPVAKKAMPGAEYKAKKAKGDVKKKGRPDPYAYIPLNRSKLNRRKKMKLQGQFKGLVKAARRGSQVGHKNRRKDRRP

SEQ ID NO: 13805 - protein, 25 aa, Artificial Sequence
  Synthetic polypeptide
TDITPPHSSLVNGARLHLRKKKRSP

SEQ ID NO: 13806 - protein, 31 aa, Artificial Sequence
  Synthetic polypeptide
GRGCELISRHRTPAWLTEQDSISEKKKDLLR

SEQ ID NO: 13807 - protein, 74 aa, Artificial Sequence
  Synthetic polypeptide
RSKTPSQKKKKISLGDAQSNYLLTTAENELGVVVAHSESGIQMVPISWCEMQCPKTHTKEFRKVARVQPEFLQT

SEQ ID NO: 13808 - protein, 41 aa, Artificial Sequence
  Synthetic polypeptide
TLFLFFQALCQHMMRHSASSGVCSERNRVPVTARCGSYCNL

SEQ ID NO: 13809 - protein, 149 aa, Artificial Sequence
  Synthetic polypeptide
DTQLPVVSVVRETESQLLPDVGAIVTCKVSSINSRFAKVHILYVGSMPLKNSFRGTIRKEDVRATEKDKVEIYKSFRPGDIVLAKVISLGDAQSNYLLTTAENELGVVVAHSESGIQMVPISWCEMQCPKTHTKEFRKVARVQPEFLQT

SEQ ID NO: 13810 - protein, 22 aa, Artificial Sequence
  Synthetic polypeptide
SVPFLPSTMSAYDETLSFQWCL

SEQ ID NO: 13811 - protein, 132 aa, Artificial Sequence
  Synthetic polypeptide
DTQLPVVSVVRETESQLLPDVGAIVTCKVSSINSRFAKVHILYVGSMPLKNSFRGTIRKEDVRATEKDKISLGDAQSNYLLTTAENELGVVVAHSESGIQMVPISWCEMQCPKTHTKEFRKVARVQPEFLQT

SEQ ID NO: 13812 - protein, 93 aa, Artificial Sequence
  Synthetic polypeptide
DTQLPVVSVVRETESQLLPDVGAIVTCKVSSINSRFAKVHILYVGSMPLKNSFRGTIRKEDVRATEKDKVSRWFPSAGVRCSALRPTLKNSGK

SEQ ID NO: 13813 - protein, 106 aa, Artificial Sequence
  Synthetic polypeptide
DTQLPVVSVVRETESQLLPDVGAIVTCKVSSINSRFAKVHILYVGSMPLKNSFRGTIRKEDVRATEKDKVVGIQMVPISWCEMQCPKTHTKEFRKVARVQPEFLQT

SEQ ID NO: 13814 - protein, 108 aa, Artificial Sequence
  Synthetic polypeptide
DTQLPVVSVVRETESQLLPDVGAIVTCKVEIYKSFRPGDIVLAKVISLGDAQSNYLLTTAENELGVVVAHSESGIQMVPISWCEMQCPKTHTKEFRKVARVQPEFLQT

SEQ ID NO: 13815 - protein, 6 aa, Artificial Sequence
  Synthetic polypeptide
NDAMSP

SEQ ID NO: 13816 - protein, 49 aa, Artificial Sequence
  Synthetic polypeptide
TAWLRGVSTRFGPERLGPSPTSPSCLVCSPAQVLLPSLSLSFLICKMTQ

SEQ ID NO: 13817 - protein, 46 aa, Artificial Sequence
  Synthetic polypeptide
VLTRSDSFKRGFPPLLALHLSLLTPCEEGSVCFPFLHNCTMDPTWF

SEQ ID NO: 13818 - protein, 25 aa, Artificial Sequence
  Synthetic polypeptide
RHVKKEVFASPSSIIVQWTQPGSEV

SEQ ID NO: 13819 - protein, 23 aa, Artificial Sequence
  Synthetic polypeptide
GTGFISLGSARQWAQFRRQHPPM

SEQ ID NO: 13820 - protein, 24 aa, Artificial Sequence
  Synthetic polypeptide
GVPDSGRSSEDSTHQCKRKKWKKA

SEQ ID NO: 13821 - protein, 161 aa, Artificial Sequence
  Synthetic polypeptide
FLHFHLRYRVHLTRECQTVGAVPKTAPTNVSGRSGRRHELVIAWEPVSEEFQNGEGFGYIVAFRPNGTRGWKEKMVTSSEASKFIYRDESVPPLTPFEVKVGVYNNKGDGPFSQIVVICSAEGEPSAAPTDVKATSVSVSEILVAWKHIKESLGRPQGFEV

SEQ ID NO: 13822 - protein, 350 aa, Artificial Sequence
  Synthetic polypeptide
FLHFHLRYRVHLTRECQTVGAVPKTAPTNVSGRSGRRHELVIAWEPVSEEFQNGEGFGYIVAFRPNGTRGWKEKMVTSSEASKFIYRDESVPPLTPFEVKVGVYNNKGDGPFSQIVVICSAEGEPSAAPTDVKATSVSVSEILVAWKHIKESLGRPQGFEVGYWKDMEQEDTAETVKTRGNESFVILTGLEGNTLYHFTVRAYNGAGYGPPSSEVSATTKKSPPSQAPSNLRWEQQGSQVSLGWEPVIPLANESEVVGYKVFYRQEGHSNSQVIETQKLQAVVPLPDAGVYIIEVRAYSEGGDGTASSQIRVPSYSGGKITSAQSTLHSLSTSSSSVTLLLALMIPSTSW

SEQ ID NO: 13823 - protein, 261 aa, Artificial Sequence
  Synthetic polypeptide
MCHIDQTTTWQDPRKAMLSQMNVTAPTSPPVQQNMMNSASAMNQRISQSAPVKQPPPLAPQSPQGGVMGGSNSNQQQQMRLQQLQMEKERLRLKQQELLRQELALRSQLPTLEQDGGTQNPVSSPGMSQELRTMTTNSSDPFLNSGTYHSRDESTDSGLSMSSYSVPRTPDDFLNSVDEMDTGDTINQSTLPSQQNRFPDYLEAIPGTNVDLGTLEGDGMNIEGEELMPSLQEALSSDILNDMESVLAATKLDKESFLTWL

SEQ ID NO: 13824 - protein, 30 aa, Artificial Sequence
  Synthetic polypeptide
VPDCLFSSTRCVTSIRQQHGRTPGRPCCPR

SEQ ID NO: 13825 - protein, 121 aa, Artificial Sequence
  Synthetic polypeptide
SHLNFRCLIAYSPPLDVSHRSDNNMAGPQEGHAVPDERHSPHQSTSAAEYDELGFSHEPENQSECSSETATTPGSPEPTGRRHGWQQLQPAATDATAATADGEGEAAAETARTASAGVSPA

SEQ ID NO: 13826 - protein, 315 aa, Artificial Sequence
  Synthetic polypeptide
MCHIDQTTTWQDPRKAMLSQMNVTAPTSPPVQQNMMNSASGPLPDGWEQAMTQDGEIYYINHKNKTTSWLDPRLDPRFAMNQRISQSAPVKQPPPLAPQSPQGGVMGGSNSNQQQQMRLQQLQMEKERLRLKQQELLRQAMRNINPSTANSPKCQELALRSQLPTLEQDGGTQNPVSSPGMSQELRTMTTNSSDPFLNSGTYHSRDESTDSGLSMSSYSVPRTPDDFLNSVDEMDTGDTINQSTLPSQQNRFPDYLEAIPGTNVDLGTLEGDGMNIEGEELMPSLQEALSSDILNDMESVLAATKLDKESFLTWL

SEQ ID NO: 13827 - protein, 59 aa, Artificial Sequence
  Synthetic polypeptide
SHLNFRCLIAYSPPLDVSHRSDNNMAGPQEGHAVPDERHSPHQSTSAAEYDELGFRSSS

SEQ ID NO: 13828 - protein, 265 aa, Artificial Sequence
  Synthetic polypeptide
MCHIDQTTTWQDPRKAMLSQMNVTAPTSPPVQQNMMNSASAMNQRISQSAPVKQPPPLAPQSPQGGVMGGSNSNQQQQMRLQQLQMEKERLRLKQQELLRQVRPQELALRSQLPTLEQDGGTQNPVSSPGMSQELRTMTTNSSDPFLNSGTYHSRDESTDSGLSMSSYSVPRTPDDFLNSVDEMDTGDTINQSTLPSQQNRFPDYLEAIPGTNVDLGTLEGDGMNIEGEELMPSLQEALSSDILNDMESVLAATKLDKESFLTWL

SEQ ID NO: 13829 - protein, 125 aa, Artificial Sequence
  Synthetic polypeptide
SHLNFRCLIAYSPPLDVSHRSDNNMAGPQEGHAVPDERHSPHQSTSAAEYDELGFSHEPENQSECSSETATTPGSPEPTGRRHGWQQLQPAATDATAATADGEGEAAAETARTASAGEATGVSPA

SEQ ID NO: 13830 - protein, 303 aa, Artificial Sequence
  Synthetic polypeptide
MCHIDQTTTWQDPRKAMLSQMNVTAPTSPPVQQNMMNSASGPLPDGWEQAMTQDGEIYYINHKNKTTSWLDPRLDPRFAMNQRISQSAPVKQPPPLAPQSPQGGVMGGSNSNQQQQMRLQQLQMEKERLRLKQQELLRQVRPQELALRSQLPTLEQDGGTQNPVSSPGMSQELRTMTTNSSDPFLNSGTYHSRDESTDSGLSMSSYSVPRTPDDFLNSVDEMDTGDTINQSTLPSQQNRFPDYLEAIPGTNVDLGTLEGDGMNIEGEELMPSLQEALSSDILNDMESVLAATKLDKESFLTWL

SEQ ID NO: 13831 - protein, 299 aa, Artificial Sequence
  Synthetic polypeptide
MCHIDQTTTWQDPRKAMLSQMNVTAPTSPPVQQNMMNSASGPLPDGWEQAMTQDGEIYYINHKNKTTSWLDPRLDPRFAMNQRISQSAPVKQPPPLAPQSPQGGVMGGSNSNQQQQMRLQQLQMEKERLRLKQQELLRQELALRSQLPTLEQDGGTQNPVSSPGMSQELRTMTTNSSDPFLNSGTYHSRDESTDSGLSMSSYSVPRTPDDFLNSVDEMDTGDTINQSTLPSQQNRFPDYLEAIPGTNVDLGTLEGDGMNIEGEELMPSLQEALSSDILNDMESVLAATKLDKESFLTWL

SEQ ID NO: 13832 - protein, 12 aa, Artificial Sequence
  Synthetic polypeptide
GQQIETILANMP

SEQ ID NO: 13833 - protein, 92 aa, Artificial Sequence
  Synthetic polypeptide
SRHSQHFGRPTRADHEVNRSRPSWPTCHEPENQSECSSETATTPGSPEPTGRRHGWQQLQPAATDATAATADGEGEAAAETARTASAGVSPA

SEQ ID NO: 13834 - protein, 253 aa, Artificial Sequence
  Synthetic polypeptide
PGVVADHATPSTLGGQRGQIMRSTDRDHPGQHAMNQRISQSAPVKQPPPLAPQSPQGGVMGGSNSNQQQQMRLQQLQMEKERLRLKQQELLRQELALRSQLPTLEQDGGTQNPVSSPGMSQELRTMTTNSSDPFLNSGTYHSRDESTDSGLSMSSYSVPRTPDDFLNSVDEMDTGDTINQSTLPSQQNRFPDYLEAIPGTNVDLGTLEGDGMNIEGEELMPSLQEALSSDILNDMESVLAATKLDKESFLTWL

SEQ ID NO: 13835 - protein, 108 aa, Artificial Sequence
  Synthetic polypeptide
SRHSQHFGRPTRADHEVNRSRPSWPTCHEPENQSECSSETATTPGSPEPTGRRHGWQQLQPAATDATAATADGEGEAAAETARTASAGNAEYQSQHSKFSKMSGVSPA

SEQ ID NO: 13836 - protein, 269 aa, Artificial Sequence
  Synthetic polypeptide
PGVVADHATPSTLGGQRGQIMRSTDRDHPGQHAMNQRISQSAPVKQPPPLAPQSPQGGVMGGSNSNQQQQMRLQQLQMEKERLRLKQQELLRQAMRNINPSTANSPKCQELALRSQLPTLEQDGGTQNPVSSPGMSQELRTMTTNSSDPFLNSGTYHSRDESTDSGLSMSSYSVPRTPDDFLNSVDEMDTGDTINQSTLPSQQNRFPDYLEAIPGTNVDLGTLEGDGMNIEGEELMPSLQEALSSDILNDMESVLAATKLDKESFLTWL

SEQ ID NO: 13837 - protein, 96 aa, Artificial Sequence
  Synthetic polypeptide
SRHSQHFGRPTRADHEVNRSRPSWPTCHEPENQSECSSETATTPGSPEPTGRRHGWQQLQPAATDATAATADGEGEAAAETARTASAGEATGVSPA

SEQ ID NO: 13838 - protein, 257 aa, Artificial Sequence
  Synthetic polypeptide
PGVVADHATPSTLGGQRGQIMRSTDRDHPGQHAMNQRISQSAPVKQPPPLAPQSPQGGVMGGSNSNQQQQMRLQQLQMEKERLRLKQQELLRQVRPQELALRSQLPTLEQDGGTQNPVSSPGMSQELRTMTTNSSDPFLNSGTYHSRDESTDSGLSMSSYSVPRTPDDFLNSVDEMDTGDTINQSTLPSQQNRFPDYLEAIPGTNVDLGTLEGDGMNIEGEELMPSLQEALSSDILNDMESVLAATKLDKESFLTWL

SEQ ID NO: 13839 - protein, 112 aa, Artificial Sequence
  Synthetic polypeptide
SRHSQHFGRPTRADHEVNRSRPSWPTCHEPENQSECSSETATTPGSPEPTGRRHGWQQLQPAATDATAATADGEGEAAAETARTASAGEATGNAEYQSQHSKFSKMSGVSPA

SEQ ID NO: 13840 - protein, 273 aa, Artificial Sequence
  Synthetic polypeptide
PGVVADHATPSTLGGQRGQIMRSTDRDHPGQHAMNQRISQSAPVKQPPPLAPQSPQGGVMGGSNSNQQQQMRLQQLQMEKERLRLKQQELLRQVRPQAMRNINPSTANSPKCQELALRSQLPTLEQDGGTQNPVSSPGMSQELRTMTTNSSDPFLNSGTYHSRDESTDSGLSMSSYSVPRTPDDFLNSVDEMDTGDTINQSTLPSQQNRFPDYLEAIPGTNVDLGTLEGDGMNIEGEELMPSLQEALSSDILNDMESVLAATKLDKESFLTWL

SEQ ID NO: 13841 - protein, 6 aa, Artificial Sequence
  Synthetic polypeptide
HGVSPA

SEQ ID NO: 13842 - protein, 184 aa, Artificial Sequence
  Synthetic polypeptide
SQHFWGAKAGGSRGQEIETILGNMELALRSQLPTLEQDGGTQNPVSSPGMSQELRTMTTNSSDPFLNSGTYHSRDESTDSGLSMSSYSVPRTPDDFLNSVDEMDTGDTINQSTLPSQQNRFPDYLEAIPGTNVDLGTLEGDGMNIEGEELMPSLQEALSSDILNDMESVLAATKLDKESFLTWL

SEQ ID NO: 13843 - protein, 34 aa, Artificial Sequence
  Synthetic polypeptide
PGAVAHVCNPSTFGGPRRVDHEVKRSRPSWVTWS

SEQ ID NO: 13844 - protein, 8 aa, Artificial Sequence
  Synthetic polypeptide
SQLLRRLR

SEQ ID NO: 13845 - protein, 3832 aa, Artificial Sequence
  Synthetic polypeptide
TKMSWTWCCTSVVPATQEAEVDDTIKIAEALLSDLPGFRCFHQSAKDLLDQLKLYEQEQFDDWSRDIQSGLSDSRSGLCIEASSRIMELDSNDGLLKVHYSDRLVILLREVRQLSALGFVIPAKIQQVANIAQKFCKQAIILKQVAHFYNSIDQQMIQSQRPMMLQSALAFEQIIKNSKAGSGGKSQITWDNPKELEGYIQKLQNAAERLATENRKLRKWHTTFCEKVVVLMNIDLLRQQQRWKDGLQELRTGLATVEAQGFQASDMHAWKQHWNHQLYKALEHQYQMGLEALNENLPEINIDLTYKQGRLQFRPPFEEIRAKYYREMKRFIGIPNQFKGVGEAGDESIFSIMIDRNASGFLTIFSKAEDLFRRLSAVLHQHKEWIVIGQVDMEALVEKHLFTVHDWEKNFKALKIKGKEVERLPSAVKVDCLNINCNPVKTVIDDLIQKLFDLLVLSLKKSIQAHLHEIDTFVTEAMEVLTIMPQSVEEIGDANLQYSKLQERKPEILPLFQEAEDKNRLLRTVAGGGLETISNLKAKWDKFELMMESHQLMIKDQIEVMKGNVKSRLQIYYQELEKFKARWDQLKPGDDVIETGQHNTLDKSAKLIKEKKIEFDDLEVTRKKLVDDCHHFRLEEPNFSLASSISKDIESCAQIWAFYEEFQQGFQEMANEDWITFRTKTYLFEEFLMNWHDRLRKVEEHSVMTVKLQSEVDKYKIVIPILKYVRGEHLSPDHWLDLFRLLGLPRGTSLEKLLFGDLLRVADTIVAKAADLKDLNSRAQGEVTIREALRELDLWGVGAVFTLIDYEDSQSRTMKLIKDWKDIVNQVGDNRCLLQSLKDSPYYKGFEDKVSIWERKLAELDEYLQNLNHIQRKWVYLEPIFGRGALPKEQTRFNRVDEDFRSIMTDIKKDNRVTTLTTHAGIRNSLLTILDQLQRCQKSLNEFLEEKRSAFPRFYFIGDDDLLEILGQSTNPSVIQSHLKKLFAGINSVCFDEKSKHITAMKSLEGEVVPFKNKVPLSNNVETWLNDLALEMKKTLEQLLKECVTTGRSSQGAVDPSLFPSQILCLAEQIKFTEDVENAIKDHSLHQIETQLVNKLEQYTNIDTSSEDPGNTESGILELKLKALILDIIHNIDVVKQLNQIQVHTTEDWAWKKQLRFYMKSDHTCCVQMVDSEFQYTYEYQGNASKLVYTPLTDKCYLTLTQAMKMGLGGNPYGPAGTGKTESVKALGGLLGRQVLVFNCDEGIDVKSMGRIFVGLVKCGAWGCFDEFNRLEESVLSAVSMQIQTIQDALKNHRTVCELLGKEVEVNSNSGIFITMNPAGKGYGGRQKLPDNLKQLFRPVAMSHPDNELIAEVILYSEGFKDAKVLSRKLVAIFNLSRELLTPQQHYDWGLRALKTVLRGSGNLLRQLNKSGTTQNANESHIVVQALRLNTMSKFTFTDCTRFDALIKDVFPGIELKEVEYDELSAALKQVFEEANYEIIPNQIKKALELYEQLCQRMGVVIVGPSGAGKSTLWRMLRAALCKTGKVVKQYTMNPKAMPRYQLLGHIDMDTREWSDGVLTNSARQVVREPQDVSSWIICDGDIDPEWIESLNSVLDDNRLLTMPSGERIQFGPNVNFVFETHDLSCASPATISRMGMIFLSDEETDLNSLIKSWLRNQPAEYRNNLENWIGDYFEKALQWVLKQNDYVVETSLVGTVMNGLSHLHGCRDHDEFIINLIRGLGGNLNMKSRLEFTKEVFHWARESPPDFHKPMDTYYDSTRGRLATYVLKKPEDLTADDFSNGLTLPVIQTPDMQRGLDYFKPWLSSDTKQPFILVGPEGCGKGMLLRYAFSQLRSTQIATVHCSAQTTSRHLLQKLSQTCMVISTNTGRVYRPKDCERLVLYLKDINLPKLDKWGTSTLVAFLQQVLTYQGFYDENLEWVGLENIQIVASMSAGGRLGRHKLTTRFTSIVRLCSIDYPEREQLQTIYGAYLEPVLHKNLKNHSIWGSSSKIYLLAGSMVQVYEQVRAKFTVDDYSHYFFTPCILTQWVLGLFRYDLEGGSSNHPLDYVLEIVAYEARRLFRDKIVGAKELHLFDIILTSVFQGDWGSDILDNMSDSFYVTWGARHNSGARAAPGQPLPPHGKPLGKLNSTDLKDVIKKGLIHYGRDNQNLDILLFHEVLEYMSRIDRVLSFPGGSLLLAGRSGVGRRTITSLVSHMHGAVLFSPKISRGYELKQFKNDLKHVLQLAGIEAQQVVLLLEDYQFVHPTFLEMINSLLSSGEVPGLYTLEELEPLLLPLKDQASQDGFFGPVFNYFTYRIQQNLHIVLIMDSANSNFMINCESNPALHKKCQVLWMEGWSNSSMKKIPEMLFSETGGGEKYNDKKRKEEKKKNSVDPDFLKSFLLIHESCKAYGATPSRYMTFLHVYSAISSSKKKELLKRQSHLQAGVSKLNEAKALVDELNRKAGEQSVLLKTKQDEADAALQMITVSMQDASEQKTELERLKHRIAEEVVKIEERKNKIDDELKEVQPLVNEAKLAVGNIKPESLSEIRSLRMPPDVIRDILEGVLRLMGIFDTSWVSMKSFLAKRGVREDIATFDARNISKEIRESVEELLFKNKGSFDPKNAKRASTAAAPLAAWVKANIQYSHVLERIHPLETEQAGLESNLKKTEDRKRKLEELLNSVGQKVSELKEKFQSRTSEAAKLEAEVSKAQETIKAAEVLINQLDREHKRWNAQVVEITEELATLPKRAQLAAAFITYLSAAPESLRKTCLEEWTKSAGLEKFDLRRFLCTESEQLIWKSEGLPSDDLSIENALVILQSRVCPFLIDPSSQATEWLKTHLKDSRLEVINQQDSNFITALELAVRFGKTLIIQEMDGVEPVLYPLLRRDLVAQGPRYVVQIGDKIIDYNEEFRLFLSTRNPNPFIPPDAASIVTEVNFTTTRSGLRGQLLALTIQHEKPDLEEQKTKLLQQEEDKKIQLAKLEESLLETLATSQGNILENKDLIESLNQTKASSALIQESLKESYKLQISLDQERDAYLPLAESASKMYFIISDLSKINNMYRFSLAAFLRLFQRALQNKQDSENTEQRIQSLISSLQHMVYEYICRCLFKADQLMFALHFVRGMHPELFQENEWDTFTGVVVGDMLRKADSQQKIRDQLPSWIDQERSWAVATLKIALPSLYQTLCFEDAALWRTYYNNSMCEQEFPSILAKKVSLFQQILVVQALRPDRLQSAMALFACKTLGLKEVSPLPLNLKRLYKETLEIEPILIIISPGADPSQELQELANAERSGECYHQVAMGQGQADLAIQMLKECARNGDWLCLKNLHLVVSWLPVLEKELNTLQPKDTFRLWLTAEVHPNFTPILLQSSLKITYESPPGLKKNLMRTYESWTPEQISKKDNTHRAHALFSLAWFHAACQERRNYIPQGWTKFYEFSLSDLRAGYNIIDRLFDGAKDVQWEFVHGLLENAIYGGRIDNYFDLRVLQSYLKQFFNSSVIDVFNQRNKKSIFPYSVSLPQSCSILDYRAVIEKIPEDDKPSFFGLPANIARSSQRMISSQVISQLRILGRSITAGSKFDREIWSNELSPVLNLWKKLNQNSNLIHQKVPPPNDRQGSPILSFIILEQFNAIRLVQSVHQSLAALSKVIRGTTLLSSEVQKLASALLNQKCPLAWQSKWEGPEDPLQYLRGLVARALAIQNWVDKAEKQALLSETLDLSELFHPDTFLNALRQETARAVGRSVDSLKFVASWKGRLQEAKLQIKISGLLLEGCSFDGNQLSENQLDSPSVSSVLPCFMGWIPQDACGPYSPDECISLPVYTSAERDRVVTNIDVPCGGNQDQWIQCGAALFLKNQ

SEQ ID NO: 13846 - protein, 445 aa, Artificial Sequence
  Synthetic polypeptide
TKMSWTWCCTSVVPATQEAEVDDTIKIAEALLSDLPGFRCFHQSAKDLLDQLKLYEQEQFDDWSRDIQSGLSDSRSGLCIEASSRIMELDSNDGLLKVHYSDRLVILLREVRQLSALGFVIPAKIQQVANIAQKFCKQAIILKQVAHFYNSIDQQMIQSQRPMMLQSALAFEQIIKNSKAGSGGKSQITWDNPKELEGYIQKLQNAAERLATENRKLRKWHTTFCEKVVVLMNIDLLRQQQRWKDGLQELRTGLATVEAQCPLAWQSKWEGPEDPLQYLRGLVARALAIQNWVDKAEKQALLSETLDLSELFHPDTFLNALRQETARAVGRSVDSLKFVASWKGRLQEAKLQIKISGLLLEGCSFDGNQLSENQLDSPSVSSVLPCFMGWIPQDACGPYSPDECISLPVYTSAERDRVVTNIDVPCGGNQDQWIQCGAALFLKNQ

SEQ ID NO: 13847 - protein, 3839 aa, Artificial Sequence
  Synthetic polypeptide
TKMSWTWCCTSVVPATQEAEVDDTIKIAEALLSDLPGFRCFHQSAKDLLDQLKLYEQEQFDDWSRDIQSGLSDSRSGLCIEASSRIMELDSNDGLLKVHYSDRLVILLREVRQLSALGFVIPAKIQQVANIAQKFCKQAIILKQVAHFYNSIDQQMIQSQRPMMLQSALAFEQIIKNSKAGSGGKSQITWDNPKELEGYIQKLQNAAERLATENRKLRKWHTTFCEKVVVLMNIDLLRQQQRWKDGLQELRTGLATVEAQGFQASDMHAWKQHWNHQLYKALEHQYQMGLEALNENLPEINIDLTYKQGRLQFRPPFEEIRAKYYREMKRFIGIPNQFKGVGEAGDESIFSIMIDRNASGFLTIFSKAEDLFRRLSAVLHQHKEWIVIGQVDMEALVEKHLFTVHDWEKNFKALKIKGKEVERLPSAVKVDCLNINCNPVKTVIDDLIQKLFDLLVLSLKKSIQAHLHEIDTFVTEAMEVLTIMPQSVEEIGDANLQYSKLQERKPEILPLFQEAEDKNRLLRTVAGGGLETISNLKAKWDKFELMMESHQLMIKDQIEVMKGNVKSRLQIYYQELEKFKARWDQLKPGDDVIETGQHNTLDKSAKLIKEKKIEFDDLEVTRKKLVDDCHHFRLEEPNFSLASSISKDIESCAQIWAFYEEFQQGFQEMANEDWITFRTKTYLFEEFLMNWHDRLRKVEEHSVMTVKLQSEVDKYKIVIPILKYVRGEHLSPDHWLDLFRLLGLPRGTSLEKLLFGDLLRVADTIVAKAADLKDLNSRAQGEVTIREALRELDLWGVGAVFTLIDYEDSQSRTMKLIKDWKDIVNQVGDNRCLLQSLKDSPYYKGFEDKVSIWERKLAELDEYLQNLNHIQRKWVYLEPIFGRGALPKEQTRFNRVDEDFRSIMTDIKKDNRVTTLTTHAGIRNSLLTILDQLQRCQKSLNEFLEEKRSAFPRFYFIGDDDLLEILGQSTNPSVIQSHLKKLFAGINSVCFDEKSKHITAMKSLEGEVVPFKNKVPLSNNVETWLNDLALEMKKTLEQLLKECVTTGRSSQGAVDPSLFPSQILCLAEQIKFTEDVENAIKDHSLHQIETQLVNKLEQYTNIDTSSEDPGNTESGILELKLKALILDIIHNIDVVKQLNQIQVHTTEDWAWKKQLRFYMKSDHTCCVQMVDSEFQYTYEYQGNASKLVYTPLTDKCYLTLTQAMKMGLGGNPYGPAGTGKTESVKALGGLLGRQVLVFNCDEGIDVKSMGRIFVGLVKCGAWGCFDEFNRLEESVLSAVSMQIQTIQDALKNHRTVCELLGKEVEVNSNSGIFITMNPAGKGYGGRQKLPDNLKQLFRPVAMSHPDNELIAEVILYSEGFKDAKVLSRKLVAIFNLSRELLTPQQHYDWGLRALKTVLRGSGNLLRQLNKSGTTQNANESHIVVQALRLNTMSKFTFTDCTRFDALIKDVFPGIELKEVEYDELSAALKQVFEEANYEIIPNQIKKALELYEQLCQRMGVVIVGPSGAGKSTLWRMLRAALCKTGKVVKQYTMNPKAMPRYQLLGHIDMDTREWSDGVLTNSARQVVREPQDVSSWIICDGDIDPEWIESLNSVLDDNRLLTMPSGERIQFGPNVNFVFETHDLSCASPATISRMGMIFLSDEETDLNSLIKSWLRNQPAEYRNNLENWIGDYFEKALQWVLKQNDYVVETSLVGTVMNGLSHLHGCRDHDEFIINLIRGLGGNLNMKSRLEFTKEVFHWARESPPDFHKPMDTYYDSTRGRLATYVLKKPEDLTADDFSNGLTLPVIQTPDMQRGLDYFKPWLSSDTKQPFILVGPEGCGKGMLLRYAFSQLRSTQIATVHCSAQTTSRHLLQKLSQTCMVISTNTGRVYRPKDCERLVLYLKDINLPKLDKWGTSTLVAFLQQVLTYQGFYDENLEWVGLENIQIVASMSAGGRLGRHKLTTRFTSIVRLCSIDYPEREQLQTIYGAYLEPVLHKNLKNHSIWGSSSKIYLLAGSMVQVYEQVRAKFTVDDYSHYFFTPCILTQWVLGLFRYDLEGGSSNHPLDYVLEIVAYEARRLFRDKIVGAKELHLFDIILTSVFQGDWGSDILDNMSDSFYVTWGARHNSGARAAPGQPLPPHGKPLGKLNSTDLKDVIKKGLIHYGRDNQNLDILLFHEVLEYMSRIDRVLSFPGGSLLLAGRSGVGRRTITSLVSHMHGAVLFSPKISRGYELKQFKNDLKHVLQLAGIEAQQVVLLLEDYQFVHPTFLEMINSLLSSGEVPGLYTLEELEPLLLPLKDQASQDGFFGPVFNYFTYRIQQNLHIVLIMDSANSNFMINCESNPALHKKCQVLWMEGWSNSSMKKIPEMLFSETGGGEKYNDKKRKEEKKKNSVDPDFLKSFLLIHESCKAYGATPSRYMTFLHVYSAISSSKKKELLKRQSHLQAGVSKLNEAKALVDELNRKAGEQSVLLKTKQDEADAALQMITVSMQDASEQKTELERLKHRIAEEVVKIEERKNKIDDELKEVQPLVNEAKLAVGNIKPESLSEIRSLRMPPDVIRDILEGVLRLMGIFDTSWVSMKSFLAKRGVREDIATFDARNISKEIRESVEELLFKNKGSFDPKNAKRASTAAAPLAAWVKANIQYSHVLERIHPLETEQAGLESNLKKTEDRKRKLEELLNSVGQKVSELKEKFQSRTSEAAKLEAEVSKAQETIKAAEVLINQLDREHKRWNAQVVEITEELATLPKRAQLAAAFITYLSAAPESLRKTCLEEWTKSAGLEKFDLRRFLCTESEQLIWKSEGLPSDDLSIENALVILQIIGLKSWSRVCPFLIDPSSQATEWLKTHLKDSRLEVINQQDSNFITALELAVRFGKTLIIQEMDGVEPVLYPLLRRDLVAQGPRYVVQIGDKIIDYNEEFRLFLSTRNPNPFIPPDAASIVTEVNFTTTRSGLRGQLLALTIQHEKPDLEEQKTKLLQQEEDKKIQLAKLEESLLETLATSQGNILENKDLIESLNQTKASSALIQESLKESYKLQISLDQERDAYLPLAESASKMYFIISDLSKINNMYRFSLAAFLRLFQRALQNKQDSENTEQRIQSLISSLQHMVYEYICRCLFKADQLMFALHFVRGMHPELFQENEWDTFTGVVVGDMLRKADSQQKIRDQLPSWIDQERSWAVATLKIALPSLYQTLCFEDAALWRTYYNNSMCEQEFPSILAKKVSLFQQILVVQALRPDRLQSAMALFACKTLGLKEVSPLPLNLKRLYKETLEIEPILIIISPGADPSQELQELANAERSGECYHQVAMGQGQADLAIQMLKECARNGDWLCLKNLHLVVSWLPVLEKELNTLQPKDTFRLWLTAEVHPNFTPILLQSSLKITYESPPGLKKNLMRTYESWTPEQISKKDNTHRAHALFSLAWFHAACQERRNYIPQGWTKFYEFSLSDLRAGYNIIDRLFDGAKDVQWEFVHGLLENAIYGGRIDNYFDLRVLQSYLKQFFNSSVIDVFNQRNKKSIFPYSVSLPQSCSILDYRAVIEKIPEDDKPSFFGLPANIARSSQRMISSQVISQLRILGRSITAGSKFDREIWSNELSPVLNLWKKLNQNSNLIHQKVPPPNDRQGSPILSFIILEQFNAIRLVQSVHQSLAALSKVIRGTTLLSSEVQKLASALLNQKCPLAWQSKWEGPEDPLQYLRGLVARALAIQNWVDKAEKQALLSETLDLSELFHPDTFLNALRQETARAVGRSVDSLKFVASWKGRLQEAKLQIKISGLLLEGCSFDGNQLSENQLDSPSVSSVLPCFMGWIPQDACGPYSPDECISLPVYTSAERDRVVTNIDVPCGGNQDQWIQCGAALFLKNQ

SEQ ID NO: 13848 - protein, 298 aa, Artificial Sequence
  Synthetic polypeptide
YCQVVISQLRILGRSITAGSKFDREIWSNELSPVLNLWKKLNQNSNLIHQKVPPPNDRQGSPILSFIILEQFNAIRLVQSVHQSLAALSKVIRGTTLLSSEVQKLASALLNQKCPLAWQSKWEGPEDPLQYLRGLVARALAIQNWVDKAEKQALLSETLDLSELFHPDTFLNALRQETARAVGRSVDSLKFVASWKGRLQEAKLQIKISGLLLEGCSFDGNQLSENQLDSPSVSSVLPCFMGWIPQDACGPYSPDECISLPVYTSAERDRVVTNIDVPCGGNQDQWIQCGAALFLKNQ

SEQ ID NO: 13849 - protein, 8 aa, Artificial Sequence
  Synthetic polypeptide
IAKWLFHS

SEQ ID NO: 13850 - protein, 21 aa, Artificial Sequence
  Synthetic polypeptide
MPSGYFTVEDFGQIHNSWFQI

SEQ ID NO: 13851 - protein, 228 aa, Artificial Sequence
  Synthetic polypeptide
YCQVVISQLRILGRSITAGSKFDREIWSNELSPVLNLWKKLNQCPLAWQSKWEGPEDPLQYLRGLVARALAIQNWVDKAEKQALLSETLDLSELFHPDTFLNALRQETARAVGRSVDSLKFVASWKGRLQEAKLQIKISGLLLEGCSFDGNQLSENQLDSPSVSSVLPCFMGWIPQDACGPYSPDECISLPVYTSAERDRVVTNIDVPCGGNQDQWIQCGAALFLKNQ

SEQ ID NO: 13852 - protein, 10 aa, Artificial Sequence
  Synthetic polypeptide
SSQEEKPTLA

SEQ ID NO: 13853 - protein, 93 aa, Artificial Sequence
  Synthetic polypeptide
HHKKKNQLLRKKRRIFIHSVGAGTINALLDCLLEDEVISQEDMNKVRDENDTVMDKARVLIDLVTGKGPKSCCKFIKHLCEEDPQLASKMGLH

SEQ ID NO: 13854 - protein, 24 aa, Artificial Sequence
  Synthetic polypeptide
ITRRKTNSCVKREEFLSIQWVQAQ

SEQ ID NO: 13855 - protein, 11 aa, Artificial Sequence
  Synthetic polypeptide
VTGIRMKTSKK

SEQ ID NO: 13856 - protein, 393 aa, Artificial Sequence
  Synthetic polypeptide
WKFCSLREKKTPCIERLNSEEFFHCLARLLEVLSYRNKNEDQQEVILVRTDQSGRVWPVNTPGKSLESQGGRRKRQMVSTHEERERVRYFHDDDNLSLNDLVKNEKMGTAENQNKLFMRMASKFMGKTDGDYYTLDDMFVSKAAERERLGEEEENQRKKAIAEHRSLAAQMEKCLYCFDSSQFPKHLIVAIGVKVYLCLPNVRSLTEGHCLIVPLQHHRAATLLDEDIWEEIQMFRKSLVKMFEDKGLDCIFLETNMSMKKQYHMVYECIPLPKEVGDMAPIYFKKAIMESDEEWSMNKKLIDLSSKDIRKSVPRGLPYFSVDFGLHGGFAHVIEDQHKFPHYFGKEIIGGMLDIEPRLWRKGIRESFEDQRKKALQFAQWWKPYDFTKSKNY

SEQ ID NO: 13857 - protein, 241 aa, Artificial Sequence
  Synthetic polypeptide
WKFCSLREKKTPCIERLNSEEFFHCLARLLEVLSYRNKNEDQQEVILVRTDQSGRVWPVNTPGKSLESQGGRRKRQMVSTHEERERVRYFHDDDNLSLNDLVKNEKMGTAENQNKLFMRMASKFMGKTDGDYYTLDDMFVSKAAERERLGEEEENQRKKAIAEHRSLAAQMEKCLYCFDSSQFPKHLIVAIGVKVYLCLPNVRSLTEGHCLIVPLQHHRAATLLDEDIWEEIQIKSRTVIQ

SEQ ID NO: 13858 - protein, 171 aa, Artificial Sequence
  Synthetic polypeptide
WKFCSLREKKTPCIERLNSEEFFHCLARLLEVLSYRNKNEDQQEVILVRTDQSGRVWPVNTPGKSLESQGGRRKRQMVSTHEERERVRYFHDDDNLSLNDLVKNEKMGTAENQNKLFMRMASKQLRENVLVKRKRTKGKKLLLSIGVLLHKWKNVCIVLTALNFPSILLLQ

SEQ ID NO: 13859 - protein, 94 aa, Artificial Sequence
  Synthetic polypeptide
DSLAGKAGQTPTDPLIYKTLRAPYPIPFRKELTCEYFENNCPGSDVVLVYMWDSHHQPVFGRKIQSEHPHASELYQLLLAVPNLYSDAGISIRQ

SEQ ID NO: 13860 - protein, 339 aa, Artificial Sequence
  Synthetic polypeptide
PVNILKTIALGQMLSLCICGTAITSQYLAERYKVNTPMLQSFINYCLLFLIYTVMLAFRSGSDNLLVILKRKWWKYILLGLADVEANYVIVRAYQYTTLTSVQLLDCFGIPVLMALSWFILHARYRVIHFIAVAVCLLGVGTMVGADILAGREDNSGSDVLIGDILVLLGASLYAISNVCEEYIVKKLSRQEFLGMVGLFGTIISGIQLLIVEYKDIASIHWDWKIALLFVAFALCMFCLYSFMPLVIKVTSATSVNLGILTADLYSLFVGLFLFGYKFSGLYILSFTVIMVGFILYCSTPTRTAEPAESSVPPVTSIGIDNLGLKLEENLQETHSAVL

SEQ ID NO: 13861 - protein, 322 aa, Artificial Sequence
  Synthetic polypeptide
PVNILKTIALGQMLSLCICGTAITSQYLAERYKVNTPMLQSFINYCLLFLIYTVMLAFRSGSDNLLVILKRKWWKYILLGLADVEANYVIVRAYQYTTLTSVQLLDCFGIPVLMALSWFILHARYRVIHFIAVAVCLLGVGTMVGADILAGREDNSGSDVLIGDILVLLGASLYAISNVCEEYIVKKLSRQEFLGMVGLFGTIISGIQLLIVEYKDIASIHWDWKIALLFVAFALCMFCLYSFMPLVIKVTSATSVNLGILTADLYSLFVGLFLFGYKDSTSCPSLSSWWGLSCTAPPLLARPSRLKAACLQSPALGLTTWG

SEQ ID NO: 13862 - protein, 230 aa, Artificial Sequence
  Synthetic polypeptide
PVNILKTIALGQMLSLCICGTAITSQYLAERYKVNTPMLQSFINYCLLFLIYTVMLAFRSGSDNLLVILKRKWWKYILLGLADVEANYVIVRAYQYTTLTSVQLLDCFGIPVLMALSWFILHARYRVIHFIAVAVCLLGVGTMVGADILAGREDNSGSDVLIGDILVLLGASLYAISNVCEEYIVKKLSRQEFLGMVGLFGTIISGIQLPAVRGICPVYVLPVQLHAIGD

SEQ ID NO: 13863 - protein, 99 aa, Artificial Sequence
  Synthetic polypeptide
EVKSPSARQPPRLGVPPHRDRGLHRGQVLPPAPLHPGPLPRAALPRLRPHRRRGLLLPPAGDRAGQEDQATALGHGGTGAVQINNPILLPQLSWWIFSI

SEQ ID NO: 13864 - protein, 221 aa, Artificial Sequence
  Synthetic polypeptide
RAPPPGSHPVWEFRLIVIGDSTVGKSCLLHRFTQGRFPGLRSPACDPTVGVDFFSRLLEIEPGKRIKLQLWDTAGQERFRSITRSYYRNSVGGFLVFDITNRRSFEHVKDWLEEAKMYVQPFRIVFLLVGHKCDLASQRQVTREEAEKLSADCGMKYIETSAKDATNVEESFTILTRDIYELIKKGEICIQDGWEGVKSGFVPNTVHSSEEAVKPRKECFC

SEQ ID NO: 13865 - protein, 32 aa, Artificial Sequence
  Synthetic polypeptide
EVRSPSARQPPRLRSEEPLRPAATPFGSSASS

SEQ ID NO: 13866 - protein, 16 aa, Artificial Sequence
  Synthetic polypeptide
EVKSPSARQPPRLGDQ

SEQ ID NO: 13867 - protein, 29 aa, Artificial Sequence
  Synthetic polypeptide
RAPPPGSHPVWEINNPILLPQLSWWIFSI

SEQ ID NO: 13868 - protein, 169 aa, Artificial Sequence
  Synthetic polypeptide
EVRSPSARQPPRLRSEEPLRPAATPFGRSITRSYYRNSVGGFLVFDITNRRSFEHVKDWLEEAKMYVQPFRIVFLLVGHKCDLASQRQVTREEAEKLSADCGMKYIETSAKDATNVEESFTILTRDIYELIKKGEICIQDGWEGVKSGFVPNTVHSSEEAVKPRKECFC

SEQ ID NO: 13869 - protein, 27 aa, Artificial Sequence
  Synthetic polypeptide
DLLLRRSGVVCGRPVLLLRTTRKSGWD

SEQ ID NO: 13870 - protein, 13 aa, Artificial Sequence
  Synthetic polypeptide
EQLENQGGIKNSA

SEQ ID NO: 13871 - protein, 390 aa, Artificial Sequence
  Synthetic polypeptide
KIRVGLKTQPESKCPELLANYCDMLLRKTPLSKKLTSEEIEAKLKEVLLVLKYVQNKDVFMRYHKAHLTRRLILDISADSEIEENMVEWLREVGMPADYVNKLARMFQDIKVSEDLNQAFKEMHKNNKLALPADSVNIKILNAGAWSRSSEKVFVSLPTELEDLIPEVEEFYKKNHSGRKLHWHHLMSNGIITFKNEVGQYDLEVTTFQLAVLFAWNQRPREKISFENLKLATELPDAELRRTLWSLVAFPKLKRQVLLYEPQVNSPKDFTEGTLFSVNQEFSLIKNAKVQKRGKINLIGRLQLTTERMREEENEGIVQLRILRTQEAIIQIMKMRKKISNAQLQTELVEILKNMFLPQKKMIKEQIEWLIEHKYIRRDESDINTFIYMA

SEQ ID NO: 13872 - protein, 50 aa, Artificial Sequence
  Synthetic polypeptide
SQGSETSLGSILRHPICTNKLLTARKPHFYLPDFYFGKFRFKRICRTLYR

SEQ ID NO: 13873 - protein, 1422 aa, Artificial Sequence
  Synthetic polypeptide
DTPSVPISYLQQENLISTCQTFILESSDLKEYAEHCTDEGFIPACLLSLFGKNLTTILNEYVAMKTKETSNNVPAIMSSLWKKLDHTLSQIRSMQSSPRFAGSQRARTRTGIAEIKRQRKLASQTAPASAELLTLPYLSGQFTTPPSTGTQVTRPSGQISDPSRSYFVVVNHSQSQDTVTTGEALNVIPGAQEKKAHASLMSPGRRKSESQRKSTTLSGPHSTIRNFQDPNAFAVEKQMVIENAREKILSNKSLQEKLAENINKFLTSDNNIAQVPKQTDNNPTEPETSIDEFLGLPSEIHMSEEAIQDILEQTESDPAFQALFDLFDYGKTKNNKNISQSISSQPMESNPSIVLADETNLAVKGSFETEESDGQSGQPAFCTSYQNDDPLNALKNSNNHDVLRQEDQENFSQISTSIQKKAFKTAVPTEQKCDIDITFESVPNLNDFNQRGNSNAECNPHCAELYTNQMSTETEMAIGIEKNSLSSNVPSESQLQPDQPDIPITSFVSLGCEANNENLILSGKSSQLLSQDTSLTGKPSKKSQFCENSNDTVKLKINFHGSKSSDSSEVHKSKIEINVLEPVMSQLSNCQDNSCLQSEILPVSVESSHLNVSGQVEIHLGDSLSSTKQPSNDSASVELNHTENEAQASKSENSQEPSSSVKEENTIFLSLGGNANCEKVALTPPEGTPVENSHSLPPESVCSSVGDSHPESQNTDDKPSSNNSAEIDASNIVSLKVIISDDPFVSSDTELTSAVSSINGENLPTIILSSPTKSPTKNAELVKCLSSEETVGAVVYAEVGDSASMEQSLLTFKSEDSAVNNTQNEDGIAFSANVTPCVSKDGGYIQLMPATSTAFGNSNNILIATCVTDPTALGTSVSQSNVVVLPGNSAPMTAQPLPPQLQTPPRSNSVFAVNQAVSPNFSQGSAIIIASPVQPVLQGMVGMIPVSVVGQNGNNFSTPPRQVLHMPLTAPVCNRSIPQFPVPPKSQKAQGLRNKPCIGKQVNNLVDSSGHSVGCHAQKTEVSDKSIATDLGKKSEETTVPFPEESIVPAAKPCHRRVLCFDSTTAPVANTQGPNHKMVSQNKERNAVSFPNLDSPNVSSTLKPPSNNAIKREKEKPPLPKILSKSESAISRHTTIRETQSEKKVSPTEIVLESFHKATANKENELCSDVERQKNPENSKLSIGQQNGGLRSEKSIASLQEMTKKQGTSSNNKNVLSVGTAVKDLKQEQTKSASSLITTEMLQDIQRHSSVSRLADSSDLPVPRTPGSGAGEKHKEEPIDIIKAPSSRRFSEDSSTSKVMVPPVTPDLPACSPASETGSENSVNMAAHTLMILSRAAISRTTSATPLKDNTQQFRASSRSTTKKRKIEELDERERNSRPSSKNLTNSSIPMKKKKIKKKKLPSSFPAGMDVDKFLLSLHYDE

SEQ ID NO: 13874 - protein, 20 aa, Artificial Sequence
  Synthetic polypeptide
AKLHSNIGSAAHYVKHHSKS

SEQ ID NO: 13875 - protein, 13 aa, Artificial Sequence
  Synthetic polypeptide
QSYIQILALLLIM

SEQ ID NO: 13876 - protein, 452 aa, Artificial Sequence
  Synthetic polypeptide
KATFKYWLCCSLCETPFKVVVKSLSPKELVRIHVPKPLDRNDGTFLMRYRMYETVDEGLKIEVLYGDEHVAQSPYILKGPVYHEYCECPEDPQAWQKTLSCPTKEPQIAKDFASFPSINLQQMLKEVPKRFGDERGAIVHYTILNNHVYRRSLGKYTDFKMFSDEILLSLTRKVLLPDLEFYVNLGDWPLEHRKVNGTPSPIPIISWCGSLDSRDVVLPTYDITHSMLEAMRGVTNDLLSIQGNTGPSWINKTERAFFRGRDSREERLQLVQLSKENPQLLDAGITGYFFFQEKEKELGKAKLMGFFDFFKYKYQVNVDGTVAAYRYPYLMLGDSLVLKQDSPYYEHFYMALEPWKHYVPIKRNLSDLLEKVKWAKENDEEAKKIAKEGQLMARDLLQPHRLYCYYYQVLQKYAERQSSKPEVRDGMELVPQPEDSTAICQCHRKKPSREEL

SEQ ID NO: 13877 - protein, 410 aa, Artificial Sequence
  Synthetic polypeptide
KATFKYWLCCSLCETPFKVVVKSLSPKELVRIHVPKPLDRNDGTFLMRYRMYETVDEGLKIEVLYGDEHVAQSPYILKGPVYHEYCECPEDPQAWQKTLSCPTKEPQIAKDFASFPSINLQQMLKEVPKRFGDERGAIVHYTILNNHVYRRSLGKYTDFKMFSDEILLSLTRKVLLPDLEFYVNLGDWPLEHRKVNGTPSPIPIISWCGSLDSRDVVLPTYDITHSMLEAMRGVTNDLLSIQGNTGPSWINKTERAFFRGRDSREERLQLVQLSKENPQLLDAGITGYFFFQEKEKELGKAKLMGFFDFFKYKYQVNVDGTVAAYRYPYLMLGDSLVLKQDSPYYEHFYMALEPWKHYVPIKRNLSDLLEKVKWAKSFTLSPRLECSGTISTHCNLCLPGSRNFVPQPPE

SEQ ID NO: 13878 - protein, 8 aa, Artificial Sequence
  Synthetic polypeptide
GLPSHVEL

SEQ ID NO: 13879 - protein, 854 aa, Artificial Sequence
  Synthetic polypeptide
ASDISPACTSLSCHHVKKTSLFPLSSATIVSFLRPPQPCGTINVNEITRFSDFPLSKKTLKGLQEAQYRLVTEIQKQTIGLALQGKDVLGAAKTGSGKTLAFLVPVLEALYRLQWTSTDGLGVLIISPTRELAYQTFEVLRKVGKNHDFSAGLIIGGKDLKHEAERINNINILVCTPGRLLQHMDETVSFHATDLQMLVLDEADRILDMGFADTMNAVIENLPKKRQTLLFSATQTKSVKDLARLSLKNPEYVWVHEKAKYSTPATLEQNYIVCELQQKISVLYSFLRSHLKKKSIVFFSSCKEVQYLYRVFCRLRPGVSILALHGRQQQMRRMEVYNEFVRKRAAVLFATDIAARGLDFPAVNWVLQFDCPEDANTYIHRAGRTARYKEDGEALLILLPSEKAMVQQLLQKKVPVKEIKINPEKLIDVQKKLESILAQDQDLKERAQRCFVSYVRSVYLMKDKEVFDVSKLPIPEYALSLGLAVAPRVRFLQKMQKQPTKELVRSQADKVIEPRAPSLTNDEVEEFRAYFNEKMSILQKGGKRLEGTEHRQDNDTGNEEQEEEEDDEEEMEEKLAKAKGSQAPSLPNTSEAQKIKEVPTQFLDRDEEEEDADFLKVKRHNVFGLDLKDEKTLQKKEPSKSSIKKKMTKVAEAKKVMKRNFKVNKKITFTDEGELVQQWPQMQKSAIKDAEEDDDTGGINLHKAKERLQEEDKFDKEEYRKKIKAKHREKRLKEREARREANKRQAKAKDEEEAFLDWSDDDDDDDDGFDPSTLPDPDKYRSSEDSDSEDMENKISDTKKKQGMKKRSNSEVEDVGPTSHNRKKARWDTLEPLDTGLSLAEDEELVLHLLRSQS

SEQ ID NO: 13880 - protein, 42 aa, Artificial Sequence
  Synthetic polypeptide
HFPCLHFSLLPPCEKDLSFPFVFCHDCEFPEASPAMWNYKCK

SEQ ID NO: 13881 - protein, 814 aa, Artificial Sequence
  Synthetic polypeptide
ASDISPACTSLSCHHVKKTSLFPLSSATIVSFLRPPQPCGTINVNEITRFSDFPLSKKTLKGLQEAQYRLVTEIQKQTIGLALQGKDVLGAAKTGSGKTLAFLVPVLEALYRLQWTSTDGLGVLIISPTRELAYQTFEVLRKVGKNHDFSAGLIIGGKDLKHEAERINNINILVCTPGRLLQHMDETVSFHATDLQMLVLDEADRILDMGFADTMNAVIENLPKKRQTLLFSATQTKSVKDLARLSLKNPEYVWVHEKAKYSTPATLEQNYIVCELQQKISVLYSFLRSHLKKKSIVFFSSCKEVQYLYRVFCRLRPGVSILALHGRQQQMRRMEVYNEFVRKRAAVLFATDIAARGLDFPAVNWVLQFDCPEDANTYIHRAGRTARYKEDGEALLILLPSEKAMVQQLLQKKVPVKEIKINPEKLIDVQKKLESILAQDQDLKERAQRCFVSYVRSVYLMKDKEVFDVSKLPIPEYALSLGLAVAPRVRFLQKMQKQPTKELVRSQADKVIEPRAPSLTNDEVEEFRAYFNEKMSILQKGGKRLEGTEHRQDNDTGNEEQEEEEDDEEEMEEKLAKAKGSQAPSLPNTSEAQKIKEVPTQFLDRDEEEEDADFLKVKRHNVFGLDLKDEKTLQKKEPSKSSIKKKMTKVAEAKKVMKRNFKVNKKITFTDEGELVQQWPQMQKSAIKDAEEDDDTGGINLHKAKERLQEEDKFDKEEYRKKIKAKHREKRLKEREARREANKRQAKAKDEEEAFLDWSDDDDDDDDGFDPSTLPDPDKYRSSEDSDSEDMENKIRYVFTMGMKYILSTLTSVF

SEQ ID NO: 13882 - protein, 36 aa, Artificial Sequence
  Synthetic polypeptide
DLPFFFLLFSLLSVKTTRMKTFIMIHFHLMNKERTF

SEQ ID NO: 13883 - protein, 221 aa, Artificial Sequence
  Synthetic polypeptide
IKKEPSKSSIKKKMTKVAEAKKVMKRNFKVNKKITFTDEGELVQQWPQMQKSAIKDAEEDDDTGGINLHKAKERLQEEDKFDKEEYRKKIKAKHREKRLKEREARREANKRQAKAKDEEEAFLDWSDDDDDDDDGFDPSTLPDPDKYRSSEDSDSEDMENKISDTKKKQGMKKRSNSEVEDVGPTSHNRKKARWDTLEPLDTGLSLAEDEELVLHLLRSQS

SEQ ID NO: 13884 - protein, 181 aa, Artificial Sequence
  Synthetic polypeptide
IKKEPSKSSIKKKMTKVAEAKKVMKRNFKVNKKITFTDEGELVQQWPQMQKSAIKDAEEDDDTGGINLHKAKERLQEEDKFDKEEYRKKIKAKHREKRLKEREARREANKRQAKAKDEEEAFLDWSDDDDDDDDGFDPSTLPDPDKYRSSEDSDSEDMENKIRYVFTMGMKYILSTLTSVF

SEQ ID NO: 13885 - protein, 46 aa, Artificial Sequence
  Synthetic polypeptide
RGPVKQMRPLDVTDLNTSHSSCVTAGIRGALHSGIQKKQQSGVKYT

SEQ ID NO: 13886 - protein, 878 aa, Artificial Sequence
  Synthetic polypeptide
LQEYGVLCIQEYRKNSKVESSTRNNFMGLKDHLGHDLGHLYVESTDPQLSPAVPWSTVENPSMDTVNVGKDEKEASEENASSGDSEENTNSDHESEQLGSISVEPGLITKTHRQLCRSPCLEPHILKRNEILQDFKPEESQTTSKEAKKPPDVVREYQTKLEFALKLGYSEEQVQLVLNKLGTDALINDILGELVKLGNKSEADQTVSTINTITRETSSLESQRSESPMQEIVTDDGENLRPIVIDGSNVAMSHGNKEVFSCRGIKLAVDWFLERGHKDITVFVPAWRKEQSRPDALITDQEILRKLEKEKILVFTPSRRVQGRRVVCYDDRFIVKLAFESDGIIVSNDNYRDLANEKPEWKKFIDERLLMYSFVNDKFMPPDDPLGRHGPSLDNFLRKKPIVPEHKKQPCPYGKKCTYGHKCKYYHPERGSQPQRSVADELRAMSRNTAAKTANEGGLVKSNSVPCSTKADSTSDVKRGAPKRQSDPSIRTQVYQDLEEKLPTKNKLETRSVPSLVSIPATSTAKPQSTTSLSNGLPSGVHFPPQDQRPQGQYPSMMMATKNHGTPMPYEQYPKCDSPVDIGYYSMLNAYSNLSLSGPRSPERRFSLDTDYRISSVASDCSSEGSMSCGSSDSYVGYNDRSYVSSPDPQLEENLKCQHMHPHSRLNPQPFLQNFHDPLTRGQSYSHEEPKFHHKPPLPHLALHLPHSAVGARSSCPGDYPSPPSSAHSKAPHLGRSLVATRIDSISDSRLYDSSPSRQRKPYSRQEGLGSWERPGYGIDAYGYRQTYSLPDNSTQPCYEQFTFQSLPEQQEPAWRIPYCGMPQDPPRYQDNREKIYINLCNIFPPDLVRIVMKRNPHMTDAQQLAAAILVEKSQLGY

SEQ ID NO: 13887 - protein, 51 aa, Artificial Sequence
  Synthetic polypeptide
WSSETNASFRCNRPEYLTFKLCNCRNTGCFAFRNTEKTAKWSQVHVTTSWA

SEQ ID NO: 13888 - protein, 480 aa, Artificial Sequence
  Synthetic polypeptide
VGPQLLSLGSAFTESTNHRLKICEKNNTAMKSVLEQHKLTKEQWEERIQNWHEEHRGMLREDSMMEYLKIAQDLEMYGVNYFEIKNKKGTELWLGVDALGLNIYEHDDKLTPKIGFPWSEIRNISFNDKKFVIKPIDKKAPDFVFYAPRLRINKRILALCMGNHELYMRRRKPDTIEVQQMKAQAREEKHQKQLERAQLENEKKKREIAEKEKERIEREKEELMERLKQIEEQTIKAQKELEEQTRKALELDQERKRAKEEAERLEKERRAAEEAKSAIAKQAADQMKNQEQLAAELAEFTAKIALLEEAKKKKEEEATEWQHKAFAAQEDLEKTKEELKTVMSAPPPPPPPPVIPPTENEHDEHDENNAEASAELSNEGVMNHRSEEERVTETQKNERVKKQLQALSSELAQARDETKKTQNDVLHAENVKAGRDKYKTLRQIRQGNTKQRIDEFEAMWGPKLYALFQMRSCQSSIKQM

SEQ ID NO: 13889 - protein, 8 aa, Artificial Sequence
  Synthetic polypeptide
KVYWNNTN

SEQ ID NO: 13890 - protein, 25 aa, Artificial Sequence
  Synthetic polypeptide
HSNEKCIGTTQTNKRTVGRKNTELA

SEQ ID NO: 13891 - protein, 108 aa, Artificial Sequence
  Synthetic polypeptide
VGPQLLSLGSAFTESTNHRLKICEKNNTAMKSVLEQHKLTKEQDETKKTQNDVLHAENVKAGRDKYKTLRQIRQGNTKQRIDEFEAMWGPKLYALFQMRSCQSSIKQM

SEQ ID NO: 13892 - protein, 17 aa, Artificial Sequence
  Synthetic polypeptide
HSNEKCIGTTQTNKRTR

SEQ ID NO: 13893 - protein, 459 aa, Artificial Sequence
  Synthetic polypeptide
VGPQLLSLGSAFTESTNHRLKICEKNNTAMKSVLEQHKLTKEQWEERIQNWHEEHRGMLREDSMMEYLKIAQDLEMYGVNYFEIKNKKGTELWLGVDALGLNIYEHDDKLTPKIGFPWSEIRNISFNDKKFVIKPIDKKAPDFVFYAPRLRINKRILALCMGNHELYMRRRKPDTIEVQQMKAQAREEKHQKQLERAQLENEKKKREIAEKEKERIEREKEELMERLKQIEEQTIKAQKELEEQTRKALELDQERKRAKEEAERLEKERRAAEEAKSAIAKQAADQMKNQEQLAAELAEFTAKIALLEEAKKKKEEEATEWQHKAFAAQEDLEKTKEELKTVMSAPPPPPPPPVIPPTENEHDEHDENNAEASAELSNEGVMNHRSEEERVTETQKNERVKKQLQALSSELAQARDETKKTQNDVLHAENVKAGRDKYKTLRQIRQGNTKQRIDEFEAM

SEQ ID NO: 13894 - protein, 52 aa, Artificial Sequence
  Synthetic polypeptide
VGPQLLSLGSAFTESTNHRLKICEKNNTAMKSVLEQHKLTKEQWEERIQNWH

SEQ ID NO: 13895 - protein, 35 aa, Artificial Sequence
  Synthetic polypeptide
VGPQLLSLGSAFTESTNHRLKICEKNNTAMKSVLE

SEQ ID NO: 13896 - protein, 5 aa, Artificial Sequence
  Synthetic polypeptide
KVYWN

SEQ ID NO: 13897 - protein, 8 aa, Artificial Sequence
  Synthetic polypeptide
HSNEKCIG

SEQ ID NO: 13898 - protein, 27 aa, Artificial Sequence
  Synthetic polypeptide
DSFLFAVLSPLPSTRNQQFLLEKLKVR

SEQ ID NO: 13899 - protein, 23 aa, Artificial Sequence
  Synthetic polypeptide
RAEILSCLLFYLRYLAQETSSSF

SEQ ID NO: 13900 - protein, 14 aa, Artificial Sequence
  Synthetic polypeptide
HKKPAVPSREAEGE

SEQ ID NO: 13901 - protein, 30 aa, Artificial Sequence
  Synthetic polypeptide
DSFLFAVLSPLPSTRNQQFLLEKLKVRKQS

SEQ ID NO: 13902 - protein, 195 aa, Artificial Sequence
  Synthetic polypeptide
HKKPAVPSREAEGEETELTTPVLPEETQEEDAKKTFKESREAALNLAYILIPSIPLLLLLVVTTVVCWVWICRKRKREQPDPSTKKQHTIWPSPHQGNSPDLEVYNVIRKQSEADLAETRPDLKNISFRVCSGEATPDDMSCDYDNMAVNPSESGFVTLVSVESGFVTNDIYEFSPDQMGRSKESGWVENEIYGY

SEQ ID NO: 13903 - protein, 83 aa, Artificial Sequence
  Synthetic polypeptide
HKKPAVPSREAEGEETELTTPVLPEETQEEDAKKTFKESREAALNLAYILIPSIPLLLLLVVTTVVCWVWICRKRQKTGAARP

SEQ ID NO: 13904 - protein, 21 aa, Artificial Sequence
  Synthetic polypeptide
DSFLFAVLSPLPSTRNQQFLL

SEQ ID NO: 13905 - protein, 8 aa, Artificial Sequence
  Synthetic polypeptide
HKKPAVPS

SEQ ID NO: 13906 - protein, 74 aa, Artificial Sequence
  Synthetic polypeptide
HKKPAVPSREAEGEETELTTPVLPEETQEEDAKKTFKESREAALNLAYILIPSIPLLLLLVVTTVVCWVWICRK

SEQ ID NO: 13907 - protein, 4 aa, Artificial Sequence
  Synthetic polypeptide
ATKK

SEQ ID NO: 13908 - protein, 38 aa, Artificial Sequence
  Synthetic polypeptide
ARHGGLHLESQHFGRPKWEGHLRPGVQDQPRQQRNESS

SEQ ID NO: 13909 - protein, 84 aa, Artificial Sequence
  Synthetic polypeptide
GQEFRTSLGNKEMNPPDNIKDTKSDIIFFQRSVPGHDNKMQFESSSYEGYFLACEKERDLFKLILKKEDELGDRSIMFTVQNED

SEQ ID NO: 13910 - protein, 481 aa, Artificial Sequence
  Synthetic polypeptide
IGTVLVCSSQHDQRRRWVISAFPTESLMLDDQPPMEAQYAEEGPGPGIFRAEPGDQQHPISQAVCWRSMRRGCAVLGALGLLAGAGVGSWLLVLYLCPAASQPISGTLQDEEITLSCSEASAEEALLPALPKTVSFRINSEDFLLEAQVRDQPRWLLVCHEGWSPALGLQICWSLGHLRLTHHKGVNLTDIKLNSSQEFAQLSPRLGGFLEEAWQPRNNCTSGQVVSLRCSECGARPLASRIVGGQSVAPGRWPWQASVALGFRHTCGGSVLAPRWVVTAAHCMHSFRLARLSSWRVHAGLVSHSAVRPHQGALVERIIPHPLYSAQNHDYDVALLRLQTALNFSDTVGAVCLPAKEQHFPKGSRCWVSGWGHTHPSHTYSSDMLQDTVVPLFSTQLCNSSCVYSGALTPRMLCAGYLDGRADACQGDSGGPLVCPDGDTWRLVGVVSWGRGCAEPNHPGVYAKVAEFLDWIHDTAQDSLL

SEQ ID NO: 13911 - protein, 8 aa, Artificial Sequence
  Synthetic polypeptide
FLHFQLRA

SEQ ID NO: 13912 - protein, 412 aa, Artificial Sequence
  Synthetic polypeptide
IGTVLVCSSQHDQRRRWVISAFPTESLMLDDQPPMEAQYAEEGPGPGIFRAEPGDQQHPISQAVCWRSMRRGCAVLGALGLLAGAGVGSWLLVLYLCPAASQPISGTLQDEEITLSCSEASAEEALLPALPKTVSFRINSEDFLLEAQVRDQPRWLLVCHEGWSPALGLQICWSLGHLRLTHHKGVNLTDIKLNSSQEFAQLSPRLGGFLEEAWQPSFRLARLSSWRVHAGLVSHSAVRPHQGALVERIIPHPLYSAQNHDYDVALLRLQTALNFSDTVGAVCLPAKEQHFPKGSRCWVSGWGHTHPSHTYSSDMLQDTVVPLFSTQLCNSSCVYSGALTPRMLCAGYLDGRADACQGDSGGPLVCPDGDTWRLVGVVSWGRGCAEPNHPGVYAKVAEFLDWIHDTAQDSLL

SEQ ID NO: 13913 - protein, 68 aa, Artificial Sequence
  Synthetic polypeptide
IGTVLVCSSQHDQRRRWVISAFPTESLMLDDQPPMEAQYAEEGPGPGIFRAEPGDQQHPSRPDWAIGE

SEQ ID NO: 13914 - protein, 745 aa, Artificial Sequence
  Synthetic polypeptide
GCHGSCLQSQHFGRPRWADRLSPGVQDQPGQHGRTPSLSKNTKIRQVRRDLHVSTGEFTDLKQQLERDSVVLSLLKQLQEFSTAIEEYNCALTEKKYVTGAQRLEEAQKCLKLLKSRKCFDLKILKSLSMELTIQKQNILYHLGEEWQKLIVWKFPPSKDTSSLESYLQTELHLYTEQSHKEEKTPMPPISSVLLAFSVLGELHSKLKSFGQMLLKYILRPLASCPSLHAVIESQPNIVIIRFESIMTNLEYPSPSEVFTKIRLVLEVLQKQLLDLPLDTDLENEKTSTVPLAEMLGDMIWEDLSECLIKNCLVYSIPTNSSKLQQYEEIIQSTEEFENALKEMRFLKGDTTDLLKYARNINSHFANKKCQDVIVAARNLMTSEIHNTVKIIPDSKINVPELPTPDEDNKLEVQKVSNTQYHEVMNLEPENTLDQHSFSLPTCRISESVKKLMELAYQTLLEATTSSDQCAVQLFYSVRNIFHLFHDVVPTYHKENLQKLPQLAAIHHNNCMYIAHHLLTLGHQFRLRLAPILCDGTATFVDLVPGFRRLGTECFLAQMRAQKGELLERLSSARNFSNMDDEENYSAASKAVRQVLHQLKRLGIVWQDVLPVNIYCKAMGTLLNTAISEVIGKITALEDISTEDGDRLYSLCKTVMDEGPQVFAPLSEESKNKKYQEEVPVYVPKWMPFKELMMMLQASLQEIGDRWADGKGPLAAAFSSSEVKALIRALFQNTERRAAALAKIK

SEQ ID NO: 13915 - protein, 39 aa, Artificial Sequence
  Synthetic polypeptide
VQEFKTSLDNMAELHLYQKIQKLDRSAGIFTYQPVNLQT

SEQ ID NO: 13916 - protein, 11 aa, Artificial Sequence
  Synthetic polypeptide
TGPPGSSRINR

SEQ ID NO: 13917 - protein, 638 aa, Artificial Sequence
  Synthetic polypeptide
GCHGSCLQSQHFGRPRWADRLSPGVQDQPGQHGRTPSLSKNTKIRQVRRDLHVSTGEFTDLKQQLERDSVVLSLLKQLQEFSTAIEEYNCALTEKKYVTGAQRLEEAQKCLKLLKSRKCFDLKILKSLSMELTIQKQNILYHLGEEWQKLIVWKFPPSKDTSSLESYLQTELHLYTEQSHKEEKTPMPPISSVLLAFSVLGELHSKLKSFGQMLLKYILRPLASCPSLHAVIESQPNIVIIRFESIMTNLEYPSPSEVFTKIRLVLEVLQKQLLDLPLDTDLENEKTSTVPLAEMLGDMIWEDLSECLIKNCLVYSIPTNSSKLQQYEEIIQSTEEFENALKEMRFLKGDTTDLLKYARNINSHFANKKCQDVIVAARNLMTSEIHNTVKIIPDSKINVPELPTPDEDNKLEVQKVSNTQYHEVMNLEPENTLDQHSFSLPTCRISESVKKLMELAYQTLLEATTSSDQCAVQLFYSVRNIFHLFHDVVPTYHKENLQKLPQLAAIHHNNCMYIAHHLLTLGHQFRLRLAPILCDGTATFVDLVPGFRRLGTECFLAQMRAQKGELLERLSSARNFSNMDDEENYSAASKAVRQVLHQLKRLGIVWQDVLPVNIYCKAMGTLLNTAISEVIGKITALE

SEQ ID NO: 13918 - protein, 766 aa, Artificial Sequence
  Synthetic polypeptide
SQLLWRLRQKNRLNPGSGNCSEGEVCNMISKKYSEFLPSMQSAQGLITQVDKLSEDIDLLKSRIESEVRRDLHVSTGEFTDLKQQLERDSVVLSLLKQLQEFSTAIEEYNCALTEKKYVTGAQRLEEAQKCLKLLKSRKCFDLKILKSLSMELTIQKQNILYHLGEEWQKLIVWKFPPSKDTSSLESYLQTELHLYTEQSHKEEKTPMPPISSVLLAFSVLGELHSKLKSFGQMLLKYILRPLASCPSLHAVIESQPNIVIIRFESIMTNLEYPSPSEVFTKIRLVLEVLQKQLLDLPLDTDLENEKTSTVPLAEMLGDMIWEDLSECLIKNCLVYSIPTNSSKLQQYEEIIQSTEEFENALKEMRFLKGDTTDLLKYARNINSHFANKKCQDVIVAARNLMTSEIHNTVKIIPDSKINVPELPTPDEDNKLEVQKVSNTQYHEVMNLEPENTLDQHSFSLPTCRISESVKKLMELAYQTLLEATTSSDQCAVQLFYSVRNIFHLFHDVVPTYHKENLQKLPQLAAIHHNNCMYIAHHLLTLGHQFRLRLAPILCDGTATFVDLVPGFRRLGTECFLAQMRAQKGELLERLSSARNFSNMDDEENYSAASKAVRQVLHQLKRLGIVWQDVLPVNIYCKAMGTLLNTAISEVIGKITALEDISTEDGDRLYSLCKTVMDEGPQVFAPLSEESKNKKYQEEVPVYVPKWMPFKELMMMLQASLQEIGDRWADGKGPLAAAFSSSEVKALIRALFQNTERRAAALAKIK

SEQ ID NO: 13919 - protein, 14 aa, Artificial Sequence
  Synthetic polypeptide
TREVEIAVRVRCAI

SEQ ID NO: 13920 - protein, 659 aa, Artificial Sequence
  Synthetic polypeptide
SQLLWRLRQKNRLNPGSGNCSEGEVCNMISKKYSEFLPSMQSAQGLITQVDKLSEDIDLLKSRIESEVRRDLHVSTGEFTDLKQQLERDSVVLSLLKQLQEFSTAIEEYNCALTEKKYVTGAQRLEEAQKCLKLLKSRKCFDLKILKSLSMELTIQKQNILYHLGEEWQKLIVWKFPPSKDTSSLESYLQTELHLYTEQSHKEEKTPMPPISSVLLAFSVLGELHSKLKSFGQMLLKYILRPLASCPSLHAVIESQPNIVIIRFESIMTNLEYPSPSEVFTKIRLVLEVLQKQLLDLPLDTDLENEKTSTVPLAEMLGDMIWEDLSECLIKNCLVYSIPTNSSKLQQYEEIIQSTEEFENALKEMRFLKGDTTDLLKYARNINSHFANKKCQDVIVAARNLMTSEIHNTVKIIPDSKINVPELPTPDEDNKLEVQKVSNTQYHEVMNLEPENTLDQHSFSLPTCRISESVKKLMELAYQTLLEATTSSDQCAVQLFYSVRNIFHLFHDVVPTYHKENLQKLPQLAAIHHNNCMYIAHHLLTLGHQFRLRLAPILCDGTATFVDLVPGFRRLGTECFLAQMRAQKGELLERLSSARNFSNMDDEENYSAASKAVRQVLHQLKRLGIVWQDVLPVNIYCKAMGTLLNTAISEVIGKITALE

SEQ ID NO: 13921 - protein, 122 aa, Artificial Sequence
  Synthetic polypeptide
SQLLWRLRQKNRLNPGSGNCSEGEVCNMISKKYSEFLPSMQSAQGLITQVDKLSEDIDLLKSRIESEIPAVWNLTYKLNFIYTLNNRTKRRRPLCHPSVLSSWHFLFLENYTASLNHLVRCC

SEQ ID NO: 13922 - protein, 13 aa, Artificial Sequence
  Synthetic polypeptide
SQHFGRPRVRCAI

SEQ ID NO: 13923 - protein, 17 aa, Artificial Sequence
  Synthetic polypeptide
PGAVAHACNPSTLGGQG

SEQ ID NO: 13924 - protein, 760 aa, Artificial Sequence
  Synthetic polypeptide
QVRWLTPVIPALWEAKGEVCNMISKKYSEFLPSMQSAQGLITQVDKLSEDIDLLKSRIESEVRRDLHVSTGEFTDLKQQLERDSVVLSLLKQLQEFSTAIEEYNCALTEKKYVTGAQRLEEAQKCLKLLKSRKCFDLKILKSLSMELTIQKQNILYHLGEEWQKLIVWKFPPSKDTSSLESYLQTELHLYTEQSHKEEKTPMPPISSVLLAFSVLGELHSKLKSFGQMLLKYILRPLASCPSLHAVIESQPNIVIIRFESIMTNLEYPSPSEVFTKIRLVLEVLQKQLLDLPLDTDLENEKTSTVPLAEMLGDMIWEDLSECLIKNCLVYSIPTNSSKLQQYEEIIQSTEEFENALKEMRFLKGDTTDLLKYARNINSHFANKKCQDVIVAARNLMTSEIHNTVKIIPDSKINVPELPTPDEDNKLEVQKVSNTQYHEVMNLEPENTLDQHSFSLPTCRISESVKKLMELAYQTLLEATTSSDQCAVQLFYSVRNIFHLFHDVVPTYHKENLQKLPQLAAIHHNNCMYIAHHLLTLGHQFRLRLAPILCDGTATFVDLVPGFRRLGTECFLAQMRAQKGELLERLSSARNFSNMDDEENYSAASKAVRQVLHQLKRLGIVWQDVLPVNIYCKAMGTLLNTAISEVIGKITALEDISTEDGDRLYSLCKTVMDEGPQVFAPLSEESKNKKYQEEVPVYVPKWMPFKELMMMLQASLQEIGDRWADGKGPLAAAFSSSEVKALIRALFQNTERRAAALAKIK

SEQ ID NO: 13925 - protein, 653 aa, Artificial Sequence
  Synthetic polypeptide
QVRWLTPVIPALWEAKGEVCNMISKKYSEFLPSMQSAQGLITQVDKLSEDIDLLKSRIESEVRRDLHVSTGEFTDLKQQLERDSVVLSLLKQLQEFSTAIEEYNCALTEKKYVTGAQRLEEAQKCLKLLKSRKCFDLKILKSLSMELTIQKQNILYHLGEEWQKLIVWKFPPSKDTSSLESYLQTELHLYTEQSHKEEKTPMPPISSVLLAFSVLGELHSKLKSFGQMLLKYILRPLASCPSLHAVIESQPNIVIIRFESIMTNLEYPSPSEVFTKIRLVLEVLQKQLLDLPLDTDLENEKTSTVPLAEMLGDMIWEDLSECLIKNCLVYSIPTNSSKLQQYEEIIQSTEEFENALKEMRFLKGDTTDLLKYARNINSHFANKKCQDVIVAARNLMTSEIHNTVKIIPDSKINVPELPTPDEDNKLEVQKVSNTQYHEVMNLEPENTLDQHSFSLPTCRISESVKKLMELAYQTLLEATTSSDQCAVQLFYSVRNIFHLFHDVVPTYHKENLQKLPQLAAIHHNNCMYIAHHLLTLGHQFRLRLAPILCDGTATFVDLVPGFRRLGTECFLAQMRAQKGELLERLSSARNFSNMDDEENYSAASKAVRQVLHQLKRLGIVWQDVLPVNIYCKAMGTLLNTAISEVIGKITALE

SEQ ID NO: 13926 - protein, 116 aa, Artificial Sequence
  Synthetic polypeptide
QVRWLTPVIPALWEAKGEVCNMISKKYSEFLPSMQSAQGLITQVDKLSEDIDLLKSRIESEIPAVWNLTYKLNFIYTLNNRTKRRRPLCHPSVLSSWHFLFLENYTASLNHLVRCC

SEQ ID NO: 13927 - protein, 14 aa, Artificial Sequence
  Synthetic polypeptide
GLPSHVELSYRPYS

SEQ ID NO: 13928 - protein, 63 aa, Artificial Sequence
  Synthetic polypeptide
LNHEGRSSRAIFVIVNKSHEIQRVYQRFPLLLLPHFLLLLPCKKSLSPPAMILRPPQPCGTKL

SEQ ID NO: 13929 - protein, 40 aa, Artificial Sequence
  Synthetic polypeptide
GLPSHVELPVMVTLLRQSAFSLMRELRSPVKTLLLQNHLK

SEQ ID NO: 13930 - protein, 20 aa, Artificial Sequence
  Synthetic polypeptide
EEPFTSRHDSEASPAMWNCQ

SEQ ID NO: 13931 - protein, 1093 aa, Artificial Sequence
  Synthetic polypeptide
LNHEGRSSRAIFVIVNKSHEIQRVYQRFPLLLLPHFLLLLPCKKSLSPPAMILRPPQPCGTASNGDITQAVSLLTDERVKEPSQDTVATEPSEVEGSAANKEVLAKVIDLTHDNKDDLQAAIALSLLESPKIQADGRDLNRMHEATSAETKRSKRKRCEVWGENPNPNDWRRVDGWPVGLKNVGNTCWFSAVIQSLFQLPEFRRLVLSYSLPQNVLENCRSHTEKRNIMFMQELQYLFALMMGSNRKFVDPSAALDLLKGAFRSSEEQQQDVSEFTHKLLDWLEDAFQLAVNVNSPRNKSENPMVQLFYGTFLTEGVREGKPFCNNETFGQYPLQVNGYRNLDECLEGAMVEGDVELLPSDHSVKYGQERWFTKLPPVLTFELSRFEFNQSLGQPEKIHNKLEFPQIIYMDRYMYRSKELIRNKRECIRKLKEEIKILQQKLERYVKYGSGPARFPLPDMLKYVIEFASTKPASESCPPESDTHMTLPLSSVHCSVSDQTSKESTSTESSSQDVESTFSSPEDSLPKSKPLTSSRSSMEMPSQPAPRTVTDEEINFVKTCLQRWRSEIEQDIQDLKTCIASTTQTIEQMYCDPLLRQVPYRLHAVLVHEGQANAGHYWAYIYNQPRQSWLKYNDISVTESSWEEVERDSYGGLRNVSAYCLMYINDKLPYFNAEAAPTESDQMSEVEALSVELKHYIQEDNWRFEQEVEEWEEEQSCKIPQMESSTNSSSQDYSTSQEPSVASSHGVRCLSSEHAVIVKEQTAQAIANTARAYEKSGVEAALSEVMLSPAMQGVILAIAKARQTFDRDGSEAGLIKAFHEEYSRLYQLAKETPTSHSDPRLQHVLVYFFQNEAPKRVVERTLLEQFADKNLSYDERSISIMKVAQAKLKEIGPDDMNMEEYKKWHEDYSLFRKVSVYLLTGLELYQKGKYQEALSYLVYAYQSNAALLMKGPRRGVKESVIALYRRKCLLELNAKAASLFETNDDHSVTEGINVMNELIIPCIHLIINNDISKDDLDAIEVMRNHWCSYLGQDIAENLQLCLGEFLPRLLDPSAEIIVLKEPPTIRPNSPYDLCSRFAAVMESIQGVSTVTVK

SEQ ID NO: 13932 - protein, 1061 aa, Artificial Sequence
  Synthetic polypeptide
LNHEGRSSRAIFVIVNKSHEIQRVYQRFPLLLLPHFLLLLPCKKSLSPPAMILRPPQPCGTASNGDITQAVSLLTDERVKEPSQDTVATEPSEVEGSAANKEVLAKVIDLTHDNKDDLQAAIALSLLESPKIQADGRDLNRMHEATSAETKRSKRKRCEVWGENPNPNDWRRVDGWPVGLKNVGNTCWFSAVIQSLFQLPEFRRLVLSYSLPQNVLENCRSHTEKRNIMFMQELQYLFALMMGSNRKFVDPSAALDLLKGAFRSSEEQQQDVSEFTHKLLDWLEDAFQLAVNVNSPRNKSENPMVQLFYGTFLTEGVREGKPFCNNETFGQYPLQVNGYRNLDECLEGAMVEGDVELLPSDHSVKYGQERWFTKLPPVLTFELSRFEFNQSLGQPEKIHNKLEFPQIIYMDRYMYRSKELIRNKRECIRKLKEEIKILQQKLERYVKYGSGPARFPLPDMLKYVIEFASTKPASESCPPESDTHMTLPLSSVHCSVSDQTSKESTSTESSSQDVESTFSSPEDSLPKSKPLTSSRSSMEMPSQPAPRTVTDEEINFVKTCLQRWRSEIEQDIQDLKTCIASTTQTIEQMYCDPLLRQVPYRLHAVLVHEGQANAGHYWAYIYNQPRQSWLKYNDISVTESSWEEVERDSYGGLRNVSAYCLMYINDKLPYFNAEAAPTESDQMSEVEALSVELKHYIQEDNWRFEQEVEEWEEEQSCKIPQMESSTNSSSQDYSTSQEPSVASSHGVRCLSSEHAVIVKEQTAQAIANTARAYEKSGVEAALSEAFHEEYSRLYQLAKETPTSHSDPRLQHVLVYFFQNEAPKRVVERTLLEQFADKNLSYDERSISIMKVAQAKLKEIGPDDMNMEEYKKWHEDYSLFRKVSVYLLTGLELYQKGKYQEALSYLVYAYQSNAALLMKGPRRGVKESVIALYRRKCLLELNAKAASLFETNDDHSVTEGINVMNELIIPCIHLIINNDISKDDLDAIEVMRNHWCSYLGQDIAENLQLCLGEFLPRLLDPSAEIIVLKEPPTIRPNSPYDLCSRFAAVMESIQGVSTVTVK

SEQ ID NO: 13933 - protein, 210 aa, Artificial Sequence
  Synthetic polypeptide
LNHEGRSSRAIFVIVNKSHEIQRVYQRFPLLLLPHFLLLLPCKKSLSPPAMILRPPQPCGTASNGDITQAVSLLTDERVKEPSQDTVATEPSEVEGSAANKEVLAKVIDLTHDNKDDLQAAIALSLLESPKIQADGRDLNRMHEATSAETKRSKRKRCEVWGENPNPNDWRRVDGWPVGLKNVGNTCWFSAVIQDASSGVPPCRPERVFI

SEQ ID NO: 13934 - protein, 599 aa, Artificial Sequence
  Synthetic polypeptide
LNHEGRSSRAIFVIVNKSHEIQRVYQRFPLLLLPHFLLLLPCKKSLSPPAMILRPPQPCGTASNGDITQAVSLLTDERVKEPSQDTVATEPSEVEGSAANKEVLAKVIDLTHDNKDDLQAAIALSLLESPKIQADGRDLNRMHEATSAETKRSKRKRCEVWGENPNPNDWRRVDGWPVGLKNVGNTCWFSAVIQSLFQLPEFRRLVLSYSLPQNVLENCRSHTEKRNIMFMQELQYLFALMMGSNRKFVDPSAALDLLKGAFRSSEEQQQDVSEFTHKLLDWLEDAFQLAVNVNSPRNKSENPMVQLFYGTFLTEGVREGKPFCNNETFGQYPLQVNGYRNLDECLEGAMVEGDVELLPSDHSVKYGQERWFTKLPPVLTFELSRFEFNQSLGQPEKIHNKLEFPQIIYMDRYMYRSKELIRNKRECIRKLKEEIKILQQKLERYVKYGSGPARFPLPDMLKYVIEFASTKPASESCPPESDTHMTLPLSSVHCSVSDQTSKESTSTESSSQDVESTFSSPEDSLPKSKPLTSSRSSMEMPSQPAPRTVTDEEINFVKTCLQRWRSEIEQDIQDLKTCIASTTQTIEQMYCDPLLRQVE

SEQ ID NO: 13935 - protein, 96 aa, Artificial Sequence
  Synthetic polypeptide
LNHEGRSSRAIFVIVNKSHEIQRVYQRFPLLLLPHFLLLLPCKKSLSPPAMILRPPQPCGTASNGDITQAVSLLTDERVKEPSQDTVATEPSEVEG

SEQ ID NO: 13936 - protein, 11 aa, Artificial Sequence
  Synthetic polypeptide
GLPSHVELPVM

SEQ ID NO: 13937 - protein, 65 aa, Artificial Sequence
  Synthetic polypeptide
LNHEGRSSRAIFVIVNKSHEIQRVYQRFPLLLLPHFLLLLPCKKSLSPPAMILRPPQPCGTASNG

SEQ ID NO: 13938 - protein, 13 aa, Artificial Sequence
  Synthetic polypeptide
GLPSHVELAAKCC

SEQ ID NO: 13939 - protein, 1119 aa, Artificial Sequence
  Synthetic polypeptide
LNHEGRSSRAIFVIVNKSHEIQRVYQRFPLLLLPHFLLLLPCKKSLSPPAMILRPPQPCGTSCQMLLNQLREITGIQDPSFLHEALKASNGDITQAVSLLTDERVKEPSQDTVATEPSEVEGSAANKEVLAKVIDLTHDNKDDLQAAIALSLLESPKIQADGRDLNRMHEATSAETKRSKRKRCEVWGENPNPNDWRRVDGWPVGLKNVGNTCWFSAVIQSLFQLPEFRRLVLSYSLPQNVLENCRSHTEKRNIMFMQELQYLFALMMGSNRKFVDPSAALDLLKGAFRSSEEQQQDVSEFTHKLLDWLEDAFQLAVNVNSPRNKSENPMVQLFYGTFLTEGVREGKPFCNNETFGQYPLQVNGYRNLDECLEGAMVEGDVELLPSDHSVKYGQERWFTKLPPVLTFELSRFEFNQSLGQPEKIHNKLEFPQIIYMDRYMYRSKELIRNKRECIRKLKEEIKILQQKLERYVKYGSGPARFPLPDMLKYVIEFASTKPASESCPPESDTHMTLPLSSVHCSVSDQTSKESTSTESSSQDVESTFSSPEDSLPKSKPLTSSRSSMEMPSQPAPRTVTDEEINFVKTCLQRWRSEIEQDIQDLKTCIASTTQTIEQMYCDPLLRQVPYRLHAVLVHEGQANAGHYWAYIYNQPRQSWLKYNDISVTESSWEEVERDSYGGLRNVSAYCLMYINDKLPYFNAEAAPTESDQMSEVEALSVELKHYIQEDNWRFEQEVEEWEEEQSCKIPQMESSTNSSSQDYSTSQEPSVASSHGVRCLSSEHAVIVKEQTAQAIANTARAYEKSGVEAALSEVMLSPAMQGVILAIAKARQTFDRDGSEAGLIKAFHEEYSRLYQLAKETPTSHSDPRLQHVLVYFFQNEAPKRVVERTLLEQFADKNLSYDERSISIMKVAQAKLKEIGPDDMNMEEYKKWHEDYSLFRKVSVYLLTGLELYQKGKYQEALSYLVYAYQSNAALLMKGPRRGVKESVIALYRRKCLLELNAKAASLFETNDDHSVTEGINVMNELIIPCIHLIINNDISKDDLDAIEVMRNHWCSYLGQDIAENLQLCLGEFLPRLLDPSAEIIVLKEPPTIRPNSPYDLCSRFAAVMESIQGVSTVTVK

SEQ ID NO: 13940 - protein, 1087 aa, Artificial Sequence
  Synthetic polypeptide
LNHEGRSSRAIFVIVNKSHEIQRVYQRFPLLLLPHFLLLLPCKKSLSPPAMILRPPQPCGTSCQMLLNQLREITGIQDPSFLHEALKASNGDITQAVSLLTDERVKEPSQDTVATEPSEVEGSAANKEVLAKVIDLTHDNKDDLQAAIALSLLESPKIQADGRDLNRMHEATSAETKRSKRKRCEVWGENPNPNDWRRVDGWPVGLKNVGNTCWFSAVIQSLFQLPEFRRLVLSYSLPQNVLENCRSHTEKRNIMFMQELQYLFALMMGSNRKFVDPSAALDLLKGAFRSSEEQQQDVSEFTHKLLDWLEDAFQLAVNVNSPRNKSENPMVQLFYGTFLTEGVREGKPFCNNETFGQYPLQVNGYRNLDECLEGAMVEGDVELLPSDHSVKYGQERWFTKLPPVLTFELSRFEFNQSLGQPEKIHNKLEFPQIIYMDRYMYRSKELIRNKRECIRKLKEEIKILQQKLERYVKYGSGPARFPLPDMLKYVIEFASTKPASESCPPESDTHMTLPLSSVHCSVSDQTSKESTSTESSSQDVESTFSSPEDSLPKSKPLTSSRSSMEMPSQPAPRTVTDEEINFVKTCLQRWRSEIEQDIQDLKTCIASTTQTIEQMYCDPLLRQVPYRLHAVLVHEGQANAGHYWAYIYNQPRQSWLKYNDISVTESSWEEVERDSYGGLRNVSAYCLMYINDKLPYFNAEAAPTESDQMSEVEALSVELKHYIQEDNWRFEQEVEEWEEEQSCKIPQMESSTNSSSQDYSTSQEPSVASSHGVRCLSSEHAVIVKEQTAQAIANTARAYEKSGVEAALSEAFHEEYSRLYQLAKETPTSHSDPRLQHVLVYFFQNEAPKRVVERTLLEQFADKNLSYDERSISIMKVAQAKLKEIGPDDMNMEEYKKWHEDYSLFRKVSVYLLTGLELYQKGKYQEALSYLVYAYQSNAALLMKGPRRGVKESVIALYRRKCLLELNAKAASLFETNDDHSVTEGINVMNELIIPCIHLIINNDISKDDLDAIEVMRNHWCSYLGQDIAENLQLCLGEFLPRLLDPSAEIIVLKEPPTIRPNSPYDLCSRFAAVMESIQGVSTVTVK

SEQ ID NO: 13941 - protein, 236 aa, Artificial Sequence
  Synthetic polypeptide
LNHEGRSSRAIFVIVNKSHEIQRVYQRFPLLLLPHFLLLLPCKKSLSPPAMILRPPQPCGTSCQMLLNQLREITGIQDPSFLHEALKASNGDITQAVSLLTDERVKEPSQDTVATEPSEVEGSAANKEVLAKVIDLTHDNKDDLQAAIALSLLESPKIQADGRDLNRMHEATSAETKRSKRKRCEVWGENPNPNDWRRVDGWPVGLKNVGNTCWFSAVIQDASSGVPPCRPERVFI

SEQ ID NO: 13942 - protein, 625 aa, Artificial Sequence
  Synthetic polypeptide
LNHEGRSSRAIFVIVNKSHEIQRVYQRFPLLLLPHFLLLLPCKKSLSPPAMILRPPQPCGTSCQMLLNQLREITGIQDPSFLHEALKASNGDITQAVSLLTDERVKEPSQDTVATEPSEVEGSAANKEVLAKVIDLTHDNKDDLQAAIALSLLESPKIQADGRDLNRMHEATSAETKRSKRKRCEVWGENPNPNDWRRVDGWPVGLKNVGNTCWFSAVIQSLFQLPEFRRLVLSYSLPQNVLENCRSHTEKRNIMFMQELQYLFALMMGSNRKFVDPSAALDLLKGAFRSSEEQQQDVSEFTHKLLDWLEDAFQLAVNVNSPRNKSENPMVQLFYGTFLTEGVREGKPFCNNETFGQYPLQVNGYRNLDECLEGAMVEGDVELLPSDHSVKYGQERWFTKLPPVLTFELSRFEFNQSLGQPEKIHNKLEFPQIIYMDRYMYRSKELIRNKRECIRKLKEEIKILQQKLERYVKYGSGPARFPLPDMLKYVIEFASTKPASESCPPESDTHMTLPLSSVHCSVSDQTSKESTSTESSSQDVESTFSSPEDSLPKSKPLTSSRSSMEMPSQPAPRTVTDEEINFVKTCLQRWRSEIEQDIQDLKTCIASTTQTIEQMYCDPLLRQVE

SEQ ID NO: 13943 - protein, 122 aa, Artificial Sequence
  Synthetic polypeptide
LNHEGRSSRAIFVIVNKSHEIQRVYQRFPLLLLPHFLLLLPCKKSLSPPAMILRPPQPCGTSCQMLLNQLREITGIQDPSFLHEALKASNGDITQAVSLLTDERVKEPSQDTVATEPSEVEG

SEQ ID NO: 13944 - protein, 91 aa, Artificial Sequence
  Synthetic polypeptide
LNHEGRSSRAIFVIVNKSHEIQRVYQRFPLLLLPHFLLLLPCKKSLSPPAMILRPPQPCGTSCQMLLNQLREITGIQDPSFLHEALKASNG

SEQ ID NO: 13945 - protein, 95 aa, Artificial Sequence
  Synthetic polypeptide
GCRELCSHHCIPPGDRPWETTAATWEDPRTSRRARGTDVALPHHLGRPRWRCVGCCRSCPPSGNSWKSGMRSERWPETGCAWAPCWTSCYSTFTC

SEQ ID NO: 13946 - protein, 43 aa, Artificial Sequence
  Synthetic polypeptide
AQEVEAAGSCVRITASHLEIDHGKPLQPHGRTPGLREEPEGQM

SEQ ID NO: 13947 - protein, 48 aa, Artificial Sequence
  Synthetic polypeptide
VLMRSDGFISVWHFPCWLSFSLLPPCEEVPSTMIVSFLRPPQPCRTVP

SEQ ID NO: 13948 - protein, 472 aa, Artificial Sequence
  Synthetic polypeptide
GLPSHAELCRNLSFPDSLPEVSIVFIFVNEALSVLLRSIHSAMERTPPHLLKEIILVDDNSSNEELKEKLTEYVDKVNSQKPGFIKVVRHSKQEGLIRSRVSGWRAATAPVVALFDAHVEFNVGWAEPVLTRIKENRKRIISPSFDNIKYDNFEIEEYPLAAQGFDWELWCRYLNPPKAWWKLENSTAPIRSPALIGCFIVDRQYFQEIGLLDEGMEVYGGENVELGIRVWQCGGSVEVLPCSRIAHIERAHKPYTEDLTAHVRRNALRVAEVWMDEFKSHVYMAWNIPQEDSGIDIGDITARKALRKQLQCKTFRWYLVSVYPEMRMYSDIIAYGVLQNSLKTDLCLDQGPDTENVPIMYICHGMTPQNVYYTSSQQIHVGILSPTVDDDDNRCLVDVNSRPRLIECSYAKAKRMKLHWQFSQGGPIQNRKSKRCLELQENSDLEFGFQLVLQKCSGQHWSITNVLRSLAS

SEQ ID NO: 13949 - protein, 32 aa, Artificial Sequence
  Synthetic polypeptide
GGAFHHDCKFPEASPAMQNCAVTSHFLTACQR

SEQ ID NO: 13950 - protein, 36 aa, Artificial Sequence
  Synthetic polypeptide
VLMRSDGFISVWHFPCWLSFSLLPPCEEVPSTMIVP

SEQ ID NO: 13951 - protein, 20 aa, Artificial Sequence
  Synthetic polypeptide
GGAFHHDCAVTSHFLTACQR

SEQ ID NO: 13952 - protein, 16 aa, Artificial Sequence
  Synthetic polypeptide
DWIGFMLPKAKNADCG

SEQ ID NO: 13953 - protein, 452 aa, Artificial Sequence
  Synthetic polypeptide
MKAEIGLDLCCQKPRMRIVDDDVSWTAISTTKLEKEEEEDDGDLPVVAEFVDERPEEVKQMEAFRSSAKWKLLGGHNEDLPSNRHFRHDTPDSSPRRVRHGTPDPSPRKDRHDTPDPSPRRARHDTPDPSPLRGARHDSDTSPPRRIRHDSSDTSPPRRARHDSPDPSPPRRPQHNSSGDCQKATDSDLSSPRHKQSPGHQDSDSDLSPPRNRPRHRSSDSDLSPPRRRQRTKSSDSDLSPPRRSQPPGKKAAHMYSGAKTGLVLTDIQREQQELKEQDQETMAFEAEFQYAETVFRDKSGRKRNLKLERLEQRRKAEKDSERDELYAQWGKGLAQSRQQQQNVEDAMKEMQKPLARYIDDEDLDRMLREQEREGDPMANFIKKNKAKENKNKKVRPRYSGPAPPPNRFNIWPGYRWDGVDRSNGFEQKRFARLASKKAVEELAYKWSVEDM

SEQ ID NO: 13954 - protein, 21 aa, Artificial Sequence
  Synthetic polypeptide
RLRLDWIYVAKSQECGLWMMM

SEQ ID NO: 13955 - protein, 586 aa, Artificial Sequence
  Synthetic polypeptide
MKAEIGLDLCCQKPRMRIVDDDVSWTAISTTKLEKEEEEDDGDLPVVAEFVDERPEEVKQMEAFRSSAKWKLLGGHNEDLPSNRHFRHDTPDSSPRRVRHGTPDPSPRKDRHDTPDPSPRRARHDTPDPSPLRGARHDSDTSPPRRIRHDSSDTSPPRRARHDSPDPSPPRRPQHNSSGASPRRVRHDSPDPSPPRRARHGSSDISSPRRVHNNSPDTSRRTLGSSDTQQLRRARHDSPDLAPNVTYSLPRTKSGKAPERASSKTSPHWKESGASHLSFPKNSKYEYDPDISPPRKKQAKSHFGDKKQLDSKGDCQKATDSDLSSPRHKQSPGHQDSDSDLSPPRNRPRHRSSDSDLSPPRRRQRTKSSDSDLSPPRRSQPPGKKAAHMYSGAKTGLVLTDIQREQQELKEQDQETMAFEAEFQYAETVFRDKSGRKRNLKLERLEQRRKAEKDSERDELYAQWGKGLAQSRQQQQNVEDAMKEMQKPLARYIDDEDLDRMLREQEREGDPMANFIKKNKAKENKNKKVRPRYSGPAPPPNRFNIWPGYRWDGVDRSNGFEQKRFARLASKKAVEELAYKWSVEDM

SEQ ID NO: 13956 - protein, 46 aa, Artificial Sequence
  Synthetic polypeptide
EEIHETGQMTTWWPMVEWQKRRHVGSSNRSSQLSIFVTVGTLFIVI

SEQ ID NO: 13957 - protein, 1222 aa, Artificial Sequence
  Synthetic polypeptide
NRPNDHLVAHGRMAEKEARRKFKQIVTAVYFCHCRNIVHRDLKAENLLLDANLNIKIADFGFSNLFTPGQLLKTWCGSPPYAAPELFEGKEYDGPKVDIWSLGVVLYVLVCGALPFDGSTLQNLRARVLSGKFRIPFFMSTECEHLIRHMLVLDPNKRLSMEQICKHKWMKLGDADPNFDRLIAECQQLKEERQVDPLNEDVLLAMEDMGLDKEQTLQSLRSDAYDHYSAIYSLLCDRHKRHKTLRLGALPSMPRALAFQAPVNIQAEQAGTAMNISVPQVQLINPENQIVEPDGTLNLDSDEGEEPSPEALVRYLSMRRHTVGVADPRTEVMEDLQKLLPGFPGVNPQAPFLQVAPNVNFMHNLLPMQNLQPTGQLEYKEQSLLQPPTLQLLNGMGPLGRRASDGGANIQLHAQQLLKRPRGPSPLVTMTPAVPAVTPVDEESSDGEPDQEAVQRYLANRSKRHTLAMTNPTAEIPPDLQRQLGQQPFRSRVWPPHLVPDQHRSTYKDSNTLHLPTERFSPVRRFSDGAASIQAFKAHLEKMGNNSSIKQLQQECEQLQKMYGGQIDERTLEKTQQQHMLYQQEQHHQILQQQIQDSICPPQPSPPLQAACENQPALLTHQLQRLRIQPSSPPPNHPNNHLFRQPSNSPPPMSSAMIQPHGAASSSQFQGLPSRSAIFQQQPENCSSPPNVALTCLGMQQPAQSQQVTIQVQEPVDMLSNMPGTAAGSSGRGISISPSAGQMQMQHRTNLMATLSYGHRPLSKQLSADSAEAHSLNVNRFSPANYDQAHLHPHLFSDQSRGSPSSYSPSTGVGFSPTQALKVPPLDQFPTFPPSAHQQPPHYTTSALQQALLSPTPPDYTRHQQVPHILQGLLSPRHSLTGHSDIRLPPTEFAQLIKRQQQQRQQQQQQQQQQEYQELFRHMNQGDAGSLAPSLGGQSMTERQALSYQNADSYHHHTSPQHLLQIRAQECVSQASSPTPPHGYAHQPALMHSESMEEDCSCEGAKDGFQDSKSSSTLTKGCHDSPLLLSTGGPGDPESLLGTVSHAQELGIHPYGHQPTAAFSKNKVPSREPVIGNCMDRSSPGQAVELPDHNGLGYPARPSVHEHHRPRALQRHHTIQNSDDAYVQLDNLPGMSLVAGKALSSARMSDAVLSQSSLMGSQQFQDGENEECGASLGGHEHPDLSDGSQHLNSSCYPSTCITDILLSYKHPEVSFSMEQAGV

SEQ ID NO: 13958 - protein, 1174 aa, Artificial Sequence
  Synthetic polypeptide
NRPNDHLVAHGRMAEKEARRKFKQIVTAVYFCHCRNIVHRDLKAENLLLDANLNIKIADFGFSNLFTPGQLLKTWCGSPPYAAPELFEGKEYDGPKVDIWSLGVVLYVLVCGALPFDGSTLQNLRARVLSGKFRIPFFMSTECEHLIRHMLVLDPNKRLSMEQICKHKWMKLGDADPNFDRLIAECQQLKEERQVDPLNEDVLLAMEDMGLDKEQTLQSLRSDAYDHYSAIYSLLCDRHKRHKTLRLGALPSMPRALAFQAPVNIQAEQAGTAMNISVPQVQLINPENQIVEPDGTLNLDSDEGEEPSPEALVRYLSMRRHTVGVADPRTEVMEDLQKLLPGFPGVNPQAPFLQVAPNVNFMHNLLPMQNLQPTGQLEYKEQSLLQPPTLQLLNGMGPLGRRASDGGANIQLHAQQLLKRPRGPSPLVTMTPAVPAVTPVDEESSDGEPDQEAVQSSTYKDSNTLHLPTERFSPVRRFSDGAASIQAFKAHLEKMGNNSSIKQLQQECEQLQKMYGGQIDERTLEKTQQQHMLYQQEQHHQILQQQIQDSICPPQPSPPLQAACENQPALLTHQLQRLRIQPSSPPPNHPNNHLFRQPSNSPPPMSSAMIQPHGAASSSQFQGLPSRSAIFQQQPENCSSPPNVALTCLGMQQPAQSQQVTIQVQEPVDMLSNMPGTAAGSSGRGISISPSAGQMQMQHRTNLMATLSYGHRPLSKQLSADSAEAHSLNVNRFSPANYDQAHLHPHLFSDQSRGSPSSYSPSTGVGFSPTQALKVPPLDQFPTFPPSAHQQPPHYTTSALQQALLSPTPPDYTRHQQVPHILQGLLSPRHSLTGHSDIRLPPTEFAQLIKRQQQQRQQQQQQQQQQEYQELFRHMNQGDAGSLAPSLGGQSMTERQALSYQNADSYHHHTSPQHLLQIRAQECVSQASSPTPPHGYAHQPALMHSESMEEDCSCEGAKDGFQDSKSSSTLTKGCHDSPLLLSTGGPGDPESLLGTVSHAQELGIHPYGHQPTAAFSKNKVPSREPVIGNCMDRSSPGQAVELPDHNGLGYPARPSVHEHHRPRALQRHHTIQNSDDAYVQLDNLPGMSLVAGKALSSARMSDAVLSQSSLMGSQQFQDGENEECGASLGGHEHPDLSDGSQHLNSSCYPSTCITDILLSYKHPEVSFSMEQAGV

SEQ ID NO: 13959 - protein, 1114 aa, Artificial Sequence
  Synthetic polypeptide
NRPNDHLVAHGRMAEKEARRKFKQIVTAVYFCHCRNIVHRDLKAENLLLDANLNIKIADFGFSNLFTPGQLLKTWCGSPPYAAPELFEGKEYDGPKVDIWSLGVVLYVLVCGALPFDGSTLQNLRARVLSGKFRIPFFMSTECEHLIRHMLVLDPNKRLSMEQICKHKWMKLGDADPNFDRLIAECQQLKEERQVDPLNEDVLLAMEDMGLDKEQTLQAEQAGTAMNISVPQVQLINPENQIVEPDGTLNLDSDEGEEPSPEALVRYLSMRRHTVGVADPRTEVMEDLQKLLPGFPGVNPQAPFLQVAPNVNFMHNLLPMQNLQPTGQLEYKEQSLLQPPTLQLLNGMGPLGRRASDGGANIQLHAQQLLKRPRGPSPLVTMTPAVPAVTPVDEESSDGEPDQEAVQRYLANRSKRHTLAMTNPTAEIPPDLQRQLGQQPFRSRVWPPHLVPDQHRSTYKDSNTLHLPTERFSPVRRFSDGAASIQAFKAHLEKMGNNSSIKQLQQECEQLQKMYGGQIDERTLEKTQQQHMLYQQEQHHQILQQQIQDSICPPQPSPPLQAACENQPALLTHQLQRLRIQPSSPPPNHPNNHLFRQPSNSPPPMSSAMIQPHGAASSSQFQGLPSRSAIFQQQPENCSSPPNVALTCLGMQQPAQSQQVTIQVQEPVDMLSNMPGTAAGSSGRGISISPSAGQMQMQHRTNLMATLSYGHRPLSKQLSADSAEAHSAHQQPPHYTTSALQQALLSPTPPDYTRHQQVPHILQGLLSPRHSLTGHSDIRLPPTEFAQLIKRQQQQRQQQQQQQQQQEYQELFRHMNQGDAGSLAPSLGGQSMTERQALSYQNADSYHHHTSPQHLLQIRAQECVSQASSPTPPHGYAHQPALMHSESMEEDCSCEGAKDGFQDSKSSSTLTKGCHDSPLLLSTGGPGDPESLLGTVSHAQELGIHPYGHQPTAAFSKNKVPSREPVIGNCMDRSSPGQAVELPDHNGLGYPARPSVHEHHRPRALQRHHTIQNSDDAYVQLDNLPGMSLVAGKALSSARMSDAVLSQSSLMGSQQFQDGENEECGASLGGHEHPDLSDGSQHLNSSCYPSTCITDILLSYKHPEVSFSMEQAGV

SEQ ID NO: 13960 - protein, 16 aa, Artificial Sequence
  Synthetic polypeptide
EEIHETGQMTTWWPMV

SEQ ID NO: 13961 - protein, 11 aa, Artificial Sequence
  Synthetic polypeptide
NRPNDHLVAHG

SEQ ID NO: 13962 - protein, 456 aa, Artificial Sequence
  Synthetic polypeptide
NRPNDHLVAHGRMAEKEARRKFKQIVTAVYFCHCRNIVHRDLKAENLLLDANLNIKIADFGFSNLFTPGQLLKTWCGSPPYAAPELFEGKEYDGPKVDIWSLGVVLYVLVCGALPFDGSTLQNLRARVLSGKFRIPFFMSTECEHLIRHMLVLDPNKRLSMEQICKHKWMKLGDADPNFDRLIAECQQLKEERQVDPLNEDVLLAMEDMGLDKEQTLQSLRSDAYDHYSAIYSLLCDRHKRHKTLRLGALPSMPRALAFQAPVNIQAEQAGTAMNISVPQVQLINPENQIVEPDGTLNLDSDEGEEPSPEALVRYLSMRRHTVGVADPRTEVMEDLQKLLPGFPGVNPQAPFLQVAPNVNFMHNLLPMQNLQPTGQLEYKEQSLLQPPTLQLLNGMGPLGRRASDGGANIQLHAQQLLKRPRGPSPLVTMTPAVPAVTPVDEESSDGEPDQEAVQR

SEQ ID NO: 13963 - protein, 98 aa, Artificial Sequence
  Synthetic polypeptide
AWDIIDLDICPLLSILRQSRVKRKQGDSAVPPFPGGPVECQQDGPGDVRAEDPGACGSDSLHHSPTARQLGAEAVLPQWHDVPHRRPPQHGLGSQRLQ

SEQ ID NO: 13964 - protein, 12 aa, Artificial Sequence
  Synthetic polypeptide
MGYHRSGHLSLT

SEQ ID NO: 13965 - protein, 8 aa, Artificial Sequence
  Synthetic polypeptide
PCLLGMIS

SEQ ID NO: 13966 - protein, 52 aa, Artificial Sequence
  Synthetic polypeptide
TILASAGLVQVICPSLVSVSPCVTRGKLTLPSGDDQLKRRRKWTLFIMITRP

SEQ ID NO: 13967 - protein, 430 aa, Artificial Sequence
  Synthetic polypeptide
CLPLPPDDVKPLRKPRIPMETFRKVGIPIIIALLSLASIIIVVVLIKVILDKYYFLCGQPLHFIPRKQLCDGELDCPLGEDEEHCVKSFPEGPAVAVRLSKDRSTLQVLDSATGNWFSACFDNFTEALAETACRQMGYSSKPTFRAVEIGPDQDLDVVEITENSQELRMRNSSGPCLSGSLVSLHCLACGKSLKTPRVVGVEEASVDSWPWQVSIQYDKQHVCGGSILDPHWVLTAAHCFRKHTDVFNWKVRAGSDKLGSFPSLAVAKIIIIEFNPMYPKDNDIALMKLQFPLTFSGTVRPICLPFFDEELTPATPLWIIGWGFTKQNGGKMSDILLQASVQVIDSTRCNADDAYQGEVTEKMMCAGIPEGGVDTCQGDSGGPLMYQSDQWHVVGIVSWGYGCGGPSTPGVYTKVSAYLNWIYNVWKAEL

SEQ ID NO: 13968 - protein, 30 aa, Artificial Sequence
  Synthetic polypeptide
VCLFPQMMSNPCANPVSPWRPSERWGSPSS

SEQ ID NO: 13969 - protein, 330 aa, Artificial Sequence
  Synthetic polypeptide
CLPLPPDDVKPLRKPRIPMETFRKVGIPIIIALLSLASIIIVVVLIKVILDKYYFLCGQPLHFIPRKQLCDGELDCPLGEDEEHCVKSFPEGPAVAVRLSKDRSTLQVLDSATGNWFSACFDNFTEALAETACRQMGYSSKPTFRAVEIGPDQDLDVVEITENSQELRMRNSSGPCLSGSLVSLHCLACGKSLKTPRVVGVEEASVDSWPWQVSIQYDKQHVCGGSILDPHWVLTAAHCFRKHTDVFNWKVRAGSDKLGSFPSLAVAKIIIIEFNPMYPKDNDIALMKLQFPLTFSGTVRPICLPFFDEELTPATPLWIIGWGFTKQNGG

SEQ ID NO: 13970 - protein, 51 aa, Artificial Sequence
  Synthetic polypeptide
CLPLPPDDVKPLRKPRIPMETFRKVGIPIIIALLSLASIIIVVVLIKVILD

SEQ ID NO: 13971 - protein, 425 aa, Artificial Sequence
  Synthetic polypeptide
CLPLPPDDVKPLRKPRIPMETFRKVGIPIIIALLSLASIIIVVVLIKVILDKYYFLCGQPLHFIPRKQLCDGELDCPLGEDEEHCVKSFPEGPAVAVRLSKDRSTLQVLDSATGNWFSACFDNFTEALAETACRQMGYSRAVEIGPDQDLDVVEITENSQELRMRNSSGPCLSGSLVSLHCLACGKSLKTPRVVGVEEASVDSWPWQVSIQYDKQHVCGGSILDPHWVLTAAHCFRKHTDVFNWKVRAGSDKLGSFPSLAVAKIIIIEFNPMYPKDNDIALMKLQFPLTFSGTVRPICLPFFDEELTPATPLWIIGWGFTKQNGGKMSDILLQASVQVIDSTRCNADDAYQGEVTEKMMCAGIPEGGVDTCQGDSGGPLMYQSDQWHVVGIVSWGYGCGGPSTPGVYTKVSAYLNWIYNVWKAEL

SEQ ID NO: 13972 - protein, 168 aa, Artificial Sequence
  Synthetic polypeptide
CLPLPPDDVKPLRKPRIPMETFRKVGIPIIIALLSLASIIIVVVLIRLSKDRSTLQVLDSATGNWFSACFDNFTEALAETACRQMGYSSKPTFRAVEIGPDQDLDVVEITENSQELRMRNSSGPCLSGSLVSLHCLACGKSLKTPRVVGVEEASVDSWPWQVSIQYDK

SEQ ID NO: 13973 - protein, 38 aa, Artificial Sequence
  Synthetic polypeptide
HGPCARLTCLVSARLLSVRSMGSIDMTVDEIPWSGACL

SEQ ID NO: 13974 - protein, 10 aa, Artificial Sequence
  Synthetic polypeptide
HVWCRRACYR

SEQ ID NO: 13975 - protein, 123 aa, Artificial Sequence
  Synthetic polypeptide
VCFGSTGTKIGTIQRRLAWALCKADMSGVGAPVIGEIDGEYRHDSRRNTLEWCLPVIDAKNKSGSLEFSIAGQPNDFFPVQVSFVSKKNYCNIQVTKVTQVDGNSPVRFSTETTFLVDKYEIL

SEQ ID NO: 13976 - protein, 43 aa, Artificial Sequence
  Synthetic polypeptide
PGSAWPSWTVRLGRSGLRPCRNQNAWPGTRMPPYSCCKRRRRS

SEQ ID NO: 13977 - protein, 164 aa, Artificial Sequence
  Synthetic polypeptide
VLLEASDLGAPGHPGQSGWADPGSGRAGIRTPGPGQECLLTAAAKGEGEADCAGKEIPLTHRGQAFPEDHIDPQRDGEAAAPCCRLRAVVPGADGRAGDWPRCSLPSLFSPASARQSFPSAAGLPLQDGWRGHQPPSPDPQRPPPLLLWLFLLLLPAQRGYPGA

SEQ ID NO: 13978 - protein, 540 aa, Artificial Sequence
  Synthetic polypeptide
CCWRPVTWERLAILDSQAGQIRAQAVQESERLARDKNASLQLLQKEKEKLTVLERRYHSLTGGRPFPKTTSTLKEMEKLLLPAVDLEQWYQELMAGLGTGPAAASPHSSPPPLPAKASRQLQVYRSKMDGEATSPLPRTRSGPLPSSSGSSSSSSQLSVATLGRSPSPKSALLTQNGTGSLPRNLAATLQDIETKRQLALQQKGQQVIEEQRRRLAELKQKAAAEAQCQWDALHGAAPFPAGPSGFPPLMHHSILHHLPAGRERGEEGEHAYDTLSLESSDSMETSISTGGNSACSPDNMSSASGLDMGKIEEMEKMLKEAHAEKNRLMESREREMELRRQALEEERRRREQVERRLQSESARRQQLVEKEVKMREKQFSQARPLTRYLPIRKEDFDLKTHIESSGHGVDTCLHVVLSSKVCRGYLVKMGGKIKSWKKRWFVFDRLKRTLSYYVDKHETKLKGVIYFQAIEEVYYDHLRSAAKKRFFRFTMVTESPNPALTFCVKTHDRLYYMVAPSAEAMRIWMDVIVTGAEGYTQFMN

SEQ ID NO: 13979 - protein, 117 aa, Artificial Sequence
  Synthetic polypeptide
VLLEASDLGAPGHPGQSGWADPGSGRAGIRTPGPGQECLLTAAAKGEGEADCAGKEIPLTHRGQAFPEDHIDPQRGLPLQDGWRGHQPPSPDPQRPPPLLLWLFLLLLPAQRGYPGA

SEQ ID NO: 13980 - protein, 158 aa, Artificial Sequence
  Synthetic polypeptide
CCWRPVTWERLAILDSQAGQIRAQAVQESERLARDKNASLQLLQKEKEKLTVLERRYHSLTGGRPFPKTTSTLKEVYRSKMDGEATSPLPRTRSGPLPSSSGSSSSSSQLSVATLGRSPSPKSALLTQNGTGSLPRNLAATLQDIETKRQLALQQKGE

SEQ ID NO: 13981 - protein, 482 aa, Artificial Sequence
  Synthetic polypeptide
CCWRPVTWERLAILDSQAGQIRAQAVQESERLARDKNASLQLLQKEKEKLTVLERRYHSLTGGRPFPKTTSTLKEVYRSKMDGEATSPLPRTRSGPLPSSSGSSSSSSQLSVATLGRSPSPKSALLTQNGTGSLPRNLAATLQDIETKRQLALQQKGQQVIEEQRRRLAELKQKAAAEAQCQWDALHGAAPFPAGPSGFPPLMHHSILHHLPAGRERGEEGEHAYDTLSLESSDSMETSISTGGNSACSPDNMSSASGLDMGKIEEMEKMLKEAHAEKNRLMESREREMELRRQALEEERRRREQVERRLQSESARRQQLVEKEVKMREKQFSQARPLTRYLPIRKEDFDLKTHIESSGHGVDTCLHVVLSSKVCRGYLVKMGGKIKSWKKRWFVFDRLKRTLSYYVDKHETKLKGVIYFQAIEEVYYDHLRSAAKSPNPALTFCVKTHDRLYYMVAPSAEAMRIWMDVIVTGAEGYTQFMN

SEQ ID NO: 13982 - protein, 38 aa, Artificial Sequence
  Synthetic polypeptide
RLNLFCFGKKDVCLYKRSGASMAKCLQGLWVRDSRNPW

SEQ ID NO: 13983 - protein, 13 aa, Artificial Sequence
  Synthetic polypeptide
EIQEIHGERFGFL

SEQ ID NO: 13984 - protein, 239 aa, Artificial Sequence
  Synthetic polypeptide
GLTSKPILFWQKGRVSVQKKWSQYGKMFTRTLGERFKKSMVKGLDSYEEKEDKVIKEMAAQIREVEQSRQEVVRSVLEPQAVPDPEEGSSAPRSWKGMNSQVASSLQQPSNLDLPPAPELDWMETGPSLTFIGHQDIPGVGNIHSGATPPWMIQDEEYIAGNQEIGPSYEEFLKEKEKQKLKKLPPDRVGANFDHSSRTSAGWLPSFGRVWNNGRRWQSRHQFKTEAAAMKKQSHTEKS

SEQ ID NO: 13985 - protein, 101 aa, Artificial Sequence
  Synthetic polypeptide
GLTSKPILFWQKGRVSVQKKWSQYGKMFTRTLGERFKKSMVKGLDSYEEKEDKVIKEMAAQIREVEQSRQEVVRSVLEVGFPRRIQTTSGSARPRRGLFST

SEQ ID NO: 13986 - protein, 34 aa, Artificial Sequence
  Synthetic polypeptide
RPAWPIWTYQTGFKAQSSSNLHQKYQGWRCSSCW

SEQ ID NO: 13987 - protein, 53 aa, Artificial Sequence
  Synthetic polypeptide
HFGRPRRVNQRRSGVKDQPGQYGLIKLVSKHRAQVIYTRNTKGGDAPAAGEDA

SEQ ID NO: 13988 - protein, 26 aa, Artificial Sequence
  Synthetic polypeptide
INGGQELKTSLANMDLSNWFQSTELK

SEQ ID NO: 13989 - protein, 18 aa, Artificial Sequence
  Synthetic polypeptide
ADIWKVLLEQCLACNPAP

SEQ ID NO: 13990 - protein, 163 aa, Artificial Sequence
  Synthetic polypeptide
SSVWHVILHPEECMYAVGQGALGVEVRAKDQDILDLVGVLHDPETLLRCIAERAFLRHLEGGCSVPVAVHTAMKDGQLYLTGGVWSLDGSDSIQETMQATIHVPAQHEDGPEDDPQLVGITARNIPRGPQLAAQNLGISLANLLLSKGAKNILDVARQLNDAH

SEQ ID NO: 13991 - protein, 123 aa, Artificial Sequence
  Synthetic polypeptide
SSVWHVILHPEECMYAVGQEGGCSVPVAVHTAMKDGQLYLTGGVWSLDGSDSIQETMQATIHVPAQHEDGPEDDPQLVGITARNIPRGPQLAAQNLGISLANLLLSKGAKNILDVARQLNDAH

SEQ ID NO: 13992 - protein, 19 aa, Artificial Sequence
  Synthetic polypeptide
SSVWHVILHPEECMYAVGQ

SEQ ID NO: 13993 - protein, 59 aa, Artificial Sequence
  Synthetic polypeptide
QWVYQDVTLLSCTLRNACMLWARGPWAWKCEPRTRTSWIWWVCCTIPRLCFAASLKGPS

SEQ ID NO: 13994 - protein, 6 aa, Artificial Sequence
  Synthetic polypeptide
PYYPAP

SEQ ID NO: 13995 - protein, 176 aa, Artificial Sequence
  Synthetic polypeptide
MHFQLVFNLTMGLSGCNPIILHPEECMYAVGQGALGVEVRAKDQDILDLVGVLHDPETLLRCIAERAFLRHLEGGCSVPVAVHTAMKDGQLYLTGGVWSLDGSDSIQETMQATIHVPAQHEDGPEDDPQLVGITARNIPRGPQLAAQNLGISLANLLLSKGAKNILDVARQLNDAH

SEQ ID NO: 13996 - protein, 30 aa, Artificial Sequence
  Synthetic polypeptide
QWVYQDVTLLSCTLRNACMLWARKEAAVCQ

SEQ ID NO: 13997 - protein, 136 aa, Artificial Sequence
  Synthetic polypeptide
MHFQLVFNLTMGLSGCNPIILHPEECMYAVGQEGGCSVPVAVHTAMKDGQLYLTGGVWSLDGSDSIQETMQATIHVPAQHEDGPEDDPQLVGITARNIPRGPQLAAQNLGISLANLLLSKGAKNILDVARQLNDAH

SEQ ID NO: 13998 - protein, 23 aa, Artificial Sequence
  Synthetic polypeptide
QWVYQDVTLLSCTLRNACMLWAR

SEQ ID NO: 13999 - protein, 32 aa, Artificial Sequence
  Synthetic polypeptide
MHFQLVFNLTMGLSGCNPIILHPEECMYAVGQ

SEQ ID NO: 14000 - protein, 66 aa, Artificial Sequence
  Synthetic polypeptide
SHHFGRPRRADHKRHAKGRLQLPGKRLNKLSESGTRPWLSFGPTWQTWRRSMRKSYTTVWTGSWPS

SEQ ID NO: 14001 - protein, 35 aa, Artificial Sequence
  Synthetic polypeptide
PAAVAHTCNPTTLGGRGGRITRGMPKGGCSCPGRG

SEQ ID NO: 14002 - protein, 115 aa, Artificial Sequence
  Synthetic polypeptide
QPRWLTLVIPPLWEAEAGGSQEACQREAAAAREEAEQALGERDQALAQLRAHMADMEAKYEEILHDSLDRLLAKLRAIKQQWDGAALRLHARHKEQQRQFGLTPPGSLRPPAPSL

SEQ ID NO: 14003 - protein, 47 aa, Artificial Sequence
  Synthetic polypeptide
NSISILTVLRGVHHRRGLWAQHVLPVCQLPVHLPAMPGPEDALHPGQ

SEQ ID NO: 14004 - protein, 206 aa, Artificial Sequence
  Synthetic polypeptide
EECIIDEDCGPSMYCQFASFQYTCQPCRGQRMLCTRDSECCGDQLCVWGHCTKMATRGSNGTICDNQRDCQPGLCCAFQRGLLFPVCTPLPVEGELCHDPASRLLDLITWELEPDGALDRCPCASGLLCQPHSHSLVYVCKPTFVGSRDQDGEILLPREVPDEYEVGSFMEEVRQELEDLERSLTEEMALREPAAAAAALLGGEEI

SEQ ID NO: 14005 - protein, 126 aa, Artificial Sequence
  Synthetic polypeptide
PELMLKFNFHFNSIKRSASSTRTVGPACTASLPASSTPASHAGARGCSAPGTVSAVETSCVSGVTAPKWPPGAAMGPSVTTRGTASRGCAVPSREACCSLCAHPCPWRASFAMTPPAGFWTSSPGS

SEQ ID NO: 14006 - protein, 220 aa, Artificial Sequence
  Synthetic polypeptide
EECIIDEDCGPSMYCQFASFQYTCQPCRGQRMLCTRDSECCGDQLCVWGHCTKMATRGSNGTICDNQRDCQPGLCCAFQRGLLFPVCTPLPVEGELCHDPASRLLDLITWELEPDGALDRCPCASGLLCQPHRLPRLEPGFVPSLPSHSLVYVCKPTFVGSRDQDGEILLPREVPDEYEVGSFMEEVRQELEDLERSLTEEMALREPAAAAAALLGGEEI

SEQ ID NO: 14007 - protein, 90 aa, Artificial Sequence
  Synthetic polypeptide
EECIIDEDCGPSMYCQFASFQYTCQPCRGQRMLCTRDSECCGDQLCVWGHCTKMATRGSNGTICDNQRDCQPGLCCAFQRGLLFPVCTPL

SEQ ID NO: 14008 - protein, 105 aa, Artificial Sequence
  Synthetic polypeptide
PELMLKFNFHFNSIKRSASSTRTVGPACTASLPASSTPASHAGARGCSAPGTVSAVETSCVSGVTAPKWPPGAAMGPSVTTRGTASRGCAVPSREACCSLCAHPC

SEQ ID NO: 14009 - protein, 67 aa, Artificial Sequence
  Synthetic polypeptide
EECIIDEDCGPSMYCQFASFQYTCQPCRGQRMLCTRDSECCGDQLCVWGHCTKMATRGSNGTICDNQ

SEQ ID NO: 14010 - protein, 82 aa, Artificial Sequence
  Synthetic polypeptide
PELMLKFNFHFNSIKRSASSTRTVGPACTASLPASSTPASHAGARGCSAPGTVSAVETSCVSGVTAPKWPPGAAMGPSVTTR

SEQ ID NO: 14011 - protein, 25 aa, Artificial Sequence
  Synthetic polypeptide
NSISILTVLRGVHHRRGLWAQHVLP

SEQ ID NO: 14012 - protein, 16 aa, Artificial Sequence
  Synthetic polypeptide
EECIIDEDCGPSMYCQ

SEQ ID NO: 14013 - protein, 30 aa, Artificial Sequence
  Synthetic polypeptide
PELMLKFNFHFNSIKRSASSTRTVGPACTA

SEQ ID NO: 14014 - protein, 198 aa, Artificial Sequence
  Synthetic polypeptide
WQDVKVFRALILGELEKGQSQFQALCFVTQLQHNEIIPSEAMAKLRQKNPRAVRQAEEVRGLEHLHMDVAVNFSQGALLSPHLHNVCAEAVDAIYTRQEDVRFWLEQGVDSSVFEALPKASEQAELPRCRQVGDHGKPCVCRYGLSLAWYPCMLKYCHSRDRPTPYKCGIRSCQKSYSFDFYVPQRQLCLWDEDPYPG

SEQ ID NO: 14015 - protein, 28 aa, Artificial Sequence
  Synthetic polypeptide
ASVSLSGKPPPILPYLIVPEMIYNNGKM

SEQ ID NO: 14016 - protein, 37 aa, Artificial Sequence
  Synthetic polypeptide
FTIMARCEGLPGPDPGGAGEGAESVPGPLLCHPAAAQ

SEQ ID NO: 14017 - protein, 21 aa, Artificial Sequence
  Synthetic polypeptide
GLPSDVELWRQKKLLLKHHQK

SEQ ID NO: 14018 - protein, 26 aa, Artificial Sequence
  Synthetic polypeptide
YVPFTFCHESEASPAMWNYGGRRSCC

SEQ ID NO: 14019 - protein, 320 aa, Artificial Sequence
  Synthetic polypeptide
WFYKGFLLLLGSHSLFSCLPPCDMCLSPSAMNLRPPQRCGTMEAEEAAAKASSEVNLANLPPSYHNETNTDTKVGNNTIHVHREIHKITNNQTGQMVFSETVITSVGDEEGRRSHECIIDEDCGPSMYCQFASFQYTCQPCRGQRMLCTRDSECCGDQLCVWGHCTKMATRGSNGTICDNQRDCQPGLCCAFQRGLLFPVCTPLPVEGELCHDPASRLLDLITWELEPDGALDRCPCASGLLCQPHSHSLVYVCKPTFVGSRDQDGEILLPREVPDEYEVGSFMEEVRQELEDLERSLTEEMALREPAAAAAALLGGEEI

SEQ ID NO: 14020 - protein, 334 aa, Artificial Sequence
  Synthetic polypeptide
WFYKGFLLLLGSHSLFSCLPPCDMCLSPSAMNLRPPQRCGTMEAEEAAAKASSEVNLANLPPSYHNETNTDTKVGNNTIHVHREIHKITNNQTGQMVFSETVITSVGDEEGRRSHECIIDEDCGPSMYCQFASFQYTCQPCRGQRMLCTRDSECCGDQLCVWGHCTKMATRGSNGTICDNQRDCQPGLCCAFQRGLLFPVCTPLPVEGELCHDPASRLLDLITWELEPDGALDRCPCASGLLCQPHRLPRLEPGFVPSLPSHSLVYVCKPTFVGSRDQDGEILLPREVPDEYEVGSFMEEVRQELEDLERSLTEEMALREPAAAAAALLGGEEI

SEQ ID NO: 14021 - protein, 292 aa, Artificial Sequence
  Synthetic polypeptide
WFYKGFLLLLGSHSLFSCLPPCDMCLSPSAMNLRPPQRCGTMEAEEAAAKASSEVNLANLPPSYHNETNTDTKVGNNTIHVHREIHKECIIDEDCGPSMYCQFASFQYTCQPCRGQRMLCTRDSECCGDQLCVWGHCTKMATRGSNGTICDNQRDCQPGLCCAFQRGLLFPVCTPLPVEGELCHDPASRLLDLITWELEPDGALDRCPCASGLLCQPHSHSLVYVCKPTFVGSRDQDGEILLPREVPDEYEVGSFMEEVRQELEDLERSLTEEMALREPAAAAAALLGGEEI

SEQ ID NO: 14022 - protein, 204 aa, Artificial Sequence
  Synthetic polypeptide
WFYKGFLLLLGSHSLFSCLPPCDMCLSPSAMNLRPPQRCGTMEAEEAAAKASSEVNLANLPPSYHNETNTDTKVGNNTIHVHREIHKITNNQTGQMVFSETVITSVGDEEGRRSHECIIDEDCGPSMYCQFASFQYTCQPCRGQRMLCTRDSECCGDQLCVWGHCTKMATRGSNGTICDNQRDCQPGLCCAFQRGLLFPVCTPL

SEQ ID NO: 14023 - protein, 153 aa, Artificial Sequence
  Synthetic polypeptide
WFYKGFLLLLGSHSLFSCLPPCDMCLSPSAMNLRPPQRCGTMEAEEAAAKASSEVNLANLPPSYHNETNTDTKVGNNTIHVHREIHKECIIDEDCGPSMYCQFASFQYTCQPCRGQRMLCTRDSECCGDQLCVWGHCTKMATRGSNGTICDNQ

SEQ ID NO: 14024 - protein, 102 aa, Artificial Sequence
  Synthetic polypeptide
WFYKGFLLLLGSHSLFSCLPPCDMCLSPSAMNLRPPQRCGTMEAEEAAAKASSEVNLANLPPSYHNETNTDTKVGNNTIHVHREIHKECIIDEDCGPSMYCQ

SEQ ID NO: 14025 - protein, 781 aa, Artificial Sequence
  Synthetic polypeptide
KSDRCIRQLQLILFKVALMLGVEIHVNVEFVKVLEPPEDQENQKIGWRAEFLPTDHSLSEFEFDVIIGADGRRNTLEGFRRKEFRGKLAIAITANFINRNSTAEAKVEEISGVAFIFNQKFFQDLKEETGIDLENIVYYKDCTHYFVMTAKKQSLLDKGVIINDYIDTEMLLCAENVNQDNLLSYAREAADFATNYQLPSLDFAMNHYGQPDVAMFDFTCMYASENAALVRERQAHQLLVALVGDSLLEPFWPMGTGCARGFLAAFDTAWMVKSWNQGTPPLELLAERESLYRLLPQTTPENINKNFEQYTLDPGTRYPNLNSHCVRPHQVKHLYITKELEHYPLERLGSVRRSVNLSRKESDIRPSKLLTWCQQQTEGYQHVNVTDLTTSWRSGLALCAIIHRFRPELINFDSLNEDDAVENNQLAFDVAEREFGIPPVTTGKEMASAQEPDKLSMVMYLSKFYELFRGTPLRPVDSWRKNYGENADLSLAKSSISNNYLNLTFPRKRTPRVDGQTGENDMNKRRRKGFTNLDEPSNFSSRSLGSNQECGSSKEGGNQNKVKSMANQLLAKFEESTRNPSLMKQEKKSPSGFHFHPSHLRTVHPQLTVGKVSSGIGAAAEVLVNLYMNDHRPKAQATSPDLESMRKSFPLNLGGSDTCYFCKKRVYVMERLSAEGHFFHRECFRCSICATTLRLAAYTFDCDEGKFYCKPHFIHCKTNSKQRKRRAELKQQREEEATWQEQEAPRRDTPTESSCAVAAIGTLEGSPPVHFSLPVLHPLLG

SEQ ID NO: 14026 - protein, 28 aa, Artificial Sequence
  Synthetic polypeptide
QHHLAARTGSRNQTDVFANYSSSYSRWP

SEQ ID NO: 14027 - protein, 28 aa, Artificial Sequence
  Synthetic polypeptide
QLEQGLEIRQMYSPTTAHPIQGGPDAGS

SEQ ID NO: 14028 - protein, 971 aa, Artificial Sequence
  Synthetic polypeptide
KSDRCIRQLQLILFKVALMLGVEIHVNVEFVKVLEPPEDQENQKIGWRAEFLPTDHSLSEFEFDVIIGADGRRNTLEGFRRKEFRGKLAIAITANFINRNSTAEAKVEEISGVAFIFNQKFFQDLKEETGIDLENIVYYKDCTHYFVMTAKKQSLLDKGVIINDYIDTEMLLCAENVNQDNLLSYAREAADFATNYQLPSLDFAMNHYGQPDVAMFDFTCMYASENAALVRERQAHQLLVALVGDSLLEPFWPMGTGCARGFLAAFDTAWMVKSWNQGTPPLELLAERESLYRLLPQTTPENINKNFEQYTLDPGTRYPNLNSHCVRPHQVKHLYITKELEHYPLERLGSVRRSVNLSRKESDIRPSKLLTWCQQQTEGYQHVNVTDLTTSWRSGLALCAIIHRFRPELINFDSLNEDDAVENNQLAFDVAEREFGIPPVTTGKEMASAQEPDKLSMVMYLSKFYELFRGTPLRPVDSWRKNYGENADLSLAKSSISNNYLNLTFPRKRTPRVDGQTGENDMNKRRRKGFTNLDEPSNFSSRSLGSNQECGSSKEGGNQNKVKSMANQLLAKFEESTRNPSLMKQERRVSGIGKPVLCSSSGPPVHSCCPKPEEATPSPSPPLKRQFPSVVVTGHVLRELKQVSAGSECLSRPWRARAKSDLQLGGTENFATLPSTRPRAQALSGVLWRLQQVEEKILQKRAQNLANREFHTKNIKEKAAHLASMFGHGDFPQNKLLSKGLSHTHPPSPPSRLPSPDPAASSSPSTVDSASPARKEKKSPSGFHFHPSHLRTVHPQLTVGKVSSGIGAAAEVLVNLYMNDHRPKAQATSPDLESMRKSFPLNLGGSDTCYFCKKRVYVMERLSAEGHFFHRECFRCSICATTLRLAAYTFDCDEGKFYCKPHFIHCKTNSKQRKRRAELKQQREEEATWQEQEAPRRDTPTESSCAVAAIGTLEGSPPVHFSLPVLHPLLG

SEQ ID NO: 14029 - protein, 950 aa, Artificial Sequence
  Synthetic polypeptide
KSDRCIRQLQLILFKVALMLGVEIHVNVEFVKVLEPPEDQENQKIGWRAEFLPTDHSLSEFEFDVIIGADGRRNTLEGFRRKEFRGKLAIAITANFINRNSTAEAKVEEISGVAFIFNQKFFQDLKEETGIDLENIVYYKDCTHYFVMTAKKQSLLDKGVIINDYIDTEMLLCAENVNQDNLLSYAREAADFATNYQLPSLDFAMNHYGQPDVAMFDFTCMYASENAALVRERQAHQLLVALVGDSLLEPFWPMGTGCARGFLAAFDTAWMVKSWNQGTPPLELLAERESLYRLLPQTTPENINKNFEQYTLDPGTRYPNLNSHCVRPHQVKHLYITKELEHYPLERLGSVRRSVNLSRKESDIRPSKLLTWCQQQTEGYQHVNVTDLTTSWRSGLALCAIIHRFRPELINFDSLNEDDAVENNQLAFDVAEREFGIPPVTTGKEMASAQEPDKLSMVMYLSKFYELFRGTPLRPVDSWRKNYGENADLSLAKSSISNNYLNLTFPRKRTPRVDGQTGENDMNKRRRKGFTNLDEPSNFSSRSLGSNQECGSSKEGGNQNKVKSMANQLLAKFEESTRNPSLMKQERRVSGIGKPVLCSSSGPPVHSCCPKPEEATPSPSPPLKRQFPSVVVTGHVLRELKQVSAGSECLSRPWRARAKSDLQLGGTENFATLPSTRPRAQALSGVLWRLQQVEEKILQKRAQNLANREFHTKNIKEKAAHLASMFGHGDFPQNKLLSKGLSHTHPPSPPSRLPSPDPAASSSPSTVDSASPARKLTVGKVSSGIGAAAEVLVNLYMNDHRPKAQATSPDLESMRKSFPLNLGGSDTCYFCKKRVYVMERLSAEGHFFHRECFRCSICATTLRLAAYTFDCDEGKFYCKPHFIHCKTNSKQRKRRAELKQQREEEATWQEQEAPRRDTPTESSCAVAAIGTLEGSPPVHFSLPVLHPLLG

SEQ ID NO: 14030 - protein, 823 aa, Artificial Sequence
  Synthetic polypeptide
KSDRCIRQLQLILFKVALMLGVEIHVNVEFVKVLEPPEDQENQKIGWRAEFLPTDHSLSEFEFDVIIGADGRRNTLEGFRRKEFRGKLAIAITANFINRNSTAEAKVEEISGVAFIFNQKFFQDLKEETGIDLENIVYYKDCTHYFVMTAKKQSLLDKGVIINDYIDTEMLLCAENVNQDNLLSYAREAADFATNYQLPSLDFAMNHYGQPDVAMFDFTCMYASENAALVRERQAHQLLVALVGDSLLEPFWPMGTGCARGFLAAFDTAWMVKSWNQGTPPLELLAERESLYRLLPQTTPENINKNFEQYTLDPGTRYPNLNSHCVRPHQVKHLYITKELEHYPLERLGSVRRSVNLSRKESDIRPSKLLTWCQQQTEGYQHVNVTDLTTSWRSGLALCAIIHRFRPELINFDSLNEDDAVENNQLAFDVAEREFGIPPVTTGKEMASAQEPDKLSMVMYLSKFYELFRGTPLRPVDSWRKNYGENADLSLAKSSISNNYLNLTFPRKRTPRVDGQTGENDMNKRRRKGFTNLDEPSNFSSRSLGSNQECGSSKEGGNQNKVKSMANQLLAKFEESTRNPSLMKQEKKSPSGFHFHPSHLRTVHPQESMRKSFPLNLGGSDTCYFCKKRVYVMERLSAEGHFFHRECFRCSICATTLRLAAYTFDCDEGKFYCKPHFIHCKTNSKQRKRRAELKQQREEEATWQEQEAPRRDTPTESSCAVAAIGTLEGSPPGISTSFFRKVLGWPLRLPRDLCNWMQGLLQAAGLHIRDNAYNYCYMYELLSLGLPLLWAFSEVLAAMYRESEGSLESICNWVLRCFPVKLR

SEQ ID NO: 14031 - protein, 30 aa, Artificial Sequence
  Synthetic polypeptide
PCTKYLPSPSLICKTKSLGIHGRKKCSGSM

SEQ ID NO: 14032 - protein, 633 aa, Artificial Sequence
  Synthetic polypeptide
DGVEEQRCLASLCLSPGCTHYLHNLVQSIYLLLLSSVKQKALASTGGRSVQAACDWLFSHVGDPFLDDPLPREYVLYLRPTGPLAQKLSDFWQQSKQICGKNKAHNIFPHITLCQFFMCEDSKVDALGEALQTTVSRWKCKFSAPLPLELYTSSNFIGLFVKEDSAEVLKKFAADFAAEAASKTEVHVEPHKKQLHVTLAYHFQASHLPTLEKLAQNIDVKLGCDWVATIFSRDIRFANHETLQVIYPYTPQNDDELELVPGDFIFMSPMEQTSTSEGWIYGTSLTTGCSGLLPENYITKADECSTWIFHGSYSILNTSSSNSLTFGDGVLERRPYEDQGLGETTPLTIICQPMQPLRVNSQPGPQKRCLFVCRHGERMDVVFGKYWLSQCFDAKGRYIRTNLNMPHSLPQRSGGFRDYEKDAPITVFGCMQARLVGEALLESNTIIDHVYCSPSLRCVQTAHNILKGLQQENHLKIRVEPGLFEWTKWVAGSTLPAWIPPSELAAANLSVDTTYRPHIPISKLVVSESYDTYISRSFQVTKEIISECKSKGNNILIVAHASSLEACTCQLQGLSPQNSKDFVQMVRKIPYLGFCSCEELGETGIWQLTDPPILPLTHGPTGGFNWRETLLQE

SEQ ID NO: 14033 - protein, 152 aa, Artificial Sequence
  Synthetic polypeptide
QGFTHDVQSIGMVAGAVTGIVAGALLIFLLVWLLIRRKDKERYEEEERPNEIREDAEAPKARLVKPSSSSSGSRSSRSGSSSTRSTANSASRSQRTLSTDAAPQPGLATQAYSLVGPEVRGSEPKKVHHANLTKAETTPSMIPSQSRAFQTV

SEQ ID NO: 14034 - protein, 16 aa, Artificial Sequence
  Synthetic polypeptide
RASHMMYKASAWLQEQ

SEQ ID NO: 14035 - protein, 31 aa, Artificial Sequence
  Synthetic polypeptide
SWTSLSALVEYILSKNAAKSGDHLLQSSCLQ

SEQ ID NO: 14036 - protein, 318 aa, Artificial Sequence
  Synthetic polypeptide
ARMLLSQVITYSSRHVYNNLTEEQKGRVAFASNFLAGDASLQIEPLKPSDEGRYTCKVKNSGRYVWSHVILKVLVRPSKPKCELEGELTEGSDLTLQCESSSGTEPIVYYWQRIREKEGEDERLPPKSRIDYNHPGRVLLQNLTMSYSGLYQCTAGNEAGKESCVVRVTVQYVQSIGMVAGAVTGIVAGALLIFLLVWLLIRRKDKERYEEEERPNEIREDAEAPKARLVKPSSSSSGSRSSRSGSSSTRSTANSASRSQRTLSTDAAPQPGLATQAYSLVGPEVRGSEPKKVHHANLTKAETTPSMIPSQSRAFQTV

SEQ ID NO: 14037 - protein, 2 aa, Artificial Sequence
  Synthetic polypeptide
VR

SEQ ID NO: 14038 - protein, 46 aa, Artificial Sequence
  Synthetic polypeptide
SQLLGRLSVPVMFDPHFSRTVYMKYLMTWSQRWKILENSYFSQFST

SEQ ID NO: 14039 - protein, 254 aa, Artificial Sequence
  Synthetic polypeptide
QAQWLVPVIPTTWEAERTSNVRSTFFKDCLYEVFDDLESKMEDSGKQLLQSVLHLMENGALVLTTNFDNLLELYAADQGKQLESLDLTDEKKVLEWAQEKRKLSVLHIHGVYTNPSGIVLHPAGYQNVLRNTEVMREIQKLYENKSFLFLGCGWTVDDTTFQALFLEAVKHKSDLEHFMLVRRGDVDEFKKLRENMLDKGIKVISYGDDYADLPEYFKRLTCEISTRGTSAGMVREGQLNGSSAAHSEIRGCST

SEQ ID NO: 14040 - protein, 249 aa, Artificial Sequence
  Synthetic polypeptide
QAQWLVPVIPTTWEAERTSNVRSTFFKDCLYEVFDDLESKMEDSGKQLLQSVLHLMENGALVLTTNFDNLLELYAADQGKQLESLDLTDEKKVLEWAQEKRKLSVLHIHGVYTNPSGIVLHPAGYQNVLRNTEVMREIQKLYENKSFLFLGCGWTVDDTTFQALFLEAVKHKSDLEHFMLVRRGDVDEFKKLRENMLDKGIKVISYGDDYADLPEYFKRLTCEISTRGTSGMVREGQLNGSSAAHSEIR

SEQ ID NO: 14041 - protein, 253 aa, Artificial Sequence
  Synthetic polypeptide
QAQWLVPVIPTTWEAERTSNVRSTFFKDCLYEVFDDLESKMEDSGKQLLQSVLHLMENGALVLTTNFDNLLELYAADQGKQLESLDLTDEKKVLEWAQEKRKLSVLHIHGVYTNPSGIVLHPAGYQNVLRNTEVMREIQKLYENKSFLFLGCGWTVDDTTFQALFLEAVKHKSDLEHFMLVRRGDVDEFKKLRENMLDKGIKVISYGDDYADLPEYFKRLTCEISTRGTSGMVREGQLNGSSAAHSEIRGCST

SEQ ID NO: 14042 - protein, 56 aa, Artificial Sequence
  Synthetic polypeptide
QAQWLVPVIPTTWEAERTSNVRSTFFKDCLYEVFDDLESKMEDSGKQLLQSVLHLM

SEQ ID NO: 14043 - protein, 209 aa, Artificial Sequence
  Synthetic polypeptide
AKIAPLYSSLDWFRQTLLKKPKKRPNSPESTSSDASQPTSQDSPLPPSLSSVTSPSLPPTHASDSGSSRWSKDYDVCVCHSEEDLVAAQDLVSYLEGSTASLRCFLQLRDATPGGAIVSELCQALSSSHCRVLLITPGFLQDPWCKYQMLQALTEAPGAEGCTIPLLSGLSRAAYPPELRFMYYVDGRGPDGGFRQVKEAVMRYLQTLS

SEQ ID NO: 14044 - protein, 39 aa, Artificial Sequence
  Synthetic polypeptide
SQLLRRLRQENRLNLGGRSCSEPRSHHCTPAWTGSGRPC

SEQ ID NO: 14045 - protein, 71 aa, Artificial Sequence
  Synthetic polypeptide
TWEAEVAVSQDRTTVLQPGLVQADPAEEAQEEAQLPRKHLQRCFTAYLTGQPTTPKPQLSHVSQPATHTCE

SEQ ID NO: 14046 - protein, 223 aa, Artificial Sequence
  Synthetic polypeptide
AKIAPLYSSLDWFRQTLLKKPKKRPNSPESTSSDASQPTSQDSPLPPSLSSVTSPSLPPTHASDSGSSRWSKDYDVCVCHSEEDLVAAQDLVSYLEGSTASLRCFLQLRDATPGGAIVSELCQALSSSHCRVLLITPGFLQDPWCKYQMLQALTEAPGAEGCTIPLLSGLSRAAYPPELRFMYYVDGRGPDGGFRQVKEAVMRCKLLQEGEGERDSATVSDLL

SEQ ID NO: 14047 - protein, 21 aa, Artificial Sequence
  Synthetic polypeptide
CSLVVQSAASGKGCRDLQTLS

SEQ ID NO: 14048 - protein, 17 aa, Artificial Sequence
  Synthetic polypeptide
FKAQLLEKAVGICRHSV

SEQ ID NO: 14049 - protein, 20 aa, Artificial Sequence
  Synthetic polypeptide
PSSSKRSFWKRLSGSADTQL

SEQ ID NO: 14050 - protein, 33 aa, Artificial Sequence
  Synthetic polypeptide
ESLRARSHLGDLGSGFCFNADCSCDLGQVTQGE

SEQ ID NO: 14051 - protein, 289 aa, Artificial Sequence
  Synthetic polypeptide
VLVSVSMLTVHVTLGKSLKVNEASGDGDGEDAVVILEKTPFQVEQVAQLLTGSPELQLQFSNDIYSTYHLFPPRQLNDVKTTVVYPATEKHLQKYLRQDLRLIRETGDDYRNITLPHLESQSLSIQWVYNILDKKAEADRIVFENPDPSDGFVLIPDLKWNQQQLDDLYLIAICHRRGIRSLRDLTPEHLPLLRNILHQGQEAILQRYRMKGDHLRVYLHYLPSYYHLHVHFTALGFEAPGSGVERAHLLAEVIENLECDPRHYQQRTLTFALRADDPLLKLLQEAQQS

SEQ ID NO: 14052 - protein, 7 aa, Artificial Sequence
  Synthetic polypeptide
PWASHSR

SEQ ID NO: 14053 - protein, 81 aa, Artificial Sequence
  Synthetic polypeptide
SFPRPPDRIILSPLKSDPPSSPAPRPSTPSTARRARSSASSGARRRRTASPGPGRRTFWSRAHRGAIRWRPSAPRRASSPP

SEQ ID NO: 14054 - protein, 93 aa, Artificial Sequence
  Synthetic polypeptide
SRTPHHLQHPDPARPPRREGPDQVLHPEHAAAGPHRLVLEGERSGVGHIGALYGGDHQHRGGRHLHPDHQQHRAGRLPDHLQLHGLEQLRLRH

SEQ ID NO: 14055 - protein, 369 aa, Artificial Sequence
  Synthetic polypeptide
NYSLSSEVGPPIISSTQTQHALHGEKGQIKCFIRSTPPPDRIAWSWKENVLESGTSGRYTVETISTEEGVISTLTISNIVRADFQTIYNCTAWNSFGSDTEIIRLKEQGSEMKSGAGLEAESVPMAVIIGVAVGAGVAFLVLMATIVAFCCARSQRNLKGVVSAKNDIRVEIVHKEPASGREGEEHSTIKQLMMDRGEFQQDSVLKQLEVLKEEEKEFQNLKDPTNGYYSVNTFKEHHSTPTISLSSCQPDLRPAGKQRVPTGMSFTNIYSTLSGQGRLYDYGQRFVLGMGSSSIELCEREFQRGSLSDSSSFLDTQCDSSVSSSGKQDGYVQFDKASKASASSSHHSQSSSQNSDPSRPLQRRMQTHV

SEQ ID NO: 14056 - protein, 357 aa, Artificial Sequence
  Synthetic polypeptide
NYSLSSEVGPPIISSTQTQHALHGEKGQIKCFIRSTPPPDRIAWSWKENVLESGTSGRYTVETISTEEGVISTLTISNIVRADFQTIYNCTAWNSFGSDTEIIRLKEQESVPMAVIIGVAVGAGVAFLVLMATIVAFCCARSQRNLKGVVSAKNDIRVEIVHKEPASGREGEEHSTIKQLMMDRGEFQQDSVLKQLEVLKEEEKEFQNLKDPTNGYYSVNTFKEHHSTPTISLSSCQPDLRPAGKQRVPTGMSFTNIYSTLSGQGRLYDYGQRFVLGMGSSSIELCEREFQRGSLSDSSSFLDTQCDSSVSSSGKQDGYVQFDKASKASASSSHHSQSSSQNSDPSRPLQRRMQTHV

SEQ ID NO: 14057 - protein, 191 aa, Artificial Sequence
  Synthetic polypeptide
NYSLSSEVGPPIISSTQTQHALHGEKGQIKCFIRSTPPPDRIAWSWKENVLESGTSGRYTVETISTEEGVISTLTISNIVRADFQTIYNCTAWNSFGSDTEIIRLKEQGSEMKSGAGLEAESVPMAVIIGVAVGAGVAFLVLMATIVAFCCARSQRSTGGRSGISGRGTEKKARLRLPRRASKQECNEQGS

SEQ ID NO: 14058 - protein, 23 aa, Artificial Sequence
  Synthetic polypeptide
IRNPGRGTQQLVIHLTFQKEASK

SEQ ID NO: 14059 - protein, 1445 aa, Artificial Sequence
  Synthetic polypeptide
LSRKRPQNKMKKSPVGSWRSFFNLGKSSSVSKRKLQRNESEPSEMKAMALKGGRAEGTLRSAKSEESLTSLHAVDGDSKLFRPRRPRSSSDALSASFNGEMLGNRCNSYDNLPHDNESEEEGGLLHIPALMSPHSAEDVDLSPPDIGVASLDFDPMSFQCSPPKAESECLESGASFLDSPGYSKDKPSANKKDAETGSSQCQTPGSTASSEPVSPLQEKLSPFFTLDLSPTEDKSSKPSSFTEKVVYAFSPKIGRKLSKSPSMSISEPISVTLPPRVSEVIGTVSNTTAQNASSSTWDKCVEERDATNRSPTQIVKMKTNETVAQEAYESEVQPLDQVAAEEVELPGKEDQSVSSSQSKAVASGQTQTGAVTHDPPQDSVPVSSVSLIPPPPPPKNVARMLALALAESAQQASTQSLKRPGTSQAGYTNYGDIAVATTEDNLSSSYSAVALDKAYFQTDRPAEQFHLQNNAPGNCDHPLPETTATGDPTHSNTTESGEQHHQVDLTGNQPHQAYLSGDPEKARITSVPLDSEKSDDHVSFPEDQSGKNSMPTVSFLDQDQSPPRFYSGDQPPSYLGASVDKLHHPLEFADKSPTPPNLPSDKIYPPSGSPEENTSTATMTYMTTTPATAQMSTKEASWDVAEQPTTADFAAATLQRTHRTNRPLPPPPSQRSAEQPPVVGQVQAATNIGLNNSHKVQGVVPVPERPPEPRAMDDPASAFISDSGAAAAQCPMATAVQPGLPEKVRDGARVPLLHLRAESVPAHPCGFPAPLPPTRMMESKMIAAIHSSSADATSSSNYHSFVTASSTSVDDALPLPLPVPQPKHASQKTVYSSFARPDVTTEPFGPDNCLHFNMTPNCQYRPQSVPPHHNKLEQHQVYGARSEPPASMGLRYNTYVAPGRNASGHHSKPCSRVEYVSSLSSSVRNTCYPEDIPPYPTIRRVQSLHAPPSSMIRSVPISRTEVPPDDEPAYCPRPLYQYKPYQSSQARSDYHVTQLQPYFENGRVHYRYSPYSSSSSSYYSPDGALCDVDAYGTVQLRPLHRLPNRDFAFYNPRLQGKSLYSYAGLAPRPRANVTGYFSPNDHNVVSMPPAADVKHTYTSWDLEDMEKYRMQSIRRESRARQKVKGPVMSQYDNMTPAVQDDLGGIYVIHLRSKSDPGKTGLLSVAEGKESRHAAKAISPEGEDRFYRRHPEAEMDRAHHHGGHGSTQPEKPSLPQKQSSLRSRKLPDMGCSLPEHRAHQEASHRQFCESKNGPPYPQGAGQLDYGSKGIPDTSEPVSYHNSGVKYAASGQESLRLNHKEVRLSKEMERPWVRQPSAPEKHSRDCYKEEEHLTQSIVPPPKPERSHSLKLHHTQNVERDPSVLYQYQPHGKRQSSVTVVSQYDNLEDYHSLPQHQRGVFGGGGMGTYVPPGFPHPQSRTYATALGQGAFLPAELSLQHPETQIHAE

SEQ ID NO: 14060 - protein, 42 aa, Artificial Sequence
  Synthetic polypeptide
LLEVHIVQSSSHTPDPLNQKPWAWDPATGHSSNFPERGLKIR

SEQ ID NO: 14061 - protein, 378 aa, Artificial Sequence
  Synthetic polypeptide
LSRKRPQNKMKKSPVGSWRSFFNLGKSSSVSKRKLQRNESEPSEMKAMALKGGRAEGTLRSAKSEESLTSLHAVDGDSKLFRPRRPRSSSDALSASFNGEMLGNRCNSYDNLPHDNESEEEGGLLHIPALMSPHSAEDVDLSPPDIGVASLDFDPMSFQCSPPKAESECLESGASFLDSPGYSKDKPSANKKDAETGSSQCQTPGSTASSEPVSPLQEKLSPFFTLDLSPTEDKSSKPSSFTEKVVYAFSPKIGRKLSKSPSMSISEPISVTLPPRVSEVIGTVSNTTAQNASSSTWDKCVEERDATNRSPTQIVKMKTNETVAQEAYESEVQPLDQVAAEEVELPGKEDQSVSSSQSKAVASGQTQTGTVCFPPFFL

SEQ ID NO: 14062 - protein, 13 aa, Artificial Sequence
  Synthetic polypeptide
LCPRYKGNEHWSS

SEQ ID NO: 14063 - protein, 50 aa, Artificial Sequence
  Synthetic polypeptide
NAQALWSHSDLDLKCSTATASLWNPSNLDFVLGTRGMNTGVPDETLVSSS

SEQ ID NO: 14064 - protein, 1954 aa, Artificial Sequence
  Synthetic polypeptide
ELSLSEEQNEVMKNGCESKELVYLVQIACQGKSWIVKRSYEDFRVLDKHLHLCIYDRRFSQLSELPRSDTLKDSPESVTQMLMAYLSRLSAIAGNKINCGPALTWMEIDNKGNHLLVHEESSINTPAVGAAHVIKRYTARAPDELTLEVGDIVSVIDMPPKVLSTWWRGKHGFQVGLFPGHCVELINQKVPQSVTNSVPKPVSKKHGKLITFLRTFMKSRPTKQKLKQRGILKERVFGCDLGEHLLNSGFEVPQVLQSCTAFIERYGIVDGIYRLSGVASNIQRLRHEFDSEHVPDLTKEPYVQDIHSVGSLCKLYFRELPNPLLTYQLYEKFSDAVSAATDEERLIKIHDVIQQLPPPHYRTLEFLMRHLSLLADYCSITNMHAKNLAIVWAPNLLRSKQIESACFSGTAAFMEVRIQSVVVEFILNHVDVLFSGRISMAMQEGAASLSRPKSLLVSSPSTKLLTLEEAQARTQAQVNSPIVTENKYIEVGEGPAALQGKFHTIIEFPLERKRPQNKMKKSPVGSWRSFFNLGKSSSVSKRKLQRNESEPSEMKAMALKGGRAEGTLRSAKSEESLTSLHAVDGDSKLFRPRRPRSSSDALSASFNGEMLGNRCNSYDNLPHDNESEEEGGLLHIPALMSPHSAEDVDLSPPDIGVASLDFDPMSFQCSPPKAESECLESGASFLDSPGYSKDKPSANKKDAETGSSQCQTPGSTASSEPVSPLQEKLSPFFTLDLSPTEDKSSKPSSFTEKVVYAFSPKIGRKLSKSPSMSISEPISVTLPPRVSEVIGTVSNTTAQNASSSTWDKCVEERDATNRSPTQIVKMKTNETVAQEAYESEVQPLDQVAAEEVELPGKEDQSVSSSQSKAVASGQTQTGAVTHDPPQDSVPVSSVSLIPPPPPPKNVARMLALALAESAQQASTQSLKRPGTSQAGYTNYGDIAVATTEDNLSSSYSAVALDKAYFQTDRPAEQFHLQNNAPGNCDHPLPETTATGDPTHSNTTESGEQHHQVDLTGNQPHQAYLSGDPEKARITSVPLDSEKSDDHVSFPEDQSGKNSMPTVSFLDQDQSPPRFYSGDQPPSYLGASVDKLHHPLEFADKSPTPPNLPSDKIYPPSGSPEENTSTATMTYMTTTPATAQMSTKEASWDVAEQPTTADFAAATLQRTHRTNRPLPPPPSQRSAEQPPVVGQVQAATNIGLNNSHKVQGVVPVPERPPEPRAMDDPASAFISDSGAAAAQCPMATAVQPGLPEKVRDGARVPLLHLRAESVPAHPCGFPAPLPPTRMMESKMIAAIHSSSADATSSSNYHSFVTASSTSVDDALPLPLPVPQPKHASQKTVYSSFARPDVTTEPFGPDNCLHFNMTPNCQYRPQSVPPHHNKLEQHQVYGARSEPPASMGLRYNTYVAPGRNASGHHSKPCSRVEYVSSLSSSVRNTCYPEDIPPYPTIRRVQSLHAPPSSMIRSVPISRTEVPPDDEPAYCPRPLYQYKPYQSSQARSDYHVTQLQPYFENGRVHYRYSPYSSSSSSYYSPDGALCDVDAYGTVQLRPLHRLPNRDFAFYNPRLQGKSLYSYAGLAPRPRANVTGYFSPNDHNVVSMPPAADVKHTYTSWDLEDMEKYRMQSIRRESRARQKVKGPVMSQYDNMTPAVQDDLGGIYVIHLRSKSDPGKTGLLSVAEGKESRHAAKAISPEGEDRFYRRHPEAEMDRAHHHGGHGSTQPEKPSLPQKQSSLRSRKLPDMGCSLPEHRAHQEASHRQFCESKNGPPYPQGAGQLDYGSKGIPDTSEPVSYHNSGVKYAASGQESLRLNHKEVRLSKEMERPWVRQPSAPEKHSRDCYKEEEHLTQSIVPPPKPERSHSLKLHHTQNVERDPSVLYQYQPHGKRQSSVTVVSQYDNLEDYHSLPQHQRGVFGGGGMGTYVPPGFPHPQSRTYATALGQGAFLPAELSLQHPETQIHAE

SEQ ID NO: 14065 - protein, 14 aa, Artificial Sequence
  Synthetic polypeptide
HCNKSFHFQKNRMK

SEQ ID NO: 14066 - protein, 25 aa, Artificial Sequence
  Synthetic polypeptide
CWKCSQEAEKSHDIVIRAFTFRRTE

SEQ ID NO: 14067 - protein, 887 aa, Artificial Sequence
  Synthetic polypeptide
ELSLSEEQNEVMKNGCESKELVYLVQIACQGKSWIVKRSYEDFRVLDKHLHLCIYDRRFSQLSELPRSDTLKDSPESVTQMLMAYLSRLSAIAGNKINCGPALTWMEIDNKGNHLLVHEESSINTPAVGAAHVIKRYTARAPDELTLEVGDIVSVIDMPPKVLSTWWRGKHGFQVGLFPGHCVELINQKVPQSVTNSVPKPVSKKHGKLITFLRTFMKSRPTKQKLKQRGILKERVFGCDLGEHLLNSGFEVPQVLQSCTAFIERYGIVDGIYRLSGVASNIQRLRHEFDSEHVPDLTKEPYVQDIHSVGSLCKLYFRELPNPLLTYQLYEKFSDAVSAATDEERLIKIHDVIQQLPPPHYRTLEFLMRHLSLLADYCSITNMHAKNLAIVWAPNLLRSKQIESACFSGTAAFMEVRIQSVVVEFILNHVDVLFSGRISMAMQEGAASLSRPKSLLVSSPSTKLLTLEEAQARTQAQVNSPIVTENKYIEVGEGPAALQGKFHTIIEFPLERKRPQNKMKKSPVGSWRSFFNLGKSSSVSKRKLQRNESEPSEMKAMALKGGRAEGTLRSAKSEESLTSLHAVDGDSKLFRPRRPRSSSDALSASFNGEMLGNRCNSYDNLPHDNESEEEGGLLHIPALMSPHSAEDVDLSPPDIGVASLDFDPMSFQCSPPKAESECLESGASFLDSPGYSKDKPSANKKDAETGSSQCQTPGSTASSEPVSPLQEKLSPFFTLDLSPTEDKSSKPSSFTEKVVYAFSPKIGRKLSKSPSMSISEPISVTLPPRVSEVIGTVSNTTAQNASSSTWDKCVEERDATNRSPTQIVKMKTNETVAQEAYESEVQPLDQVAAEEVELPGKEDQSVSSSQSKAVASGQTQTGTVCFPPFFL

SEQ ID NO: 14068 - protein, 71 aa, Artificial Sequence
  Synthetic polypeptide
ELSLSEEQNEVMKNGCESKELVYLVQIACQGKSWIVKRSYEDFRVLDKHLHLCIYDRRFSQLSELPRSDTL

SEQ ID NO: 14069 - protein, 131 aa, Artificial Sequence
  Synthetic polypeptide
GRARCLTPVIPALWEAEAGGSRGQGIETILANTALAANAGTGFAVAEPQIAMFCGKLNMHVNIQTGKWEPDPTGTKSCFETKEEVLQYCQEMYPELQITNVMEANQRVSIDNWCRRDKKQCKSRFVTPFKC

SEQ ID NO: 14070 - protein, 47 aa, Artificial Sequence
  Synthetic polypeptide
SQHFGRPRQADHEVRGSRPSWLTRLLQPMPEQDLLLLSLKSQCFVGS

SEQ ID NO: 14071 - protein, 14 aa, Artificial Sequence
  Synthetic polypeptide
HGSCSQCRNRICCC

SEQ ID NO: 14072 - protein, 171 aa, Artificial Sequence
  Synthetic polypeptide
GRARCLTPVIPALWEAEAGGSRGQGIETILANTALAANAGTGFAVAEPQIAMFCGKLNMHVNIQTGKWEPDPTGTKSCFETKEEVLQYCQEMYPELQITNVMEANQRVSIDNWCRRDKKQCKSRFVTPFKCLVGEFVSDVLLVPEKCQFFHKERMEVCENHQHWHTVVKEV

SEQ ID NO: 14073 - protein, 114 aa, Artificial Sequence
  Synthetic polypeptide
GRARCLTPVIPALWEAEAGGSRGQGIETILANTALAANAGTGFAVAEPQIAMFCGKLNMHVNIQTGKWEPDPTGTKSCFETKEEVLQYCQEMYPELQITNSGWRCVRITSTGTR

SEQ ID NO: 14074 - protein, 693 aa, Artificial Sequence
  Synthetic polypeptide
GRARCLTPVIPALWEAEAGGSRGQGIETILANTALAANAGTGFAVAEPQIAMFCGKLNMHVNIQTGKWEPDPTGTKSCFETKEEVLQYCQEMYPELQITNVMEANQRVSIDNWCRRDKKQCKSRFVTPFKCLVGEFVSDVLLVPEKCQFFHKERMEVCENHQHWHTVVKEACLTQGMTLYSYGMLLPCGVDQFHGTEYVCCPQTKIIGSVSKEEEEEDEEEEEEEDEEEDYDVYKSEFPTEADLEDFTEAAVDEDDEDEEEGEEVVEDRDYYYDTFKGDDYNEENPTEPGSDGTMSDKEITHDVKVPPTPLPTNDVDVYFETSADDNEHARFQKAKEQLEIRHRNRMDRVKKEWEEAELQAKNLPKAERQTLIQHFQAMVKALEKEAASEKQQLVETHLARVEAMLNDRRRMALENYLAALQSDPPRPHRILQALRRYVRAENKDRLHTIRHYQHVLAVDPEKAAQMKSQVMTHLHVIEERRNQSLSLLYKVPYVAQEIQEEIDELLQEQRADMDQFTASISETPVDVRVSSEESEEIPPFHPFHPFPALPENEGSGVGEQDGGLIGAEEKVINSKNKVDENMVIDETLDVKEMIFNAERVGGLEEERESVGPLREDFSLSSSALIGLLVIAVAIATVIVISLVMLRKRQYGTISHGIVEVDPMLTPEERHLNKMQNHGYENPTYKYLEQMQI

SEQ ID NO: 14075 - protein, 761 aa, Artificial Sequence
  Synthetic polypeptide
GRARCLTPVIPALWEAEAGGSRGQGIETILANTALAANAGTGFAVAEPQIAMFCGKLNMHVNIQTGKWEPDPTGTKSCFETKEEVLQYCQEMYPELQITNVMEANQRVSIDNWCRRDKKQCKSRFVTPFKCLVGEFVSDVLLVPEKCQFFHKERMEVCENHQHWHTVVKEACLTQGMTLYSYGMLLPCGVDQFHGTEYVCCPQTKIIGSVSKEEEEEDEEEEEEEDEEEDYDVYKSEFPTEADLEDFTEAAVDEDDEDEEEGEEVVEDRDYYYDTFKGDDYNEENPTEPGSDGTMSDKEITHDVKAVCSQEAMTGPCRAVMPRWYFDLSKGKCVRFIYGGCGGNRNNFESEDYCMAVCKAMIPPTPLPTNDVDVYFETSADDNEHARFQKAKEQLEIRHRNRMDRVKKEWEEAELQAKNLPKAERQTLIQHFQAMVKALEKEAASEKQQLVETHLARVEAMLNDRRRMALENYLAALQSDPPRPHRILQALRRYVRAENKDRLHTIRHYQHVLAVDPEKAAQMKSQVMTHLHVIEERRNQSLSLLYKVPYVAQEIQEEIDELLQEQRADMDQFTASISETPVDVRVSSEESEEIPPFHPFHPFPALPENEDTQPELYHPMKKGSGVGEQDGGLIGAEEKVINSKNKVDENMVIDETLDVKEMIFNAERVGGLEEERESVGPLREDFSLSSSALIGLLVIAVAIATVIVISLVMLRKRQYGTISHGIVEVDPMLTPEERHLNKMQNHGYENPTYKYLEQMQI

SEQ ID NO: 14076 - protein, 520 aa, Artificial Sequence
  Synthetic polypeptide
GRARCLTPVIPALWEAEAGGSRGQGIETILANTALAANAGTGFAVAEPQIAMFCGKLNMHVNIQTGKWEPDPTGTKSCFETKEEVLQYCQEMYPELQITNVMEANQRVSIDNWCRRDKKQCKSRFVTPFKCLVPPTPLPTNDVDVYFETSADDNEHARFQKAKEQLEIRHRNRMDRVKKEWEEAELQAKNLPKAERQTLIQHFQAMVKALEKEAASEKQQLVETHLARVEAMLNDRRRMALENYLAALQSDPPRPHRILQALRRYVRAENKDRLHTIRHYQHVLAVDPEKAAQMKSQVMTHLHVIEERRNQSLSLLYKVPYVAQEIQEEIDELLQEQRADMDQFTASISETPVDVRVSSEESEEIPPFHPFHPFPALPENEGSGVGEQDGGLIGAEEKVINSKNKVDENMVIDETLDVKEMIFNAERVGGLEEERESVGPLREDFSLSSSALIGLLVIAVAIATVIVISLVMLRKRQYGTISHGIVEVDPMLTPEERHLNKMQNHGYENPTYKYLEQMQI

SEQ ID NO: 14077 - protein, 749 aa, Artificial Sequence
  Synthetic polypeptide
GRARCLTPVIPALWEAEAGGSRGQGIETILANTALAANAGTGFAVAEPQIAMFCGKLNMHVNIQTGKWEPDPTGTKSCFETKEEVLQYCQEMYPELQITNVMEANQRVSIDNWCRRDKKQCKSRFVTPFKCLVGEFVSDVLLVPEKCQFFHKERMEVCENHQHWHTVVKEACLTQGMTLYSYGMLLPCGVDQFHGTEYVCCPQTKIIGSVSKEEEEEDEEEEEEEDEEEDYDVYKSEFPTEADLEDFTEAAVDEDDEDEEEGEEVVEDRDYYYDTFKGDDYNEENPTEPGSDGTMSDKEITHDVKAVCSQEAMTGPCRAVMPRWYFDLSKGKCVRFIYGGCGGNRNNFESEDYCMAVCKAMIPPTPLPTNDVDVYFETSADDNEHARFQKAKEQLEIRHRNRMDRVKKEWEEAELQAKNLPKAERQTLIQHFQAMVKALEKEAASEKQQLVETHLARVEAMLNDRRRMALENYLAALQSDPPRPHRILQALRRYVRAENKDRLHTIRHYQHVLAVDPEKAAQMKSQVMTHLHVIEERRNQSLSLLYKVPYVAQEIQEEIDELLQEQRADMDQFTASISETPVDVRVSSEESEEIPPFHPFHPFPALPENEGSGVGEQDGGLIGAEEKVINSKNKVDENMVIDETLDVKEMIFNAERVGGLEEERESVGPLREDFSLSSSALIGLLVIAVAIATVIVISLVMLRKRQYGTISHGIVEVDPMLTPEERHLNKMQNHGYENPTYKYLEQMQI

SEQ ID NO: 14078 - protein, 72 aa, Artificial Sequence
  Synthetic polypeptide
HSAQQPACEGALQILLPAGARRACGHLPQGLRGDQRGEILRREVPVRRHQQQQQDHSSLPLRSVLHRHRLLS

SEQ ID NO: 14079 - protein, 495 aa, Artificial Sequence
  Synthetic polypeptide
GQEFKTSLCNIVPNNQHVKVRFKFFYLLEPGVPAGTCPKDYVEINGEKYCGERSQFVVTSNSNKITVRFHSDQSYTDTGFLAEYLSYDSSDPCPGQFTCRTGRCIRKELRCDGWADCTDHSDELNCSCDAGHQFTCKNKFCKPLFWVCDSVNDCGDNSDEQGCSCPAQTFRCSNGKCLSKSQQCNGKDDCGDGSDEASCPKVNVVTCTKHTYRCLNGLCLSKGNPECDGKEDCSDGSDEKDCDCGLRSFTRQARVVGGTDADEGEWPWQVSLHALGQGHICGASLISPNWLVSAAHCYIDDRGFRYSDPTQWTAFLGLHDQSQRSAPGVQERRLKRIISHPFFNDFTFDYDIALLELEKPAEYSSMVRPICLPDASHVFPAGKAIWVTGWGHTQYGGTGALILQKGEIRVINQTTCENLLPQQITPRMMCVGFLSGGVDSCQGDSGGPLSSVEADGRIFQAGVVSWGDGCAQRNKPGVYTRLPLFRDWIKENTGV

SEQ ID NO: 14080 - protein, 24 aa, Artificial Sequence
  Synthetic polypeptide
REKERRRERKKGALLTTGSPGWPG

SEQ ID NO: 14081 - protein, 14 aa, Artificial Sequence
  Synthetic polypeptide
ERKKGGEKGRKVHY

SEQ ID NO: 14082 - protein, 299 aa, Artificial Sequence
  Synthetic polypeptide
RERKEERKEERCTIDNRVTRVAWLNRSTILYAGNDKWCLDPRVVLLSNTQTQYSIEIQNVDVYDEGPYTCSVQTDNHPKTSRVHLIVQVSPKIVEISSDISINEGNNISLTCIATGRPEPTVTWRHISPKAVGFVSEDEYLEIQGITREQSGDYECSASNDVAAPVVRRVKVTVNYPPYISEAKGTGVPVGQKGTLQCEASAVPSAEFQWYKDDKRLIEGKKGVKVENRPFLSKLIFFNVSEHDYGNYTCVASNKLGHTNASIMLFGPGAVSEVSNGTSRRAGCVWLLPLLVLHLLLKF

SEQ ID NO: 14083 - protein, 310 aa, Artificial Sequence
  Synthetic polypeptide
RERKEERKEERCTIDNRVTRVAWLNRSTILYAGNDKWCLDPRVVLLSNTQTQYSIEIQNVDVYDEGPYTCSVQTDNHPKTSRVHLIVQVSPKIVEISSDISINEGNNISLTCIATGRPEPTVTWRHISPKAVGFVSEDEYLEIQGITREQSGDYECSASNDVAAPVVRRVKVTVNYPPYISEAKGTGVPVGQKGTLQCEASAVPSAEFQWYKDDKRLIEGKKGVKVENRPFLSKLIFFNVSEHDYGNYTCVASNKLGHTNASIMLFEVKTTALTPWKGPGAVSEVSNGTSRRAGCVWLLPLLVLHLLLKF

SEQ ID NO: 14084 - protein, 155 aa, Artificial Sequence
  Synthetic polypeptide
RERKEERKEERCTIDNRVTRVAWLNRSTILYAGNDKWCLDPRVVLLSNTQTQYSIEIQNVDVYDEGPYTCSVQTDNHPKTSRVHLIVQVSPKIVEISSDISINEGNNISLTCIATGRPEPTVTWRHISPKAVGFVSEDEYLEIQGITREQSGDYE

SEQ ID NO: 14085 - protein, 271 aa, Artificial Sequence
  Synthetic polypeptide
RERKEERKEERCTIDNRVTRVAWLNRSTILYAGNDKWCLDPRVVLLSNTQTQYSIEIQNVDVYDEGPYTCSVQTDNHPKTSRVHLIVQVSPKIVEISSDISINEGNNISLTCIATGRPEPTVTWRHISPKAVGFVSEDEYLEIQGITREQSGDYECSASNDVAAPVVRRVKVTVNYPPYISEAKGTGVPVGQKGTLQCEASAVPSAEFQWYKDDKRLIEGKKGVKVENRPFLSKLIFFNVSEHDYGNYTCVASNKLGHTNASIMLFGETVL

SEQ ID NO: 14086 - protein, 49 aa, Artificial Sequence
  Synthetic polypeptide
ATQKTEVKTTALTPWKGPGAVSEVSNGTSRRAGCVWLLPLLVLHLLLKF

SEQ ID NO: 14087 - protein, 24 aa, Artificial Sequence
  Synthetic polypeptide
RSQDGRIGTAPVYSSQCERRKRQK

SEQ ID NO: 14088 - protein, 60 aa, Artificial Sequence
  Synthetic polypeptide
EQLQSTAPSVSDAKDRSENYSPDPLERSRRRQRGEQRHVEEGRLRLAAASSGLAPASQIL

SEQ ID NO: 14089 - protein, 53 aa, Artificial Sequence
  Synthetic polypeptide
GLPSYVELTGIMDLCSSMDVTLGDIGILGLRKHCTFLEFGFIQKTMRSSCLRR

SEQ ID NO: 14090 - protein, 99 aa, Artificial Sequence
  Synthetic polypeptide
WVYQGFPLLLLFHFLLLLACDKCLSPSAMILRPPQLCGTNWNYGFVFINGRNLGRYWNIGPQKTLYLPGVWLHPEDNEVILFEKMMSGSDIKSTDKPTL

SEQ ID NO: 14091 - protein, 15 aa, Artificial Sequence
  Synthetic polypeptide
DHTIALQPRITIKQE

SEQ ID NO: 14092 - protein, 13 aa, Artificial Sequence
  Synthetic polypeptide
AEITPLHSSLGLL

SEQ ID NO: 14093 - protein, 12 aa, Artificial Sequence
  Synthetic polypeptide
DHTIALQPRITI

SEQ ID NO: 14094 - protein, 11 aa, Artificial Sequence
  Synthetic polypeptide
PYHSFTEMLFS

SEQ ID NO: 14095 - protein, 63 aa, Artificial Sequence
  Synthetic polypeptide
RQHCNGRAMSFGITYISSNLDHIIHLLRCCSVKCDCNATAYSPCTTNEESGSVHACINSICLL

SEQ ID NO: 14096 - protein, 19 aa, Artificial Sequence
  Synthetic polypeptide
QHLQDDENNNSSSQSYGVS

SEQ ID NO: 14097 - protein, 147 aa, Artificial Sequence
  Synthetic polypeptide
ETFDNICRMMKTITRLHKAMVFLEYFTSNSWVWNTENVNMLMNQLNPEDKKTFNIDVRQLHWAEYIENYCLGTKKYVLNEEMSGLPAARKHLNKLRNIRYGFNTILVILIWRIFIARSQMARNIWYFVVSLCYKFLSYFRASSTMRY

SEQ ID NO: 14098 - protein, 8 aa, Artificial Sequence
  Synthetic polypeptide
RHLTTFAG

SEQ ID NO: 14099 - protein, 92 aa, Artificial Sequence
  Synthetic polypeptide
KDVLRQKGNDTKWKSENEYRVPEMVTQEEGQQLARQLKVTYMEASAKIRMNVDQAFHELVRVIRKFQEQECPPSPEPTRKEKDKKGCHCVIF

SEQ ID NO: 14100 - protein, 40 aa, Artificial Sequence
  Synthetic polypeptide
KRDNSSAADLHYKKCEKMSLGRREMIPNGNLKMNTEYQRW

SEQ ID NO: 14101 - protein, 19 aa, Artificial Sequence
  Synthetic polypeptide
IQSTRDGNTGRRTTVSTAA

SEQ ID NO: 14102 - protein, 73 aa, Artificial Sequence
  Synthetic polypeptide
KDVLRQKGNDTKWKSENEYRVPEMVTQEEGQQLARQLKVTYMEASAKIRMNVDQAFHELVRVIRKFQEQECPP

SEQ ID NO: 14103 - protein, 34 aa, Artificial Sequence
  Synthetic polypeptide
KDVLRQKGNDTKWKSENEYRVPEMVTQEEGQQLA

SEQ ID NO: 14104 - protein, 16 aa, Artificial Sequence
  Synthetic polypeptide
IQSTRDGNTGRRTTVS

SEQ ID NO: 14105 - protein, 31 aa, Artificial Sequence
  Synthetic polypeptide
SQHFGRLRWADHPRSGIQDQPGQHVLFCNGL

SEQ ID NO: 14106 - protein, 185 aa, Artificial Sequence
  Synthetic polypeptide
GGRITRDQEFKTSLANMSYFVTDYDPTIEDSYTKQCVIDDRAARLDILDTAGQEEFGAMREQYMRTGEGFLLVFSVTDRGSFEEIYKFQRQILRVKDRDEFPMILIGNKADLDHQRQVTQEEGQQLARQLKVTYMEASAKIRMNVDQAFHELVRVIRKFQEQECPPSPEPTRKEKDKKGCHCVIF

SEQ ID NO: 14107 - protein, 36 aa, Artificial Sequence
  Synthetic polypeptide
QAQWLVPVIPTLWEAEVGGSPEIRNSRPAWPTCPIL

SEQ ID NO: 14108 - protein, 166 aa, Artificial Sequence
  Synthetic polypeptide
GGRITRDQEFKTSLANMSYFVTDYDPTIEDSYTKQCVIDDRAARLDILDTAGQEEFGAMREQYMRTGEGFLLVFSVTDRGSFEEIYKFQRQILRVKDRDEFPMILIGNKADLDHQRQVTQEEGQQLARQLKVTYMEASAKIRMNVDQAFHELVRVIRKFQEQECPP

SEQ ID NO: 14109 - protein, 27 aa, Artificial Sequence
  Synthetic polypeptide
SQHFGRPRREDHEVRRSRPFWLTSPIL

SEQ ID NO: 14110 - protein, 8 aa, Artificial Sequence
  Synthetic polypeptide
QVLFCNGL

SEQ ID NO: 14111 - protein, 200 aa, Artificial Sequence
  Synthetic polypeptide
RARWLTPVIPALWEAKAGGSRGQEIETILANKSYFVTDYDPTIEDSYTKQCVIDDRAARLDILDTAGQEEFGAMREQYMRTGEGFLLVFSVTDRGSFEEIYKFQRQILRVKDRDEFPMILIGNKADLDHQRQVTQEEGQQLARQLKVTYMEASAKIRMNVDQAFHELVRVIRKFQEQECPPSPEPTRKEKDKKGCHCVIF

SEQ ID NO: 14112 - protein, 181 aa, Artificial Sequence
  Synthetic polypeptide
RARWLTPVIPALWEAKAGGSRGQEIETILANKSYFVTDYDPTIEDSYTKQCVIDDRAARLDILDTAGQEEFGAMREQYMRTGEGFLLVFSVTDRGSFEEIYKFQRQILRVKDRDEFPMILIGNKADLDHQRQVTQEEGQQLARQLKVTYMEASAKIRMNVDQAFHELVRVIRKFQEQECPP

SEQ ID NO: 14113 - protein, 181 aa, Artificial Sequence
  Synthetic polypeptide
SQHFGRPRREDHESYFVTDYDPTIEDSYTKQCVIDDRAARLDILDTAGQEEFGAMREQYMRTGEGFLLVFSVTDRGSFEEIYKFQRQILRVKDRDEFPMILIGNKADLDHQRQVTQEEGQQLARQLKVTYMEASAKIRMNVDQAFHELVRVIRKFQEQECPPSPEPTRKEKDKKGCHCVIF

SEQ ID NO: 14114 - protein, 25 aa, Artificial Sequence
  Synthetic polypeptide
PGTVAHACNPSTLGGQGGRITSPIL

SEQ ID NO: 14115 - protein, 28 aa, Artificial Sequence
  Synthetic polypeptide
RARWLTPVIPALWEAKAGGSRVLFCNGL

SEQ ID NO: 14116 - protein, 162 aa, Artificial Sequence
  Synthetic polypeptide
SQHFGRPRREDHESYFVTDYDPTIEDSYTKQCVIDDRAARLDILDTAGQEEFGAMREQYMRTGEGFLLVFSVTDRGSFEEIYKFQRQILRVKDRDEFPMILIGNKADLDHQRQVTQEEGQQLARQLKVTYMEASAKIRMNVDQAFHELVRVIRKFQEQECPP

SEQ ID NO: 14117 - protein, 534 aa, Artificial Sequence
  Synthetic polypeptide
GWVWWLTLVFPALWEAKAGELLDVRSWRPAWATWIYRGALWILGEYCSTKEDIQSVMTEIRRSLGEIPIVESEIKKEAGELKPEEEITVGPVQKLVTEMGTYATQSALSSSRPTKKEEDRPPLRGFLLDGDFFVAASLATTLTKIALRYVALVQEKKKQNSFVAEAMLLMATILHLGKSSLPKKPITDDDVDRISLCLKVLSECSPLMNDIFNKECRQSLSHMLSAKLEEEKLSQKKESEKRNVTVQPDDPISFMQLTAKNEMNCKEDQFQLSLLAAMGNTQRKEAADPLASKLNKVTQLTGFSDPVYAEAYVHVNQYDIVLDVLVVNQTSDTLQNCTLELATLGDLKLVEKPSPLTLAPHDFANIKANVKVASTENGIIFGNIVYDVSGAASDRNCVVLSDIHIDIMDYIQPATCTDAEFRQMWAEFEWENKVTVNTNMVDLNDYLQHILKSTNMKCLTPEKALSGYCGFMAANLYARSIFGEDALANVSIEKPIHQGPDAAVTGHIRIRAKSQGMALSLGDKINLSQKKTSI

SEQ ID NO: 14118 - protein, 55 aa, Artificial Sequence
  Synthetic polypeptide
AGYGGSHLYSQHFGRPRQENCWMSGVGDQPGQHGFTEEHYGSWENTVVPRKTFRV

SEQ ID NO: 14119 - protein, 46 aa, Artificial Sequence
  Synthetic polypeptide
MGMVAHTCIPSTLGGQGRRIAGCQELETSLGNMDLPRSIMDPGRIL

SEQ ID NO: 14120 - protein, 66 aa, Artificial Sequence
  Synthetic polypeptide
GWVWWLTLVFPALWEAKAGELLDVRSWRPAWATWIYRGALWILGEYCSTKEDIQSVMTEIRRSLGE

SEQ ID NO: 14121 - protein, 30 aa, Artificial Sequence
  Synthetic polypeptide
GWARWLTPVIPALWETKAGGSRECFHWNCW

SEQ ID NO: 14122 - protein, 68 aa, Artificial Sequence
  Synthetic polypeptide
SQHFGRPRQVDHENVSIGIVGKDLEFTIYDDDDVSPFLEGLEERPQRKAQPAQPADEPAEKADEPMEH

SEQ ID NO: 14123 - protein, 77 aa, Artificial Sequence
  Synthetic polypeptide
MGAVAHACNPSTLGDQGRWITRMFPLELLVKTWSLQSMMMMMCLHSWKVLKKDHRERHSLLNLLMNLQKRLMNQWNI

SEQ ID NO: 14124 - protein, 165 aa, Artificial Sequence
  Synthetic polypeptide
FQFRNQYDNDVTVWSPQGRIHQIEYAMEAVKQGSATVGLKSKTHAVLVALKRAQSELAAHQKKILHVDNHIGISIAGLTADARLLCNFMRQECLDSRFVFDRPLPVSRLVSLIGSSILFMIWALTFSKPVHLLTILTAEPCPLEPVPNQLVLTWRDICLNLWSVI

SEQ ID NO: 14125 - protein, 40 aa, Artificial Sequence
  Synthetic polypeptide
DNSSFEISMTMMSLFGAPRAGFIKLNMQWKLLNKVQPQLV

SEQ ID NO: 14126 - protein, 10 aa, Artificial Sequence
  Synthetic polypeptide
FEIIPVSKSV

SEQ ID NO: 14127 - protein, 264 aa, Artificial Sequence
  Synthetic polypeptide
FQFRNQYDNDVTVWSPQGRIHQIEYAMEAVKQGSATVGLKSKTHAVLVALKRAQSELAAHQKKILHVDNHIGISIAGLTADARLLCNFMRQECLDSRFVFDRPLPVSRLVSLIGSKTQIPTQRYGRRPYGVGLLIAGYDDMGPHIFQTCPSANYFDCRAMSIGARSQSARTYLERHMSEFMECNLNELVKHGLRALRETLPAEQDLTTKNVSIGIVGKDLEFTIYDDDDVSPFLEGLEERPQRKAQPAQPADEPAEKADEPMEH

SEQ ID NO: 14128 - protein, 7 aa, Artificial Sequence
  Synthetic polypeptide
FLHFHLR

SEQ ID NO: 14129 - protein, 818 aa, Artificial Sequence
  Synthetic polypeptide
GRSQDGRIGTAPVYSSQRERRRRQVISAFPSEMILWDWDLKQWYKPHYQNSGGGNGVDLSVLNEARNMVSDLLTDPSLPPQVISSLRSISSLMGAFSGSCRPKINPLTPFPGFYPCSEIEDPAEKGDRKLNKGLNRNSLPTPQLRRSSGTSGLLPVEQSSRWDRNNGKRPHQEFGISSQGCYLNGPFNSNLLTIPKQRSSSVSLTHHVGLRRAGVLSSLSPVNSSNHGPVSTGSLTNRSPIEFPDTADFLNKPSVILQRSLGNAPNTPDFYQQLRNSDSNLCNSCGHQMLKYVSTSESDGTDCCSGKSGEEENIFSKESFKLMETQQEEETEKKDSRKLFQEGDKWLTEEAQSEQQTNIEQEVSLDLILVEEYDSLIEKMSNWNFPIFELVEKMGEKSGRILSQVMYTLFQDTGLLEIFKIPTQQFMNYFRALENGYRDIPYHNRIHATDVLHAVWYLTTRPVPGLQQIHNGCGTGNETDSDGRINHGRIAYISSKSCSNPDESYGCLSSNIPALELMALYVAAAMHDYDHPGRTNAFLVATNAPQAVLYNDRSVLENHHAASAWNLYLSRPEYNFLLHLDHVEFKRFRFLVIEAILATDLKKHFDFLAEFNAKANDVNSNGIEWSNENDRLLVCQVCIKLADINGPAKVRDLHLKWTEGIVNEFYEQGDEEANLGLPISPFMDRSSPQLAKLQESFITHIVGPLCNSYDAAGLLPGQWLEAEEDNDTESGDDEDGEELDTEDEEMENNLNPKPPRRKSRRRIFCQLMHHLTENHKIWKEIVEEEEKCKADGNKLQVENSSLPQADEIQVIEEADEEE

SEQ ID NO: 14130 - protein, 767 aa, Artificial Sequence
  Synthetic polypeptide
GRSQDGRIGTAPVYSSQRERRRRQVISAFPSEMILWDWDLKQWYKPHYQNSGGGNGVDLSVLNEARNMVSDLLTDPSLPPQGLNRNSLPTPQLRRSSGTSGLLPVEQSSRWDRNNGKRPHQEFGISSQGCYLNGPFNSNLLTIPKQRSSSVSLTHHVGLRRAGVLSSLSPVNSSNHGPVSTGSLTNRSPIEFPDTADFLNKPSVILQRSLGNAPNTPDFYQQLRNSDSNLCNSCGHQMLKYVSTSESDGTDCCSGKSGEEENIFSKESFKLMETQQEEETEKKDSRKLFQEGDKWLTEEAQSEQQTNIEQEVSLDLILVEEYDSLIEKMSNWNFPIFELVEKMGEKSGRILSQVMYTLFQDTGLLEIFKIPTQQFMNYFRALENGYRDIPYHNRIHATDVLHAVWYLTTRPVPGLQQIHNGCGTGNETDSDGRINHGRIAYISSKSCSNPDESYGCLSSNIPALELMALYVAAAMHDYDHPGRTNAFLVATNAPQAVLYNDRSVLENHHAASAWNLYLSRPEYNFLLHLDHVEFKRFRFLVIEAILATDLKKHFDFLAEFNAKANDVNSNGIEWSNENDRLLVCQVCIKLADINGPAKVRDLHLKWTEGIVNEFYEQGDEEANLGLPISPFMDRSSPQLAKLQESFITHIVGPLCNSYDAAGLLPGQWLEAEEDNDTESGDDEDGEELDTEDEEMENNLNPKPPRRKSRRRIFCQLMHHLTENHKIWKEIVEEEEKCKADGNKLQVENSSLPQADEIQVIEEADEEE

SEQ ID NO: 14131 - protein, 64 aa, Artificial Sequence
  Synthetic polypeptide
WFYKGLPTLLSSHSSPSYHHVKMDMFAFPSAMIVNFLRPPQPCRTIPPAWKNYFQKIGRKKWKD

SEQ ID NO: 14132 - protein, 30 aa, Artificial Sequence
  Synthetic polypeptide
GLPSPAELFLLHGKTTFKRLEGKNGKTKYQ

SEQ ID NO: 14133 - protein, 701 aa, Artificial Sequence
  Synthetic polypeptide
GASHFTQFSFFSFLSPCEDGHVCFPFCHDCKFPEASPALQNYSSCMEKLLSKDWKEKMERLNTSELLGEIKGTPESLAEKERQLSTMITQLISLREQLLAAHDEQKKLAASQIEKQRQQMDLARQQQEQIARQQQQLLQQQHKINLLQQQIQVQGHMPPLMIPIFPHDQRTLAAAAAAQQGFLFPPGITYKPGDNYPVQFIPSTMAAAAASGLSPLQLQKGHVSHPQINQRLKGLSDRFGRNLDTFEHGGGHSYNHKQIEQLYAAQLASMQVSPGAKMPSTPQPPNTAGTVSPTGIKNEKRGTSPVTQVKDEAAAQPLNLSSRPKTAEPVKSPTSPTQNLFPASKTSPVNLPNKSSIPSPIGGSLGRGSSLDILSSLNSPALFGDQDTVMKAIQEARKMREQIQREQQQQQPHGVDGKLSSINNMGLNSCRNEKERTRFENLGPQLTGKSNEDGKLGPGVIDLTRPEDAEGGATVAEARVYRDARGRASSEPHIKRPMNAFMVWAKDERRKILQAFPDMHNSNISKILGSRWKSMSNQEKQPYYEEQARLSKIHLEKYPNYKYKPRPKRTCIVDGKKLRIGEYKQLMRSRRQEMRQFFTVGQQPQIPITTGTGVVYPGAITMATTTPSPQMTSDCSSTSASPEPSLPVIQSTYGMKTDGGSLAGNEMINGEDEMEMYDDYEDDPKSDYSSENEAPEAVSAN

SEQ ID NO: 14134 - protein, 721 aa, Artificial Sequence
  Synthetic polypeptide
GASHFTQFSFFSFLSPCEDGHVCFPFCHDCKFPEASPALQNYSSCMEKLLSKDWKEKMERLNTSELLGEIKGTPESLAEKERQLSTMITQLISLREQLLAAHDEQKKLAASQIEKQRQQMDLARQQQEQIARQQQQLLQQQHKINLLQQQIQVQGHMPPLMIPIFPHDQRTLAAAAAAQQGFLFPPGITYKPGDNYPVQFIPSTMAAAAASGLSPLQLQKGHVSHPQINQRLKGLSDRFGRNLDTFEHGGGHSYNHKQIEQLYAAQLASMQVSPGAKMPSTPQPPNTAGTVSPTGIKNEKRGTSPVTQVKDEAAAQPLNLSSRPKTAEPVKSPTSPTQNLFPASKTSPVNLPNKSSIPSPIGGSLGRGSSLDILSSLNSPALFGDQDTVMKAIQEARKMREQIQREQQQQQPHGVDGKLSSINNMGLNSCRNEKERTRFENLGPQLTGKSNEDGKLGPGVIDLTRPEDAEGSKAMNGSAAKLQQYYCWPTGGATVAEARVYRDARGRASSEPHIKRPMNAFMVWAKDERRKILQAFPDMHNSNISKILGSRWKSMSNQEKQPYYEEQARLSKIHLEKYPNYKYKPRPKRTCIVDGKKLRIGEYKQLMRSRRQEMRQFFTVGQQPQIPITTGTGVVYPGAITMATTTPSPQMTSDCSSTSASPEPSLPVIQSTYGMKTDGGSLAGNEMINGEDEMEMYDDYEDDPKSDYSSENEAPEAVSAN

SEQ ID NO: 14135 - protein, 694 aa, Artificial Sequence
  Synthetic polypeptide
GASHFTQFSFFSFLSPCEDGHVCFPFCHDCKFPEASPALQNYSSCMEKLLSKDWKEKMERLNTSELLGEIKGTPESLAEKERQLSTMITQLISLREQLLAAHDEQKKLAASQIEKQRQQMDLARQQQEQIARQQQQLLQQQHKINLLQQQIQVQGHMPPLMIPIFPHDQRTLAAAAAAQQGFLFPPGITYKPGDNYPVQFIPSTMAAAAASGLSPLQLQQLYAAQLASMQVSPGAKMPSTPQPPNTAGTVSPTGIKNEKRGTSPVTQVKDEAAAQPLNLSSRPKTAEPVKSPTSPTQNLFPASKTSPVNLPNKSSIPSPIGGSLGRGSSLGKWKSQHQEETYELDILSSLNSPALFGDQDTVMKAIQEARKMREQIQREQQQQQPHGVDGKLSSINNMGLNSCRNEKERTRFENLGPQLTGKSNEDGKLGPGVIDLTRPEDAEGSKAMNGSAAKLQQYYCWPTGGATVAEARVYRDARGRASSEPHIKRPMNAFMVWAKDERRKILQAFPDMHNSNISKILGSRWKSMSNQEKQPYYEEQARLSKIHLEKYPNYKYKPRPKRTCIVDGKKLRIGEYKQLMRSRRQEMRQFFTVGQQPQIPITTGTGVVYPGAITMATTTPSPQMTSDCSSTSASPEPSLPVIQSTYGMKTDGGSLAGNEMINGEDEMEMYDDYEDDPKSDYSSENEAPEAVSAN

SEQ ID NO: 14136 - protein, 55 aa, Artificial Sequence
  Synthetic polypeptide
WFYKGLPTLLSSHSSPSYHHVKMDMFAFPSAMIVNFLRPPQPCRTIPPAWKNYFQ

SEQ ID NO: 14137 - protein, 18 aa, Artificial Sequence
  Synthetic polypeptide
GLPSPAELFLLHGKTTFK

SEQ ID NO: 14138 - protein, 52 aa, Artificial Sequence
  Synthetic polypeptide
GASHFTQFSFFSFLSPCEDGHVCFPFCHDCKFPEASPALQNYSSCMEKLLSK

SEQ ID NO: 14139 - protein, 814 aa, Artificial Sequence
  Synthetic polypeptide
VFCNVSDPSKMRRMSSKQATSPFACAADGEDAMTQDLTSREKEEGSDQHVASHLPLHPIMHNKPHSEELPTLVSTIQQDADWDSVLSSQQRMESENNKLCSLYSFRNTSTSPHKPDEGSRDREIMTSVTFGTPERRKGSLADVVDTLKQKKLEEMTRTEQEDSSCMEKLLSKDWKEKMERLNTSELLGEIKGTPESLAEKERQLSTMITQLISLREQLLAAHDEQKKLAASQIEKQRQQMDLARQQQEQIARQQQQLLQQQHKINLLQQQIQVQGHMPPLMIPIFPHDQRTLAAAAAAQQGFLFPPGITYKPGDNYPVQFIPSTMAAAAASGLSPLQLQQLYAAQLASMQVSPGAKMPSTPQPPNTAGTVSPTGIKNEKRGTSPVTQVKDEAAAQPLNLSSRPKTAEPVKSPTSPTQNLFPASKTSPVNLPNKSSIPSPIGGSLGRGSSLGKWKSQHQEETYELDILSSLNSPALFGDQDTVMKAIQEARKMREQIQREQQQQQPHGVDGKLSSINNMGLNSCRNEKERTRFENLGPQLTGKSNEDGKLGPGVIDLTRPEDAEGSKAMNGSAAKLQQYYCWPTGGATVAEARVYRDARGRASSEPHIKRPMNAFMVWAKDERRKILQAFPDMHNSNISKILGSRWKSMSNQEKQPYYEEQARLSKIHLEKYPNYKYKPRPKRTCIVDGKKLRIGEYKQLMRSRRQEMRQFFTVGQQPQIPITTGTGVVYPGAITMATTTPSPQMTSDCSSTSASPEPSLPVIQSTYGMKTDGGSLAGNEMINGEDEMEMYDDYEDDPKSDYSSENEAPEAVSAN

SEQ ID NO: 14140 - protein, 20 aa, Artificial Sequence
  Synthetic polypeptide
SLQNEKNVFQASHLSICLCS

SEQ ID NO: 14141 - protein, 166 aa, Artificial Sequence
  Synthetic polypeptide
VYIMLGSSNWEAADLGNEERKQKFLRLMGAGKKEHTGRLVIGDHKSTSHFRTGEEDKKINEELESQYQQSMDSKLSGRYRRHCGLGFSEVEDHDGEGDVAGDDDDDDDDSPDPESPDDSESDSESEKEESAEELQAAEHPDEVEDPKNKKDAKSNYKMMFVKSSGS

SEQ ID NO: 14142 - protein, 33 aa, Artificial Sequence
  Synthetic polypeptide
ENKLKASIESTLCWDLAIGRQQTWVMKRENKSS

SEQ ID NO: 14143 - protein, 45 aa, Artificial Sequence
  Synthetic polypeptide
SRLHTPYENLMPDDLSLSPITPQMGLSSFRKTSSKLPLSLHYAGI

SEQ ID NO: 14144 - protein, 139 aa, Artificial Sequence
  Synthetic polypeptide
VYIMLGSSNWEAADLGNEERKQKFLRLMGAGKKEHTGRLVIGDHKSTSHFRTGEEDKKINEELESQYQQSMDSKLSGRYRRHCGLGFSERRSFAMLPRLVSKLLGSSDLSAFQSAGTTGVSHHVRPGHIFNRREQQHAH

SEQ ID NO: 14145 - protein, 69 aa, Artificial Sequence
  Synthetic polypeptide
VYIMLGSSNWEAADLGNEERKQKFLRLMGAGKGKKTRKLMKNWSLNISKVWTVNYQEDIGDIVDLASVR

SEQ ID NO: 14146 - protein, 54 aa, Artificial Sequence
  Synthetic polypeptide
LDGFLFSLLRSKSLLLNGKKTRKLMKNWSLNISKVWTVNYQEDIGDIVDLASVR

SEQ ID NO: 14147 - protein, 175 aa, Artificial Sequence
  Synthetic polypeptide
GYIMCTFAFNQHHSCRTIQVFKYISGKLNWSFCIDICRDGAAAMTGRLSVFTTQVKELASEWEEDKKINEELESQYQQSMDSKLSGRYRRHCGLGFSEVEDHDGEGDVAGDDDDDDDDSPDPESPDDSESDSESEKEESAEELQAAEHPDEVEDPKNKKDAKSNYKMMFVKSSGS

SEQ ID NO: 14148 - protein, 110 aa, Artificial Sequence
  Synthetic polypeptide
GYIMCTFAFNQHHSCRTIQVFKYISGKLNWSFCIDICRDGAAAMTGRLSVFTTQVKELASEWEEDKKINEELESQYQQSMDSKLSGRYRRHCGLGFSEVEDHDGEGDVAG

SEQ ID NO: 14149 - protein, 84 aa, Artificial Sequence
  Synthetic polypeptide
LDGFLFSLLRSKSLLLNGKKTRKLMKNWSLNISKVWTVNYQEDIGDIVDLASVRDGVLLCCPGWSQNSWVQAIFPPSKVLELQV

SEQ ID NO: 14150 - protein, 148 aa, Artificial Sequence
  Synthetic polypeptide
GYIMCTFAFNQHHSCRTIQVFKYISGKLNWSFCIDICRDGAAAMTGRLSVFTTQVKELASEWEEDKKINEELESQYQQSMDSKLSGRYRRHCGLGFSERRSFAMLPRLVSKLLGSSDLSAFQSAGTTGVSHHVRPGHIFNRREQQHAH

SEQ ID NO: 14151 - protein, 99 aa, Artificial Sequence
  Synthetic polypeptide
GYIMCTFAFNQHHSCRTIQVFKYISGKLNWSFCIDICRDGAAAMTGRLSVFTTQVKELASEWEEDKKINEELESQYQQSMDSKLSGRYRRHCGLGFSEV

SEQ ID NO: 14152 - protein, 1138 aa, Artificial Sequence
  Synthetic polypeptide
RLKFQISQTQLIISSPPWPAISPRLLFPDLSNGTTILPGTQDSSGMRLWKRRWFVLADYCLFYYKDSREEAVLGSIPLPSYVISPVAPEDRISRKYSFKAVHTGMRALIYNSSTAGSQAEQSGMRTYYFSADTQEDMNAWVRAMNQAAQVLSRSSLKRDMEKVERQAVPQANHTESCHECGRVGPGHTRDCPHRGHDDIVNFERQEQEGEQYRSQRDPLEGKRDRSKARSPYSPAEEDALFMDLPTGPRGQQAQPQRAEKNGMLPASYGPGEQNGTGGYQRAFPPRTNPEKHSQRKSNLAQVEHWARAQKGDSRSLPLDQTLPRQGPGQSLSFPENYQTLPKSTRHPSGGSSPPPRNLPSDYKYAQDRASHLKMSSEERRAHRDGTVWQLYEWQQRQQFRHGSPTAPICLGSPEFTDQGRSRSMLEVPRSISVPPSPSDIPPPGPPRVFPPRRPHTPAERVTVKPPDQRRSVDISLGDSPRRARGHAVKNSSHVDRRSMPSMGYMTHTVSAPSLHGKSADDTYLQLKKDLEYLDLKMTGRDLLKDRSLKPVKIAESDTDVKLSIFCEQDRVLQDLEDKIRALKENKDQLESVLEVLHRQMEQYRDQPQHLEKIAYQQKLLQEDLVHIRAELSRESTEMENAWNEYLKLENDVEQLKQTLQEQHRRAFFFQEKSQIQKDLWRIEDVTAGLSANKENFRILVESVKNPERKTVPLFPHPPVPSLSTSESKPPPQPSPPTSPVRTPLEVRLFPQLQTYVPYRPHPPQLRKVTSPLQSPTKAKPKVEDEAPPRPPLPELYSPEDQPPAVPPLPREATIIRHTSVRGLKRQSDERKRDRELGQCVNGDSRVELRSYVSEPELATLSGDMAQPSLGLVGPESRYQTLPGRGLSGSTSRLQQSSTIAPYVTLRRGLNAESSKATFPRPKSALERLYSGDHQRGKMSAEEQLERMKRHQKALVRERKRTLGQGERTGLPSSRYLSRPLPGDLGSWKREQDFDLQLLERVVQGEKKDKEENGWLKVQAMPVTELDLEPQDYDLDISRELSKPEKVSIPERYVELDPEEPPSLEELQARYRKAEKIRNILARSSMCNLQPTSGQDQNSVADLDLQLQEQERIINISYALASEASQRSKQVAAQAVTDP

SEQ ID NO: 14153 - protein, 50 aa, Artificial Sequence
  Synthetic polypeptide
AYPPNVSNSKSAKLSSLSPHHLGLPFPQDCFFRILVMVPPFSQALRTVLG

SEQ ID NO: 14154 - protein, 25 aa, Artificial Sequence
  Synthetic polypeptide
WYHHSPRHSGQFWDEAVEKEVVCAC

SEQ ID NO: 14155 - protein, 988 aa, Artificial Sequence
  Synthetic polypeptide
RLKFQISQTQLIISSPPWPAISPRLLFPDLSNGTTILPGTQDSSGMRLWKRRWFVLADYCLFYYKDSREEAVLGSIPLPSYVISPVAPEDRISRKYSFKAVHTGMRALIYNSSTAGSQAEQSGMRTYYFSADTQEDMNAWVRAMNQAAQVLSRSSLKRDMEKVERQAVPQANHTESCHECGRVGPGHTRDCPHRGHDDIVNFERQEQEGEQYRSQRDPLEGKRDRSKARSPYSPAEEDALFMDLPTGPRGQQAQPQRAEKNGMLPASYGPGEQNGTGGYQRAFPPRTNPEKHSQRKSNLAQVEHWARAQKGDSRSLPLDQTLPRQGPGQSLSFPENYQTLPKSTRHPSGGSSPPPRNLPSDYKYAQDRASHLKMSSEERRAHRDGTVWQLYEWQQRQQFRHGSPTAPICLGSPEFTDQGRSRSMLEVPRSISVPPSPSDIPPPGPPRVFPPRRPHTPAERVTVKPPDQRRSVDISLGDSPRRARGHAVKNSSHVDRRSMPSMGYMTHTVSAPSLHGKSADDTYLQLKKDLEYLDLKMTGRDLLKDRSLKPVKIAESDTDVKLSIFCEQDRVLQDLEDKIRALKENKDQLESVLEVLHRQMEQYRDQPQHLEKIAYQQKLLQEDLVHIRAELSRESTEMENAWNEYLKLENDVEQLKQTLQEQHRRAFFFQEKSQIQKDLWRIEDVTAGLSANKENFRILVESVKNPERKTVPLFPHPPVPSLSTSESKPPPQPSPPTSPVRTPLEVRLFPQLQTYVPYRPHPPQLRKVTSPLQSPTKAKPKVEDEAPPRPPLPELYSPEDQPPAVPPLPREATIIRHTSVRGLKRQSDERKRDRELGQCVNGDSRVELRSYVSEPELATLSGDMAQPSLGLVGPESRYQTLPGRGLSGSTSRLQQSSTIAPYVTLRRGLNAESSKATFPRPKSALERLYSGDHQRGKMSAEEQLERMKRHQKALVRERKRTLGQGERTGLPSSRYLSRPLPGDLGSVC

SEQ ID NO: 14156 - protein, 989 aa, Artificial Sequence
  Synthetic polypeptide
RLKFQISQTQLIISSPPWPAISPRLLFPDLSNGTTILPGTQDSSGMRLWKRRWFVLADYCLFYYKDSREEAVLGSIPLPSYVISPVAPEDRISRKYSFKAVHTGMRALIYNSSTAGSQAEQSGMRTYYFSADTQEDMNAWVRAMNQAAQVLSRSSLKRDMEKVERQAVPQANHTESCHECGRVGPGHTRDCPHRGHDDIVNFERQEQEGEQYRSQRDPLEGKRDRSKARSPYSPAEEDALFMDLPTGPRGQQAQPQRAEKNGMLPASYGPGEQNGTGGYQRAFPPRTNPEKHSQRKSNLAQVEHWARAQKGDSRSLPLDQTLPRQGPGQSLSFPENYQTLPKSTRHPSGGSSPPPRNLPSDYKYAQDRASHLKMSSEERRAHRDGTVWQLYEWQQRQQFRHGSPTAPICLGSPEFTDQGRSRSMLEVPRSISVPPSPSDIPPPGPPRVFPPRRPHTPAERVTVKPPDQRRSVDISLGDSPRRARGHAVKNSSHVDRRSMPSMGYMTHTVSAPSLHGKSADDTYLQLKKDLEYLDLKMTGRDLLKDRSLKPVKIAESDTDVKLSIFCEQDRVLQDLEDKIRALKENKDQLESVLEVLHRQMEQYRDQPQHLEKIAYQQKLLQEDLVHIRAELSRESTEMENAWNEYLKLENDVEQLKQTLQEQHRRAFFFQEKSQIQKDLWRIEDVTAGLSANKENFRILVESVKNPERKTVPLFPHPPVPSLSTSESKPPPQPSPPTSPVRTPLEVRLFPQLQTYVPYRPHPPQLRKVTSPLQSPTKAKPKVQEDEAPPRPPLPELYSPEDQPPAVPPLPREATIIRHTSVRGLKRQSDERKRDRELGQCVNGDSRVELRSYVSEPELATLSGDMAQPSLGLVGPESRYQTLPGRGLSGSTSRLQQSSTIAPYVTLRRGLNAESSKATFPRPKSALERLYSGDHQRGKMSAEEQLERMKRHQKALVRERKRTLGQGERTGLPSSRYLSRPLPGDLGSVC

SEQ ID NO: 14157 - protein, 96 aa, Artificial Sequence
  Synthetic polypeptide
RLKFQISQTQLIISSPPWPAISPRLLFPDLSNGTTILPGTQDSSGMRLWKRRWFVLADYCLFYYKDSREEAVLGSIPLPSYVISPVAPEDRISRKY

SEQ ID NO: 14158 - protein, 1199 aa, Artificial Sequence
  Synthetic polypeptide
MSHNQQTTAFRHPVTGQFSPENSEFILQEEPNPHMSKQDRNQRPSSMVSETSTAGTASTLEAKPGPKIIKSSSKVHSFGKRDQAIRRNPNVPVVVRGWLHKQDSSGMRLWKRRWFVLADYCLFYYKDSREEAVLGSIPLPSYVISPVAPEDRISRKYSFKAVHTGMRALIYNSSTAGSQAEQSGMRTYYFSADTQEDMNAWVRAMNQAAQVLSRSSLKRDMEKVERQAVPQANHTESCHECGRVGPGHTRDCPHRGHDDIVNFERQEQEGEQYRSQRDPLEGKRDRSKARSPYSPAEEDALFMDLPTGPRGQQAQPQRAEKNGMLPASYGPGEQNGTGGYQRAFPPRTNPEKHSQRKSNLAQVEHWARAQKGDSRSLPLDQTLPRQGPGQSLSFPENYQTLPKSTRHPSGGSSPPPRNLPSDYKYAQDRASHLKMSSEERRAHRDGTVWQLYEWQQRQQFRHGSPTAPICLGSPEFTDQGRSRSMLEVPRSISVPPSPSDIPPPGPPRVFPPRRPHTPAERVTVKPPDQRRSVDISLGDSPRRARGHAVKNSSHVDRRSMPSMGYMTHTVSAPSLHGKSADDTYLQLKKDLEYLDLKMTGRDLLKDRSLKPVKIAESDTDVKLSIFCEQDRVLQDLEDKIRALKENKDQLESVLEVLHRQMEQYRDQPQHLEKIAYQQKLLQEDLVHIRAELSRESTEMENAWNEYLKLENDVEQLKQTLQEQHRRAFFFQEKSQIQKDLWRIEDVTAGLSANKENFRILVESVKNPERKTVPLFPHPPVPSLSTSESKPPPQPSPPTSPVRTPLEVRLFPQLQTYVPYRPHPPQLRKVTSPLQSPTKAKPKVEDEAPPRPPLPELYSPEDQPPAVPPLPREATIIRHTSVRGLKRQSDERKRDRELGQCVNGDSRVELRSYVSEPELATLSGDMAQPSLGLVGPESRYQTLPGRGLSGSTSRLQQSSTIAPYVTLRRGLNAESSKATFPRPKSALERLYSGDHQRGKMSAEEQLERMKRHQKALVRERKRTLGQGERTGLPSSRYLSRPLPGDLGSWKREQDFDLQLLERVVQGEKKDKEENGWLKVQAMPVTELDLEPQDYDLDISRELSKPEKVSIPERYVELDPEEPPSLEELQARYRKAEKIRNILARSSMCNLQPTSGQDQNSVADLDLQLQEQERIINISYALASEASQRSKQVAAQAVTDP

SEQ ID NO: 14159 - protein, 37 aa, Artificial Sequence
  Synthetic polypeptide
GNLVLIYGSVITVTSINFLTFPGLSFLIYATKRLDEP

SEQ ID NO: 14160 - protein, 1049 aa, Artificial Sequence
  Synthetic polypeptide
MSHNQQTTAFRHPVTGQFSPENSEFILQEEPNPHMSKQDRNQRPSSMVSETSTAGTASTLEAKPGPKIIKSSSKVHSFGKRDQAIRRNPNVPVVVRGWLHKQDSSGMRLWKRRWFVLADYCLFYYKDSREEAVLGSIPLPSYVISPVAPEDRISRKYSFKAVHTGMRALIYNSSTAGSQAEQSGMRTYYFSADTQEDMNAWVRAMNQAAQVLSRSSLKRDMEKVERQAVPQANHTESCHECGRVGPGHTRDCPHRGHDDIVNFERQEQEGEQYRSQRDPLEGKRDRSKARSPYSPAEEDALFMDLPTGPRGQQAQPQRAEKNGMLPASYGPGEQNGTGGYQRAFPPRTNPEKHSQRKSNLAQVEHWARAQKGDSRSLPLDQTLPRQGPGQSLSFPENYQTLPKSTRHPSGGSSPPPRNLPSDYKYAQDRASHLKMSSEERRAHRDGTVWQLYEWQQRQQFRHGSPTAPICLGSPEFTDQGRSRSMLEVPRSISVPPSPSDIPPPGPPRVFPPRRPHTPAERVTVKPPDQRRSVDISLGDSPRRARGHAVKNSSHVDRRSMPSMGYMTHTVSAPSLHGKSADDTYLQLKKDLEYLDLKMTGRDLLKDRSLKPVKIAESDTDVKLSIFCEQDRVLQDLEDKIRALKENKDQLESVLEVLHRQMEQYRDQPQHLEKIAYQQKLLQEDLVHIRAELSRESTEMENAWNEYLKLENDVEQLKQTLQEQHRRAFFFQEKSQIQKDLWRIEDVTAGLSANKENFRILVESVKNPERKTVPLFPHPPVPSLSTSESKPPPQPSPPTSPVRTPLEVRLFPQLQTYVPYRPHPPQLRKVTSPLQSPTKAKPKVEDEAPPRPPLPELYSPEDQPPAVPPLPREATIIRHTSVRGLKRQSDERKRDRELGQCVNGDSRVELRSYVSEPELATLSGDMAQPSLGLVGPESRYQTLPGRGLSGSTSRLQQSSTIAPYVTLRRGLNAESSKATFPRPKSALERLYSGDHQRGKMSAEEQLERMKRHQKALVRERKRTLGQGERTGLPSSRYLSRPLPGDLGSVC

SEQ ID NO: 14161 - protein, 1050 aa, Artificial Sequence
  Synthetic polypeptide
MSHNQQTTAFRHPVTGQFSPENSEFILQEEPNPHMSKQDRNQRPSSMVSETSTAGTASTLEAKPGPKIIKSSSKVHSFGKRDQAIRRNPNVPVVVRGWLHKQDSSGMRLWKRRWFVLADYCLFYYKDSREEAVLGSIPLPSYVISPVAPEDRISRKYSFKAVHTGMRALIYNSSTAGSQAEQSGMRTYYFSADTQEDMNAWVRAMNQAAQVLSRSSLKRDMEKVERQAVPQANHTESCHECGRVGPGHTRDCPHRGHDDIVNFERQEQEGEQYRSQRDPLEGKRDRSKARSPYSPAEEDALFMDLPTGPRGQQAQPQRAEKNGMLPASYGPGEQNGTGGYQRAFPPRTNPEKHSQRKSNLAQVEHWARAQKGDSRSLPLDQTLPRQGPGQSLSFPENYQTLPKSTRHPSGGSSPPPRNLPSDYKYAQDRASHLKMSSEERRAHRDGTVWQLYEWQQRQQFRHGSPTAPICLGSPEFTDQGRSRSMLEVPRSISVPPSPSDIPPPGPPRVFPPRRPHTPAERVTVKPPDQRRSVDISLGDSPRRARGHAVKNSSHVDRRSMPSMGYMTHTVSAPSLHGKSADDTYLQLKKDLEYLDLKMTGRDLLKDRSLKPVKIAESDTDVKLSIFCEQDRVLQDLEDKIRALKENKDQLESVLEVLHRQMEQYRDQPQHLEKIAYQQKLLQEDLVHIRAELSRESTEMENAWNEYLKLENDVEQLKQTLQEQHRRAFFFQEKSQIQKDLWRIEDVTAGLSANKENFRILVESVKNPERKTVPLFPHPPVPSLSTSESKPPPQPSPPTSPVRTPLEVRLFPQLQTYVPYRPHPPQLRKVTSPLQSPTKAKPKVQEDEAPPRPPLPELYSPEDQPPAVPPLPREATIIRHTSVRGLKRQSDERKRDRELGQCVNGDSRVELRSYVSEPELATLSGDMAQPSLGLVGPESRYQTLPGRGLSGSTSRLQQSSTIAPYVTLRRGLNAESSKATFPRPKSALERLYSGDHQRGKMSAEEQLERMKRHQKALVRERKRTLGQGERTGLPSSRYLSRPLPGDLGSVC

SEQ ID NO: 14162 - protein, 53 aa, Artificial Sequence
  Synthetic polypeptide
RRGSGSYASTGFAFPLRRESVLQRVSLCLLSSGRPDTAFDPLPQCRTASRHSP

SEQ ID NO: 14163 - protein, 1219 aa, Artificial Sequence
  Synthetic polypeptide
APGGQTLPLTPCPSAGQQVGTRHNQQTTAFRHPVTGQFSPENSEFILQEEPNPHMSKQDRNQRPSSMVSETSTAGTASTLEAKPGPKIIKSSSKVHSFGKRDQAIRRNPNVPVVVRGWLHKQDSSGMRLWKRRWFVLADYCLFYYKDSREEAVLGSIPLPSYVISPVAPEDRISRKYSFKAVHTGMRALIYNSSTAGSQAEQSGMRTYYFSADTQEDMNAWVRAMNQAAQVLSRSSLKRDMEKVERQAVPQANHTESCHECGRVGPGHTRDCPHRGHDDIVNFERQEQEGEQYRSQRDPLEGKRDRSKARSPYSPAEEDALFMDLPTGPRGQQAQPQRAEKNGMLPASYGPGEQNGTGGYQRAFPPRTNPEKHSQRKSNLAQVEHWARAQKGDSRSLPLDQTLPRQGPGQSLSFPENYQTLPKSTRHPSGGSSPPPRNLPSDYKYAQDRASHLKMSSEERRAHRDGTVWQLYEWQQRQQFRHGSPTAPICLGSPEFTDQGRSRSMLEVPRSISVPPSPSDIPPPGPPRVFPPRRPHTPAERVTVKPPDQRRSVDISLGDSPRRARGHAVKNSSHVDRRSMPSMGYMTHTVSAPSLHGKSADDTYLQLKKDLEYLDLKMTGRDLLKDRSLKPVKIAESDTDVKLSIFCEQDRVLQDLEDKIRALKENKDQLESVLEVLHRQMEQYRDQPQHLEKIAYQQKLLQEDLVHIRAELSRESTEMENAWNEYLKLENDVEQLKQTLQEQHRRAFFFQEKSQIQKDLWRIEDVTAGLSANKENFRILVESVKNPERKTVPLFPHPPVPSLSTSESKPPPQPSPPTSPVRTPLEVRLFPQLQTYVPYRPHPPQLRKVTSPLQSPTKAKPKVEDEAPPRPPLPELYSPEDQPPAVPPLPREATIIRHTSVRGLKRQSDERKRDRELGQCVNGDSRVELRSYVSEPELATLSGDMAQPSLGLVGPESRYQTLPGRGLSGSTSRLQQSSTIAPYVTLRRGLNAESSKATFPRPKSALERLYSGDHQRGKMSAEEQLERMKRHQKALVRERKRTLGQGERTGLPSSRYLSRPLPGDLGSWKREQDFDLQLLERVVQGEKKDKEENGWLKVQAMPVTELDLEPQDYDLDISRELSKPEKVSIPERYVELDPEEPPSLEELQARYRKAEKIRNILARSSMCNLQPTSGQDQNSVADLDLQLQEQERIINISYALASEASQRSKQVAAQAVTDP

SEQ ID NO: 14164 - protein, 14 aa, Artificial Sequence
  Synthetic polypeptide
ALAITSRPQHSGIL

SEQ ID NO: 14165 - protein, 1069 aa, Artificial Sequence
  Synthetic polypeptide
APGGQTLPLTPCPSAGQQVGTRHNQQTTAFRHPVTGQFSPENSEFILQEEPNPHMSKQDRNQRPSSMVSETSTAGTASTLEAKPGPKIIKSSSKVHSFGKRDQAIRRNPNVPVVVRGWLHKQDSSGMRLWKRRWFVLADYCLFYYKDSREEAVLGSIPLPSYVISPVAPEDRISRKYSFKAVHTGMRALIYNSSTAGSQAEQSGMRTYYFSADTQEDMNAWVRAMNQAAQVLSRSSLKRDMEKVERQAVPQANHTESCHECGRVGPGHTRDCPHRGHDDIVNFERQEQEGEQYRSQRDPLEGKRDRSKARSPYSPAEEDALFMDLPTGPRGQQAQPQRAEKNGMLPASYGPGEQNGTGGYQRAFPPRTNPEKHSQRKSNLAQVEHWARAQKGDSRSLPLDQTLPRQGPGQSLSFPENYQTLPKSTRHPSGGSSPPPRNLPSDYKYAQDRASHLKMSSEERRAHRDGTVWQLYEWQQRQQFRHGSPTAPICLGSPEFTDQGRSRSMLEVPRSISVPPSPSDIPPPGPPRVFPPRRPHTPAERVTVKPPDQRRSVDISLGDSPRRARGHAVKNSSHVDRRSMPSMGYMTHTVSAPSLHGKSADDTYLQLKKDLEYLDLKMTGRDLLKDRSLKPVKIAESDTDVKLSIFCEQDRVLQDLEDKIRALKENKDQLESVLEVLHRQMEQYRDQPQHLEKIAYQQKLLQEDLVHIRAELSRESTEMENAWNEYLKLENDVEQLKQTLQEQHRRAFFFQEKSQIQKDLWRIEDVTAGLSANKENFRILVESVKNPERKTVPLFPHPPVPSLSTSESKPPPQPSPPTSPVRTPLEVRLFPQLQTYVPYRPHPPQLRKVTSPLQSPTKAKPKVEDEAPPRPPLPELYSPEDQPPAVPPLPREATIIRHTSVRGLKRQSDERKRDRELGQCVNGDSRVELRSYVSEPELATLSGDMAQPSLGLVGPESRYQTLPGRGLSGSTSRLQQSSTIAPYVTLRRGLNAESSKATFPRPKSALERLYSGDHQRGKMSAEEQLERMKRHQKALVRERKRTLGQGERTGLPSSRYLSRPLPGDLGSVC

SEQ ID NO: 14166 - protein, 1070 aa, Artificial Sequence
  Synthetic polypeptide
APGGQTLPLTPCPSAGQQVGTRHNQQTTAFRHPVTGQFSPENSEFILQEEPNPHMSKQDRNQRPSSMVSETSTAGTASTLEAKPGPKIIKSSSKVHSFGKRDQAIRRNPNVPVVVRGWLHKQDSSGMRLWKRRWFVLADYCLFYYKDSREEAVLGSIPLPSYVISPVAPEDRISRKYSFKAVHTGMRALIYNSSTAGSQAEQSGMRTYYFSADTQEDMNAWVRAMNQAAQVLSRSSLKRDMEKVERQAVPQANHTESCHECGRVGPGHTRDCPHRGHDDIVNFERQEQEGEQYRSQRDPLEGKRDRSKARSPYSPAEEDALFMDLPTGPRGQQAQPQRAEKNGMLPASYGPGEQNGTGGYQRAFPPRTNPEKHSQRKSNLAQVEHWARAQKGDSRSLPLDQTLPRQGPGQSLSFPENYQTLPKSTRHPSGGSSPPPRNLPSDYKYAQDRASHLKMSSEERRAHRDGTVWQLYEWQQRQQFRHGSPTAPICLGSPEFTDQGRSRSMLEVPRSISVPPSPSDIPPPGPPRVFPPRRPHTPAERVTVKPPDQRRSVDISLGDSPRRARGHAVKNSSHVDRRSMPSMGYMTHTVSAPSLHGKSADDTYLQLKKDLEYLDLKMTGRDLLKDRSLKPVKIAESDTDVKLSIFCEQDRVLQDLEDKIRALKENKDQLESVLEVLHRQMEQYRDQPQHLEKIAYQQKLLQEDLVHIRAELSRESTEMENAWNEYLKLENDVEQLKQTLQEQHRRAFFFQEKSQIQKDLWRIEDVTAGLSANKENFRILVESVKNPERKTVPLFPHPPVPSLSTSESKPPPQPSPPTSPVRTPLEVRLFPQLQTYVPYRPHPPQLRKVTSPLQSPTKAKPKVQEDEAPPRPPLPELYSPEDQPPAVPPLPREATIIRHTSVRGLKRQSDERKRDRELGQCVNGDSRVELRSYVSEPELATLSGDMAQPSLGLVGPESRYQTLPGRGLSGSTSRLQQSSTIAPYVTLRRGLNAESSKATFPRPKSALERLYSGDHQRGKMSAEEQLERMKRHQKALVRERKRTLGQGERTGLPSSRYLSRPLPGDLGSVC

SEQ ID NO: 14167 - protein, 16 aa, Artificial Sequence
  Synthetic polypeptide
KNIELGAKTHLFTILI

SEQ ID NO: 14168 - protein, 56 aa, Artificial Sequence
  Synthetic polypeptide
ARSQDPSLHYFDLDMLIKAATSDLEHYDKTRHEEFKKYEMMKEHERREYLKTLNEE

SEQ ID NO: 14169 - protein, 196 aa, Artificial Sequence
  Synthetic polypeptide
ARSQDPSLHYFDLDMLIKAATSDLEHYDKTRHEEFKKYEMMKEHERREYLKTLNEEKRKEEESKFEEMKKKHENHPKVNHPGSKDQLKEVWEETDGLDPNDFDPKTFFKLHDVNSDGFLDEQELEALFTKELEKVYDPKNEEDDMVEMEEERLRMREHVMSEVDTNKDRLVTLEEFLKATEKKEFLEPDSWESPSI

SEQ ID NO: 14170 - protein, 278 aa, Artificial Sequence
  Synthetic polypeptide
ARSQDPSLHYFDLDMLIKAATSDLEHYDKTRHEEFKKYEMMKEHERREYLKTLNEEKRKEEESKFEEMKKKHENHPKVNHPGSKDQLKEVWEETDGLDPNDFDPKTFFKLHDVNSDGFLDEQELEALFTKELEKVYDPKNEEDDMVEMEEERLRMREHVMSEVDTNKDRLVTLEEFLKATEKKEFLEPDSWETLDQQQFFTEEELKEYENIIALQENELKKKADELQKQKEELQRQHDQLEAQKLEYHQVIQQMEQKKLQQGIPPSGPAGELKFEPRV

SEQ ID NO: 14171 - protein, 278 aa, Artificial Sequence
  Synthetic polypeptide
ARSQDPSLHYFDLDMLIKAATSDLEHYDKTRHEEFKKYEMMKEHERREYLKTLNEEKRKEEESKFEEMKKKHENHPKVNHPGSKDQLKEVWEETDGLDPNDFDPKTFFKLHDVNSDGFLDEQELEALFTKELEKVYDPKNEEDDMVEMEEERLRMREHVMSEVDTNKDRLVTLEEFLKATEKKEFLEPDSWETLDQQQFFTEEELKEYENIIALQENELKKKADELQKQKEELQRQHDQLEAQKLEYHQVIQQMEQKKLQQGIPPSGPAGELKFEPHI

SEQ ID NO: 14172 - protein, 53 aa, Artificial Sequence
  Synthetic polypeptide
ARSQDPSLHYFDLDMLIKAATSDLEHYDKTRHEEFKKYEMMKEHERREYLKTL

SEQ ID NO: 14173 - protein, 248 aa, Artificial Sequence
  Synthetic polypeptide
ARSQDPSLHYFDLDMLIKAATSDLEHYDKTRHEEFKKYEMMKEHERREYLKTLNEEKRKEEESKFEEMKKKHENHPKVNHPGSKDQLKEVWEETDGLDPNDFDPKTFFKLHDVNSDGFLDEQELEALFTKELEKVYDPKNEEDDMVEMEEERLRMREHVMSETLDQQQFFTEEELKEYENIIALQENELKKKADELQKQKEELQRQHDQLEAQKLEYHQVIQQMEQKKLQQGIPPSGPAGELKFEPHI

SEQ ID NO: 14174 - protein, 12 aa, Artificial Sequence
  Synthetic polypeptide
GLPNHMELISAR

SEQ ID NO: 14175 - protein, 70 aa, Artificial Sequence
  Synthetic polypeptide
ISLTRSDGFKKGSFSAQALSLPATISVRCDLLLLVFCHDCEASPTTWNLSLQGKYYYPSFADVEMELQRN

SEQ ID NO: 14176 - protein, 43 aa, Artificial Sequence
  Synthetic polypeptide
DVTCFSLSSATIVRPPQPHGTYLCKVSIIIPVLLMWKWSCREI

SEQ ID NO: 14177 - protein, 33 aa, Artificial Sequence
  Synthetic polypeptide
NPVSTKNTKISWAWWKVQFLKSPVVYMMMIMLL

SEQ ID NO: 14178 - protein, 52 aa, Artificial Sequence
  Synthetic polypeptide
SQHFGRPRRMDYLRSGVGDQPGQHGETPSPLKTQKLAGRGGRCNFSSRLLFT

SEQ ID NO: 14179 - protein, 1060 aa, Artificial Sequence
  Synthetic polypeptide
LGVVEGAISQVACCLHDDDYVAVATSQGLVVVWELNQERRGKPEQMYVSSEHKGRRVTALCWDTAILRVFVGDHAGKVSAIKLNTSKQAKAAAAFVMFPVQTITTVDSCVVQLDYLDGRLLISSLTRSFLCDTEREKFWKIGNKERDGEYGACFFPGRCSGGQQPLIYCARPGSRMWEVNFDGEVISTHQFKKLLSLPPLPVITLRSEPQYDHTAGSSQSLSFPKLLHLSEHCVLTWTERGIYIFIPQNVQVLLWSEVKDIQDVAVCRNELFCLHLNGKVSHLSLISVERCVERLLRRGLWNLAARTCCLFQNSVIASRARKTLTADKLEHLKSQLDHGTYNDLISQLEELILKFEPLDSACSSRRSSISSHESFSILDSGIYRIISSRRGSQSDEDSCSLHSQTLSEDERFKEFTSQQEEDLPDQCCGSHGNEDNVSHAPVMFETDKNETFLPFGIPLPFRSPSPLVSLQAVKESVSSFVRKTTEKIGTLHTSPDLKVRPELRGDEQSCEEDVSSDTCPKEEDTEEEKEVTSPPPEEDRFQELKVATAEAMTKLQDPLVLFESESLRMVLQEWLSHLEKTFAMKDFSGVSDTDNSSMKLNQDVLLVNESKKGILDEDNEKEKRDSLGNEESVDKTACECVRSPRESLDDLFQICSPCAIASGLRNDLAELTTLCLELNVLNSKIKSTSGHVDHTLQQYSPEILACQFLKKYFFLLNLKRAKESIKLSYSNSPSVWDTFIEGLKEMASSNPVYMEMEKGDLPTRLKLLDDEVPFDSPLLVVYATRLYEKFGESALRSLIKFFPSILPSDIIQLCHHHPAEFLAYLDSLVKSRPEDQRSSFLESLLQPESLRLDWLLLAVSLDAPPSTSTMDDEGYPRPHSHLLSWGYSQLILHLIKLPADFITKEKMTDICRSCGFWPGYLILCLELERRREAFTNIVYLNDMSLMEGDNGWIPETVEEWKLLLHLIQSKSTRPAPQESLNGSLSDGPSPINVENVALLLAKAMGPDRAWSLLQECGLALELSEKFTRTCDILRIAEKRQRALIQSMLEKCDRFLWSQQA

SEQ ID NO: 14180 - protein, 279 aa, Artificial Sequence
  Synthetic polypeptide
SSCLLDISSQGYGISSVPSASNSKSIKENSNAAIIKRFNHHSAMVLAAGLRKQEAQNEQTSEPSNMDGNSGDADCFQPAVKRAKLQESIEYEDLGKNNSVKTIALNLKKSDRYYHGPTPIQSLQYATSQDIINSFQSIRQEMEAYTPKLTQVLSSSAASSTITALSPGGALMQGGTQQAINQMVPNDIQSELKHLYVAVGELLRHFWSCFPVNTPFLEEKVVKMKSNLERFQVTKLCPFQEKIRRQYLSTNLVSHIEEMLQTAYNKLHTWQSRRLMKKT

SEQ ID NO: 14181 - protein, 25 aa, Artificial Sequence
  Synthetic polypeptide
LAAYLTSPLRAMAFPLCHLLPILNP

SEQ ID NO: 14182 - protein, 17 aa, Artificial Sequence
  Synthetic polypeptide
HLLSGLWHFLCAICFQF

SEQ ID NO: 14183 - protein, 116 aa, Artificial Sequence
  Synthetic polypeptide
SSCLLDISSQGYGISSVPSASNSKSIKENSNAAIIKRFNHHSAMVLAAGLRKQEAQNEQTSEPSNMDGNSGDADCFQPAVKRVWAKKYEPFGAQVSPNTLCDCKYCIRLFPVTQFF

SEQ ID NO: 14184 - protein, 27 aa, Artificial Sequence
  Synthetic polypeptide
SQHLGRPRQADHLMPGVQDQPNMTSVP

SEQ ID NO: 14185 - protein, 6 aa, Artificial Sequence
  Synthetic polypeptide
HDFSAL

SEQ ID NO: 14186 - protein, 31 aa, Artificial Sequence
  Synthetic polypeptide
KRDIPPLHPHKHTATVRLVGAYSGHDCGIWR

SEQ ID NO: 14187 - protein, 280 aa, Artificial Sequence
  Synthetic polypeptide
HTIYIYQVHQEREPRGKKDNRNGTSLHSTPTNTQPQSDLLGLIQVMIVVFGDEPPVFSRPISASYPPYQATGPPNTSYMPGMPGGISPYPSGYPPNPSGYPGCPYPPGGPYPATTSSQYPSQPPVTTVGPSRDGTISEDTIRASLISAVSDKLRWRMKEEMDRAQAELNALKRTEEDLKKGHQKLEEMVTRLDQEVAEVDKNIELLKKKDEELSSALEKMENQSENNDIDEVIIPTAPLYKQILNLYAEENAIEDTIFYLGEALRRGVIDLDVFLKTSVP

SEQ ID NO: 14188 - protein, 51 aa, Artificial Sequence
  Synthetic polypeptide
FFTMSSIQFIFIKYTKKENQEEKKTIETGHPSTPPPQTHSHSQTCWGLFRS

SEQ ID NO: 14189 - protein, 305 aa, Artificial Sequence
  Synthetic polypeptide
HTIYIYQVHQEREPRGKKDNRNGTSLHSTPTNTQPQSDLLGLIQVMIVVFGDEPPVFSRPISASYPPYQATGPPNTSYMPGMPGGISPYPSGYPPNPSGYPGCPYPPGGPYPATTSSQYPSQPPVTTVGPSRDGTISEDTIRASLISAVSDKLRWRMKEEMDRAQAELNALKRTEEDLKKGHQKLEEMVTRLDQEVAEVDKNIELLKKKDEELSSALEKMENQSENNDIDEVIIPTAPLYKQILNLYAEENAIEDTIFYLGEALRRGVIDLDVFLKHVRLLSRKQFQLRALMQKARKTAGLSDLY

SEQ ID NO: 14190 - protein, 31 aa, Artificial Sequence
  Synthetic polypeptide
MGTVAHTCNSSTLGDQGYCRQACPLRPLRRD

SEQ ID NO: 14191 - protein, 283 aa, Artificial Sequence
  Synthetic polypeptide
WARWLTPVIPALWETKGIADRLVLLDLSEGTKGATMDLEIFNLPNVEISKDLSASAHSKVVIFTVNSLGSSQSYLDVVQSNVDMFRALVPALGHYSQHSVLLVASQPVEIMTYVTWKLSTFPANRVIGIGCNLDSQRLQYIITNVLKAQTSGKEVWVIGEQGEDKVLTWSGQEEVVSHTSQVQLSNRAMELLRVKGQRSWSVGLSVADMVDSIVNNKKKVHSVSALAKGYYDINSEVFLSLPCILGTNGVSEVIKTTLKEDTVTEKLQSSASSIHSLQQQLKL

SEQ ID NO: 14192 - protein, 16 aa, Artificial Sequence
  Synthetic polypeptide
FQHFGRPRVLQTGLSS

SEQ ID NO: 14193 - protein, 191 aa, Artificial Sequence
  Synthetic polypeptide
WARWLTPVIPALWETKGIADRLVLLDLSEGTKGATMDLEIFNLPNVEISKDLSASAHSKVVIFTVNSLGSSQSYLDVVQSNVDMFRALVPALGHYSQHSVLLVASQPVEIMTYVTWKLSTFPANRVIGIGCNLDSQRLQYIITNVLKAQTSGKEVWVIGEQGEDKVLTWSGQEEVVSHTSQVQLSNRDIMI

SEQ ID NO: 14194 - protein, 111 aa, Artificial Sequence
  Synthetic polypeptide
WARWLTPVIPALWETKGIADRLVLLDLSEGTKGATMDLEIFNLPNVEISKVEIMTYVTWKLSTFPANRVIGIGCNLDSQRLQYIITNVLKAQTSGKEVWVIGEQGEDKGIL

SEQ ID NO: 14195 - protein, 470 aa, Artificial Sequence
  Synthetic polypeptide
AEITPLHSSLGDKYKFRDLTVEELRNVNVFFPHFKYSMDTYVFKDSSQKDLLNFTGTIPVMYQGNTYNIPIRFWILDSHPFAPPICFLKPTANMGILVGKHVDAQGRIYLPYLQNWSHPKSVIVGLIKEMIAKFQEELPMYSLSSSDEARQVDLLAYIAKITEGVSDTNSKSWANHENKTVNKITVVGGGELGIACTLAISAKGIADRLVLLDLSEGTKGATMDLEIFNLPNVEISKDLSASAHSKVVIFTVNSLGSSQSYLDVVQSNVDMFRALVPALGHYSQHSVLLVASQPVEIMTYVTWKLSTFPANRVIGIGCNLDSQRLQYIITNVLKAQTSGKEVWVIGEQGEDKVLTWSGQEEVVSHTSQVQLSNRAMELLRVKGQRSWSVGLSVADMVDSIVNNKKKVHSVSALAKGYYDINSEVFLSLPCILGTNGVSEVIKTTLKEDTVTEKLQSSASSIHSLQQQLKL

SEQ ID NO: 14196 - protein, 40 aa, Artificial Sequence
  Synthetic polypeptide
SQLLGRLRQENCLNPGNGGYSELRSRHCTPAWATSTSSGT

SEQ ID NO: 14197 - protein, 41 aa, Artificial Sequence
  Synthetic polypeptide
DHAIALQPGRQVQVQGPNCGRTKECKCIFPTFQIFHGHLCF

SEQ ID NO: 14198 - protein, 378 aa, Artificial Sequence
  Synthetic polypeptide
AEITPLHSSLGDKYKFRDLTVEELRNVNVFFPHFKYSMDTYVFKDSSQKDLLNFTGTIPVMYQGNTYNIPIRFWILDSHPFAPPICFLKPTANMGILVGKHVDAQGRIYLPYLQNWSHPKSVIVGLIKEMIAKFQEELPMYSLSSSDEARQVDLLAYIAKITEGVSDTNSKSWANHENKTVNKITVVGGGELGIACTLAISAKGIADRLVLLDLSEGTKGATMDLEIFNLPNVEISKDLSASAHSKVVIFTVNSLGSSQSYLDVVQSNVDMFRALVPALGHYSQHSVLLVASQPVEIMTYVTWKLSTFPANRVIGIGCNLDSQRLQYIITNVLKAQTSGKEVWVIGEQGEDKVLTWSGQEEVVSHTSQVQLSNRDIMI

SEQ ID NO: 14199 - protein, 356 aa, Artificial Sequence
  Synthetic polypeptide
AEITPLHSSLGDKYKFRDLTVEELRNVNVFFPHFKYSMDTYGNTYNIPIRFWILDSHPFAPPICFLKPTANMGILVGKHVDAQGRIYLPYLQNWSHPKSVIVGLIKEMIAKFQEELPMYSLSSSDEARQVDLLAYIAKITEGVSDTNSKSWANHENKTVNKITVVGGGELGIACTLAISAKGIADRLVLLDLSEGTKGATMDLEIFNLPNVEISKDLSASAHSKVVIFTVNSLGSSQSYLDVVQSNVDMFRALVPALGHYSQHSVLLVASQPVEIMTYVTWKLSTFPANRVIGIGCNLDSQRLQYIITNVLKAQTSGKEVWVIGEQGEDKVLTWSGQEEVVSHTSQVQLSNRDIMI

SEQ ID NO: 14200 - protein, 40 aa, Artificial Sequence
  Synthetic polypeptide
DHAIALQPGRQVQVQGPNCGRTKECKCIFPTFQIFHGHLW

SEQ ID NO: 14201 - protein, 448 aa, Artificial Sequence
  Synthetic polypeptide
AEITPLHSSLGDKYKFRDLTVEELRNVNVFFPHFKYSMDTYGNTYNIPIRFWILDSHPFAPPICFLKPTANMGILVGKHVDAQGRIYLPYLQNWSHPKSVIVGLIKEMIAKFQEELPMYSLSSSDEARQVDLLAYIAKITEGVSDTNSKSWANHENKTVNKITVVGGGELGIACTLAISAKGIADRLVLLDLSEGTKGATMDLEIFNLPNVEISKDLSASAHSKVVIFTVNSLGSSQSYLDVVQSNVDMFRALVPALGHYSQHSVLLVASQPVEIMTYVTWKLSTFPANRVIGIGCNLDSQRLQYIITNVLKAQTSGKEVWVIGEQGEDKVLTWSGQEEVVSHTSQVQLSNRAMELLRVKGQRSWSVGLSVADMVDSIVNNKKKVHSVSALAKGYYDINSEVFLSLPCILGTNGVSEVIKTTLKEDTVTEKLQSSASSIHSLQQQLKL

SEQ ID NO: 14202 - protein, 64 aa, Artificial Sequence
  Synthetic polypeptide
AEITPLHSSLGDKYKFRDLTVEELRNVNVFFPHFKYSMDTYVFKDSSQKDLLNFTGTIPVMYQA

SEQ ID NO: 14203 - protein, 198 aa, Artificial Sequence
  Synthetic polypeptide
AEITPLHSSLGDKYKFRDLTVEELRNVNVFFPHFKYSMDTYVFKDSSQKDLLNFTGTIPVMYQGVSDTNSKSWANHENKTVNKITVVGGGELGIACTLAISAKGIADRLVLLDLSEGTKGATMDLEIFNLPNVEISKVEIMTYVTWKLSTFPANRVIGIGCNLDSQRLQYIITNVLKAQTSGKEVWVIGEQGEDKGIL

SEQ ID NO: 14204 - protein, 214 aa, Artificial Sequence
  Synthetic polypeptide
AEITPLHSSLGDKYKFRDLTVEELRNVNVFFPHFKYSMDTYVFKDSSQKDLLNFTGTIPVMYQGNTYNIPIRFWILDSHPFAPPICFLKPTANMGILVGKHVDAQGRIYLPYLQNWSHPKSVIVGLIKEMIAKFQEELPMYSLSSSDEARQVDLLAYIAKITEGVSDTNSKSWANHENKTVNKITVVGGGELGIACTLAISAKVESRSVTQAGV

SEQ ID NO: 14205 - protein, 31 aa, Artificial Sequence
  Synthetic polypeptide
AQEFKTSLGNMAHCSVERGGRGGGRPRAMPA

SEQ ID NO: 14206 - protein, 354 aa, Artificial Sequence
  Synthetic polypeptide
RVQWFMLVLPALWEAETGGWFEPRSSRPAWETWPTAQWSVEDEEEAVHEQCQHERDRQLQAQDEEGGGHVPERPKQEMLLSLKPSEAPELDEDEGFGDWSQRPEQRQQHEGAQGALDSGEPPQCRSPEGEQEDRPGLHAYEKEDSDEVHLEELSLSKEGPGPEDTVQDNLGAAGAEEEQEEHQKCQQPRTPSPLVLEGTIEQSSPPLSPTTKLIDRTESLNRSIEKSNSVKKSQPDLPISKIDQWLEQYTQAIETAGRTPKLARQASIELPSMAVASTKSRWETGEVQAQSAAKTPSCKDIVAGDMSKKSLWEQKGGSKTSSTIKSTPSGKRYKFVATGHGKYEKVLVEGGPAP

SEQ ID NO: 14207 - protein, 81 aa, Artificial Sequence
  Synthetic polypeptide
GCSGSCLYSQHYGRLRQEDGLSPGVQDQPGKHGPLLSGAWRTRRRPSTSNASMRETGSFRPRTRREAAMSPSGRSRRCSSA

SEQ ID NO: 14208 - protein, 299 aa, Artificial Sequence
  Synthetic polypeptide
RVQWFMLVLPALWEAETGGWFEPRSSRPAWETWPTAQWSVEDEEEAVHEQCQHERDRQLQAQDEEGGGHVPERPKQEMLLSLKPSEAPELDEDEGFGDWSQRPEQRQQHEGAQGALDSGEPPQCRSPEGEQEDRPGLHAYEKEDSDEVHLEELSLSKEGPGPEDTVQDNLGAAGAEEEQEEHQKCQQPRTPSPLVLEGTIEQSSPPLSPTTKLIDRTESLNRSIEKSNSVKKSQPDLPISKIDQWLEQYTQAIETAGRTPKLARQASIELPSMAVASTKSRWETGEVQAQSAAKTPSCK

SEQ ID NO: 14209 - protein, 207 aa, Artificial Sequence
  Synthetic polypeptide
RVQWFMLVLPALWEAETGGWFEPRSSRPAWETWPTAQWSVEDEEEAVHEQCQHERDRQLQAQDEEGGGHVPERPKQEMLLSLKPSEAPELDEDEGFGDWSQRPEQRQQHEGAQGALDSGEPPQCRSPEGEQEDRPGLHAYEKEDSDEVHLEELSLSKEGPGPEDTVQDNLGAAGAEEEQEEHQKCQQPRTPSPLVLEGTIEQSSPPL

SEQ ID NO: 14210 - protein, 119 aa, Artificial Sequence
  Synthetic polypeptide
RVQWFMLVLPALWEAETGGWFEPRSSRPAWETWPTAQWSVEDEEEAVHEQCQHERDRQLQAQDEEGGGHVPERPKQEMLLSLKPSEAPELDEDEGFGDWSQRPEQRQQHEGAQGALDSG

SEQ ID NO: 14211 - protein, 621 aa, Artificial Sequence
  Synthetic polypeptide
NRLLRDGKCRNHSHGPHPPGFGRYGICAHENKELANAREALPLIEDSSNCDIVKATQYGIFERCKELVEAGYDVRQPDKENVSLLHWAAINNRLDLVKFYISKGAVVDQLGGDLNSTPLHWAIRQGHLPMVILLLQHGADPTLIDGEGFSSIHLAVLFQHMPIIAYLISKGQSVNMTDVNGQTPLMLSAHKVIGPEPTGFLLKFNPSLNVVDKIHQNTPLHWAVAAGNVNAVDKLLEAGSSLDIQNVKGETPLDMALQNKNQLIIHMLKTEAKMRANQKFRLWRWLQKCELFLLLMLSVITMWAIGYILDFNSDSWLLKGCLLVTLFFLTSLFPRFLVGYKNLVYLPTAFLLSSVFWIFMTWFILFFPDLAGAPFYFSFIFSIVAFLYFFYKTWATDPGFTKASEEEKKVNIITLAETGSLDFRTFCTSCLIRKPLRSLHCHVCNCCVARYDQHCLWTGRCIGFGNHHYYIFFLFFLSMVCGWIIYGSFIYLSSHCATTFKEDGLWTYLNQIVACSPWVLYILMLATFHFSWSTFLLLNQLFQIAFLGLTSHERISLQKQSKHMKQTLSLRKTPYNLGFMQNLADFFQCGCFGLVKPCVVDWTSQYTMVFHPAREKVLRSV

SEQ ID NO: 14212 - protein, 39 aa, Artificial Sequence
  Synthetic polypeptide
EMGSAGITAMAPTLQDLVDMASVHMKTKNLPMQEKLFLL

SEQ ID NO: 14213 - protein, 34 aa, Artificial Sequence
  Synthetic polypeptide
NFCSMKQTFKRWEVQESQPWPPPSRIWSIWHLCT

SEQ ID NO: 14214 - protein, 2308 aa, Artificial Sequence
  Synthetic polypeptide
YYHYVTLANEKIEDINGCPKNRSQMIENIDACLNFLAAKGINIQGLSAEEIRNGNLKAILGLFFSLSRYKQQQQQPQKQHLSSPLPPAVSQVAGAPSQCQAGTPQQQVPVTPQAPCQPHQPAPHQQSKAQAEMQSRLPGPTARVSAAGSEAKTRGGSTTANNRRSQSFNNYDKSKPVTSPPPPPSSHEKEPLASSASSHPGMSDNAPASLESGSSSTPTNCSTSSAIPQPGAATKPWRSKSLSVKHSATVSMLSVKPPGPEAPRPTPEAMKPAPNNQKSMLEKLKLFNSKGGSKAGEGPGSRDTSCERLETLPSFEESEELEAASRMLTTVGPASSSPKIALKGIAQRTFSRALTNKKSSLKGNEKEKEKQQREKDKEKSKDLAKRASVTERLDLKEEPKEDPSGAAVPEMPKKSSKIASFIPKGGKLNSAKKEPMAPSHSGIPKPGMKSMPGKSPSAPAPSKEGERSRSGKLSSGLPQQKPQLDGRHSSSSSSLASSEGKGPGGTTLNHSISSQTVSGSVGTTQTTGSNTVSVQLPQPQQQYNHPNTATVAPFLYRSQTDTEGNVTAESSSTGVSVEPSHFTKTGQPALEELTGEDPEARRLRTVKNIADLRQNLEETMSSLRGTQVTHSTLETTFDTNVTTEMSGRSILSLTGRPTPLSWRLGQSSPRLQAGDAPSMGNGYPPRANASRFINTESGRYVYSAPLRRQLASRGSSVCHVDVSDKAGDEMDLEGISMDAPGYMSDGDVLSKNIRTDDITSGYMTDGGLGLYTRRLNRLPDGMAVVRETLQRNTSLGLGDADSWDDSSSVSSGISDTIDNLSTDDINTSSSISSYANTPASSRKNLDVQTDAEKHSQVERNSLWSGDDVKKSDGGSDSGIKMEPGSKWRRNPSDVSDESDKSTSGKKNPVISQTGSWRRGMTAQVGITMPRTKPSAPAGALKTPGTGKTDDAKVSEKGRLSPKASQVKRSPSDAGRSSGDESKKPLPSSSRTPTANANSFGFKKQSGSAAGLAMITASGVTVTSRSATLGKIPKSSALVSRSAGRKSSMDGAQNQDDGYLALSSRTNLQYRSLPRPSKSNSRNGAGNRSSTSSIDSNISSKSAGLPVPKLREPSKTALGSSLPGLVNQTDKEKGISSDNESVASCNSVKVNPAAQPVSSPAQTSLQPGAKYPDVASPTLRRLFGGKPTKQVPIATAENMKNSVVISNPHATMTQQGNLDSPSGSGVLSSGSSSPLYSKNVDLNQSPLASSPSSAHSAPSNSLTWGTNASSSSAVSKDGLGFQSVSSLHTSCESIDISLSSGGVPSHNSSTGLIASSKDDSLTPFVRTNSVKTTLSESPLSSPAASPKFCRSTLPRKQDSDPHLDRNTLPKKGLRYTPTSQLRTQEDAKEWLRSHSAGGLQDTAANSPFSSGSSVTSPSGTRFNFSQLASPTTVTQMSLSNPTMLRTHSLSNADGQYDPYTDSRFRNSSMSLDEKSRTMSRSGSFRDGFEEVHGSSLSLVSSTSSVYSTPEEKCQSEIRKLRRELDASQEKVSALTTQLTANAHLVAAFEQSLGNMTIRLQSLTMTAEQKDSELNELRKTIELLKKQNAAAQAAINGVINTPELNCKGNGTAQSADLRIRRQHSSDSVSSINSATSHSSVGSNIESDSKKKKRKNWLRSSFKQAFGKKKSPKSASSHSDIEEMTDSSLPSSPKLPHNGSTGSTPLLRNSHSNSLISECMDSEAETVMQLRNELRDKEMKLTDIRLEALSSAHQLDQLREAMNRMQSEIEKLKAENDRLKSESQGSGCSRAPSQVSISASPRQSMGLSQHSLNLTESTSLDMLLDDTGECSARKEGGRHVKIVVSFQEEMKWKEDSRPHLFLIGCIGVSGKTKWDVLDGVVRRLFKEYIIHVDPVSQLGLNSDSVLGYSIGEIKRSNTSETPELLPCGYLVGENTTISVTVKGLAENSLDSLVFESLIPKPILQRYVSLLIEHRRIILSGPSGTGKTYLANRLSEYIVLREGRELTDGVIATFNVDHKSSKELRQYLSNLADQCNSENNAVDMPLVIILDNLHHVSSLGEIFNGLLNCKYHKCPYIIGTMNQATSSTPNLQLHHNFRWVLCANHTEPVKGFLGRFLRRKLMETEISGRVRNMELVKIIDWIPKVWHHLNRFLEAHSSSDVTIGPRLFLSCPIDVDGSRVWFTDLWNYSIIPYLLEAVREGLQLYGRRAPWEDPAKWVMDTYPWAASPQQHEWPPLLQLRPEDVGFDGYSMPREGSTSKQMPPSDAEGDPLMNMLMRLQEAANYSSPQSYDSDSNSNSHHDDILDSSLESTL

SEQ ID NO: 14215 - protein, 19 aa, Artificial Sequence
  Synthetic polypeptide
PWQMKRLKTSMAVRRTDPK

SEQ ID NO: 14216 - protein, 8 aa, Artificial Sequence
  Synthetic polypeptide
LPLCDPGK

SEQ ID NO: 14217 - protein, 2311 aa, Artificial Sequence
  Synthetic polypeptide
YYHYVTLANEKIEDINGCPKNRSQMIENIDACLNFLAAKGINIQGLSAEEIRNGNLKAILGLFFSLSRYKQQQQQPQKQHLSSPLPPAVSQVAGAPSQCQAGTPQQQVPVTPQAPCQPHQPAPHQQSKAQAEMQSRLPGPTARVSAAGSEAKTRGGSTTANNRRSQSFNNYDKSKPVTSPPPPPSSHEKEPLASSASSHPGMSDNAPASLESGSSSTPTNCSTSSAIPQPGAATKPWRSKSLSVKHSATVSMLSVKPPGPEAPRPTPEAMKPAPNNQKSMLEKLKLFNSKGGSKAGEGPGSRDTSCERLETLPSFEESEELEAASRMLTTVGPASSSPKIALKGIAQRTFSRALTNKKSSLKGNEKEKEKQQREKDKEKSKDLAKRASVTERLDLKEEPKEDPSGAAVPEMPKKSSKIASFIPKGGKLNSAKKEPMAPSHSGIPKPGMKSMPGKSPSAPAPSKEGERSRSGKLSSGLPQQKPQLDGRHSSSSSSLASSEGKGPGGTTLNHSISSQTVSGSVGTTQTTGSNTVSVQLPQPQQQYNHPNTATVAPFLYRSQTDTEGNVTAESSSTGVSVEPSHFTKTGQPALEELTGEDPEARRLRTVKNIADLRQNLEETMSSLRGTQVTHSTLETTFDTNVTTEMSGRSILSLTGRPTPLSWRLGQSSPRLQAGDAPSMGNGYPPRANASRFINTESGRYVYSAPLRRQLASRGSSVCHVDVSDKAGDEMDLEGISMDAPGYMSDGDVLSKNIRTDDITSGYMTDGGLGLYTRRLNRLPDGMAVVRETLQRNTSLGLGDADSWDDSSSVSSGISDTIDNLSTDDINTSSSISSYANTPASSRKNLDVQTDAEKHSQVERNSLWSGDDVKKSDGGSDSGIKMEPGSKWRRNPSDVSDESDKSTSGKKNPVISQTGSWRRGMTAQVGITMPRTKPSAPAGALKTPGTGKTDDAKVSEKGRLSPKASQVKRSPSDAGRSSGDESKKPLPSSSRTPTANANSFGFKKQSGSAAGLAMITASGVTVTSRSATLGKIPKSSALVSRSAGRKSSMDGAQNQDDGYLALSSRTNLQYRSLPRPSKSNSRNGAGNRSSTSSIDSNISSKSAGLPVPKLREPSKTALGSSLPGLVNQTDKEKGISSDNESVASCNSVKVNPAAQPVSSPAQTSLQPGAKYPDVASPTLRRLFGGKPTKQVPIATAENMKNSVVISNPHATMTQQGNLDSPSGSGVLSSGSSSPLYSKNVDLNQSPLASSPSSAHSAPSNSLTWGTNASSSSAVSKDGLGFQSVSSLHTSCESIDISLSSGGVPSHNSSTGLIASSKDDSLTPFVRTNSVKTTLSESPLSSPAASPKFCRSTLPRKQDSDPHLDRNTLPKKGLRYTPTSQLRTQEDAKEWLRSHSAGGLQDTAANSPFSSGSSVTSPSGTRFNFSQLASPTTVTQMSLSNPTMLRTHSLSNADGQYDPYTDSRFRNSSMSLDEKSRTMSRSGSFRDGFEEVHGSSLSLVSSTSSVYSTPEEKCQSEIRKLRRELDASQEKVSALTTQLTANAHLVAAFEQSLGNMTIRLQSLTMTAEQKDSELNELRKTIELLKKQNAAAQAAINGVINTPELNCKGNGTAQSADLRIRRQHSSDSVSSINSATSHSSVGSNIESDSKKKKRKNWVNELRSSFKQAFGKKKSPKSASSHSDIEEMTDSSLPSSPKLPHNGSTGSTPLLRNSHSNSLISECMDSEAETVMQLRNELRDKEMKLTDIRLEALSSAHQLDQLREAMNRMQSEIEKLKAENDRLKSESQGSGCSRAPSQVSISASPRQSMGLSQHSLNLTESTSLDMLLDDTGECSARKEGGRHVKIVVSFQEEMKWKEDSRPHLFLIGCIGVSGKTKWDVLDGVVRRLFKEYIIHVDPVSQLGLNSDSVLGYSIGEIKRSNTSETPELLPCGYLVGENTTISVTVKGLAENSLDSLVFESLIPKPILQRYVSLLIEHRRIILSGPSGTGKTYLANRLSEYIVLREGRELTDGVIATFNVDHKSSKELRQYLSNLADQCNSENNAVDMPLVIILDNLHHVSSLGEIFNGLLNCKYHKCPYIIGTMNQATSSTPNLQLHHNFRWVLCANHTEPVKGFLGRFLRRKLMETEISGRVRNMELVKIIDWIPKVWHHLNRFLEAHSSSDVTIGPRLFLSCPIDVDGSRVWFTDLWNYSIIPYLLEAVREGLQLYGRRAPWEDPAKWVMDTYPWAASPQQHEWPPLLQLRPEDVGFDGYSMPREGSTSKQMPPSDAEGDPLMNMLMRLQEAANYSSPQSYDSDSNSNSHHDDILDSSLESTL

SEQ ID NO: 14218 - protein, 2367 aa, Artificial Sequence
  Synthetic polypeptide
YYHYVTLANEKIEDINGCPKNRSQMIENIDACLNFLAAKGINIQGLSAEEIRNGNLKAILGLFFSLSRYKQQQQQPQKQHLSSPLPPAVSQVAGAPSQCQAGTPQQQVPVTPQAPCQPHQPAPHQQSKAQAEMQSSASSKDSSQSKIIRFTLGQKKISRLPGPTARVSAAGSEAKTRGGSTTANNRRSQSFNNYDKSKPVTSPPPPPSSHEKEPLASSASSHPGMSDNAPASLESGSSSTPTNCSTSSAIPQPGAATKPWRSKSLSVKHSATVSMLSVKPPGPEAPRPTPEAMKPAPNNQKSMLEKLKLFNSKGGSKAGEGPGSRDTSCERLETLPSFEESEELEAASRMLTTVGPASSSPKIALKGIAQRTFSRALTNKKSSLKGNEKEKEKQQREKDKEKSKDLAKRASVTERLDLKEEPKEDPSGAAVPEMPKKSSKIASFIPKGGKLNSAKKEPMAPSHSGIPKPGMKSMPGKSPSAPAPSKEGERSRSGKLSSGLPQQKPQLDGRHSSSSSSLASSEGKGPGGTTLNHSISSQTVSGSVGTTQTTGSNTVSVQLPQPQQQYNHPNTATVAPFLYRSQTDTEGNVTAESSSTGVSVEPSHFTKTGQPALEELTGEDPEARRLRTVKNIADLRQNLEETMSSLRGTQVTHSTLETTFDTNVTTEMSGRSILSLTGRPTPLSWRLGQSSPRLQAGDAPSMGNGYPPRANASRFINTESGRYVYSAPLRRQLASRGSSVCHVDVSDKAGDEMDLEGISMDAPGYMSDGDVLSKNIRTDDITSGYMTDGGLGLYTRRLNRLPDGMAVVRETLQRNTSLGLGDADSWDDSSSVSSGISDTIDNLSTDDINTSSSISSYANTPASSRKNLDVQTDAEKHSQVERNSLWSGDDVKKSDGGSDSGIKMEPGSKWRRNPSDVSDESDKSTSGKKNPVISQTGSWRRGMTAQVGITMPRTKPSAPAGALKTPGTGKTDDAKVSEKGRLSPKASQVKRSPSDAGRSSGDESKKPLPSSSRTPTANANSFGFKKQSGSAAGLAMITASGVTVTSRSATLGKIPKSSALVSRSAGRKSSMDGAQNQDDGYLALSSRTNLQYRSLPRPSKSNSRNGAGNRSSTSSIDSNISSKSAGLPVPKLREPSKTALGSSLPGLVNQTDKEKGISSDNESVASCNSVKVNPAAQPVSSPAQTSLQPGAKYPDVASPTLRRLFGGKPTKQVPIATAENMKNSVVISNPHATMTQQGNLDSPSGSGVLSSGSSSPLYSKNVDLNQSPLASSPSSAHSAPSNSLTWGTNASSSSAVSKDGLGFQSVSSLHTSCESIDISLSSGGVPSHNSSTGLIASSKDDSLTPFVRTNSVKTTLSESPLSSPAASPKFCRSTLPRKQDSDPHLDRNTLPKKGLRYTPTSQLRTQEDAKEWLRSHSAGGLQDTAANSPFSSGSSVTSPSGTRFNFSQLASPTTVTQMSLSNPTMLRTHSLSNADGQYDPYTDSRFRNSSMSLDEKSRTMSRSGSFRDGFEEESWEKSSVDNFVSRLHSSLHFSLPLFHHARYELVHGSSLSLVSSTSSVYSTPEEKCQSEIRKLRRELDASQEKVSALTTQLTANAHLVAAFEQSLGNMTIRLQSLTMTAEQKDSELNELRKTIELLKKQNAAAQAAINGVINTPELNCKGNGTAQSADLRIRRQHSSDSVSSINSATSHSSVGSNIESDSKKKKRKNWVNELRSSFKQAFGKKKSPKSASSHSDIEEMTDSSLPSSPKLPHNGSTGSTPLLRNSHSNSLISECMDSEAETVMQLRNELRDKEMKLTDIRLEALSSAHQLDQLREAMNRMQSEIEKLKAENDRLKSESQGSGCSRAPSQVSISASPRQSMGLSQHSLNLTESTSLDMLLDDTGECSARKEGGRHVKIVVSFQEEMKWKEDSRPHLFLIGCIGVSGKTKWDVLDGVVRRLFKEYIIHVDPVSQLGLNSDSVLGYSIGEIKRSNTSETPELLPCGYLVGENTTISVTVKGLAENSLDSLVFESLIPKPILQRYVSLLIEHRRIILSGPSGTGKTYLANRLSEYIVLREGRELTDGVIATFNVDHKSSKELRQYLSNLADQCNSENNAVDMPLVIILDNLHHVSSLGEIFNGLLNCKYHKCPYIIGTMNQATSSTPNLQLHHNFRWVLCANHTEPVKGFLGRFLRRKLMETEISGRVRNMELVKIIDWIPKVWHHLNRFLEAHSSSDVTIGPRLFLSCPIDVDGSRVWFTDLWNYSIIPYLLEAVREGLQLYGRRAPWEDPAKWVMDTYPWAASPQQHEWPPLLQLRPEDVGFDGYSMPREGSTSKQMPPSDAEGDPLMNMLMRLQEAANYSSPQSYDSDSNSNSHHDDILDSSLESTL

SEQ ID NO: 14219 - protein, 25 aa, Artificial Sequence
  Synthetic polypeptide
LFVLCPPPQPQIYSRSSMENFRMHG

SEQ ID NO: 14220 - protein, 661 aa, Artificial Sequence
  Synthetic polypeptide
IRPCPFTCINQHSTMSQCSPWSLCPCFIFPHCTCCPLTPDIEVFLDYLFSVPHPNPRSTVEAPWRISECMDSEAETVMQLRNELRDKEMKLTDIRLEALSSAHQLDQLREAMNRMQSEIEKLKAENDRLKSESQGSGCSRAPSQVSISASPRQSMGLSQHSLNLTESTSLDMLLDDTGECSARKEGGRHVKIVVSFQEEMKWKEDSRPHLFLIGCIGVSGKTKWDVLDGVVRRLFKEYIIHVDPVSQLGLNSDSVLGYSIGEIKRSNTSETPELLPCGYLVGENTTISVTVKGLAENSLDSLVFESLIPKPILQRYVSLLIEHRRIILSGPSGTGKTYLANRLSEYIVLREGRELTDGVIATFNVDHKSSKELRQYLSNLADQCNSENNAVDMPLVIILDNLHHVSSLGEIFNGLLNCKYHKCPYIIGTMNQATSSTPNLQLHHNFRWVLCANHTEPVKGFLGRFLRRKLMETEISGRVRNMELVKIIDWIPKVWHHLNRFLEAHSSSDVTIGPRLFLSCPIDVDGSRVWFTDLWNYSIIPYLLEAVREGLQLYGRRAPWEDPAKWVMDTYPWAASPQQHEWPPLLQLRPEDVGFDGYSMPREGSTSKQMPPSDAEGDPLMNMLMRLQEAANYSSPQSYDSDSNSNSHHDDILDSSLESTL

SEQ ID NO: 14221 - protein, 23 aa, Artificial Sequence
  Synthetic polypeptide
KLHGEFQNAWIVKLRPSCSSEMS

SEQ ID NO: 14222 - protein, 254 aa, Artificial Sequence
  Synthetic polypeptide
WDPGKLTKARKSMAETEALSKLREDFRMQNKSVFILGASGETGRVLLKEILEQGLFSKVTLIGRRKLTFDEEAYKNVNQEVVDFEKLDDYASAFQGHDVGFCCLGTTRGKAGAEGFVRVDRDYVLKSAELAKAGGCKHFNLLSSKGADKSSNFLYLQVKGEVEAKVEELKFDRYSVFRPGVLLCDRQESRPGEWLVRKFFGSLPDSWASGHSVPVVTVVRAMLNNVVRPRDKQMELLENKAIHDLGKAHGSLKP

SEQ ID NO: 14223 - protein, 40 aa, Artificial Sequence
  Synthetic polypeptide
QKPEKAWPKQKPCRSFGKTSGCRINPSLFWAPAEKPAECS

SEQ ID NO: 14224 - protein, 39 aa, Artificial Sequence
  Synthetic polypeptide
TPHSFQILLMGSRETDKSQKKHGRNRSPVEASGRLQDAE

SEQ ID NO: 14225 - protein, 160 aa, Artificial Sequence
  Synthetic polypeptide
LKGRLCRSLSAALLAQSPGAVEEILDRENKRMADSLASKVTRLKSLALDIDRDAEDQNRYLDGMVFQDSQEGAHIRRETVSKSVCAEPWRHQRARDPAPTNFPLKCQKQRGASTSSGQHGGRVNLVFFIDDDYSPPSKRQRPTSHHSHQSQNPPMLGNGK

SEQ ID NO: 14226 - protein, 59 aa, Artificial Sequence
  Synthetic polypeptide
LPSRGNWELCSAIFCAVKGLPNVLSWFLATSSGPSSKVVSAGAFLLPCWLRARALWKRF

SEQ ID NO: 14227 - protein, 50 aa, Artificial Sequence
  Synthetic polypeptide
RAFPMFCPGSLPPLQDLAQRSSLQEPFCCLAGSEPGRCGRDSRPGEQANG

SEQ ID NO: 14228 - protein, 110 aa, Artificial Sequence
  Synthetic polypeptide
LKGRLCRSLSAALLAQSPGAVEEILDRENKRMADSLASKVTRLKSLALDIDRDAEDQNRYLDGMVRAHGVRVSVPCPSTTCCRACSVSFSTGAGGWSNHHFCVILLGFLP

SEQ ID NO: 14229 - protein, 119 aa, Artificial Sequence
  Synthetic polypeptide
LKGRLCRSLSAALLAQSPGAVEEILDRENKRMADSLASKVTRLKSLALDIDRDAEDQNRYLDGMDSDFTSMTSLLTGSVKRFSTMARSGQDNRKLLCGMAVGLIVAFFILSYFLSRART

SEQ ID NO: 14230 - protein, 100 aa, Artificial Sequence
  Synthetic polypeptide
LKGRLCRSLSAALLAQSPGAVEEILDRENKRMADSLASKVTRLKSDSDFTSMTSLLTGSVKRFSTMARSGQDNRKLLCGMAVGLIVAFFILSYFLSRART

SEQ ID NO: 14231 - protein, 66 aa, Artificial Sequence
  Synthetic polypeptide
LKGRLCRSLSAALLAQSPGAVEEILDRENKRMADSLASKVTRLKSLALDIDRDAEDQNRYLDGMGA

SEQ ID NO: 14232 - protein, 24 aa, Artificial Sequence
  Synthetic polypeptide
VHLNHHSTEPGTENILHKYIFEWT

SEQ ID NO: 14233 - protein, 37 aa, Artificial Sequence
  Synthetic polypeptide
TESILITTVQSLAQRTYSTNTSLNGHRKRDPCSSSCE

SEQ ID NO: 14234 - protein, 750 aa, Artificial Sequence
  Synthetic polypeptide
MDIEREIHAAPHVSEKLIQLFRNKSEFTILATVQQKPSTSGVILSIRELEHSYFELESSGLRDEIRYHYIHNGKPRTEALPYRMADGQWHKVALSVSASHLLLHVDCNRIYERVIDPPDTNLPPGINLWLGQRNQKHGLFKGIIQDGKIIFMPNGYITQCPNLNHTCPTCSDFLSLVQGIMDLQELLAKMTAKLNYAETRLSQLENCHCEKTCQVSGLLYRDQDSWVDGDHCRNCTCKSGAVECRRMSCPPLNCSPDSLPVHIAGQCCKVCRPKCIYGGKVLAEGQRILTKSCRECRGGVLVKITEMCPPLNCSEKDHILPENQCCRVCRGHNFCAEGPKCGENSECKNWNTKATCECKSGYISVQGDSAYCEDIDECAAKMHYCHANTVCVNLPGLYRCDCVPGYIRVDDFSCTEHDECGSGQHNCDENAICTNTVQGHSCTCKPGYVGNGTICRAFCEEGCRYGGTCVAPNKCVCPSGFTGSHCEKDIDECSEGIIECHNHSRCVNLPGWYHCECRSGFHDDGTYSLSGESCIDIDECALRTHTCWNDSACINLAGGFDCLCPSGPSCSGDCPHEGGLKHNGQVWTLKEDRCSVCSCKDGKIFCRRTACDCQNPSADLFCCPECDTRVTSQCLDQNGHKLYRSGDNWTHSCQQCRCLEGEVDCWPLTCPNLSCEYTAILEGECCPRCVSDPCLADNITYDIRKTCLDSYGVSRLSGSVWTMAGSPCTTCKCKNGRVCCSVDFECLQNN

SEQ ID NO: 14235 - protein, 693 aa, Artificial Sequence
  Synthetic polypeptide
MDIEREIHAAPHVSEKLIQLFRNKSEFTILATVQQKPSTSGVILSIRELEHRIYERVIDPPDTNLPPGINLWLGQRNQKHGLFKGIIQDGKIIFMPNGYITQCPNLNHTCPTCSDFLSLVQGIMDLQELLAKMTAKLNYAETRLSQLENCHCEKTCQVSGLLYRDQDSWVDGDHCRNCTCKSGAVECRRMSCPPLNCSPDSLPVHIAGQCCKVCRPKCIYGGKVLAEGQRILTKSCRECRGGVLVKITEMCPPLNCSEKDHILPENQCCRVCRGHNFCAEGPKCGENSECKNWNTKATCECKSGYISVQGDSAYCEDIDECAAKMHYCHANTVCVNLPGLYRCDCVPGYIRVDDFSCTEHDECGSGQHNCDENAICTNTVQGHSCTCKPGYVGNGTICRAFCEEGCRYGGTCVAPNKCVCPSGFTGSHCEKDIDECSEGIIECHNHSRCVNLPGWYHCECRSGFHDDGTYSLSGESCIDIDECALRTHTCWNDSACINLAGGFDCLCPSGPSCSGDCPHEGGLKHNGQVWTLKEDRCSVCSCKDGKIFCRRTACDCQNPSADLFCCPECDTRVTSQCLDQNGHKLYRSGDNWTHSCQQCRCLEGEVDCWPLTCPNLSCEYTAILEGECCPRCVSDPCLADNITYDIRKTCLDSYGVSRLSGSVWTMAGSPCTTCKCKNGRVCCSVDFECLQNN

SEQ ID NO: 14236 - protein, 703 aa, Artificial Sequence
  Synthetic polypeptide
MDIEREIHAAPHVSEKLIQLFRNKSEFTILATVQQKPSTSGVILSIRELEHSYFELESSGLRDEIRYHYIHNGKPRTEALPYRMADGQWHKVALSVSASHLLLHVDCNRIYERVIDPPDTNLPPGINLWLGQRNQKHGLFKGIIQDGKIIFMPNGYITQCPNLNHTCPTCSDFLSLVQGIMDLQELLAKMTAKLNYAETRLSQLENCHCEKTCQVSGLLYRDQDSWVDGDHCRNCTCKSGAVECRRMSCPPLNCSPDSLPVHIAGQCCKVCRPKCIYGGKVLAEGQRILTKSCRECRGGVLVKITEMCPPLNCSEKDHILPENQCCRVCRGHNFCAEGPKCGENSECKNWNTKATCECKSGYISVQGDSAYCEDIDECAAKMHYCHANTVCVNLPGLYRCDCVPGYIRVDDFSCTEHDECGSGQHNCDENAICTNTVQGHSCTCKPGYVGNGTICRAFCEEGCRYGGTCVAPNKCVCPSGFTGSHCEKDIDECALRTHTCWNDSACINLAGGFDCLCPSGPSCSGDCPHEGGLKHNGQVWTLKEDRCSVCSCKDGKIFCRRTACDCQNPSADLFCCPECDTRVTSQCLDQNGHKLYRSGDNWTHSCQQCRCLEGEVDCWPLTCPNLSCEYTAILEGECCPRCVSDPCLADNITYDIRKTCLDSYGVSRLSGSVWTMAGSPCTTCKCKNGRVCCSVDFECLQNN

SEQ ID NO: 14237 - protein, 16 aa, Artificial Sequence
  Synthetic polypeptide
VKCTFTGHLLKSHKLT

SEQ ID NO: 14238 - protein, 4 aa, Artificial Sequence
  Synthetic polypeptide
SLTS

SEQ ID NO: 14239 - protein, 165 aa, Artificial Sequence
  Synthetic polypeptide
WFLHPSLRGLLSSLPLFPSILGKMYIYWALTEVSQADVMADRVPRCPVCTGVVKPDIVFFGEPLPQRFLLHVVDFPMADLLLILGTSLEVEPFASLTEAVRSSVPRLLINRDLVGPLAWHPRSRDVAQLGDVVHGVESLVELLGWTEEMRDLVQRETGKLDGPDK

SEQ ID NO: 14240 - protein, 124 aa, Artificial Sequence
  Synthetic polypeptide
WFLHPSLRGLLSSLPLFPSILGKMYIYWALTEVSQADVMADRVPRCPVCTGVVKPDIVFFGEPLPQRFLLHVVDFPMADLLLILGTSLEVCQQACAGRRLEGRGREGYRSHLMGPSRAGATLGR

SEQ ID NO: 14241 - protein, 183 aa, Artificial Sequence
  Synthetic polypeptide
WFLHPSLRGLLSSLPLFPSILGKMYIYWALTEVSQADVMADRVPRCPVCTGVVKPDIVFFGEPLPQRFLLHVVDFPMADLLLILGTSLEVEPFASLTEAVRSSVPRLLINRDLVGPLAWHPRSRDVAQLGDVVHGVESLVELLGWTEEMRDLVQRETGKVQTAEEDHPRGCPSHCSRLDGPDK

SEQ ID NO: 14242 - protein, 62 aa, Artificial Sequence
  Synthetic polypeptide
GLPAMLTVQPTKLKEEPNTAGSEHAPFHENQQLRRGPGPGRGDSADTHHPHLTAAGTPSGHH

SEQ ID NO: 14243 - protein, 227 aa, Artificial Sequence
  Synthetic polypeptide
VSEACQPCLLYSLQNLRKSPTLLEVSMPHFMRTNSFAEDLDLEGETLLTPITHISQLREHHRATIKVIRRMQYFVAKKKFQQARKPYDVRDVIEQYSQGHLNLMVRIKELQRRLDQSIGKPSLFISVSEKSKDRGSNTIGARLNRVEDKVTQLDQRLALITDMLHQLLSLHGGSTPGSGGPPREGGAHITQPCGSGGSVDPELFLPSNTLPTYEQLTVPRRGPDEGS

SEQ ID NO: 14244 - protein, 300 aa, Artificial Sequence
  Synthetic polypeptide
LQSDSFKKKPIPKKPTMLALAKILLISTLFYSLLSGSHGKENQDINTTQNIAEVFKTMENKPISLESEANLNSDKENITTSNLKASHSPPLNLPNNSHGITDFSSNSSAEHSLGSLKPTSTISTSPPLIHSFVSKVPWNAPIADEDLLPISAHPNATPALSSENFTWSLVNDTVKTPDNSSITVSILSSEPTSPSVTPLIVEPSGWLTTNSDSFTGFTPYQEKTTLQPTLKFTNNSKLFPNTSDPQKVLRLDNAPEPYDVSFGNSSYYNPTLNDSAMPESEENARDGIPMDDIPPLRTSV

SEQ ID NO: 14245 - protein, 19 aa, Artificial Sequence
  Synthetic polypeptide
SKAIPLKKNQYQRSLQCWP

SEQ ID NO: 14246 - protein, 5 aa, Artificial Sequence
  Synthetic polypeptide
PKRFL

SEQ ID NO: 14247 - protein, 350 aa, Artificial Sequence
  Synthetic polypeptide
LQSDSFKKKPIPKKPTMLALAKILLISTLFYSLLSGSHGKENQDINTTQNIAEVFKTMENKPISLESEANLNSDKENITTSNLKASHSPPLNLPNNSHGITDFSSNSSAEHSLGSLKPTSTISTSPPLIHSFVSKVPWNAPIADEDLLPISAHPNATPALSSENFTWSLVNDTVKTPDNSSITVSILSSEPTSPSVTPLIVEPSGWLTTNSDSFTGFTPYQEKTTLQPTLKFTNNSKLFPNTSDPQKENRNTGIVFGAILGAILGVSLLTLVGYLLCGKRKTDSFSHRRLYDDRNEPVLRLDNAPEPYDVSFGNSSYYNPTLNDSAMPESEENARDGIPMDDIPPLRTSV

SEQ ID NO: 14248 - protein, 515 aa, Artificial Sequence
  Synthetic polypeptide
EDASCTACRTYLQLRFNKPVRYAATVIYIVQTILYTGVVVYAPALALNQVTGFDLWGSVFATGIVCTFYCTLGGLKAVVWTDAFQMVVMIVGFLTVLIQGSTHAGGFHNVLEQSTNGSRLHIFDFDVDPLRRHTFWTITVGGTFTWLGIYGVNQSTIQRCISCKTEKHAKLALYFNLLGLWIILVCAVFSGLIMYSHFKDCDPWTSGIISAPDQLMPYFVMEIFATMPGLPGLFVACAFSGTLSTVASSINALATVTFEDFVKSCFPHLSDKLSTWISKGLCLLFGVMCTSMAVAASVMGGVVQASLSIHGMCGGPMLGLFSLGIVFPFVNWKGALGGLLTGITLSFWVAIGAFIYPAPASKTWPLPLSTDQCIKSNVTATGPPVLSSRPGIADTWYSISYLYYSAVGCLGCIVAGVIISLITGRQRGEDIQPLLIRPVCNLFCFWSKKYKTLCWCGVQHDSGTEQENLENGSARKQGAESVLQNGLRRESLVHVPGYDPKDKSYNNMAFETTHF

SEQ ID NO: 14249 - protein, 71 aa, Artificial Sequence
  Synthetic polypeptide
SAHSPFAFCHDCVFPEASPEAEKMLPVQPAELTYNYDSTNQFAMLPRSSTLYRRFSTQEWWCMLLPWHSIK

SEQ ID NO: 14250 - protein, 100 aa, Artificial Sequence
  Synthetic polypeptide
VLVRYGCLKVCNNSFFFLFLLLQPCEVLTPPLPSAMIVCFLRPPQKLRRCFLYSLQNLLTTTIQQTSSLCCHGHLHCTDDSLHRSGGVCSCPGTQSSDWV

SEQ ID NO: 14251 - protein, 293 aa, Artificial Sequence
  Synthetic polypeptide
EDASCTACRTYLQLRFNKPVRYAATVIYIVQTILYTGVVVYAPALALNQVTGFDLWGSVFATGIVCTFYCTLGGLKAVVWTDAFQMVVMIVGFLTVLIQGSTHAGGFHNVLEQSTNGSRLHIFDFDVDPLRRHTFWTITVGGTFTWLGIYGVNQSTIQRCISCKTEKHAKLALYFNLLGLWIILVCAVFSGLIMYSHFKDCDPWTSGIISAPDQLMPYFVMEIFATMPGLPGLFVACAFSGTLSTVASSINALATVTFEDFVKSCFPHLSDKLSTWISKGLCRYSWWTFYSIS

SEQ ID NO: 14252 - protein, 78 aa, Artificial Sequence
  Synthetic polypeptide
LSRSHPHGARQVPPGEKSDDHPFPYYGYFILWLHEGCPHERSKHPRTRWLGLPRCADPWDSGEREWAQGRFKRLDIIG

SEQ ID NO: 14253 - protein, 267 aa, Artificial Sequence
  Synthetic polypeptide
SSSADPTPMEHGKFHQVRRVMTILFLTMVISYFGCMKAAPMKEANIRGQGGLAYPGVRTHGTLESVNGPKAGSRGLTSLADTFEHVIEELLDEDQKVRPNEENNKDADLYTSRVMLSSQVPLEPPLLFLLEEYKNYLDAANMSMRVRRHSDPARRGELSVCDSISEWVTAADKKTAVDMSGGTVTVLEKVPVSKGQLKQYFYETKCNPMGYTKEGCRGIDKRHWNSQCRTTQSYVRALTMDSKKRIGWRFIRIDTSCVCTLTIKRGR

SEQ ID NO: 14254 - protein, 34 aa, Artificial Sequence
  Synthetic polypeptide
DRTIHSPGKGLKARQPSDLAQQIPPPWSTASSTR

SEQ ID NO: 14255 - protein, 83 aa, Artificial Sequence
  Synthetic polypeptide
NLRLLPGHFGFLLPLSEEAKKGDTVLAGVIDLDYEDEISLLRRNGDFSRYDIWFGRAHKSHSAEGVRYCSLCLGQRPNSLCIS

SEQ ID NO: 14256 - protein, 205 aa, Artificial Sequence
  Synthetic polypeptide
LTWTMKMKSVYYAATEIFLDMTFGSGGHTKAILQKESDIVLYALDRDPTAYALAEHLSELYPKQIRAMLGQFSQAEALLMKAGVQPGTFDGVLMDLGCSSMQLDTPERGFSLRKDGPLDMRMDGGRSTGTCIYPKNIRGGEACQENRFSNCSGTQHLPHHQNPAACQHRCRSISSLCYLYTERLTTAIYPYCHQDFPGSSHICEQ

SEQ ID NO: 14257 - protein, 11 aa, Artificial Sequence
  Synthetic polypeptide
NQSTTPQRRFF

SEQ ID NO: 14258 - protein, 199 aa, Artificial Sequence
  Synthetic polypeptide
LTWTMKMKSVYYAATEIFLDMTFGSGGHTKAILQKESDIVLYALDRDPTAYALAEHLSELYPKQIRAMLGQFSQAEALLMKAGVQPGTFDGVLMDLGCSSMQLDTPERGFSLRKDGPLDMRMDGGRYPDMPTAADVVNALDQQALASILRTYGEEKHAKKIASAIVQARSIYPITRTQQLASIVAEYSETYFPVAQTLY

SEQ ID NO: 14259 - protein, 54 aa, Artificial Sequence
  Synthetic polypeptide
LTWTMKMKSVYYAATEIFLDMTFGSGGHTKAILQKESDIVLYALDRDPTAYALA

SEQ ID NO: 14260 - protein, 333 aa, Artificial Sequence
  Synthetic polypeptide
LTWTMKMKSVYYAATEIFLDMTFGSGGHTKAILQKESDIVLYALDRDPTAYALAEHLSELYPKQIRAMLGQFSQAEALLMKAGVQPGTFDGVLMDLGCSSMQLDTPERGFSLRKDGPLDMRMDGGRYPDMPTAADVVNALDQQALASILRTYGEEKHAKKIASAIVQARSIYPITRTQQLASIVAGAFPPSAIYTRKDLLQRSTHIATKTFQALRIFVNNELNELYTGLKTAQKFLRPGGRLVALSFHSLEDRIVKRFLLGISMTERFNLSVRQQVMKTSQLGSDHENTEEVSMRRAPLMWELIHKKVLSPQDQDVQDNPRGRSAKLRAAIKL

SEQ ID NO: 14261 - protein, 35 aa, Artificial Sequence
  Synthetic polypeptide
DVTYSFLPSTMIVKLPQPSGTNTLKHISQWPKLFI

SEQ ID NO: 14262 - protein, 10 aa, Artificial Sequence
  Synthetic polypeptide
SFLSQVELIL

SEQ ID NO: 14263 - protein, 53 aa, Artificial Sequence
  Synthetic polypeptide
DVTYSFLPSTMIVKLPQPSGTEHFLPLLFIHGKTYYSDLPILPPRLSRLFAYL

SEQ ID NO: 14264 - protein, 42 aa, Artificial Sequence
  Synthetic polypeptide
SFLSQVELSISSLCYLYTERLTTAIYPYCHQDFPGSSHICEQ

SEQ ID NO: 14265 - protein, 101 aa, Artificial Sequence
  Synthetic polypeptide
SWAYPRSATHGPVCLPLEASVSSAVKRAYDIDRPPMRQCGVQRVLGGSLLMAPQGLQPPSGQQRAQKDCLGSSDVTAWKWCTAFLTTFPAKTGPAAHLCAR

SEQ ID NO: 14266 - protein, 156 aa, Artificial Sequence
  Synthetic polypeptide
PTTHEAMRCAEGAWWFSPDGPAGSAASIWPAEGAEGLPGQLGRDRLEVVYSVPDNVPGQNGSRRPLVCKITGKCLSVCSEENAKAGGCSAFPLLLSQLGARMTGREHAHKGPELTTPDSGLPRPPNPALAGFRALAQHSPPLGTSTPSAVLLSAAT

SEQ ID NO: 14267 - protein, 58 aa, Artificial Sequence
  Synthetic polypeptide
GQAWWLTSVIPALWEAEAKAGVCSPSGPLLLGPSHADSTFTTASPGTRKCSYLKMGKR

SEQ ID NO: 14268 - protein, 59 aa, Artificial Sequence
  Synthetic polypeptide
SQHFGRPRQRPACAAPVVPSCWDPAMQTPPLQQPHQEQGSVHTSRWEKGDVVLLWANRL

SEQ ID NO: 14269 - protein, 756 aa, Artificial Sequence
  Synthetic polypeptide
PGMVAHVCNPSTLGGRGKGRRVQPQWSPPAGTQPCRLHLYNSLTRNKEVFIPQDGKKVTWYCCGPTVYDASHMGHARSYISFDILRRVLKDYFKFDVFYCMNITDIDDKIIKRARQNHLFEQYREKRPEAAQLLEDVQAALKPFSVKLNETTDPDKKQMLERIQHAVQLATEPLEKAVQSRLTGEEVNSCVEVLLEEAKDLLSDWLDSTLGCDVTDNSIFSKLPKFWEGDFHRDMEALNVLPPDVLTRVSEYVPEIVNFVQKIVDNGYGYVSNGSVYFDTAKFASSEKHSYGKLVPEAVGDQKALQEGEGDLSISADRLSEKRSPNDFALWKASKPGEPSWPCPWGKGRPGWHIECSAMAGTLLGASMDIHGGGFDLRFPHHDNELAQSEAYFENDCWVRYFLHTGHLTIAGCKMSKSLKNFITIKDALKKHSARQLRLAFLMHSWKDTLDYSSNTMESALQYEKFLNEFFLNVKDILRAPVDITGQFEKWGEEEAELNKNFYDKKTAIHKALCDNVDTRTVMEEMRALVSQCNLYMAARKAVRKRPNQALLENIALYLTHMLKIFGAVEEDSSLGFPVGGPGTSLSLEATVMPYLQVLSEFREGVRKIAREQKVPEILQLSDALRDNILPELGVRFEDHEGLPTVVKLVDRNTLLKEREEKRRVEEEKRKKKEEAARRKQEQEAAKLAKMKIPPSEMFLSETDKYSKFDENGLPTHDMEGKELSKGQAKKLKKLFEAQEKLYKEYLQMAQNGSFQ

SEQ ID NO: 14270 - protein, 54 aa, Artificial Sequence
  Synthetic polypeptide
GQAWWLTSVIPALWEAEAKAGVCSPSGPLLLGPSHADSTFTTASPGTSVSCISC

SEQ ID NO: 14271 - protein, 45 aa, Artificial Sequence
  Synthetic polypeptide
SQHFGRPRQRPACAAPVVPSCWDPAMQTPPLQQPHQEQVFLAFLV

SEQ ID NO: 14272 - protein, 53 aa, Artificial Sequence
  Synthetic polypeptide
PGMVAHVCNPSTLGGRGKGRRVQPQWSPPAGTQPCRLHLYNSLTRNKCFLHFL

SEQ ID NO: 14273 - protein, 734 aa, Artificial Sequence
  Synthetic polypeptide
PGMVAHVCNPSTLGGRGKGRRVQPQWSPPAGTQPCRLHLYNSLTRNKEVFIPQDGKKVTWYCCGPTVYDASHMGHARSYISFDILRRVLKDYFKFDVFYCMNITDIDDKIIKRARQNHLFEQYREKRPEAAQLLEDVQAALKPFSVKLNETTDPDKKQMLERIQHAVQLATEPLEKAVQSRLTGEEVNSCVEVLLEEAKDLLSDWLDSTLGCDVTDNSIFSKLPKFWEGDFHRDMEALNVLPPDVLTRVSEYVPEIVNFVQKIVDNGYGYVSNGSVYFDTAKFASSEKHSYGKLVPEAVGDQKALQEGEGDLSISADRLSEKRSPNDFALWKASKPGEPSWPCPWGKGRPGWHIECSAMAGTLLGASMDIHGGGFDLRFPHHDNELAQSEAYFENDCWVRYFLHTGHLTIAGCKMSKSLKNFITIKDALKKHSARQLRLAFLMHSWKDTLDYSSNTMESALQYEKFLNEFFLNVKDILRAPVDITGQFEKWGEEEAELNKNFYDKKTAIHKALCDNVDTRTVMEEMRALVSQCNLYMAARKAVRKRPNQALLENIALYLTHMLKIFGAVEEDSSLGFPVGGPGTSLSLEATVMPYLQVLSEFREGVRKIAREQKVPEILQLSDALRDNILPELGVRFEDHEGLPTVVKLVDRNTLLKEREEKRRVEEEKRKKKEEAARRKQEQEAAKLAKMKIPPSEMFLSETDKYSKFDENVSMVCPHMTWRAKSSAKGKPRS

SEQ ID NO: 14274 - protein, 68 aa, Artificial Sequence
  Synthetic polypeptide
PGMVAHVCNPSTLGGRGKGRRVQPQWSPPAGTQPCRLHLYNSLTRNKEVFIPQDGKKVTWYCCGPTVY

SEQ ID NO: 14275 - protein, 84 aa, Artificial Sequence
  Synthetic polypeptide
PGMVAHVCNPSTLGGRGKGRRVQPQWSPPAGTQPCRLHLYNSLTRNKEVFIPQDGKKVTWYCCGPTVYDASHMGHASSRGVPRC

SEQ ID NO: 14276 - protein, 43 aa, Artificial Sequence
  Synthetic polypeptide
GRSQDGRIGTAPVYSSQRERRRRRVISAFPSERVYVIPGKSSY

SEQ ID NO: 14277 - protein, 1735 aa, Artificial Sequence
  Synthetic polypeptide
FLHFHLREFMSSQAKAVIKTTDDYLQSQFGPNRLVHSAAVSEGSGLQDCSTHQTASDHSHDEISDLDSYKSNSKNNSCSISASKRNRPVSAPVGQLRVAEFSSLKFQSARNWQKLSQRHKLQPRVIKVTAYKNGSRTVFARVTVPTITLLLEECTEKLNLNMAARRVFLADGKEALEPEDIPHEADVYVSTGEPFLNPFKKIKDHLLLIKKVTWTMNGLMLPTDIKRRKTKPVLSIRMKKLTERTSVRILFFKNGMGQDGHEITVGKETMKKVLDTCTIRMNLNLPARYFYDLYGRKIEDISKVPLLEKCLQNSITPLRGLLWVSKGEGFSPSGAKMYIQGVLLALYQRLKSAKKYYKQLNLVMNEQKEKITEKVILSMTAKEHHKEQEEVSRLIDELQTAIKSNIGHLCKLGPQLQAEQEQFSSYVYQHIKSLPANTLVPGGLQLKVFENGKNTGEISVGISKKDLGSDSPIQTDHMMERLLLKIHQRLQGSSINPPGLNYSSMRLFDENGQEIKNPLSLKNEQKIWVSYGRAYRSPLNLALGLTFDRVSAFARGDIMVAYKTFLDPNAVLLPGCGNWEVCEGFPINFNCTSQQIPDQFEKVDLENHFLQNKVDPNIVLHASVSIGKWSFSGSEASSRSQIAPSILWPVASVWLITKTGMILSRAITQGCLAIGHPIRVKAAEGTSLEGYKLILQKRHSGDDSQKWVFGTDGCIYSKAYPQFVLTYLEELNAQVDVTQTEYHIHHGAWTTAHQEHGRNLAEEVLQESASNLGLKQLPEPSDTHLMPEGSLEETGELTVALVRKLEEKHPKASAQRWAIKHEGTSKPGQWKHSRVENPLWNKLTYMWPVLPSGQLNEEFDWPIQGLLVPSSPPMKKPICKTTEPYAPVRLRVLQNGEKNKNRSVTILGPDISPGRKTQCTEILNLPSAARRLYNEKGKEIFALKDLQRDELVYVSCGELWINPDLSIAQQKKQIFLRNLESDIAKIQIFCSTHKIEALVLEVQSDIVSGSKLAVHKPVAIFGEEKQVTEPEEKQMQEDPLTTENASSEILDSHVRAHLRMKACHTLPRYAWQETSHDFDEDDSLPKKTEKGLFENVEPQKKHSCSPKHSKLHKHCHQQFEYRDGQIISHAAPQLVLGVQGPNLRSGMEVVLVEKKSDGSHQRWIHQEDSRTFHLVSNPDLVLAVSMTKTRNEVCGYPVIVQKYKPYNNGAANQKWHYMKNIKALVAFHSTALDKEITSANYAGVCTSSVIKEENIDQPGYCYLSPDGKRKTMLCLACGQSMRTEKGLKQLLPGVPFLCISGTKTQKPFLQGPFKVISVAEVDLSCDKAEKTLSYYQARLLSLRMKTCTQAASHSGMAATHQKAVKIIAYKNGDGYRNGKLIVAGTFPMLLTECTEQLGLARAASKVYTKDGTPIFTLRDLVLWALDESFLQRDSEKQKQDAAPVGKEQIIVEKNPRMKVKNRLFAKSVTSDSLDGIDKSLLTLILRNPIAIWVSCGEPFLPPNALQKAEKLEKQNWLKKDRILADLDTMRHKMRQLKGRRVAACQPATMVPTKSPVQPVVVEGGWTEQTQQEIKLMELIRHTEAHLSEIQEMESKINFPIATKRIAVKPSNLYKQPNTKRVWIYLNGGRPEDGTYAWGKTISELLQDCSSRLKMTHPARALYTPSGEPIQSWDDIERDMVICVSMGHGFKTPKELKQLMEIRANYARIRRQQGPQATDIVVSPSTKLLSLAHLHN

SEQ ID NO: 14278 - protein, 222 aa, Artificial Sequence
  Synthetic polypeptide
FLHFHLREFMSSQAKAVIKTTDDYLQSQFGPNRLVHSAAVSEGSGLQDCSTHQTASDHSHDEISDLDSYKSNSKNNSCSISASKRNRPVSAPVGQLRVAEFSSLKFQSARNWQKLSQRHKLQPRVIKVTAYKNGSRTVFARVTVPTITLLLEECTEKLNLNMAARRVFLADGKEALEPEDIPHEADVYVSTGEPFLNPFKKIKGFRYLYNKNESKFTSQIFL

SEQ ID NO: 14279 - protein, 306 aa, Artificial Sequence
  Synthetic polypeptide
FLHFHLREFMSSQAKAVIKTTDDYLQSQFGPNRLVHSAAVSEGSGLQDCSTHQTASDHSHDEISDLDSYKSNSKNNSCSISASKRNRPVSAPVGQLRVAEFSSLKFQSARNWQKLSQRHKLQPRVIKVTAYKNGSRTVFARVTVPTITLLLEECTEKLNLNMAARRVFLADGKEALEPEDIPHEADVYVSTGEPFLNPFKKIKDHLLLIKKVTWTMNGLMLPTDIKRRKTKPVLSIRMKKLTERTSVRILFFKNGMGQDGHEITVGKETMKKVLDTCTIRMNLNLPARYFYDLYGRKIEDISKGKH

SEQ ID NO: 14280 - protein, 55 aa, Artificial Sequence
  Synthetic polypeptide
KKAHHHWSLVKCKSKPGDTISRQSEWLIMKKLLDFFPLFLVYILGRTHLSQENFC

SEQ ID NO: 14281 - protein, 26 aa, Artificial Sequence
  Synthetic polypeptide
KSYWIFSPSFWCTYLEGRICHRKIFV

SEQ ID NO: 14282 - protein, 70 aa, Artificial Sequence
  Synthetic polypeptide
TDTFQKKIFMWPRNMKKSSSSLVISEMQIKTRRYHLTPVRMVDYEKVIGFFPPLFGVHTWKDASVTGKFL

SEQ ID NO: 14283 - protein, 48 aa, Artificial Sequence
  Synthetic polypeptide
VLELETSLGNMETSSLQKIQKLARLLDFFPLFLVYILGRTHLSQENFC

SEQ ID NO: 14284 - protein, 26 aa, Artificial Sequence
  Synthetic polypeptide
PGYWIFSPSFWCTYLEGRICHRKIFV

SEQ ID NO: 14285 - protein, 54 aa, Artificial Sequence
  Synthetic polypeptide
RWMDYLSLGVGDQPGQYGNLISTENTKISQVIGFFPPLFGVHTWKDASVTGKFL

SEQ ID NO: 14286 - protein, 103 aa, Artificial Sequence
  Synthetic polypeptide
KWELPCTSSLLLPPCKNCLSPSAMIMRPPQSCETVKTKPLISTPLQSHLQAIKTTKNTSGDDDWQSLITNQLNKSENLLSLENDNQPKKRKAEETLEKNNRLK

SEQ ID NO: 14287 - protein, 8 aa, Artificial Sequence
  Synthetic polypeptide
GLPSHVKL

SEQ ID NO: 14288 - protein, 22 aa, Artificial Sequence
  Synthetic polypeptide
NCENKASDINSTTKPFAGNQDD

SEQ ID NO: 14289 - protein, 53 aa, Artificial Sequence
  Synthetic polypeptide
GRARWLTPVIPALWEAEAARSQVASPPTMRCSRRSTRWLCWGRPTTLLPRRPP

SEQ ID NO: 14290 - protein, 19 aa, Artificial Sequence
  Synthetic polypeptide
SQHFGRPRRPDHKWPAPQL

SEQ ID NO: 14291 - protein, 141 aa, Artificial Sequence
  Synthetic polypeptide
PGAVAHTCNPSTLGGRGGQITSGQPPNYEMLKEEHEVAVLGAPHNPAPPTSTVIHIRSETSVPDHVVWSLFNTLFMNPCCLGFIAFAYSVKSRDRKMVGDVTGAQAYASTAKCLNIWALILGILMTILLIVIPVLIFQAYG

SEQ ID NO: 14292 - protein, 91 aa, Artificial Sequence
  Synthetic polypeptide
QTSPPRFVTVEELLETARGVTNMALAHEIVVNGDFQIKPVELPENSLKKRVKEIVHKAFWDCLSVQLSEDPPAYDHAIKLVGEIKETLLSF

SEQ ID NO: 14293 - protein, 19 aa, Artificial Sequence
  Synthetic polypeptide
AEITPLHSRLGDKLVLLAL

SEQ ID NO: 14294 - protein, 35 aa, Artificial Sequence
  Synthetic polypeptide
SQLLVGLRQEDHLSLGGGGCSEPRSRHCTPVWVTN

SEQ ID NO: 14295 - protein, 456 aa, Artificial Sequence
  Synthetic polypeptide
QTSPPRFVTVEELLETARGVTNMALAHEIVVNGDFQIKPVELPENSLKKRVKEIVHKAFWDCLSVQLSEDPPAYDHAIKLVGEIKETLLSFLLPGHTRLRNQITEVLDLDLIKQEAENGALDISKLAEFIIGMMGTLCAPARDEEVKKLKDIKEIVPLFREIFSVLDLMKVDMANFAISSIRPHLMQQSVEYERKKFQEILERQPNSLDFVTQWLEEASEDLMTQKYKHALPVGGMAAGSGDMPRLSPVAVQNYAYLKLLKWDHLQRPFPETVLMDQSRFHELQLQLEQLTILGAVLLVTFSMAAPGISSQADFAEKLKMIVKILLTDMHLPSFHLKDVLTTIGEKVCLEVSSCLSLCGSSPFTTDKETVLKGQIQAVASPDDPIRRIMESRILTFLETYLASGHQKPLPTVPGGLSPVQRELEEVAIKFARLVNYNKMVFCPYYDAILSKILVRS

SEQ ID NO: 14296 - protein, 542 aa, Artificial Sequence
  Synthetic polypeptide
QTSPPRFVTVEELLETARGVTNMALAHEIVVNGDFQIKPVELPENSLKKRVKEIVHKAFWDCLSVQLSEDPPAYDHAIKLVGEIKETLLSFLLPGHTRLRNQITEVLDLDLIKQEAENGALDISKLAEFIIGMMGTLCAPARDEEVKKLKDIKEIVPLFREIFSVLDLMKVDMANFAISSIRPHLMQQSVEYERKKFQEILERQPNSLDFVTQWLEEASEDLMTQKYKHALPVGGMAAGSGDMPRLSPVAVQNYAYLKLLKWDHLQRPFPETVLMDQSRFHELQLQLEQLTILGAVLLVTFSMAAPGISSQADFAEKLKMIVKILLTDMHLPSFHLKDVLTTIGEKVCLEVSSCLSLCGSSPFTTDKETVLKGQIQAVASPDDPIRRIMESRILTFLETYLASGHQKPLPTVPGGLSPVQRELEEVAIKFARLVNYNKMVFCPYYDAILRKRWISFGNFFGSSNTDMSPWNCRTDYPMSLHIRFPKNHVIEAPMTIQLCFQEPCNKALSLLNIPLEAKGILDRSFLQRRLKPYRIRFCCRAL

SEQ ID NO: 14297 - protein, 101 aa, Artificial Sequence
  Synthetic polypeptide
QTSPPRFVTVEELLETARGVTNMALAHEIVVNGDFQIKPVELPENRVSLCCPGWSVVALSRLTATSGQADLELLTSGELPASASKSAGITGLEEESKGDCT

SEQ ID NO: 14298 - protein, 53 aa, Artificial Sequence
  Synthetic polypeptide
QTSPPRFVTVEELLETARGVTNMALAHEIVVNGDFQIKPVELPENSLKKRVKE

SEQ ID NO: 14299 - protein, 13 aa, Artificial Sequence
  Synthetic polypeptide
PAAGRQLSMSQRR

SEQ ID NO: 14300 - protein, 26 aa, Artificial Sequence
  Synthetic polypeptide
GVNSGGLDCSNIPKKGLDLDLLLEGS

SEQ ID NO: 14301 - protein, 735 aa, Artificial Sequence
  Synthetic polypeptide
FCKGLTQEAWTVQTSPRKDWTLTCCWKAAEYVPEKVKKAEKKLEENPYDLDAWSILIREAQNQPIDKARKTYERLVAQFPSSGRFWKLYIEAEIKAKNYDKVEKLFQRCLMKVLHIDLWKCYLSYVRETKGKLPSYKEKMAQAYDFALDKIGMEIMSYQIWVDYINFLKGVEAVGSYAENQRITAVRRVYQRGCVNPMINIEQLWRDYNKYEEGINIHLAKKMIEDRSRDYMNARRVAKEYETVMKGLDRNAPSVPPQNTPQEAQQVDMWKKYIQWEKSNPLRTEDQTLITKRVMFAYEQCLLVLGHHPDIWYEAAQYLEQSSKLLAEKGDMNNAKLFSDEAANIYERAISTLLKKNMLLYFAYADYEESRMKYEKVHSIYNRLLAIEDIDPTLVYIQYMKFARRAEGIKSGRMIFKKAREDTRTRHHVYVTAALMEYYCSKDKSVAFKIFELGLKKYGDIPEYVLAYIDYLSHLNEDNNTRVLFERVLTSGSLPPEKSGEIWARFLAFESNIGDLASILKVEKRRFTAFKEEYEGKETALLVDRYKFMDLYPCSASELKALGYKDVSRAKLAAIIPDPVVAPSIVPVLKDEVDRKPEYPKPDTQQMIPFQPRHLAPPGLHPVPGGVFPVPPAAVVLMKLLPPPICFQGPFVQVDELMEIFRRCKIPNTVEEAVRIITGGAPELAVEGNGPVESNAVLTKAVKRPNEDSDEDEEKGAVVPPVHDIYRARQQKRIR

SEQ ID NO: 14302 - protein, 171 aa, Artificial Sequence
  Synthetic polypeptide
FCKGLTQEAWTVQTSPRKDWTLTCCWKAAEYVPEKVKKAEKKLEENPYDLDAWSILIREAQNQPIDKARKTYERLVAQFPSSGRFWKLYIEAEIKAKNYDKVEKLFQRCLMKVLHIDLWKCYLSYVRETKGKLPSYKEKMAQAYDFALDKIGMEIMSYQIWVDYINFLKGV

SEQ ID NO: 14303 - protein, 121 aa, Artificial Sequence
  Synthetic polypeptide
FCKGLTQEAWTVQTSPRKDWTLTCCWKAAEYVPEKVKKAEKKLEENPYDLDAWSILIREAQNQPIDKARKTYERLVAQFPSSGRFWKLYIEAEVTILFYFFLYQYCSIHCSDRKQVRNIAN

SEQ ID NO: 14304 - protein, 62 aa, Artificial Sequence
  Synthetic polypeptide
FCKGLTQEAWTVQTSPRKDWTLTCCWKAAEYVPEKVKKAEKKLEENPYDLDAWSILIREAQV

SEQ ID NO: 14305 - protein, 36 aa, Artificial Sequence
  Synthetic polypeptide
FCKGLTQEAWTVQTSPRKDWTLTCCWKAAEYVPEKV

SEQ ID NO: 14306 - protein, 79 aa, Artificial Sequence
  Synthetic polypeptide
FCKGLTQEAWTVQTSPRKDWTLTCCWKAAEYVPEKVKKAEKKLEENPYDLDAWSILIREAQNQPIDKARKTYERLVAQF

SEQ ID NO: 14307 - protein, 220 aa, Artificial Sequence
  Synthetic polypeptide
DNSVLHAPVQGFDYAKQHLGQQGADEEVIPVTQETVVLPLPIRDAPQERDVAQDGSTIKTAKSTETRKSRSPSENGSVISNESGKPSSGRRSPQNVMAQQKVTKEEARKRNVPASDEEEGAVLFDNSSKVAAEPFDTSSGSVQLIAIKPTALPMVPPTSDRSQESSAVLNGEVNKALKQKSDIEHYRNKLRLKAKRKGYYDFPAVETSKGLTERKKMYEK

SEQ ID NO: 14308 - protein, 32 aa, Artificial Sequence
  Synthetic polypeptide
DEITVFCMLLCKALIMPSNTWASKGQMRRSSL

SEQ ID NO: 14309 - protein, 10 aa, Artificial Sequence
  Synthetic polypeptide
QCFACSCARL

SEQ ID NO: 14310 - protein, 631 aa, Artificial Sequence
  Synthetic polypeptide
DNSVLHAPVQGFDYAKQHLGQQGADEEVIPVTQETVVLPLPIRDAPQERDVAQDGSTIKTAKSTETRKSRSPSENGSVISNESGKPSSGRRSPQNVMAQQKVTKEEARKRNVPASDEEEGAVLFDNSSKVAAEPFDTSSGSVQLIAIKPTALPMVPPTSDRSQESSAVLNGEVNKALKQKSDIEHYRNKLRLKAKRKGYYDFPAVETSKGLTERKKMYEKAPKEMEHVLDPDSELCAPFTESKNRQQMKNSVYRSRQSLNSPSPGETEMDLLVTRERPRRGIRNSGYDTEPEIIEETNIDRVPEPRGYSRSRQVKGHSETSTLSSQPSIDEVRQQMHMLLEEAFSLASAGHAGQSRHQEAYGSAQHLPYSEVVTSAPGTMTRPRAGVQWVPTYRPEMYQYSLPRPAYRFSQLPEMVMGSPPPPVPPRTGPVAVASLRRSTSDIGSKTRMAESTGPEPAQLHDSASFTQMSRGPVSVTQLDQSALNYSGNTVPAVFAIPAANRPGFTGYFIPTPPSSYRNQAWMSYAGENELPSQWADSVPLPGYIEAYPRSRYPQSSPSRLPRQYSQPANLHPSLEQAPAPSTAASQQSLAENDPSDAPLTNISTAALVKAIREEVAKLAKKQTDMFEFQV

SEQ ID NO: 14311 - protein, 304 aa, Artificial Sequence
  Synthetic polypeptide
SIRIMILEGGGVMNLNPGNNLLHQPPAWTDSYSTCNVSSGFFGGQWHEIHPQYWTKYQVWEWLQHLLDTNQLDANCIPFQEFDINGEHLCSMSLQEFTRAAGTAGQLLYSNLQHLKWNGQCSSDLFQSTHNVIVKTEQTEPSIMNTWKDENYLYDTNYGSTVDLLDSKTFCRAQISMTTTSHLPVAESPDMKKEQDPPAKCHTKKHNPRGTHLWEFIRDILLNPDKNPGLIKWEDRSEGVFRFLKSEAVAQLWGKKKNNSSMTYEKLSRAMRYYYKREILERVDGRRLVYKFGKNARGWRENEN

SEQ ID NO: 14312 - protein, 4 aa, Artificial Sequence
  Synthetic polypeptide
PSGS

SEQ ID NO: 14313 - protein, 46 aa, Artificial Sequence
  Synthetic polypeptide
HQDHDSGRRWCNESQPRQQPPSPAASLDRQLLHVQCFQWVFWRPVA

SEQ ID NO: 14314 - protein, 40 aa, Artificial Sequence
  Synthetic polypeptide
LFYTFYSLVKPLIPCCHTQLMTLFILKTIEVIRTRSIQDT

SEQ ID NO: 14315 - protein, 32 aa, Artificial Sequence
  Synthetic polypeptide
KSLGQGASKIPDPRTLQTVLPFRLGHWDWRRN

SEQ ID NO: 14316 - protein, 40 aa, Artificial Sequence
  Synthetic polypeptide
LFYTFYSLVKPLIPCCHTQLMTLFILKTIEVISGLHGYQN

SEQ ID NO: 14317 - protein, 258 aa, Artificial Sequence
  Synthetic polypeptide
KSLVAYMAIKIEVQGHQSFAIPSGTFWLWRSLLSQDKEHPRYLIPELCKQFYHLGWVTGTGGGISLKHGDEIYIAPSGVQKERIQPEDMFVCDINEKDISGPSPSKKLKKSQCTPLFMNAYTMRGAGAVIHTHSKAAVMATLLFPGREFKITHQEMIKGIKKCTSGGYYRYDDMLVVPIIENTPEEKDLKDRMAHAMNEYPDSCAVLVRRHGVYVWGETWEKAKTMCECYDYLFDIAVSMKKVGLDPSQLPVGENGIV

SEQ ID NO: 14318 - protein, 30 aa, Artificial Sequence
  Synthetic polypeptide
NKRGYKQMEKYSMLVGRKNQYCENGHTAQG

SEQ ID NO: 14319 - protein, 134 aa, Artificial Sequence
  Synthetic polypeptide
NYKPLLNEIKEDTNKWKNIPCSWVGRINIVKMAILPKVEEGSKNIRLGSLIGLIVEEGEDWKHVEIPKDVGPPPPVSKPSEPRPSPEPQISIPVKKEHIPGTLRFRLSPAARNILEKHSLDASQGTATGPRGIF

SEQ ID NO: 14320 - protein, 16 aa, Artificial Sequence
  Synthetic polypeptide
KWPYCPRLKKEVKIYG

SEQ ID NO: 14321 - protein, 424 aa, Artificial Sequence
  Synthetic polypeptide
NYKPLLNEIKEDTNKWKNIPCSWVGRINIVKMAILPKVEEGSKNIRLGSLIGLIVEEGEDWKHVEIPKDVGPPPPVSKPSEPRPSPEPQISIPVKKEHIPGTLRFRLSPAARNILEKHSLDASQGTATGPRGIFTKEDALKLVQLKQTGKITESRPTPAPTATPTAPSPLQATAGPSYPRPVIPPVSTPGQPNAVGTFTEIPASNIRRVIAKRLTESKSTVPHAYATADCDLGAVLKVRQDLVKDDIKVSVNDFIIKAAAVTLKQMPDVNVSWDGEGPKQLPFIDISVAVATDKGLLTPIIKDAAAKGIQEIADSVKALSKKARDGKLLPEEYQGGSFSISNLGMFGIDEFTAVINPPQACILAVGRFRPVLKLTEDEEGNAKLQQRQLITVTMSSDSRVVDDELATRFLKSFKANLENPIRLA

SEQ ID NO: 14322 - protein, 132 aa, Artificial Sequence
  Synthetic polypeptide
NYKPLLNEIKEDTNKWKNIPCSWVGRINIVKMAILPKVEEGSKNIRLGSLIGLIVEEGEDWKHVEIPKDVGPPPPVSKPSEPRPSPEPQISIPVKKEHIPGTLRFRLSPAARNILEKHSLDASQGTATGPRG

SEQ ID NO: 14323 - protein, 369 aa, Artificial Sequence
  Synthetic polypeptide
KNAHNIRLSGKMTLKSRTVYSVPFQLCKHMYLNITCRFAGVFHVEKNGRYSISRTEAADLCKAFNSTLPTMAQMEKALSIGFETCRYGFIEGHVVIPRIHPNSICAANNTGVYILTSNTSQYDTYCFNASAPPEEDCTSVTDLPNAFDGPITITIVNRDGTRYVQKGEYRTNPEDIYPSNPTDDDVSSGSSSERSSTSGGYIFYTFSTVHPIPDEDSPWITDSTDRIPATRDQDTFHPSGGSHTTHGSESDGHSHGSQEGGANTTSGPIRTPQIPEWLIILASLLALALILAVCIAVNSRRRCGQKKKLVINSGNGAVEDRKPSGLNGEASKSQEMVHLVNKESSETPDQFMTADETRNLQNVDMKIGV

SEQ ID NO: 14324 - protein, 19 aa, Artificial Sequence
  Synthetic polypeptide
LLNLELYIQYHFNYASICI

SEQ ID NO: 14325 - protein, 41 aa, Artificial Sequence
  Synthetic polypeptide
NCIFSTISIMQAYVFEYNLPLCRCIPRGEKWSLQHLSDGGR

SEQ ID NO: 14326 - protein, 86 aa, Artificial Sequence
  Synthetic polypeptide
KNAHNIRLSGKMTLKSRTVYSVPFQLCKHMYLNITCRFAGVFHVEKNGRYSISRTEAADLCKAFNSTLPTMAQMEKALSIGFETCR

SEQ ID NO: 14327 - protein, 404 aa, Artificial Sequence
  Synthetic polypeptide
KNAHNIRLSGKMTLKSRTVYSVPFQLCKHMYLNITCRFAGVFHVEKNGRYSISRTEAADLCKAFNSTLPTMAQMEKALSIGFETCRYGFIEGHVVIPRIHPNSICAANNTGVYILTSNTSQYDTYCFNASAPPEEDCTSVTDLPNAFDGPITITIVNRDGTRYVQKGEYRTNPEDIYPSNPTDDDVSSGSSSERSSTSGGYIFYTFSTVHPIPDEDSPWITDSTDRIPATNMDSSHSITLQPTANPNTGLVEDLDRTGPLSMTTRRDQDTFHPSGGSHTTHGSESDGHSHGSQEGGANTTSGPIRTPQIPEWLIILASLLALALILAVCIAVNSRRRCGQKKKLVINSGNGAVEDRKPSGLNGEASKSQEMVHLVNKESSETPDQFMTADETRNLQNVDMKIGV

SEQ ID NO: 14328 - protein, 707 aa, Artificial Sequence
  Synthetic polypeptide
KNAHNIRLSGKMTLKSRTVYSVPFQLCKHMYLNITCRFAGVFHVEKNGRYSISRTEAADLCKAFNSTLPTMAQMEKALSIGFETCRYGFIEGHVVIPRIHPNSICAANNTGVYILTSNTSQYDTYCFNASAPPEEDCTSVTDLPNAFDGPITITIVNRDGTRYVQKGEYRTNPEDIYPSNPTDDDVSSGSSSERSSTSGGYIFYTFSTVHPIPDEDSPWITDSTDRIPATSTSSNTISAGWEPNEENEDERDRHLSFSGSGIDDDEDFISSTISTTPRAFDHTKQNQDWTQWNPSHSNPEVLLQTTTRMTDVDRNGTTAYEGNWNPEAHPPLIHHEHHEEEETPHSTSTIQATPSSTTEETATQKEQWFGNRWHEGYRQTPKEDSHSTTGTAAASAHTSHPMQGRTTPSPEDSSWTDFFNPISHPMGRGHQAGRRMDMDSSHSITLQPTANPNTGLVEDLDRTGPLSMTTQQSNSQSFSTSHEGLEEDKDHPTTSTLTSSNRNDVTGGRRDPNHSEGSTTLLEGYTSHYPHTKESRTFIPVTSAKTGSFGVTAVTVGDSNSNVNRSLSGDQDTFHPSGGSHTTHGSESDGHSHGSQEGGANTTSGPIRTPQIPEWLIILASLLALALILAVCIAVNSRRRCGQKKKLVINSGNGAVEDRKPSGLNGEASKSQEMVHLVNKESSETPDQFMTADETRNLQNVDMKIGV

SEQ ID NO: 14329 - protein, 722 aa, Artificial Sequence
  Synthetic polypeptide
KNAHNIRLSGKMTLKSRTVYSVPFQLCKHMYLNITCRFAGVFHVEKNGRYSISRTEAADLCKAFNSTLPTMAQMEKALSIGFETCRYGFIEGHVVIPRIHPNSICAANNTGVYILTSNTSQYDTYCFNASAPPEEDCTSVTDLPNAFDGPITITIVNRDGTRYVQKGEYRTNPEDIYPSNPTDDDVSSGSSSERSSTSGGYIFYTFSTVHPIPDEDSPWITDSTDRIPATTLMSTSATATETATKRQETWDWFSWLFLPSESKNHLHTTTQMAGTSSNTISAGWEPNEENEDERDRHLSFSGSGIDDDEDFISSTISTTPRAFDHTKQNQDWTQWNPSHSNPEVLLQTTTRMTADVDRNGTTAYEGNWNPEAHPPLIHHEHHEEEETPHSTSTIQATPSSTTEETATQKEQWFGNRWHEGYRQTPKEDSHSTTGTAAASAHTSHPMQGRTTPSPEDSSWTDFFNPISHPMGRGHQAGRRMDMDSSHSITLQPTANPNTGLVEDLDRTGPLSMTTRNRNDVTGGRRDPNHSEGSTTLLEGYTSHYPHTKESRTFIPVTSAKTGSFGVTAVTVGDSNSNVNRSLSGDQDTFHPSGGSHTTHGSESDGHSHGSQEGGANTTSGPIRTPQIPEWLIILASLLALALILAVCIAVNSRRRCGQKKKLVINSGNGAVEDRKPSGLNGEASKSQEMVHLVNKESSETPDQFMTADETRNLQNVDMKIGV

SEQ ID NO: 14330 - protein, 682 aa, Artificial Sequence
  Synthetic polypeptide
KNAHNIRLSGKMTLKSRTVYSVPFQLCKHMYLNITCRFAGVFHVEKNGRYSISRTEAADLCKAFNSTLPTMAQMEKALSIGFETCRYGFIEGHVVIPRIHPNSICAANNTGVYILTSNTSQYDTYCFNASAPPEEDCTSVTDLPNAFDGPITITIVNRDGTRYVQKGEYRTNPEDIYPSNPTDDDVSSGSSSERSSTSGGYIFYTFSTVHPIPDEDSPWITDSTDRIPATTLMSTSATATETATKRQETWDWFSWLFLPSESKNHLHTTTQMAGTSSNTISAGWEPNEENEDERDRHLSFSGSGIDDDEDFISSTISTTPRAFDHTKQNQDWTQWNPSHSNPEVLLQTTTRMTDVDRNGTTAYEGNWNPEAHPPLIHHEHHEEEETPHSTSTIQATPSSTTEETATQKEQWFGNRWHEGYRQTPKEDSHSTTGTAAASAHTSHPMQGRTTPSPEDSSWTDFFNPISHPMGRGHQAGRRMDMDSSHSITLQPTANPNTGLVEDLDRTGPLSMTTQQSNSQSFSTSHEGLEEDKDHPTTSTLTSSRDQDTFHPSGGSHTTHGSESDGHSHGSQEGGANTTSGPIRTPQIPEWLIILASLLALALILAVCIAVNSRRRCGQKKKLVINSGNGAVEDRKPSGLNGEASKSQEMVHLVNKESSETPDQFMTADETRNLQNVDMKIGV

SEQ ID NO: 14331 - protein, 707 aa, Artificial Sequence
  Synthetic polypeptide
KNAHNIRLSGKMTLKSRTVYSVPFQLCKHMYLNITCRFAGVFHVEKNGRYSISRTEAADLCKAFNSTLPTMAQMEKALSIGFETCRYGFIEGHVVIPRIHPNSICAANNTGVYILTSNTSQYDTYCFNASAPPEEDCTSVTDLPNAFDGPITITIVNRDGTRYVQKGEYRTNPEDIYPSNPTDDDVSSGSSSERSSTSGGYIFYTFSTVHPIPDEDSPWITDSTDRIPATTLMSTSATATETATKRQETWDWFSWLFLPSESKNHLHTTTQMAGTSSNTISAGWEPNEENEDERDRHLSFSGSGIDDDEDFISSTISTTPRAFDHTKQNQDWTQWNPSHSNPEVLLQTTTRMTDVDRNGTTAYEGNWNPEAHPPLIHHEHHEEEETPHSTSTTASAHTSHPMQGRTTPSPEDSSWTDFFNPISHPMGRGHQAGRRMDMDSSHSITLQPTANPNTGLVEDLDRTGPLSMTTQQSNSQSFSTSHEGLEEDKDHPTTSTLTSSNRNDVTGGRRDPNHSEGSTTLLEGYTSHYPHTKESRTFIPVTSAKTGSFGVTAVTVGDSNSNVNRSLSGDQDTFHPSGGSHTTHGSESDGHSHGSQEGGANTTSGPIRTPQIPEWLIILASLLALALILAVCIAVNSRRRCGQKKKLVINSGNGAVEDRKPSGLNGEASKSQEMVHLVNKESSETPDQFMTADETRNLQNVDMKIGV

SEQ ID NO: 14332 - protein, 750 aa, Artificial Sequence
  Synthetic polypeptide
KNAHNIRLSGKMTLKSRTVYSVPFQLCKHMYLNITCRFAGVFHVEKNGRYSISRTEAADLCKAFNSTLPTMAQMEKALSIGFETCRYGFIEGHVVIPRIHPNSICAANNTGVYILTSNTSQYDTYCFNASAPPEEDCTSVTDLPNAFDGPITITIVNRDGTRYVQKGEYRTNPEDIYPSNPTDDDVSSGSSSERSSTSGGYIFYTFSTVHPIPDEDSPWITDSTDRIPATTLMSTSATATETATKRQETWDWFSWLFLPSESKNHLHTTTQMAGTSSNTISAGWEPNEENEDERDRHLSFSGSGIDDDEDFISSTISTTPRAFDHTKQNQDWTQWNPSHSNPEVLLQTTTRMTDVDRNGTTAYEGNWNPEAHPPLIHHEHHEEEETPHSTSTIQATPSSTTEETATQKEQWFGNRWHEGYRQTPKEDSHSTTGTAAASAHTSHPMQGRTTPSPEDSSWTDFFNPISHPMGRGHQAGRRMDMDSSHSITLQPTANPNTGLVEDLDRTGPLSMTTQQSNSQSFSTSHEGLEEDKDHPTTSTLTSSNRNDVTGGRRDPNHSEGSTTLLEGYTSHYPHTKESRTFIPVTSAKTGSFGVTAVTVGDSNSNVNRSLSGDQDTFHPSGGSHTTHGSESDGHSHGSQEGGANTTSGPIRTPQIPEWLIILASLLALALILAVCIAVNSRRRCGQKKKLVINSGNGAVEDRKPSGLNGEASKSQEMVHLVNKESSETPDQFMTADETRNLQNVDMKIGV

SEQ ID NO: 14333 - protein, 214 aa, Artificial Sequence
  Synthetic polypeptide
KNAHNIRLSGKMTLKSRTVYSVPFQLCKHMYLNITCRFAGVFHVEKNGRYSISRTEAADLCKAFNSTLPTMAQMEKALSIGFETCRYGFIEGHVVIPRIHPNSICGANTTSGPIRTPQIPEWLIILASLLALALILAVCIAVNSRRRCGQKKKLVINSGNGAVEDRKPSGLNGEASKSQEMVHLVNKESSETPDQFMTADETRNLQNVDMKIGV

SEQ ID NO: 14334 - protein, 88 aa, Artificial Sequence
  Synthetic polypeptide
KNAHNIRLSGKMTLKSRTVYSVPFQLCKHMYLNITCRFAGVFHVEKNGRYSISRTEAADLCKAFNSTLPTMAQMEKALSIGFETCSST

SEQ ID NO: 14335 - protein, 501 aa, Artificial Sequence
  Synthetic polypeptide
KNAHNIRLSGKMTLKSRTVYSVPFQLCKHMYLNITCRFAGVFHVEKNGRYSISRTEAADLCKAFNSTLPTMAQMEKALSIGFETCRYGFIEGHVVIPRIHPNSICAANNTGVYILTSNTSQYDTYCFNASAPPEEDCTSVTDLPNAFDGPITITIVNRDGTRYVQKGEYRTNPEDIYPSNPTDDDVSSGSSSERSSTSGGYIFYTFSTVHPIPDEDSPWITDSTDRIPATNMDSSHSITLQPTANPNTGLVEDLDRTGPLSMTTQQSNSQSFSTSHEGLEEDKDHPTTSTLTSSNRNDVTGGRRDPNHSEGSTTLLEGYTSHYPHTKESRTFIPVTSAKTGSFGVTAVTVGDSNSNVNRSLSGDQDTFHPSGGSHTTHGSESDGHSHGSQEGGANTTSGPIRTPQIPEWLIILASLLALALILAVCIAVNSRRRCGQKKKLVINSGNGAVEDRKPSGLNGEASKSQEMVHLVNKESSETPDQFMTADETRNLQNVDMKIGV

SEQ ID NO: 14336 - protein, 147 aa, Artificial Sequence
  Synthetic polypeptide
KNAHNIRLSGKMTLKSRTVYSVPFQLCKHMYLNITCRFAGVFHVEKNGRYSISRTEAADLCKAFNSTLPTMAQMEKALSIGFETCSLHCSQQSKKVWAEEKASDQQWQWSCGGQKAKWTQRRGQQVSGNGAFGEQGVVRNSRPVYDS

SEQ ID NO: 14337 - protein, 437 aa, Artificial Sequence
  Synthetic polypeptide
KNAHNIRLSGKMTLKSRTVYSVPFQLCKHMYLNITCRFAGVFHVEKNGRYSISRTEAADLCKAFNSTLPTMAQMEKALSIGFETCRYGFIEGHVVIPRIHPNSICAANNTGVYILTSNTSQYDTYCFNASAPPEEDCTSVTDLPNAFDGPITITIVNRDGTRYVQKGEYRTNPEDIYPSNPTDDDVSSGSSSERSSTSGGYIFYTFSTVHPIPDEDSPWITDSTDRIPATNRNDVTGGRRDPNHSEGSTTLLEGYTSHYPHTKESRTFIPVTSAKTGSFGVTAVTVGDSNSNVNRSLSGDQDTFHPSGGSHTTHGSESDGHSHGSQEGGANTTSGPIRTPQIPEWLIILASLLALALILAVCIAVNSRRRCGQKKKLVINSGNGAVEDRKPSGLNGEASKSQEMVHLVNKESSETPDQFMTADETRNLQNVDMKIGV

SEQ ID NO: 14338 - protein, 348 aa, Artificial Sequence
  Synthetic polypeptide
KNAHNIRLSGKMTLKSRTVYSVPFQLCKHMYLNITCRFAGVFHVEKNGRYSISRTEAADLCKAFNSTLPTMAQMEKALSIGFETCRYGFIEGHVVIPRIHPNSICAANNTGVYILTSNTSQYDTYCFNASAPPEEDCTSVTDLPNAFDGPITITIVNRDGTRYVQKGEYRTNPEDIYPSNPTDDDVSSGSSSERSSTSGGYIFYTFSTVHPIPDEDSPWITDSTDRIPATRHSHGSQEGGANTTSGPIRTPQIPEWLIILASLLALALILAVCIAVNSRRRCGQKKKLVINSGNGAVEDRKPSGLNGEASKSQEMVHLVNKESSETPDQFMTADETRNLQNVDMKIGV

SEQ ID NO: 14339 - protein, 302 aa, Artificial Sequence
  Synthetic polypeptide
KNAHNIRLSGKMTLKSRTVYSVPFQLCKHMYLNITCRFAGVFHVEKNGRYSISRTEAADLCKAFNSTLPTMAQMEKALSIGFETCRYGFIEGHVVIPRIHPNSICAANNTGVYILTSNTSQYDTYCFNASAPPEEDCTSVTDLPNAFDGPITITIVNRDGTRYVQKGEYRTNPEDIYPSNPTDDDVSSGSSSERSSTSGGYIFYTFSTVHPIPDEDSPWITDSTDRIPATRDQDTFHPSGGSHTTHGSESDGHSHGSQEGGANTTSGPIRTPQIPEWLIILASLLALALILAVCIAVNSRRS

SEQ ID NO: 14340 - protein, 278 aa, Artificial Sequence
  Synthetic polypeptide
KNAHNIRLSGKMTLKSRTVYSVPFQLCKHMYLNITCRFAGVFHVEKNGRYSISRTEAADLCKAFNSTLPTMAQMEKALSIGFETCRYGFIEGHVVIPRIHPNSICAANNTGVYILTSNTSQYDTYCFNASAPPEEDCTSVTDLPNAFDGPITITIVNRDGTRYVQKGEYRTNPEDIYPSNPTDDDVSSGSSSERSSTSGGYIFYTFSTVHPIPDEDSPWITDSTDRIPATTASAHTSHPMQGRTTPSPEDSSWTDFFNPISHPMGRGHQAGRRMGNSL

SEQ ID NO: 14341 - protein, 270 aa, Artificial Sequence
  Synthetic polypeptide
KNAHNIRLSGKMTLKSRTVYSVPFQLCKHMYLNITCRFAGVFHVEKNGRYSISRTEAADLCKAFNSTLPTMAQMEKALSIGFETCRYGFIEGHVVIPRIHPNSICAANNTGVYILTSNTSQYDTYCFNASAPPEEDCTSVTDLPNAFDGPITITIVNRDGTRYVQKGEYRTNPEDIYPSNPTDDDVSSGSSSERSSTSGDRNDVTGGRRDPNHSEGSTTLLEGYTSHYPHTKESRTFIPVTSAKTGSFGVTAVTVGDSNSNVNRSLSGDQ

SEQ ID NO: 14342 - protein, 35 aa, Artificial Sequence
  Synthetic polypeptide
AGLLLLTVMAPAMSRKENTERILKTSTPATLLMMT

SEQ ID NO: 14343 - protein, 5 aa, Artificial Sequence
  Synthetic polypeptide
QACYC

SEQ ID NO: 14344 - protein, 218 aa, Artificial Sequence
  Synthetic polypeptide
RPAIVNRDGTRYVQKGEYRTNPEDIYPSNPTDDDVSSGSSSERSSTSGGYIFYTFSTVHPIPDEDSPWITDSTDRIPATRDQDTFHPSGGSHTTHGSESDGHSHGSQEGGANTTSGPIRTPQIPEWLIILASLLALALILAVCIAVNSRRRCGQKKKLVINSGNGAVEDRKPSGLNGEASKSQEMVHLVNKESSETPDQFMTADETRNLQNVDMKIGV

SEQ ID NO: 14345 - protein, 253 aa, Artificial Sequence
  Synthetic polypeptide
RPAIVNRDGTRYVQKGEYRTNPEDIYPSNPTDDDVSSGSSSERSSTSGGYIFYTFSTVHPIPDEDSPWITDSTDRIPATNMDSSHSITLQPTANPNTGLVEDLDRTGPLSMTTRRDQDTFHPSGGSHTTHGSESDGHSHGSQEGGANTTSGPIRTPQIPEWLIILASLLALALILAVCIAVNSRRRCGQKKKLVINSGNGAVEDRKPSGLNGEASKSQEMVHLVNKESSETPDQFMTADETRNLQNVDMKIGV

SEQ ID NO: 14346 - protein, 556 aa, Artificial Sequence
  Synthetic polypeptide
RPAIVNRDGTRYVQKGEYRTNPEDIYPSNPTDDDVSSGSSSERSSTSGGYIFYTFSTVHPIPDEDSPWITDSTDRIPATSTSSNTISAGWEPNEENEDERDRHLSFSGSGIDDDEDFISSTISTTPRAFDHTKQNQDWTQWNPSHSNPEVLLQTTTRMTDVDRNGTTAYEGNWNPEAHPPLIHHEHHEEEETPHSTSTIQATPSSTTEETATQKEQWFGNRWHEGYRQTPKEDSHSTTGTAAASAHTSHPMQGRTTPSPEDSSWTDFFNPISHPMGRGHQAGRRMDMDSSHSITLQPTANPNTGLVEDLDRTGPLSMTTQQSNSQSFSTSHEGLEEDKDHPTTSTLTSSNRNDVTGGRRDPNHSEGSTTLLEGYTSHYPHTKESRTFIPVTSAKTGSFGVTAVTVGDSNSNVNRSLSGDQDTFHPSGGSHTTHGSESDGHSHGSQEGGANTTSGPIRTPQIPEWLIILASLLALALILAVCIAVNSRRRCGQKKKLVINSGNGAVEDRKPSGLNGEASKSQEMVHLVNKESSETPDQFMTADETRNLQNVDMKIGV

SEQ ID NO: 14347 - protein, 571 aa, Artificial Sequence
  Synthetic polypeptide
RPAIVNRDGTRYVQKGEYRTNPEDIYPSNPTDDDVSSGSSSERSSTSGGYIFYTFSTVHPIPDEDSPWITDSTDRIPATTLMSTSATATETATKRQETWDWFSWLFLPSESKNHLHTTTQMAGTSSNTISAGWEPNEENEDERDRHLSFSGSGIDDDEDFISSTISTTPRAFDHTKQNQDWTQWNPSHSNPEVLLQTTTRMTADVDRNGTTAYEGNWNPEAHPPLIHHEHHEEEETPHSTSTIQATPSSTTEETATQKEQWFGNRWHEGYRQTPKEDSHSTTGTAAASAHTSHPMQGRTTPSPEDSSWTDFFNPISHPMGRGHQAGRRMDMDSSHSITLQPTANPNTGLVEDLDRTGPLSMTTRNRNDVTGGRRDPNHSEGSTTLLEGYTSHYPHTKESRTFIPVTSAKTGSFGVTAVTVGDSNSNVNRSLSGDQDTFHPSGGSHTTHGSESDGHSHGSQEGGANTTSGPIRTPQIPEWLIILASLLALALILAVCIAVNSRRRCGQKKKLVINSGNGAVEDRKPSGLNGEASKSQEMVHLVNKESSETPDQFMTADETRNLQNVDMKIGV

SEQ ID NO: 14348 - protein, 531 aa, Artificial Sequence
  Synthetic polypeptide
RPAIVNRDGTRYVQKGEYRTNPEDIYPSNPTDDDVSSGSSSERSSTSGGYIFYTFSTVHPIPDEDSPWITDSTDRIPATTLMSTSATATETATKRQETWDWFSWLFLPSESKNHLHTTTQMAGTSSNTISAGWEPNEENEDERDRHLSFSGSGIDDDEDFISSTISTTPRAFDHTKQNQDWTQWNPSHSNPEVLLQTTTRMTDVDRNGTTAYEGNWNPEAHPPLIHHEHHEEEETPHSTSTIQATPSSTTEETATQKEQWFGNRWHEGYRQTPKEDSHSTTGTAAASAHTSHPMQGRTTPSPEDSSWTDFFNPISHPMGRGHQAGRRMDMDSSHSITLQPTANPNTGLVEDLDRTGPLSMTTQQSNSQSFSTSHEGLEEDKDHPTTSTLTSSRDQDTFHPSGGSHTTHGSESDGHSHGSQEGGANTTSGPIRTPQIPEWLIILASLLALALILAVCIAVNSRRRCGQKKKLVINSGNGAVEDRKPSGLNGEASKSQEMVHLVNKESSETPDQFMTADETRNLQNVDMKIGV

SEQ ID NO: 14349 - protein, 556 aa, Artificial Sequence
  Synthetic polypeptide
RPAIVNRDGTRYVQKGEYRTNPEDIYPSNPTDDDVSSGSSSERSSTSGGYIFYTFSTVHPIPDEDSPWITDSTDRIPATTLMSTSATATETATKRQETWDWFSWLFLPSESKNHLHTTTQMAGTSSNTISAGWEPNEENEDERDRHLSFSGSGIDDDEDFISSTISTTPRAFDHTKQNQDWTQWNPSHSNPEVLLQTTTRMTDVDRNGTTAYEGNWNPEAHPPLIHHEHHEEEETPHSTSTTASAHTSHPMQGRTTPSPEDSSWTDFFNPISHPMGRGHQAGRRMDMDSSHSITLQPTANPNTGLVEDLDRTGPLSMTTQQSNSQSFSTSHEGLEEDKDHPTTSTLTSSNRNDVTGGRRDPNHSEGSTTLLEGYTSHYPHTKESRTFIPVTSAKTGSFGVTAVTVGDSNSNVNRSLSGDQDTFHPSGGSHTTHGSESDGHSHGSQEGGANTTSGPIRTPQIPEWLIILASLLALALILAVCIAVNSRRRCGQKKKLVINSGNGAVEDRKPSGLNGEASKSQEMVHLVNKESSETPDQFMTADETRNLQNVDMKIGV

SEQ ID NO: 14350 - protein, 599 aa, Artificial Sequence
  Synthetic polypeptide
RPAIVNRDGTRYVQKGEYRTNPEDIYPSNPTDDDVSSGSSSERSSTSGGYIFYTFSTVHPIPDEDSPWITDSTDRIPATTLMSTSATATETATKRQETWDWFSWLFLPSESKNHLHTTTQMAGTSSNTISAGWEPNEENEDERDRHLSFSGSGIDDDEDFISSTISTTPRAFDHTKQNQDWTQWNPSHSNPEVLLQTTTRMTDVDRNGTTAYEGNWNPEAHPPLIHHEHHEEEETPHSTSTIQATPSSTTEETATQKEQWFGNRWHEGYRQTPKEDSHSTTGTAAASAHTSHPMQGRTTPSPEDSSWTDFFNPISHPMGRGHQAGRRMDMDSSHSITLQPTANPNTGLVEDLDRTGPLSMTTQQSNSQSFSTSHEGLEEDKDHPTTSTLTSSNRNDVTGGRRDPNHSEGSTTLLEGYTSHYPHTKESRTFIPVTSAKTGSFGVTAVTVGDSNSNVNRSLSGDQDTFHPSGGSHTTHGSESDGHSHGSQEGGANTTSGPIRTPQIPEWLIILASLLALALILAVCIAVNSRRRCGQKKKLVINSGNGAVEDRKPSGLNGEASKSQEMVHLVNKESSETPDQFMTADETRNLQNVDMKIGV

SEQ ID NO: 14351 - protein, 350 aa, Artificial Sequence
  Synthetic polypeptide
RPAIVNRDGTRYVQKGEYRTNPEDIYPSNPTDDDVSSGSSSERSSTSGGYIFYTFSTVHPIPDEDSPWITDSTDRIPATNMDSSHSITLQPTANPNTGLVEDLDRTGPLSMTTQQSNSQSFSTSHEGLEEDKDHPTTSTLTSSNRNDVTGGRRDPNHSEGSTTLLEGYTSHYPHTKESRTFIPVTSAKTGSFGVTAVTVGDSNSNVNRSLSGDQDTFHPSGGSHTTHGSESDGHSHGSQEGGANTTSGPIRTPQIPEWLIILASLLALALILAVCIAVNSRRRCGQKKKLVINSGNGAVEDRKPSGLNGEASKSQEMVHLVNKESSETPDQFMTADETRNLQNVDMKIGV

SEQ ID NO: 14352 - protein, 286 aa, Artificial Sequence
  Synthetic polypeptide
RPAIVNRDGTRYVQKGEYRTNPEDIYPSNPTDDDVSSGSSSERSSTSGGYIFYTFSTVHPIPDEDSPWITDSTDRIPATNRNDVTGGRRDPNHSEGSTTLLEGYTSHYPHTKESRTFIPVTSAKTGSFGVTAVTVGDSNSNVNRSLSGDQDTFHPSGGSHTTHGSESDGHSHGSQEGGANTTSGPIRTPQIPEWLIILASLLALALILAVCIAVNSRRRCGQKKKLVINSGNGAVEDRKPSGLNGEASKSQEMVHLVNKESSETPDQFMTADETRNLQNVDMKIGV

SEQ ID NO: 14353 - protein, 197 aa, Artificial Sequence
  Synthetic polypeptide
RPAIVNRDGTRYVQKGEYRTNPEDIYPSNPTDDDVSSGSSSERSSTSGGYIFYTFSTVHPIPDEDSPWITDSTDRIPATRHSHGSQEGGANTTSGPIRTPQIPEWLIILASLLALALILAVCIAVNSRRRCGQKKKLVINSGNGAVEDRKPSGLNGEASKSQEMVHLVNKESSETPDQFMTADETRNLQNVDMKIGV

SEQ ID NO: 14354 - protein, 151 aa, Artificial Sequence
  Synthetic polypeptide
RPAIVNRDGTRYVQKGEYRTNPEDIYPSNPTDDDVSSGSSSERSSTSGGYIFYTFSTVHPIPDEDSPWITDSTDRIPATRDQDTFHPSGGSHTTHGSESDGHSHGSQEGGANTTSGPIRTPQIPEWLIILASLLALALILAVCIAVNSRRS

SEQ ID NO: 14355 - protein, 127 aa, Artificial Sequence
  Synthetic polypeptide
RPAIVNRDGTRYVQKGEYRTNPEDIYPSNPTDDDVSSGSSSERSSTSGGYIFYTFSTVHPIPDEDSPWITDSTDRIPATTASAHTSHPMQGRTTPSPEDSSWTDFFNPISHPMGRGHQAGRRMGNSL

SEQ ID NO: 14356 - protein, 119 aa, Artificial Sequence
  Synthetic polypeptide
RPAIVNRDGTRYVQKGEYRTNPEDIYPSNPTDDDVSSGSSSERSSTSGDRNDVTGGRRDPNHSEGSTTLLEGYTSHYPHTKESRTFIPVTSAKTGSFGVTAVTVGDSNSNVNRSLSGDQ

SEQ ID NO: 14357 - protein, 184 aa, Artificial Sequence
  Synthetic polypeptide
RPAIVNRDGTRYVQKGEYRTNPEDIYPSNPTDDDVSSGSSSERSSTSGGDQDTFHPSGGSHTTHGSESDGHSHGSQEGGANTTSGPIRTPQIPEWLIILASLLALALILAVCIAVNSRRRCGQKKKLVINSGNGAVEDRKPSGLNGEASKSQEMVHLVNKESSETPDQFMTADETRNLQNVDMK

SEQ ID NO: 14358 - protein, 82 aa, Artificial Sequence
  Synthetic polypeptide
RPAIVNRDGTRYVQKGEYRTNPEDIYPSNPTDDDVSSGSSSERSSTSGDMDSSHSITLQPTANPNTGLVEDLDRTGPLSMTT

SEQ ID NO: 14359 - protein, 149 aa, Artificial Sequence
  Synthetic polypeptide
RPAIVNRDGTRYVQKGEYRTNPEDIYPSNPTDDDVSSGSSSERSSTSGGYIFYTFSTVHPIPDEDSPWITDSTDRIPATISTTPRAFDHTKQNQDWTQWNPSHSNPEVLLQTTTRMTDVDRNGTTAYEGNWNPEAHPPLIHHEHHEEEE

SEQ ID NO: 14360 - protein, 131 aa, Artificial Sequence
  Synthetic polypeptide
RPAIVNRDGTRYVQKGEYRTNPEDIYPSNPTDDDVSSGSSSERSSTSGGYIFYTFSTVHPIPDEDSPWITDSTDRIPATKQSNSQSFSTSHEGLEEDKDHPTTSTLTSSNRNDVTGGRRDPNHSEGSTTLL

SEQ ID NO: 14361 - protein, 232 aa, Artificial Sequence
  Synthetic polypeptide
RPAIVNRDGTRYVQKGEYRTNPEDIYPSNPTDDDVSSGSSSERSSTSGGYIFYTFSTVHPIPDEDSPWITDSTDRIPATIQATPSSTTEETATQKEQWFGNRWHEGYRQTPKEDSHSTTGTAAASAHTSHPMQGRTTPSPEDSSWTDFFNPISHPMGRGHQAGRRMDMDSSHSITLQPTANPNTGLVEDLDRTGPLSMTTQQSNSQSFSTSHEGLEEDKDHPTTSTLTSSSK

SEQ ID NO: 14362 - protein, 232 aa, Artificial Sequence
  Synthetic polypeptide
RPAIVNRDGTRYVQKGEYRTNPEDIYPSNPTDDDVSSGSSSERSSTSGGYIFYTFSTVHPIPDEDSPWITDSTDRIPATTLMSTSATATETATKRQETWDWFSWLFLPSESKNHLHTTTQMAGTSSNTISAGWEPNEENEDERDRHLSFSGSGIDDDEDFISSTNMDSSHSITLQPTANPNTGLVEDLDRTGPLSMTTQQSNSQSFSTSHEGLEEDKDHPTTSTLTSSSKDY

SEQ ID NO: 14363 - protein, 45 aa, Artificial Sequence
  Synthetic polypeptide
FDLPTICPSRWKCECTTVILAQRNPSTGTWACACVTSWGRICCSP

SEQ ID NO: 14364 - protein, 62 aa, Artificial Sequence
  Synthetic polypeptide
GAFPPFAWRFSLLPPCEEGHVLFPFHHDLICQQYAQAGGSANARQSSWLRGTQAPAPGPAPV

SEQ ID NO: 14365 - protein, 22 aa, Artificial Sequence
  Synthetic polypeptide
ATSSKPSALLHRPLPLQERPLY

SEQ ID NO: 14366 - protein, 302 aa, Artificial Sequence
  Synthetic polypeptide
SQHFRRLRREDCLSPGVQDQPRQQAANPLLCSTARYHCKNGLCIDKSFICDGQNNCQDNSDEESCESSQVSLLLPRLECSGTISAHCKLRLPGSRHSPASASRVAGTTEPGSGQVFVTSENQLVYYPSITYAIIGSSVIFVLVVALLALVLHHQRKRNNLMTLPVHRLQHPVLLSRLVVLDHPHHCNVTYNVNNGIQYVASQAEQNASEVGSPPSYSEALLDQRPAWYDLPPPPYSSDTESLNQADLPPYRSRSGSANSASSQAASSLLSVEDTSHSPGQPGPQEGTAEPRDSEPSQGTEEV

SEQ ID NO: 14367 - protein, 90 aa, Artificial Sequence
  Synthetic polypeptide
VQEFKTSLGNKQQTLCFAPPPATTARTASVLTRASSAMDRITVKTTVMRKAVKVLKSHSCCPGWSAVAQSRLTASSASQVHAILLPQPPE

SEQ ID NO: 14368 - protein, 263 aa, Artificial Sequence
  Synthetic polypeptide
SQHFRRLRREDCLSPGVQDQPRQQAANPLLCSTARYHCKNGLCIDKSFICDGQNNCQDNSDEESCESSQEPGSGQVFVTSENQLVYYPSITYAIIGSSVIFVLVVALLALVLHHQRKRNNLMTLPVHRLQHPVLLSRLVVLDHPHHCNVTYNVNNGIQYVASQAEQNASEVGSPPSYSEALLDQRPAWYDLPPPPYSSDTESLNQADLPPYRSRSGSANSASSQAASSLLSVEDTSHSPGQPGPQEGTAEPRDSEPSQGTEEV

SEQ ID NO: 14369 - protein, 64 aa, Artificial Sequence
  Synthetic polypeptide
VQEFKTSLGNKQQTLCFAPPPATTARTASVLTRASSAMDRITVKTTVMRKAVKVLKNPAVGRCL

SEQ ID NO: 14370 - protein, 285 aa, Artificial Sequence
  Synthetic polypeptide
PCAVTKKAANPLLCSTARYHCKNGLCIDKSFICDGQNNCQDNSDEESCESSQVSLLLPRLECSGTISAHCKLRLPGSRHSPASASRVAGTTEPGSGQVFVTSENQLVYYPSITYAIIGSSVIFVLVVALLALVLHHQRKRNNLMTLPVHRLQHPVLLSRLVVLDHPHHCNVTYNVNNGIQYVASQAEQNASEVGSPPSYSEALLDQRPAWYDLPPPPYSSDTESLNQADLPPYRSRSGSANSASSQAASSLLSVEDTSHSPGQPGPQEGTAEPRDSEPSQGTEEV

SEQ ID NO: 14371 - protein, 97 aa, Artificial Sequence
  Synthetic polypeptide
PGLKVNVPKNDPVLSPKKQQTLCFAPPPATTARTASVLTRASSAMDRITVKTTVMRKAVKVLKSHSCCPGWSAVAQSRLTASSASQVHAILLPQPPE

SEQ ID NO: 14372 - protein, 34 aa, Artificial Sequence
  Synthetic polypeptide
KLMFLRMTLCCHQKSSKPSALLHRPLPLQERPLY

SEQ ID NO: 14373 - protein, 246 aa, Artificial Sequence
  Synthetic polypeptide
PCAVTKKAANPLLCSTARYHCKNGLCIDKSFICDGQNNCQDNSDEESCESSQEPGSGQVFVTSENQLVYYPSITYAIIGSSVIFVLVVALLALVLHHQRKRNNLMTLPVHRLQHPVLLSRLVVLDHPHHCNVTYNVNNGIQYVASQAEQNASEVGSPPSYSEALLDQRPAWYDLPPPPYSSDTESLNQADLPPYRSRSGSANSASSQAASSLLSVEDTSHSPGQPGPQEGTAEPRDSEPSQGTEEV

SEQ ID NO: 14374 - protein, 71 aa, Artificial Sequence
  Synthetic polypeptide
PGLKVNVPKNDPVLSPKKQQTLCFAPPPATTARTASVLTRASSAMDRITVKTTVMRKAVKVLKNPAVGRCL

SEQ ID NO: 14375 - protein, 284 aa, Artificial Sequence
  Synthetic polypeptide
PCAVTKKANPLLCSTARYHCKNGLCIDKSFICDGQNNCQDNSDEESCESSQVSLLLPRLECSGTISAHCKLRLPGSRHSPASASRVAGTTEPGSGQVFVTSENQLVYYPSITYAIIGSSVIFVLVVALLALVLHHQRKRNNLMTLPVHRLQHPVLLSRLVVLDHPHHCNVTYNVNNGIQYVASQAEQNASEVGSPPSYSEALLDQRPAWYDLPPPPYSSDTESLNQADLPPYRSRSGSANSASSQAASSLLSVEDTSHSPGQPGPQEGTAEPRDSEPSQGTEEV

SEQ ID NO: 14376 - protein, 96 aa, Artificial Sequence
  Synthetic polypeptide
PGLKVNVPKNDPVLSPKKQTLCFAPPPATTARTASVLTRASSAMDRITVKTTVMRKAVKVLKSHSCCPGWSAVAQSRLTASSASQVHAILLPQPPE

SEQ ID NO: 14377 - protein, 33 aa, Artificial Sequence
  Synthetic polypeptide
KLMFLRMTLCCHQKSKPSALLHRPLPLQERPLY

SEQ ID NO: 14378 - protein, 245 aa, Artificial Sequence
  Synthetic polypeptide
PCAVTKKANPLLCSTARYHCKNGLCIDKSFICDGQNNCQDNSDEESCESSQEPGSGQVFVTSENQLVYYPSITYAIIGSSVIFVLVVALLALVLHHQRKRNNLMTLPVHRLQHPVLLSRLVVLDHPHHCNVTYNVNNGIQYVASQAEQNASEVGSPPSYSEALLDQRPAWYDLPPPPYSSDTESLNQADLPPYRSRSGSANSASSQAASSLLSVEDTSHSPGQPGPQEGTAEPRDSEPSQGTEEV

SEQ ID NO: 14379 - protein, 70 aa, Artificial Sequence
  Synthetic polypeptide
PGLKVNVPKNDPVLSPKKQTLCFAPPPATTARTASVLTRASSAMDRITVKTTVMRKAVKVLKNPAVGRCL

SEQ ID NO: 14380 - protein, 9 aa, Artificial Sequence
  Synthetic polypeptide
ENPAVGRCL

SEQ ID NO: 14381 - protein, 112 aa, Artificial Sequence
  Synthetic polypeptide
EVRRPSAWQLPRLRSEKPLRPAATPSEKTRQWAGVCDFREPTCVLPQHHLCHHRQLRHFCAGGGPAGTGLAPPAEAEQPHDAARAPAAAPCAAVPPGGPGPPPPLQRHLQRQ

SEQ ID NO: 14382 - protein, 208 aa, Artificial Sequence
  Synthetic polypeptide
EVRSPSARQPHRLRKPGSGQVFVTSENQLVYYPSITYAIIGSSVIFVLVVALLALVLHHQRKRNNLMTLPVHRLQHPVLLSRLVVLDHPHHCNVTYNVNNGIQYVASQAEQNASEVGSPPSYSEALLDQRPAWYDLPPPPYSSDTESLNQADLPPYRSRSGSANSASSQAASSLLSVEDTSHSPGQPGPQEGTAEPRDSEPSQGTEEV

SEQ ID NO: 14383 - protein, 20 aa, Artificial Sequence
  Synthetic polypeptide
GAPPPGSHPVWENPAVGRCL

SEQ ID NO: 14384 - protein, 112 aa, Artificial Sequence
  Synthetic polypeptide
EVRSPSARQPHRLRSEEPLRPAATPSGKTRQWAGVCDFREPTCVLPQHHLCHHRQLRHFCAGGGPAGTGLAPPAEAEQPHDAARAPAAAPCAAVPPGGPGPPPPLQRHLQRQ

SEQ ID NO: 14385 - protein, 208 aa, Artificial Sequence
  Synthetic polypeptide
EVRSPSARQPPRLGKPGSGQVFVTSENQLVYYPSITYAIIGSSVIFVLVVALLALVLHHQRKRNNLMTLPVHRLQHPVLLSRLVVLDHPHHCNVTYNVNNGIQYVASQAEQNASEVGSPPSYSEALLDQRPAWYDLPPPPYSSDTESLNQADLPPYRSRSGSANSASSQAASSLLSVEDTSHSPGQPGPQEGTAEPRDSEPSQGTEEV

SEQ ID NO: 14386 - protein, 111 aa, Artificial Sequence
  Synthetic polypeptide
GAPPPGSHPVWEVRSVSARQPPRPGGRTRQWAGVCDFREPTCVLPQHHLCHHRQLRHFCAGGGPAGTGLAPPAEAEQPHDAARAPAAAPCAAVPPGGPGPPPPLQRHLQRQ

SEQ ID NO: 14387 - protein, 207 aa, Artificial Sequence
  Synthetic polypeptide
GASPPGSHPVREGEPGSGQVFVTSENQLVYYPSITYAIIGSSVIFVLVVALLALVLHHQRKRNNLMTLPVHRLQHPVLLSRLVVLDHPHHCNVTYNVNNGIQYVASQAEQNASEVGSPPSYSEALLDQRPAWYDLPPPPYSSDTESLNQADLPPYRSRSGSANSASSQAASSLLSVEDTSHSPGQPGPQEGTAEPRDSEPSQGTEEV

SEQ ID NO: 14388 - protein, 37 aa, Artificial Sequence
  Synthetic polypeptide
EVRSPSARQPPRLGSEERLRPAATPSGRENPAVGRCL

SEQ ID NO: 14389 - protein, 425 aa, Artificial Sequence
  Synthetic polypeptide
NKDAGHKCPVDNEILLENQLFPDNFAKREILSLMVKCPNEGCLHKMELRHLEDHQAHCEFALMDCPQCQRPFQKFHINIHILKDCPRRQVSCDNCAASMAFEDKEIHDQNCPLANVICEYCNTILIREQMPNHYDLDCPTAPIPCTFSTFGCHEKMQRNHLARHLQENTQSHMRMLAQAVHSLSVIPDSGYISEVRNFQETIHQLEGRLVRQDHQIRELTAKMETQSMYVSELKRTIRTLEDKVAEIEAQQCNGIYIWKIGNFGMHLKCQEEEKPVVIHSPGFYTGKPGYKLCMRLHLQLPTAQRCANYISLFVHTMQGEYDSHLPWPFQGTIRLTILDQSEAPVRQNHEEIMDAKPELLAFQRPTIPRNPKGFGYVTFMHLEALRQRTFIKDDTLLVRCEVSTRFDMGSLRREGFQPRSTDAGV

SEQ ID NO: 14390 - protein, 85 aa, Artificial Sequence
  Synthetic polypeptide
LYLHNISKIQSLLTSSLCYHPVVTHHQLSNRPPAFYSCLPGCSQYSSGSGPSKIRMQVTNVQLTMKYCWKINYFQTILQNVRFFL

SEQ ID NO: 14391 - protein, 79 aa, Artificial Sequence
  Synthetic polypeptide
GWAQWLMPVIPALWEAKGIIVLLFFYLSLWVASQSGSCSPCSWWTGISSKQTPSSRMRDCASLLCWLENRCGSSQKRSK

SEQ ID NO: 14392 - protein, 21 aa, Artificial Sequence
  Synthetic polypeptide
FQHCGRPRGSSSCSSFISVCG

SEQ ID NO: 14393 - protein, 480 aa, Artificial Sequence
  Synthetic polypeptide
MGSVAHACNSSTVGGQGDHRLALLLSQFVGSQSVRELLTMQLVDWHQLQADSFIQDERLRIFALLAGKPVWQLSEKKQINVCSQLDWKRSLAIHLWYLLPPTASISRALSMYEEAFQNTSDSDRYACSPLPSYLEGSGCVIAEEQNSQTPLRDVCFHLLKLYSDRHYDLNQLLEPRSITADPLDYRLSWHLWEVLRALNYTHLSAQCEGVLQASYAGQLESEGLWEWAIFVLLHIDNSGIREKAVRELLTRHCQLLETPESWAKETFLTQKLRVPAKWIHEAKAVRAHMESDKHLEALCLFKAEHWNRCHKLIIRHLASDAIINENYDYLKGFLEDLAPPERSSLIQDWETSGLVYLDYIRVIEMLRHIQQVDCSGNDLEQLHIKVTSLCSRIEQIQCYSAKDRLAQSDMAKRVANLLRVVLSLHHPPDRTSDSTPDPQRVPLRLLAPHIGRLPMPEDYAMDELRSLTQSYLRELAVGSL

SEQ ID NO: 14394 - protein, 318 aa, Artificial Sequence
  Synthetic polypeptide
MGSVAHACNSSTVGGQGDHRLALLLSQFVGSQSVRELLTMQLVDWHQLQADSFIQDERLRIFALLAGKPVWQLSEKKQINVCSQLDWKRSLAIHLWYLLPPTASISRALSMYEEAFQNTSDSDRYACSPLPSYLEGSGCVIAEEQNSQTPLRDVCFHLLKLYSDSIREKAVRELLTRHCQLLETPESWAKETFLTQKLRVPAKWIHEAKAVRAHMESDKHLEALCLFKAEHWNRCHKLIIRHLASDAIINENYDYLKGFLEDLAPPERSSLIQDWETSGLVYLDYIRVIEMLRHIQQIALFCVEWIAQVMTWSSYTSK

SEQ ID NO: 14395 - protein, 406 aa, Artificial Sequence
  Synthetic polypeptide
MGSVAHACNSSTVGGQGDHRLALLLSQFVGSQSVRELLTMQLVDWHQLQADSFIQDERLRIFALLAGKPVWQLSEKKQINVCSQLDWKRSLAIHLWYLLPPTASISRALSMYEEAFQNTSDSDRYACSPLPSYLEGSGCVIAEEQNSQTPLRDVCFHLLKLYSDSIREKAVRELLTRHCQLLETPESWAKETFLTQKLRVPAKWIHEAKAVRAHMESDKHLEALCLFKAEHWNRCHKLIIRHLASDAIINENYDYLKGFLEDLAPPERSSLIQDWETSGLVYLDYIRVIEMLRHIQQVDCSGNDLEQLHIKVTSLCSRIEQIQCYSAKDRLAQSDMAKRVANLLRVVLSLHHPPDRTSDSTPDPQRVPLRLLAPHIGRLPMPEDYAMDELRSLTQSYLRELAVGSL

SEQ ID NO: 14396 - protein, 30 aa, Artificial Sequence
  Synthetic polypeptide
GRVRWLTPVIPALWEDHLRSGVRDQPGQHA

SEQ ID NO: 14397 - protein, 13 aa, Artificial Sequence
  Synthetic polypeptide
GQEFETSLANMPN

SEQ ID NO: 14398 - protein, 658 aa, Artificial Sequence
  Synthetic polypeptide
PGTVAHTCHPSTLGGSLEVRSSRPAWPTCLTESPFKVHLEKLSLRQRKPDEDMKLYQTPLELKLKHSTVHVDELCPLIVPNLGVAVIHDYADWVKEASGDLPEAQIVKHWSLTWTLCEALWGHLKELDSQLNEPREYIQILERRRAFSRWLSCTATPQIEEEVSLTQKNSPVEAVFSYLTGKRISEACSLAQQSGDHRLALLLSQFVGSQSVRELLTMQLVDWHQLQADSFIQDERLRIFALLAGKPVWQLSEKKQINVCSQLDWKRSLAIHLWYLLPPTASISRALSMYEEAFQNTSDSDRYACSPLPSYLEGSGCVIAEEQNSQTPLRDVCFHLLKLYSDRHYDLNQLLEPRSITADPLDYRLSWHLWEVLRALNYTHLSAQCEGVLQASYAGQLESEGLWEWAIFVLLHIDNSGIREKAVRELLTRHCQLLETPESWAKETFLTQKLRVPAKWIHEAKAVRAHMESDKHLEALCLFKAEHWNRCHKLIIRHLASDAIINENYDYLKGFLEDLAPPERSSLIQDWETSGLVYLDYIRVIEMLRHIQQVDCSGNDLEQLHIKVTSLCSRIEQIQCYSAKDRLAQSDMAKRVANLLRVVLSLHHPPDRTSDSTPDPQRVPLRLLAPHIGRLPMPEDYAMDELRSLTQSYLRELAVGSL

SEQ ID NO: 14399 - protein, 496 aa, Artificial Sequence
  Synthetic polypeptide
PGTVAHTCHPSTLGGSLEVRSSRPAWPTCLTESPFKVHLEKLSLRQRKPDEDMKLYQTPLELKLKHSTVHVDELCPLIVPNLGVAVIHDYADWVKEASGDLPEAQIVKHWSLTWTLCEALWGHLKELDSQLNEPREYIQILERRRAFSRWLSCTATPQIEEEVSLTQKNSPVEAVFSYLTGKRISEACSLAQQSGDHRLALLLSQFVGSQSVRELLTMQLVDWHQLQADSFIQDERLRIFALLAGKPVWQLSEKKQINVCSQLDWKRSLAIHLWYLLPPTASISRALSMYEEAFQNTSDSDRYACSPLPSYLEGSGCVIAEEQNSQTPLRDVCFHLLKLYSDSIREKAVRELLTRHCQLLETPESWAKETFLTQKLRVPAKWIHEAKAVRAHMESDKHLEALCLFKAEHWNRCHKLIIRHLASDAIINENYDYLKGFLEDLAPPERSSLIQDWETSGLVYLDYIRVIEMLRHIQQIALFCVEWIAQVMTWSSYTSK

SEQ ID NO: 14400 - protein, 584 aa, Artificial Sequence
  Synthetic polypeptide
PGTVAHTCHPSTLGGSLEVRSSRPAWPTCLTESPFKVHLEKLSLRQRKPDEDMKLYQTPLELKLKHSTVHVDELCPLIVPNLGVAVIHDYADWVKEASGDLPEAQIVKHWSLTWTLCEALWGHLKELDSQLNEPREYIQILERRRAFSRWLSCTATPQIEEEVSLTQKNSPVEAVFSYLTGKRISEACSLAQQSGDHRLALLLSQFVGSQSVRELLTMQLVDWHQLQADSFIQDERLRIFALLAGKPVWQLSEKKQINVCSQLDWKRSLAIHLWYLLPPTASISRALSMYEEAFQNTSDSDRYACSPLPSYLEGSGCVIAEEQNSQTPLRDVCFHLLKLYSDSIREKAVRELLTRHCQLLETPESWAKETFLTQKLRVPAKWIHEAKAVRAHMESDKHLEALCLFKAEHWNRCHKLIIRHLASDAIINENYDYLKGFLEDLAPPERSSLIQDWETSGLVYLDYIRVIEMLRHIQQVDCSGNDLEQLHIKVTSLCSRIEQIQCYSAKDRLAQSDMAKRVANLLRVVLSLHHPPDRTSDSTPDPQRVPLRLLAPHIGRLPMPEDYAMDELRSLTQSYLRELAVGSL

SEQ ID NO: 14401 - protein, 40 aa, Artificial Sequence
  Synthetic polypeptide
IHVLCRDMDEAGNHHSQQNIARTKNQTPHVLTHSIQLDRG

SEQ ID NO: 14402 - protein, 169 aa, Artificial Sequence
  Synthetic polypeptide
FLKDLELEIPFDPAIPLLGIYPKDYKSCCYKDTCTRVFIAALFKIAKTWNQPKCPSTIDWIKKMWHIYTMEYYAAIKKDEFMSFVGTWMKLETIILSKISQEQKTKHRMFSLIVYNWTVDEVVQWLITYVELPQYEETFRKLQLSGHAMPRLAVTNTTMTGTVLKMTDR

SEQ ID NO: 14403 - protein, 670 aa, Artificial Sequence
  Synthetic polypeptide
FLKDLELEIPFDPAIPLLGIYPKDYKSCCYKDTCTRVFIAALFKIAKTWNQPKCPSTIDWIKKMWHIYTMEYYAAIKKDEFMSFVGTWMKLETIILSKISQEQKTKHRMFSLIVYNWTVDEVVQWLITYVELPQYEETFRKLQLSGHAMPRLAVTNTTMTGTVLKMTDRSHRQKLQLKALDTVLFGPPLLTRHNHLKDFMLVVSIVIGVGGCWFAYIQNRYSKEHMKKMMKDLEGLHRAEQSLHDLQERLHKAQEEHRTVEVEKVHLEKKLRDEINLAKQEAQRLKELREGTENERSRQKYAEEELEQVREALRKAEKELESHSSWYAPEALQKWLQLTHEVEVQYYNIKKQNAEKQLLVAKEGAEKIKKKRNTLFGTFHVAHSSSLDDVDHKILTAKQALSEVTAALRERLHRWQQIEILCGFQIVNNPGIHSLVAALNIDPSWMGSTRPNPAHFIMTDDVDDMDEEIVSPLSMQSPSLQSSVRQRLTEPQHGLGSQRDLTHSDSESSLHMSDRQRVAPKPPQMSRAADEALNAMTSNGSHRLIEGVHPGSLVEKLPDSPALAKKALLALNHGLDKAHSLMELSPSAPPGGSPHLDSSRSHSPSSPDPDTPSPVGDSRALQASRNTRIPHLAGKKAVAEEDNGSIGEETDSSPGRKKFPLKIFKKPLKK

SEQ ID NO: 14404 - protein, 525 aa, Artificial Sequence
  Synthetic polypeptide
FLKDLELEIPFDPAIPLLGIYPKDYKSCCYKDTCTRVFIAALFKIAKTWNQPKCPSTIDWIKKMWHIYTMEYYAAIKKDEFMSFVGTWMKLETIILSKISQEQKTKHRMFSLIVYNWTVDEVVQWLITYVELPQYEETFRKLQLSGHAMPRLAVTNTTMTGTVLKMTDRSHRQKLQLKALDTVLFGPPLLTRHNHLKDFMLVVSIVIGVGGCWFAYIQNRYSKEHMKKMMKDLEGLHRAEQSLHDLQERLHKAQEEHRTVEVEKVHLEKKLRDEINLAKQEAQRLKELREGTENERSRQKYAEEELEQVREALRKAEKELESHSSWYAPEALQKWLQLTHEVEVQYYNIKKQNAEKQLLVAKEGAEKIKKKRNTLFGTFHVAHSSSLDDVDHKILTAKQALSEVTAALRERLHRWQQIEILCGFQIVNNPGIHSLVAALNIDPSWMGSTRPNPAHFIMTDDVDDMDEEIVSPLSMQSPSLQSSVRQRLTEPQHGLGSQRGSSLKANRLSSKGFDPFRFGVLPPHE

SEQ ID NO: 14405 - protein, 191 aa, Artificial Sequence
  Synthetic polypeptide
FLKDLELEIPFDPAIPLLGIYPKDYKSCCYKDTCTRVFIAALFKIAKTWNQPKCPSTIDWIKKMWHIYTMEYYAAIKKDEFMSFVGTWMKLETIILSKISQEQKTKHRMFSLIVYNWTVDEVVQWLITYVELPQYEETFRKLQLSGHAMPRLAVTNTTMTGTVLKMTDRSHRQKLQLKALDTVLFGPPLCE

SEQ ID NO: 14406 - protein, 198 aa, Artificial Sequence
  Synthetic polypeptide
FLKDLELEIPFDPAIPLLGIYPKDYKSCCYKDTCTRVFIAALFKIAKTWNQPKCPSTIDWIKKMWHIYTMEYYAAIKKDEFMSFVGTWMKLETIILSKISQEQKTKHRMFSLIVYNWTVDEVVQWLITYVELPQYEETFRKLQLSGHAMPRLAVTNTTMTGTVLKMTDRSHRQKLQLKALDTVLFGPPLLTRHNHLKD

SEQ ID NO: 14407 - protein, 139 aa, Artificial Sequence
  Synthetic polypeptide
FLKDLELEIPFDPAIPLLGIYPKDYKSCCYKDTCTRVFIAALFKIAKTWNQPKCPSTIDWIKKMWHIYTMEYYAAIKKDEFMSFVGTWMKLETIILSKISQEQKTKHRMFSLIVYNWTVDEVVQWLITYVELPQYEETF

SEQ ID NO: 14408 - protein, 141 aa, Artificial Sequence
  Synthetic polypeptide
FLKDLELEIPFDPAIPLLGIYPKDYKSCCYKDTCTRVFIAALFKIAKTWNQPKCPSTIDWIKKMWHIYTMEYYAAIKKDEFMSFVGTWMKLETIILSKISQEQKTKHRMFSLIVYNWTVDEVVQWLITYVELPQYEETFRK

SEQ ID NO: 14409 - protein, 176 aa, Artificial Sequence
  Synthetic polypeptide
FLKDLELEIPFDPAIPLLGIYPKDYKSCCYKDTCTRVFIAALFKIAKTWNQPKCPSTIDWIKKMWHIYTMEYYAAIKKDEFMSFVGTWMKLETIILSKISQEQKTKHRMFSLIVYNWTVDEVVQWLITYVELPQYEETFRKLQLSGHAMPRLAVTNTTMTGTVLKMTDRSHRQKLQ

SEQ ID NO: 14410 - protein, 126 aa, Artificial Sequence
  Synthetic polypeptide
FLKDLELEIPFDPAIPLLGIYPKDYKSCCYKDTCTRVFIAALFKIAKTWNQPKCPSTIDWIKKMWHIYTMEYYAAIKKDEFMSFVGTWMKLETIILSKISQEQKTKHRMFSLIVYNWTVDEVVQWL

SEQ ID NO: 14411 - protein, 41 aa, Artificial Sequence
  Synthetic polypeptide
PRHGINPESTGASTEQRGAFRGSRGGRGWGTRGNRSRGRLY

SEQ ID NO: 14412 - protein, 55 aa, Artificial Sequence
  Synthetic polypeptide
DIGTPMFIVALFISQDMESTQNQQVHQQSREEPSGEVEVAEVGAHEEIVVGEDST

SEQ ID NO: 14413 - protein, 27 aa, Artificial Sequence
  Synthetic polypeptide
HYSLAKTWNQPRINRCINRAERSLQGK

SEQ ID NO: 14414 - protein, 56 aa, Artificial Sequence
  Synthetic polypeptide
GWAQWLTPVISALREAEAEGSRAQEFKTSLGNMVKPHLYKNIYKLASLVRIHQPPV

SEQ ID NO: 14415 - protein, 14 aa, Artificial Sequence
  Synthetic polypeptide
NPISTKTYINWPVW

SEQ ID NO: 14416 - protein, 515 aa, Artificial Sequence
  Synthetic polypeptide
IGQFGEDSSTSSMMSVNFDVQSNQSDINDSVKSSPVAHSILWIWGRDSDAYRDKQHILWPKRADCTESYPRVPVGGELPTYFLPPENKGLRIHELSSDDYSTEEEAQTPDCSITDFRKSHTLSYLVKELEVRMDLKAKMPDDHARKILLSRINNYTIPEEEIGSFLFHAINKPNAPIWLILNEAGLYWRAVGNSTFAIACLQRALNLAPLQYQDVPLVNLANLLIHYGLHLDATKLLLQALAINSSEPLTFLSLGNAYLALKNISGALEAFRQALKLTTKCPECENSLKLIRCMQFYPFLYNITSSVCSGNCHEKTLDNSHDKQKYFDNSQSLDAAEEEPSERGTEEDPVFSVENSGRDSDALRLESTVVEESNGSDEMENSDETKMSEEILALVDEFQQAWPLEGFGGALEMKGRRLDLQGIRVLKKGPQDGVARSSCYGDCRSEDDEATEWITFQVKRVKKPKGDHKKTPGKKVETGQIENGHRYQANLEITGPKVASPGPQGLLDWKTRKVP

SEQ ID NO: 14417 - protein, 700 aa, Artificial Sequence
  Synthetic polypeptide
IGQFGEDSSTSSMMSVNFDVQSNQSDINDSVKSSPVAHSILWIWGRDSDAYRDKQHILWPKRADCTESYPRVPVGGELPTYFLPPENKGLRIHELSSDDYSTEEEAQTPDCSITDFRKSHTLSYLVKELEVRMDLKAKMPDDHARKILLSRINNYTIPEEEIGSFLFHAINKPNAPIWLILNEAGLYWRAVGNSTFAIACLQRALNLAPLQYQDVPLVNLANLLIHYGLHLDATKLLLQALAINSSEPLTFLSLGNAYLALKNISGALEAFRQALKLTTKCPECENSLKLIRCMQFYPFLYNITSSVCSGTVVEESNGSDEMENSDETKMSEEILALVDEFQQAWPLEGFGGALEMKGRRLDLQGIRVLKKGPQDGVARSSCYGDCRSEDDEATEWITFQVKRVKKPKGDHKKTPGKKVETGQIENGHRYQANLEITGPKVASPGPQGKKRDYQRLGWPSPDECLKLRWVELTAIVSTWLAVSSKNIDITEHIDFATPIQQPAMEPLCNGNLPTSMHTLDHLHGVSNRASLHYTGESQLTEVLQNLGKDQYPQQSLEQIGTRIAKVLEKNQTSWVLSSMAALYWRVKGQGKKAIDCLRQALHYAPHQMKDVPLISLANILHNAKLWNDAVIVATMAVEIAPHFAVNHFTLGNVYVAMEEFEKALVWYESTLKLQPEFVPAKNRIQTIQCHLMLKKGRRSP

SEQ ID NO: 14418 - protein, 26 aa, Artificial Sequence
  Synthetic polypeptide
LISFPFLVRATRLEDQESAIDIMKKT

SEQ ID NO: 14419 - protein, 33 aa, Artificial Sequence
  Synthetic polypeptide
TGRPGKCHRHNEKNVTTSVWDGPARTNASNSAG

SEQ ID NO: 14420 - protein, 17 aa, Artificial Sequence
  Synthetic polypeptide
WLSQVVLMELENHMQKS

SEQ ID NO: 14421 - protein, 34 aa, Artificial Sequence
  Synthetic polypeptide
SQHFGRLRSKGAILNISSGSGMLPVPLLTIYSAT

SEQ ID NO: 14422 - protein, 42 aa, Artificial Sequence
  Synthetic polypeptide
WAQWFTPIIPALWEAEIQRGYSEHFIWQWHAPCPTLDHLFCN

SEQ ID NO: 14423 - protein, 141 aa, Artificial Sequence
  Synthetic polypeptide
SQHFGRLRSKGAILNISSGSGMLPVPLLTIYSATKTFVDFFSQCLHEEYRSKGVFVQSVLPYFVATKLAKIRKPTLDKPSPETFVKSAIKTVGLQSRTNGYLIHALMGSIISNLPSWIYLKIVMNMNKSTRAHYLKKTKKN

SEQ ID NO: 14424 - protein, 54 aa, Artificial Sequence
  Synthetic polypeptide
WAQWFTPIIPALWEAEIQRGYSEHFIWQWHAPCPTLDHLFCNQDFCRFLLSVPP

SEQ ID NO: 14425 - protein, 43 aa, Artificial Sequence
  Synthetic polypeptide
WLSGPGLGIRRPGFQAYLGTVFCVILAESARHAEGGAIPAAVC

SEQ ID NO: 14426 - protein, 26 aa, Artificial Sequence
  Synthetic polypeptide
AQWPWPGNQETRVPGLPWDSFLCDLS

SEQ ID NO: 14427 - protein, 46 aa, Artificial Sequence
  Synthetic polypeptide
HCADMDRQLMEERDLCSGPWSWLLLCCVVLPAAVWTTRGHRQKWAL

SEQ ID NO: 14428 - protein, 178 aa, Artificial Sequence
  Synthetic polypeptide
HGQAADGGKRPVFWSLELAAALLCSPPCCCVDDTWAQAEVGPVTSCTGFVEGSSRTGGMGSACIKVTKYFLFLFNLIFFILGAVILGFGVWILADKSSFISVLQTSSSSLRMGAYVFIGVGAVTMLMGFLGCIGAVNEVRCLLGLYFAFLLLILIAQVTAGALFYFNMGKLKQEMGGI

SEQ ID NO: 14429 - protein, 173 aa, Artificial Sequence
  Synthetic polypeptide
HGQAADGGKRPVFWSLELAAALLCSPPCCCVDDTWAQAEVGPVTSCTGFVEGSSRTGGMGSACIKVTKYFLFLFNLIFFILGAVILGFGVWILADKSSFISVLQTSSSSLRMGAYVFIGVGAVTMLMGFLGCIGAVNEVRCLLGLYFAFLLLILIAQVTAGALFYFNMGKVSP

SEQ ID NO: 14430 - protein, 107 aa, Artificial Sequence
  Synthetic polypeptide
VWRSGDLGSVPSSSFTCCVILESSLLLCGRHVGTGRSGPCDQLHWFRGRKLQDWRDGLSLYQSHQILSLPLQLDLLYPGRSDPGLRGVDPGRQEQFHLCPANLLQLA

SEQ ID NO: 14431 - protein, 178 aa, Artificial Sequence
  Synthetic polypeptide
ELESGDQGTWAPFPAHLLLAVLSWSPPCCCVDDTWAQAEVGPVTSCTGFVEGSSRTGGMGSACIKVTKYFLFLFNLIFFILGAVILGFGVWILADKSSFISVLQTSSSSLRMGAYVFIGVGAVTMLMGFLGCIGAVNEVRCLLGLYFAFLLLILIAQVTAGALFYFNMGKLKQEMGGI

SEQ ID NO: 14432 - protein, 42 aa, Artificial Sequence
  Synthetic polypeptide
SLSLEIRGPGLRSQLIFYLLCYLGVLPAAVWTTRGHRQKWAL

SEQ ID NO: 14433 - protein, 173 aa, Artificial Sequence
  Synthetic polypeptide
ELESGDQGTWAPFPAHLLLAVLSWSPPCCCVDDTWAQAEVGPVTSCTGFVEGSSRTGGMGSACIKVTKYFLFLFNLIFFILGAVILGFGVWILADKSSFISVLQTSSSSLRMGAYVFIGVGAVTMLMGFLGCIGAVNEVRCLLGLYFAFLLLILIAQVTAGALFYFNMGKVSP

SEQ ID NO: 14434 - protein, 89 aa, Artificial Sequence
  Synthetic polypeptide
MIPESSLLLCGRHVGTGRSGPCDQLHWFRGRKLQDWRDGLSLYQSHQILSLPLQLDLLYPGRSDPGLRGVDPGRQEQFHLCPANLLQLA

SEQ ID NO: 14435 - protein, 156 aa, Artificial Sequence
  Synthetic polypeptide
YLSPPCCCVDDTWAQAEVGPVTSCTGFVEGSSRTGGMGSACIKVTKYFLFLFNLIFFILGAVILGFGVWILADKSSFISVLQTSSSSLRMGAYVFIGVGAVTMLMGFLGCIGAVNEVRCLLGLYFAFLLLILIAQVTAGALFYFNMGKLKQEMGGI

SEQ ID NO: 14436 - protein, 151 aa, Artificial Sequence
  Synthetic polypeptide
YLSPPCCCVDDTWAQAEVGPVTSCTGFVEGSSRTGGMGSACIKVTKYFLFLFNLIFFILGAVILGFGVWILADKSSFISVLQTSSSSLRMGAYVFIGVGAVTMLMGFLGCIGAVNEVRCLLGLYFAFLLLILIAQVTAGALFYFNMGKVSP

SEQ ID NO: 14437 - protein, 129 aa, Artificial Sequence
  Synthetic polypeptide
LRTRQVLSFFLHLSCPAQGLARSSPSAEAGLEEKMAAKQPPPLMKKHSQTDLVSRLKTRKILGVGGEDDDGEVHRSKISQVLGNEIKFTIREPLGLRVWQFVSAVLFSGIAIMALAFPDQLYDAVFDGA

SEQ ID NO: 14438 - protein, 41 aa, Artificial Sequence
  Synthetic polypeptide
GRDRYSASFCISVAQHRGWHAVALLQRPGWRRRWRPSSPRL

SEQ ID NO: 14439 - protein, 26 aa, Artificial Sequence
  Synthetic polypeptide
PGAVARACNPSTLGGRGGRSQGEPTP

SEQ ID NO: 14440 - protein, 72 aa, Artificial Sequence
  Synthetic polypeptide
RARWLAPVIPALWEAEAADHKASPHLNRALHPHLYAWLCDAAGGNTSGHGLQHQERYCGQYFGFLMFWSHTS

SEQ ID NO: 14441 - protein, 439 aa, Artificial Sequence
  Synthetic polypeptide
SQHFGRPRRQITRRAHTLTVLFILTCTLGYVTLLEETPQDTAYNTKRGIVASILVFLCFGVTQAKDGPFSRPHPAYWRFWLCVSVVYELFLIFILFQTVQDGRQFLKYVDPKLGVPLPERDYGGNCLIYDPDNETDPFHNIWDKLDGFVPAHFLGWYLKTLMIRDWWMCMIISVMFEFLEYSLEHQLPNFSECWWDHWIMDVLVCNGLGIYCGMKTLEWLSLKTYKWQGLWNIPTYKGKMKRIAFQFTPYSWVRFEWKPASSLRRWLAVCGIILVFLLAELNTFYLKFVLWMPPEHYLVLLRLVFFVNVGGVAMREIYDFMDDPKPHKKLGPQAWLVAAITATELLIVVKYDPHTLTLSLPFYISQCWTLGSVLALTWTVWRFFLRDITLRYKETRWQKWQNKDDQGSTVGNGDQHPLGLDEDLLGPGVAEGEGAPTPN

SEQ ID NO: 14442 - protein, 118 aa, Artificial Sequence
  Synthetic polypeptide
GLPVMRPVKPVELPSAEAGLEEKMAAKQPPPLMKKHSQTDLVSRLKTRKILGVGGEDDDGEVHRSKISQVLGNEIKFTIREPLGLRVWQFVSAVLFSGIAIMALAFPDQLYDAVFDGA

SEQ ID NO: 14443 - protein, 75 aa, Artificial Sequence
  Synthetic polypeptide
ILTRSGGLKVCGTSPLTLSLSCLPPWEEGPCFPFFFCHDCKFPEASQSCVLLSLWNSLLQRPGWRRRWRPSSPRL

SEQ ID NO: 14444 - protein, 48 aa, Artificial Sequence
  Synthetic polypeptide
ACGTPFCRGRAGGEDGGQAAPASDEEAQPDGPREPPEDPQDPRRGRGG

SEQ ID NO: 14445 - protein, 19 aa, Artificial Sequence
  Synthetic polypeptide
LAAVSPLPGTNLAPNKFPL

SEQ ID NO: 14446 - protein, 794 aa, Artificial Sequence
  Synthetic polypeptide
LLYPHCLEQTWRLINFRCKPSFRESGSRNVREPTFVRHHWVHRRRQDGKCRHCGKGFQQKFTFHSKEIVAISCSWCKQAYHSKVSCFMLQQIEEPCSLGVHAAVVIPPTWILRARRPQNTLKASKKKKRASFKRKSSKKGPEEGRWRPFIIRPTPSPLMKPLLVFVNPKSGGNQGAKIIQSFLWYLNPRQVFDLSQGGPKEALEMYRKVHNLRILACGGDGTVGWILSTLDQLRLKPPPPVAILPLGTGNDLARTLNWGGGYTDEPVSKILSHVEEGNVVQLDRWDLHAEPNPEAGPEDRDEGATDRLPLDVFNNYFSLGFDAHVTLEFHESREANPEKFNSRFRNKMFYAGTAFSDFLMGSSKDLAKHIRVVCDGMDLTPKIQDLKPQCVVFLNIPRYCAGTMPWGHPGEHHDFEPQRHDDGYLEVIGFTMTSLAALQVGGHGERLTQCREVVLTTSKAIPVQVDGEPCKLAASRIRIALRNQATMVQKAKRRSAAPLHSDQQPVPEQLRIQVSRVSMHDYEALHYDKEQLKEASVPLGTVVVPGDSDLELCRAHIERLQQEPDGAGAKSPTCQKLSPKWCFLDATTASRFYRIDRAQEHLNYVTEIAQDEIYILDPELLGASARPDLPTPTSPLPTSPCSPTPRSLQGDAAPPQGEELIEAAKRNDFCKLQELHRAGGDLMHRDEQSRTLLHHAVSTGSKDVVRYLLDHAPPEILDAVEENGETCLHQAAALGQRTICHYIVEAGASLMKTDQQGDTPRQRAEKAQDTELAAYLENRQHYQMIQREDQETAV

SEQ ID NO: 14447 - protein, 799 aa, Artificial Sequence
  Synthetic polypeptide
LLYPHCLEQTWRLINFRCKPSFRESGSRNVREPTFVRHHWVHRRRQDGKCRHCGKGFQQKFTFHSKEIVAISCSWCKQAYHSKVSCFMLQQIEEPCSLGVHAAVVIPPTWILRARRPQNTLKASKKKKRASFKRKSSKKGPEEGRWRPFIIRPTPSPLMKPLLVFVNPKSGGNQGAKIIQSFLWYLNPRQVFDLSQGGPKEALEMYRKVHNLRILACGGDGTVGWILSTLDQLRLKPPPPVAILPLGTGNDLARTLNWGGGYTDEPVSKILSHVEEGNVVQLDRWDLHAEPNPEAGPEDRDEGATDRLPLDVFNNYFSLGFDAHVTLEFHESREANPEKFNSRFRNKMFYAGTAFSDFLMGSSKDLAKHIRVVCDGMDLTPKIQDLKPQCVVFLNIPRYCAGTMPWGHPGEHHDFEPQRHDDGYLEVIGFTMTSLAALQVGGHGERLTQCREVVLTTSKAIPVQVDGEPCKLAASRIRIALRNQATMVQKAKRRSAAPLHSDQQPVPEQLRIQVSRVSMHDYEALHYDKEQLKEASVPLGTVVVPGDSDLELCRAHIERLQQEPDGAGAKSPTCQKLSPKWCFLDATTASRFYRIDRAQEHLNYVTEIAQDEIYILDPELLGASARPDLPTPTSPLPTSPCSPTPRSLQGDAAPPQGEELIEAAKRNDFCKLQELHRAGGDLMHRDEQSRTLLHHAVSTGSKDVVRYLLDHAPPEILDAVEENPCSPSGETCLHQAAALGQRTICHYIVEAGASLMKTDQQGDTPRQRAEKAQDTELAAYLENRQHYQMIQREDQETAV

SEQ ID NO: 14448 - protein, 15 aa, Artificial Sequence
  Synthetic polypeptide
LAAVSPLPGTNLAPN

SEQ ID NO: 14449 - protein, 14 aa, Artificial Sequence
  Synthetic polypeptide
LLYPHCLEQTWRLI

SEQ ID NO: 14450 - protein, 771 aa, Artificial Sequence
  Synthetic polypeptide
LLYPHCLEQTWRLINFRCKPSFRESGSRNVREGFQQKFTFHSKEIVAISCSWCKQAYHSKVSCFMLQQIEEPCSLGVHAAVVIPPTWILRARRPQNTLKASKKKKRASFKRKSSKKGPEEGRWRPFIIRPTPSPLMKPLLVFVNPKSGGNQGAKIIQSFLWYLNPRQVFDLSQGGPKEALEMYRKVHNLRILACGGDGTVGWILSTLDQLRLKPPPPVAILPLGTGNDLARTLNWGGGYTDEPVSKILSHVEEGNVVQLDRWDLHAEPNPEAGPEDRDEGATDRLPLDVFNNYFSLGFDAHVTLEFHESREANPEKFNSRFRNKMFYAGTAFSDFLMGSSKDLAKHIRVVCDGMDLTPKIQDLKPQCVVFLNIPRYCAGTMPWGHPGEHHDFEPQRHDDGYLEVIGFTMTSLAALQVGGHGERLTQCREVVLTTSKAIPVQVDGEPCKLAASRIRIALRNQATMVQKAKRRSAAPLHSDQQPVPEQLRIQVSRVSMHDYEALHYDKEQLKEASVPLGTVVVPGDSDLELCRAHIERLQQEPDGAGAKSPTCQKLSPKWCFLDATTASRFYRIDRAQEHLNYVTEIAQDEIYILDPELLGASARPDLPTPTSPLPTSPCSPTPRSLQGDAAPPQGEELIEAAKRNDFCKLQELHRAGGDLMHRDEQSRTLLHHAVSTGSKDVVRYLLDHAPPEILDAVEENGETCLHQAAALGQRTICHYIVEAGASLMKTDQQGDTPRQRAEKAQDTELAAYLENRQHYQMIQREDQETAV

SEQ ID NO: 14451 - protein, 79 aa, Artificial Sequence
  Synthetic polypeptide
LLYPHCLEQTWRLINFRCKPSFRESGSRNVREPTFVRHHWVHRRRQDGKCRHCGKGFQQKFTFHSKEIVAISCSWCKQA

SEQ ID NO: 14452 - protein, 38 aa, Artificial Sequence
  Synthetic polypeptide
LAAVSPLPGTNLAPSGTLVTIWGYPHLVRMTLGCPGGS

SEQ ID NO: 14453 - protein, 17 aa, Artificial Sequence
  Synthetic polypeptide
LLYPHCLEQTWRLVGLS

SEQ ID NO: 14454 - protein, 23 aa, Artificial Sequence
  Synthetic polypeptide
WDSRDDLGVSPPCEDDSGLSWRE

SEQ ID NO: 14455 - protein, 58 aa, Artificial Sequence
  Synthetic polypeptide
GRVQWLMPVIPALWEAEAGGSQHQEFKTSLGNMDSLPEKLAVHEKNVREFDAFVETLQ

SEQ ID NO: 14456 - protein, 49 aa, Artificial Sequence
  Synthetic polypeptide
SQHFGRPRRVDHNIRSSRPAWATWTHYQRSWLCMRRMSASLMPLWKPCS

SEQ ID NO: 14457 - protein, 42 aa, Artificial Sequence
  Synthetic polypeptide
PGAVAHACNPSTLGGRGGWITTSGVQDQPGQHGLITREAGCA

SEQ ID NO: 14458 - protein, 54 aa, Artificial Sequence
  Synthetic polypeptide
VYSVYKVDSSVLGFHLHTPLTQSNFQSCKLHSWHLPSDGSHMCAHAHKHSVLHR

SEQ ID NO: 14459 - protein, 151 aa, Artificial Sequence
  Synthetic polypeptide
AFTFTHHSPRATSSPASSIPGISPQMEVTCVPTPTSTVSSIGNTNGEEVGPSVYLERLKILRQRCGLDNTKQDDRPPLTSLLSKPAVPTVASSTDMLHSKLSQLRESREQHQHSDLDSNQTHSSGTVTSSSSTANIDDLKKRLERIKSSRK

SEQ ID NO: 14460 - protein, 43 aa, Artificial Sequence
  Synthetic polypeptide
CPRLSPSHTTHPEQLPVLQAPFLASPLRWKSHVCPRPQAQCPP

SEQ ID NO: 14461 - protein, 83 aa, Artificial Sequence
  Synthetic polypeptide
AFTFTHHSPRATSSPASSIPGISPQMEVTCVPTPTSTVSSIGNTNGEEVGPSVYLERLKILRQRCGLDNTKVLLLFFCAVQGG

SEQ ID NO: 14462 - protein, 27 aa, Artificial Sequence
  Synthetic polypeptide
SQHFRRPRQVDHEVRRSRPSWLTRCFR

SEQ ID NO: 14463 - protein, 33 aa, Artificial Sequence
  Synthetic polypeptide
HAVSDREPCPGGLHWSTKRPNAWPHHLNAGFSD

SEQ ID NO: 14464 - protein, 441 aa, Artificial Sequence
  Synthetic polypeptide
RARWLTPVIPALQEAKAGGSRSQEIETILANTLFQIESLAREASTGVLKDLMHGLITLMLDSRIEDLEEGQQVIRSVNLLVVKVLEKSDQTNILSALLVLLQDSLLATASSPKFSELVMKCLWRMVRLLPDTINSINLDRILLDIHIFMKVFPKEKLKQCKSEFPIRTLKTLLHTLCKLKGPKILDHLTMIDNKNESELEAHLCRMMKHSMDQTGSKSDKETEKGASRIDEKSSKAKVNDFLAEIFKKIGSKENTKEGLAELYEYKKKYSDADIEPFLKNSSQFFQSYVERGLRVIEMEREGKGRISTSTGISPQMEVTCVPTPTSTVSSIGNTNGEEVGPSVYLERLKILRQRCGLDNTKQDDRPPLTSLLSKPAVPTVASSTDMLHSKLSQLRESREQHQHSDLDSNQTHSSGTVTSSSSTANIDDLKKRLERIKSSRK

SEQ ID NO: 14465 - protein, 448 aa, Artificial Sequence
  Synthetic polypeptide
RARWLTPVIPALQEAKAGGSRSQEIETILANTLFQIESLAREASTGVLKDLMHGLITLMLDSRIEDLEEGQQVIRSVNLLVVKVLEKSDQTNILSALLVLLQDSLLATASSPKFSELVMKCLWRMVRLLPDTINSINLDRILLDIHIFMKVFPKEKLKQCKSEFPIRTLKTLLHTLCKLKGPKSCMCLPQILDHLTMIDNKNESELEAHLCRMMKHSMDQTGSKSDKETEKGASRIDEKSSKAKVNDFLAEIFKKIGSKENTKEGLAELYEYKKKYSDADIEPFLKNSSQFFQSYVERGLRVIEMEREGKGRISTSTGISPQMEVTCVPTPTSTVSSIGNTNGEEVGPSVYLERLKILRQRCGLDNTKQDDRPPLTSLLSKPAVPTVASSTDMLHSKLSQLRESREQHQHSDLDSNQTHSSGTVTSSSSTANIDDLKKRLERIKSSRK

SEQ ID NO: 14466 - protein, 16 aa, Artificial Sequence
  Synthetic polypeptide
HAVSDREPCPGGLHWS

SEQ ID NO: 14467 - protein, 46 aa, Artificial Sequence
  Synthetic polypeptide
RARWLTPVIPALQEAKAGGSRSQEIETILANTLFQIESLAREASTG

SEQ ID NO: 14468 - protein, 26 aa, Artificial Sequence
  Synthetic polypeptide
SQHFRRPRQVDHEVRRSRPSWLTRCF

SEQ ID NO: 14469 - protein, 4 aa, Artificial Sequence
  Synthetic polypeptide
HAVS

SEQ ID NO: 14470 - protein, 35 aa, Artificial Sequence
  Synthetic polypeptide
RARWLTPVIPALQEAKAGGSRSQEIETILANTLFQ

SEQ ID NO: 14471 - protein, 1641 aa, Artificial Sequence
  Synthetic polypeptide
GATSMCTAEQFRCHSGRCVRLSWRCDGEDDCADNSDEENCENTGSPQCALDQFLCWNGRCIGQRKLCNGVNDCGDNSDESPQQNCRPRTGEENCNVNNGGCAQKCQMVRGAVQCTCHTGYRLTEDGHTCQDVNECAEEGYCSQGCTNSEGAFQCWCETGYELRPDRRSCKALGPEPVLLFANRIDIRQVLPHRSEYTLLLNNLENAIALDFHHRRELVFWSDVTLDRILRANLNGSNVEEVVSTGLESPGGLAVDWVHDKLYWTDSGTSRIEVANLDGAHRKVLLWQNLEKPRAIALHPMEGTIYWTDWGNTPRIEASSMDGSGRRIIADTHLFWPNGLTIDYAGRRMYWVDAKHHVIERANLDGSHRKAVISQGLPHPFAITVFEDSLYWTDWHTKSINSANKFTGKNQEIIRNKLHFPMDIHTLHPQRQPAGKNRCGDNNGGCTHLCLPSGQNYTCACPTGFRKISSHACAQSLDKFLLFARRMDIRRISFDTEDLSDDVIPLADVRSAVALDWDSRDDHVYWTDVSTDTISRAKWDGTGQEVVVDTSLESPAGLAIDWVTNKLYWTDAGTDRIEVANTDGSMRTVLIWENLDRPRDIVVEPMGGYMYWTDWGASPKIERAGMDASGRQVIISSNLTWPNGLAIDYGSQRLYWADAGMKTIEFAGLDGSKRKVLIGSQLPHPFGLTLYGERIYWTDWQTKSIQSADRLTGLDRETLQENLENLMDIHVFHRRRPPVSTPCAMENGGCSHLCLRSPNPSGFSCTCPTGINLLSDGKTCSPGMNSFLIFARRIDIRMVSLDIPYFADVVVPINITMKNTIAIGVDPQEGKVYWSDSTLHRISRANLDGSQHEDIITTGLQTTDGLAVDAIGRKVYWTDTGTNRIEVGNLDGSMRKVLVWQNLDSPRAIVLYHEMGFMYWTDWGENAKLERSGMDGSDRAVLINNNLGWPNGLTVDKASSQLLWADAHTERIEAADLNGANRHTLVSPVQHPYGLTLLDSYIYWTDWQTRSIHRADKGTGSNVILVRSNLPGLMDMQAVDRAQPLGFNKCGSRNGGCSHLCLPRPSGFSCACPTGIQLKGDGKTCDPSPETYLLFSSRGSIRRISLDTSDHTDVHVPVPELNNVISLDYDSVDGKVYYTDVFLDVIRRADLNGSNMETVIGRGLKTTDGLAVDWVARNLYWTDTGRNTIEASRLDGSCRKVLINNSLDEPRAIAVFPRKGYLFWTDWGHIAKIERANLDGSERKVLINTDLGWPNGLTLDYDTRRIYWVDAHLDRIESADLNGKLRQVLVSHVSHPFALTQQDRWIYWTDWQTKSIQRVDKYSGRNKETVLANVEGLMDIIVVSPQRQTGTNACGVNNGGCTHLCFARASDFVCACPDEPDSRPCSLVPGLVPPAPRATGMSEKSPVLPNTPPTTLYSSTTRTRTSLEEVEGRCSERDARLGLCARSNDAVPAAPGEGLHISYAIGGLLSILLILVVIAALMLYRHKKSKFTDPGMGNLTYSNPSYRTSTQEVKIEAIPKPAMYNQLCYKKEGGPDHNYTKEKIKIVEGICLLSGDDAEWDDLKQLRSSRGGLLRDHVCMKTDTVSIQASSGSLDDTETEQLLQEEQSECSSVHTAATPERRGSLPDTGWKHERKLSSESQV

SEQ ID NO: 14472 - protein, 131 aa, Artificial Sequence
  Synthetic polypeptide
EPPPCVRQNSSAVTQAAVSACPGAVMGRTTVQTTAMKRTVRIQEAPNVPWTSSCVGMGAALGRGSCATGSTTVVTTATKAHSRIAGPGRVRRTAMLTTVAVPRSARWCGGQCSVPATQATGSQRMGTRAKM

SEQ ID NO: 14473 - protein, 62 aa, Artificial Sequence
  Synthetic polypeptide
ISLTRSNGFIRGFRFCFLLIFLLPPPCKKCLLPPATIQRPPQPCGTLSDMSSPTWRMQCASC

SEQ ID NO: 14474 - protein, 67 aa, Artificial Sequence
  Synthetic polypeptide
VSRDLMGLSGVSAFASSSFFSCRHHVRSAFCLLPQFRGLPSHVELSATCPHLHGGCSVPAARKQGRY

SEQ ID NO: 14475 - protein, 105 aa, Artificial Sequence
  Synthetic polypeptide
EVPFASCHNSEASPAMWNSQRHVLTYMEDAVCQLLENREDISQYGIARFFTEYFNSVCQGTHILFREFSFVQATPHNRVSFLRAFWRCFRTVGKNGDFYIQGKPN

SEQ ID NO: 14476 - protein, 52 aa, Artificial Sequence
  Synthetic polypeptide
EVPFASCHNSEASPAMWNSQRHVLTYMEDAVCQLLENREDISQYGIARFFTE

SEQ ID NO: 14477 - protein, 334 aa, Artificial Sequence
  Synthetic polypeptide
EVPFASCHNSEASPAMWNSQRHVLTYMEDAVCQLLENREDISQYGIARFFTEYFNSVCQGTHILFREFSFVQATPHNRVSFLRAFWRCFRTVGKNGDLLTMKEYHCLLQLLCPDFPLELTQKAARIVLMDDAMDCLMSFSDFLFAFQIQFYYSEFLDSVAAIYEDLLSGKNPNTVIVPTSSSGQHRQRPALGGAGTLEGVEASLFYQCLENLCDRHKYSCPPPALVKEALSNVQRLTFYGFLMALSKHRGINQALGALPDKGDLMHDPAMDEELERLLAQVPGLVNSVTASPEASCLPSRTPPRVGSPWRPLHHSRKVDGESDGSTEETDESET

SEQ ID NO: 14478 - protein, 329 aa, Artificial Sequence
  Synthetic polypeptide
EVPFASCHNSEASPAMWNSQRHVLTYMEDAVCQLLENREDISQYGIARFFTEYFNSVCQGTHILFREFSFVQATPHNRVSFLRAFWRCFRTVGKNGDLLTMKEYHCLLQLLCPDFPLELTQKAARIVLMDDAMDCLMSFSDFLFAFQIQFYYSEFLDSVAAIYEDLLSGKNPNTVIVPTSSSGQHRQRPALGGAGTLEGVEASLFYQCLENLCDRHKYSCPPPALVKEALSNVQRLTFYGFLMALSKHRGINQALGALPDKGDLMHDPAMDEELERLVVRSKLHRTSRQHRAKEPGAFGFQRREKQEALERVSSASVPTPYHYRWEPRE

SEQ ID NO: 14479 - protein, 277 aa, Artificial Sequence
  Synthetic polypeptide
EVPFASCHNSEASPAMWNSQRHVLTYMEDAVCQLLENREDISQYGIARFFTEYFNSVCQGTHILFREFSFVQATPHNRVSFLRAFWRCFRTVGKNGDLLTMKEYHCLLQLLCPDFPLELTQKAARIVLMDDAMDCLMSFSDFLFAFQIQFYYSEFLDSVAAIYEDLLSGKNPNTVIVPTSSSGQHRQRPALGGAGTLEGVEASLFYQCLENLCDRHKYSCPPPALVKEALSNVQRLTFYGFLMALSKHRGINQALGALPDKGDLMHDPAMDEELERL

SEQ ID NO: 14480 - protein, 340 aa, Artificial Sequence
  Synthetic polypeptide
EVPFASCHNSEASPAMWNSQRHVLTYMEDAVCQLLENREDISQYGIARFFTEYFNSVCQGTHILFREFSFVQATPHNRVSFLRAFWRCFRTVGKNGDLLTMKEYHCLLQLLCPDFPLELTQKAARIVLMDDAMDCLMSFSDFLFAFQIQFYYSEFLDSVAAIYEDLLSGKNPNTVIVPTSSSGQHRQRPALGGAGTLEGVEASLFYQCLENLCDRHKYSCPPPALVKEALSNVQRLTFYGFLMALSKHRGINQALGALPDKGDLMHDPAMDEELERLLLPFFRLAQVPGLVNSVTASPEASCLPSRTPPRVGSPWRPLHHSRKVDGESDGSTEETDESET

SEQ ID NO: 14481 - protein, 41 aa, Artificial Sequence
  Synthetic polypeptide
EVPFASCHNSEASPAMWNSQRHVLTYMEDAVCQLLENREDI

SEQ ID NO: 14482 - protein, 9 aa, Artificial Sequence
  Synthetic polypeptide
SHLLRRLRS

SEQ ID NO: 14483 - protein, 122 aa, Artificial Sequence
  Synthetic polypeptide
EAEVLAEDVTQTASGWGWLAHRSCHHAAASSGPSTSISWAELPGHLSSRGSSSPFCTLWILTGYYKRLPPLTGGLHPWRGTQLTPALWLWVPKGEISCSGILASRTNPPSSKGLELEGASLG

SEQ ID NO: 14484 - protein, 140 aa, Artificial Sequence
  Synthetic polypeptide
EAEVLAEDVTQTASGWGWLAHRSCHHAAASSGPSTSISWAELPGHLSSRGSSSPFCTLWILTGYYKRLPPLTGGLHPWRGTQLTPALWLWVPKGEISCSGILASRTNPPSSKGQPGILATTSLLWADTQILISKVVPLMN

SEQ ID NO: 14485 - protein, 58 aa, Artificial Sequence
  Synthetic polypeptide
EAEVLAEDVTQTASGWGWLAHRSCHHAAASSGPSTSISWAELPGHLSSRLELEGASLG

SEQ ID NO: 14486 - protein, 21 aa, Artificial Sequence
  Synthetic polypeptide
GRVQWLMLEIPALWEAKHLVL

SEQ ID NO: 14487 - protein, 243 aa, Artificial Sequence
  Synthetic polypeptide
AGCSGSCLKSQHFGRPSIWFCSLDVSASSRMVVTGDNVGNVILLNMDGKELWNLRMHKKKVTHVALNPCCDWFLATASVDQTVKIWDLRQVRGKASFLYSLPHRHPVNAACFSPDGARLLTTDQKSEIRVYSASQWDCPLGLIPHPHRHFQHLTPIKAAWHPRYNLIVVGRYPDPNFKSCTPYELRTIDVFDGNSGKMMCQLYDPESSGISSLNEFNPMGDTLASAMGYHILIWSQEEARTRK

SEQ ID NO: 14488 - protein, 32 aa, Artificial Sequence
  Synthetic polypeptide
NPSTLGGQASGFVAWMCLLVAEWWSQETTWGT

SEQ ID NO: 14489 - protein, 60 aa, Artificial Sequence
  Synthetic polypeptide
AGCSGSCLKSQHFGRPSIWFCSLDVSASSRMVVTGDNVGNVILLNMDGKELVSVPMEPGS

SEQ ID NO: 14490 - protein, 72 aa, Artificial Sequence
  Synthetic polypeptide
NPDSTKNTKISRVWWCPVRRTDPPEETEAARGGTGSCHILAPQGFLTPPNPAPAQPGTTGHDREARRCPATV

SEQ ID NO: 14491 - protein, 321 aa, Artificial Sequence
  Synthetic polypeptide
SQHFGRPKRVDHLRSEVRDQPGQHSETPTLLKIQKLAGCGGVLSEEQIRLKKLKRQEEEQAHATSLPPRASSPPQILPQLSPEQLGMIEKLVAAQQQCNRRSFSDRLRVTPWPMAPDPHSREARQQRFAHFTELAIVSVQEIVDFAKQLPGFLQLSREDQIALLKTSAIEVMLLETSRRYNPGSESITFLKDFSYNREDFAKAGLQVEFINPIFEFSRAMNELQLNDAEFALLIAISIFSADRPNVQDQLQVERLQHTYVEALHAYVSIHHPHDRLMFPRMLMKLVSLRTLSSVHSEQVFALRLQDKKLPPLLSEIWDVHE

SEQ ID NO: 14492 - protein, 13 aa, Artificial Sequence
  Synthetic polypeptide
PGVVVSCQKNRSA

SEQ ID NO: 14493 - protein, 261 aa, Artificial Sequence
  Synthetic polypeptide
SQHFGRPKRVDHLRSEVRDQPGQHSETPTLLKIQKLAGCGGVLSEEQIRLKKLKRQEEEQAHATSLPPRASSPPQILPQLSPEQLGMIEKLVAAQQQCNRRSFSDRLRVTVMLLETSRRYNPGSESITFLKDFSYNREDFAKAGLQVEFINPIFEFSRAMNELQLNDAEFALLIAISIFSADRPNVQDQLQVERLQHTYVEALHAYVSIHHPHDRLMFPRMLMKLVSLRTLSSVHSEQVFALRLQDKKLPPLLSEIWDVHE

SEQ ID NO: 14494 - protein, 385 aa, Artificial Sequence
  Synthetic polypeptide
SQHFGRPKRVDHLRSEVRDQPGQHSETPTLLKIQKLAGCGGVLSEEQIRLKKLKRQEEEQAHATSLPPRASSPPQILPQLSPEQLGMIEKLVAAQQQCNRRSFSDRLRVTPWPMAPDPHSREARQQRFAHFTELAIVSVQEIVDFAKQLPGFLQLSREDQIALLKTSAIEVAGEGQGMKGEAEWDYLWEGPPDIELGEPNLLGSRDEENRPPWKRPCSKTSPPSPRLRFAACVQVMLLETSRRYNPGSESITFLKDFSYNREDFAKAGLQVEFINPIFEFSRAMNELQLNDAEFALLIAISIFSADRPNVQDQLQVERLQHTYVEALHAYVSIHHPHDRLMFPRMLMKLVSLRTLSSVHSEQVFALRLQDKKLPPLLSEIWDVHE

SEQ ID NO: 14495 - protein, 50 aa, Artificial Sequence
  Synthetic polypeptide
NPDSTKNTKISRVWWCPVRRTDPPEETEAARGGTGSCHILAPQGFLTPPN

SEQ ID NO: 14496 - protein, 76 aa, Artificial Sequence
  Synthetic polypeptide
SQHFGRPKRVDHLRSEVRDQPGQHSETPTLLKIQKLAGCGGVLSEEQIRLKKLKRQEEEQAHATSLPPRASSPPQI

SEQ ID NO: 14497 - protein, 175 aa, Artificial Sequence
  Synthetic polypeptide
SQHFGRPKRVDHLRSEVRDQPGQHSETPTLLKIQKLAGCGGVLSEEQIRLKKLKRQEEEQAHATSLPPRASSPPQILPQLSPEQLGMIEKLVAAQQQCNRRSFSDRLRVTVMLLETSRRYNPGSESITFLKDFSYNREDFAKAGLQVEFINPIFEFSRAMNELQLNDAEFALLIA

SEQ ID NO: 14498 - protein, 42 aa, Artificial Sequence
  Synthetic polypeptide
NPDSTKNTKISRVWWCPVRRTDPPEETEAARGGTGSCHILAP

SEQ ID NO: 14499 - protein, 67 aa, Artificial Sequence
  Synthetic polypeptide
SQHFGRPKRVDHLRSEVRDQPGQHSETPTLLKIQKLAGCGGVLSEEQIRLKKLKRQEEEQAHATSLP

SEQ ID NO: 14500 - protein, 28 aa, Artificial Sequence
  Synthetic polypeptide
NPDSTKNTKISRVWWCPVRRTDPPEETE

SEQ ID NO: 14501 - protein, 53 aa, Artificial Sequence
  Synthetic polypeptide
SQHFGRPKRVDHLRSEVRDQPGQHSETPTLLKIQKLAGCGGVLSEEQIRLKKL

SEQ ID NO: 14502 - protein, 53 aa, Artificial Sequence
  Synthetic polypeptide
NPDSTKNTKISRVWWCPVRRTDPPEETEAARGGTGSCHILAPQGFLTPPNPAP

SEQ ID NO: 14503 - protein, 79 aa, Artificial Sequence
  Synthetic polypeptide
SQHFGRPKRVDHLRSEVRDQPGQHSETPTLLKIQKLAGCGGVLSEEQIRLKKLKRQEEEQAHATSLPPRASSPPQILPQ

SEQ ID NO: 14504 - protein, 60 aa, Artificial Sequence
  Synthetic polypeptide
NPDSTKNTKISRVWWCPVRRTDPPEETEAARGGTGSCHILAPQGFLTPPNPAPAQPGTTG

SEQ ID NO: 14505 - protein, 86 aa, Artificial Sequence
  Synthetic polypeptide
SQHFGRPKRVDHLRSEVRDQPGQHSETPTLLKIQKLAGCGGVLSEEQIRLKKLKRQEEEQAHATSLPPRASSPPQILPQLSPEQLG

SEQ ID NO: 14506 - protein, 246 aa, Artificial Sequence
  Synthetic polypeptide
PWARSPTSLCLNFFMTIPTSQDGYHYWDFHPHHVHSEFESFAENNFTELQSVQPPQLQQLYRHMELEQMHVLDTPMVPPHPSLGHQVSYLPRMCLQYPSLSPAQPSSDEEEGERQSPPLEVSDGEADGLEPGPGLLPGETGSKKKIRLYQFLLDLLRSGDMKDSIWWVDKDKGTFQFSSKHKEALAHRWGIQKGNRKKMTYQKMARALRNYGKTGEVKKVKKKLTYQFSGEVLGRGGLAERRHPPH

SEQ ID NO: 14507 - protein, 145 aa, Artificial Sequence
  Synthetic polypeptide
QYQLHRMATITGTSTPTTCTASSRASPRTTSRSSRACSPRSCSSSTATWSWSRCTSSIPPWCHPIPVLATRSPTCPGCASSTHPCPQPSPAQMRRRASGRAPHWRCLTARRMAWSPGLGSCLGRQAARRRSACTSSCWTCSAAAT

SEQ ID NO: 14508 - protein, 120 aa, Artificial Sequence
  Synthetic polypeptide
NSSPISSIAIRVTMGKISNLSVPQLLHDNTNFTGWLPLLGLPPPPRAQRVRELRREQLHGAPERAAPAAAAALPPHGAGADARPRYPHGATPSQSWPPGLLPAPDVPPVPIPVPSPAQLR

SEQ ID NO: 14509 - protein, 221 aa, Artificial Sequence
  Synthetic polypeptide
PWARSPTSLCLNFFMTIPTSQDGYHYWDFHPHHVHSEFESFAENNFTELQSVQPPQLQQLYRHMELEQMHVLDTPMVPPHPSLGHQVSYLPRMCLQYPSLSPAQPSSDEEEGERQSPPLEVSDGEADGLEPGPGLLPGETGGAPGPPPWPRPWPCLCPAPTQPGQLTQQPRHRVACVCVCMFASVCVLWGCLWLSLCVCICCVVHTGISMKCARCVCLSVP

SEQ ID NO: 14510 - protein, 150 aa, Artificial Sequence
  Synthetic polypeptide
QYQLHRMATITGTSTPTTCTASSRASPRTTSRSSRACSPRSCSSSTATWSWSRCTSSIPPWCHPIPVLATRSPTCPGCASSTHPCPQPSPAQMRRRASGRAPHWRCLTARRMAWSPGLGSCLGRQVGHLALHPGPDPGRVCALPPPSQAN

SEQ ID NO: 14511 - protein, 23 aa, Artificial Sequence
  Synthetic polypeptide
IWFLGLLPWALYPSFPSQRLSGS

SEQ ID NO: 14512 - protein, 54 aa, Artificial Sequence
  Synthetic polypeptide
RLILGASTYMDSSTRPLLTSSSKFGSWACSPGHSIHPFLPSAYRAPDNHGHPPA

SEQ ID NO: 14513 - protein, 104 aa, Artificial Sequence
  Synthetic polypeptide
PPHLNLVPGPAPLGTLSILSFPAPIGLLTTMAILLHEIPHEVGDFAILLRAGFDRWSAAKLQLSTALGGLLGAGFAICTQSPKGRRRQPGSCPSPLAAFSTSPW

SEQ ID NO: 14514 - protein, 73 aa, Artificial Sequence
  Synthetic polypeptide
PPHLNLVPGPAPLGTLSILSFPAPIGLLTTMAILLHEIPHEVGDFAILLRAGFDRWSAAKLQLSTALGGLLGA

SEQ ID NO: 14515 - protein, 150 aa, Artificial Sequence
  Synthetic polypeptide
PPHLNLVPGPAPLGTLSILSFPAPIGLLTTMAILLHEIPHEVGDFAILLRAGFDRWSAAKLQLSTALGGLLGAGFAICTQSPKGVVGCSPAAEETAAWVLPFTSGGFLYIALVNVLPDLLEEEDPWRSLQQLLLLCAGIVVMVLFSLFVD

SEQ ID NO: 14516 - protein, 143 aa, Artificial Sequence
  Synthetic polypeptide
PPHLNLVPGPAPLGTLSILSFPAPIGLLTTMAILLHEIPHEVGDFAILLRAGFDRWSAAKLQLSTALGGLLGAGFAICTQSPKGVEETAAWVLPFTSGGFLYIALVNVLPDLLEEEDPWRSLQQLLLLCAGIVVMVLFSLFVD

SEQ ID NO: 14517 - protein, 37 aa, Artificial Sequence
  Synthetic polypeptide
SLEPRGSRSSWPTWCLQNNGTRSCPNCRRSSMKPGFV

SEQ ID NO: 14518 - protein, 51 aa, Artificial Sequence
  Synthetic polypeptide
ARRGASRLSRKHFGRPRRADHLSPGVQDHLGQHGACRTTGPGAVPTAAAHP

SEQ ID NO: 14519 - protein, 35 aa, Artificial Sequence
  Synthetic polypeptide
APGFKIILANMVPAEQRDPELSQLPPLIHEAWLCM

SEQ ID NO: 14520 - protein, 97 aa, Artificial Sequence
  Synthetic polypeptide
APGFKIILANMVPAEQRDPELSQLPPLIHEAWLCMTPGSRRGLPPRHSCSFSTARQRPIYSWGSCQVVLTIAKALGPAQGCSPGPSSPPCLFVLCSL

SEQ ID NO: 14521 - protein, 498 aa, Artificial Sequence
  Synthetic polypeptide
SQLLRRLSSKKMNGTLDHPDQPDLDAIKMFVGQVPRTWSEKDLRELFEQYGAVYEINVLRDRSQNPPQSKGCCFVTFYTRKAALEAQNALHNMKVLPGMHHPIQMKPADSEKNNAVEDRKLFIGMISKKCTENDIRVMFSSFGQIEECRILRGPDGLSRGCAFVTFTTRAMAQTAIKAMHQAQTMEGCSSPMVVKFADTQKDKEQKRMAQQLQQQMQQISAASVWGNLAGLNTLGPQYLALYLQLLQQTASSGNLNTLSSLHPMGGLNAMQLQNLAALAAAASAAQNTPSGTNALTTSSSPLSVLTSSAGSSPSSSSSNSVNPIASLGALQTLAGATAGLNVGSLAGMAALNGGLGSSGLSNGTGSTMEALTQAYSGIQQYAAAALPTLYNQNLLTQQSIGAAGSQKEGPEGANLFIYHLPQEFGDQDLLQMFMPFGNVVSAKVFIDKQTNLSKCFGFVSYDNPVSAQAAIQSMNGFQIGMKRLKVQLKRSKNDSKPY

SEQ ID NO: 14522 - protein, 51 aa, Artificial Sequence
  Synthetic polypeptide
GGQITRSGDGNHPGQHGETPSVVCVPVVPATQEAELKENERHPGPPRPTRS

SEQ ID NO: 14523 - protein, 496 aa, Artificial Sequence
  Synthetic polypeptide
SQLLRRLSSKKMNGTLDHPDQPDLDAIKMFVGQVPRTWSEKDLRELFEQYGAVYEINVLRDRSQNPPQSKGCCFVTFYTRKAALEAQNALHNMKVLPGMHHPIQMKPADSEKNNVEDRKLFIGMISKKCTENDIRVMFSSFGQIEECRILRGPDGLSRGCAFVTFTTRAMAQTAIKAMHQAQTMEGCSSPMVVKFADTQKDKEQKRMAQQLQQQMQQISAASVWGNLAGLNTLGPQYLALYLQLLQQTASSGNLNTLSSLHPMGGLNAMQLQNLAALAAAASAAQNTPSGTNALTTSSSPLSVLTSSGSSPSSSSSNSVNPIASLGALQTLAGATAGLNVGSLAGMAALNGGLGSSGLSNGTGSTMEALTQAYSGIQQYAAAALPTLYNQNLLTQQSIGAAGSQKEGPEGANLFIYHLPQEFGDQDLLQMFMPFGNVVSAKVFIDKQTNLSKCFGFVSYDNPVSAQAAIQSMNGFQIGMKRLKVQLKRSKNDSKPY

SEQ ID NO: 14524 - protein, 98 aa, Artificial Sequence
  Synthetic polypeptide
SQLLRRLSSKKMNGTLDHPDQPDLDAIKMFVGQVPRTWSEKDLRELFEQYGAVYEINVLRDRSQNPPQSKGCCFVTFYTRKAALEAQNALHNMKVLPG

SEQ ID NO: 14525 - protein, 87 aa, Artificial Sequence
  Synthetic polypeptide
SQLLRRLSSKKMNGTLDHPDQPDLDAIKMFVGQVPRTWSEKDLRELFEQYGAVYEINVLRDRSQNPPQSKGCCFVTFYTRKAALEAQ

SEQ ID NO: 14526 - protein, 21 aa, Artificial Sequence
  Synthetic polypeptide
SQLLRRLSSKKMNGTLDHPDQ

SEQ ID NO: 14527 - protein, 49 aa, Artificial Sequence
  Synthetic polypeptide
GGQITRSGDGNHPGQHGETPSVVCVPVVPATQEAELKENERHPGPPRPT

SEQ ID NO: 14528 - protein, 12 aa, Artificial Sequence
  Synthetic polypeptide
SQHFGRLRSGRD

SEQ ID NO: 14529 - protein, 64 aa, Artificial Sequence
  Synthetic polypeptide
PGVVALTPVIPALWEAEEWKRLGVEQLRLSTVDMTGIPTLDNLQKGVQFALKYQSLGQCVYVHC

SEQ ID NO: 14530 - protein, 133 aa, Artificial Sequence
  Synthetic polypeptide
PGVVALTPVIPALWEAEEWKRLGVEQLRLSTVDMTGIPTLDNLQKGVQFALKYQSLGQCVYVHCKAGRSRSATMVAAYLIQVHKWSPEEAVRAIAKIRSYIHIRPGQLDVLKEFHKQITARATKDGTFVISKT

SEQ ID NO: 14531 - protein, 16 aa, Artificial Sequence
  Synthetic polypeptide
TWEMEVVQLVLKIQKK

SEQ ID NO: 14532 - protein, 37 aa, Artificial Sequence
  Synthetic polypeptide
IHKTSRAWWRMPVIPATREAEAGESLEPGRWRLCNWC

SEQ ID NO: 14533 - protein, 552 aa, Artificial Sequence
  Synthetic polypeptide
SQLLGRLRQENRLNLGDGGCAIGAENSEKIDENSDKEMEVEESPEKIKVQTTPKVEEEQDLKFQIGELANTLTSKFEFLGINRQSISNFHVLLLQTETRIADWREGALNGNYLKRKLQDAAEQLKQYEINATPKGWSCHWDRDHRRYFYVNEQSGESQWEFPDGEEEEEESQAQENRDETLAKQTLKDKTGTDSNSTESSETSTGSLCKESFSGQVSSSSLMPLTPFWTLLQSNVPVLQPPLPLEMPPPPPPPPESPPPPPPPPPPAEDGEIQEVEMEDEGSEEPPAPGTEEDTPLKPSAQTTVVTSQSSVDSTISSSSSTKGIKRKATEISTAVVQRSATIGSSPVLYSQSAIATGHQAAGIGNQATGIGHQTIPVSLPAAGMGHQARGMSLQSNYLGLAAAPAIMSYAECSVPIGVTAPSLQPVQARGAVPTATIIEPPPPPPPPPPPPPPAPKMPPPEKTKKGRKDKAKKSKTKMPSLVKKWQSIQRELDEEDNSSSSEEDRESTAQKRIEEWKQQQLVSGMAERNANFEALPEDWRARLKRRKMAPNT

SEQ ID NO: 14534 - protein, 35 aa, Artificial Sequence
  Synthetic polypeptide
GPAWWLTPVIPALSEAEVGRSPEVRSSRSTWPTWK

SEQ ID NO: 14535 - protein, 27 aa, Artificial Sequence
  Synthetic polypeptide
SQHFRRLRWADHLRSGVQDQLGQPGSK

SEQ ID NO: 14536 - protein, 726 aa, Artificial Sequence
  Synthetic polypeptide
GQEFKINLANLEVNEGIQALSNSEEEKKGVAASLLAPLLPEGIKEEEERWRRKVICKEEPVSEVKETSTTVEEATTIVKPQEIMLDNIEDPSQEDLCSVVQSGESEEEEEQDTLELELVLERKKAELRALEEGDGSVSGSSPRSDISQPASQDGMRRLMSKRGKWKMFVRATSPESTSRSSSKTGRDTPENGETAIGAENSEKIDENSDKEMEVEESPEKIKVQTTPKVEEEQDLKFQIGELANTLTSKFEFLGINRQSISNFHVLLLQTETRIADWREGALNGNYLKRKLQDAAEQLKQYEINATPKGWSCHWDRDHRRYFYVNEQSGESQWEFPDGEEEEEESQAQENRDETLAKQTLKDKTGTDSNSTESSETSTGSLCKESFSGQVSSSSLMPLTPFWTLLQSNVPVLQPPLPLEMPPPPPPPPESPPPPPPPPPPAEDGEIQEVEMEDEGSEEPPAPGTEEDTPLKPSAQTTVVTSQSSVDSTISSSSSTKGIKRKATEISTAVVQRSATIGSSPVLYSQSAIATGHQAAGIGNQATGIGHQTIPVSLPAAGMGHQARGMSLQSNYLGLAAAPAIMSYAECSVPIGVTAPSLQPVQARGAVPTATIIEPPPPPPPPPPPPPPAPKMPPPEKTKKGRKDKAKKSKTKMPSLVKKWQSIQRELDEEDNSSSSEEDRESTAQKRIEEWKQQQLVSGMAERNANFEALPEDWRARLKRRKMAPNT

SEQ ID NO: 14537 - protein, 1019 aa, Artificial Sequence
  Synthetic polypeptide
KYHLTQRSHYWVYTQRIINHAAIKTHAHVMFTAALFTIAKTWNQPECPSMIDWIKKMWHIYTIEYYAAIKKDEFMSFVGTWMKLETIILSKLSQGQKTKHHIFSLIGGLCLLGAYADSDDDDNDVSEKLAQSKETNGNQSTDIDSTLANFLAEIDAITAPQPAAPVGASAPPPTPPRPEPKEAATSTLSSSTSNGTDSTQTSGWQYDTQCSLAGVGIEMGDWQEVWDENTGCYYYWNTQTNEVTWELPQYLATQVQGLQHYQPSSVPGAETSFVVNTDIYSKEKTISVSSSKSGPVIAKREVKKEVNEGIQALSNSEEEKKGVAASLLAPLLPEGIKEEEERWRRKVICKEEPVSEVKETSTTVEEATTIVKPQEIMLDNIEDPSQEDLCSVVQSGESEEEEEQDTLELELVLERKKAELRALEEGDGSVSGSSPRSDISQPASQDGMRRLMSKRGKWKMFVRATSPESTSRSSSKTGRDTPENGETAIGAENSEKIDENSDKEMEVEESPEKIKVQTTPKVEEEQDLKFQIGELANTLTSKFEFLGINRQSISNFHVLLLQTETRIADWREGALNGNYLKRKLQDAAEQLKQYEINATPKGWSCHWDRDHRRYFYVNEQSGESQWEFPDGEEEEEESQAQENRDETLAKQTLKDKTGTDSNSTESSETSTGSLCKESFSGQVSSSSLMPLTPFWTLLQSNVPVLQPPLPLEMPPPPPPPPESPPPPPPPPPPAEDGEIQEVEMEDEGSEEPPAPGTEEDTPLKPSAQTTVVTSQSSVDSTISSSSSTKGIKRKATEISTAVVQRSATIGSSPVLYSQSAIATGHQAAGIGNQATGIGHQTIPVSLPAAGMGHQARGMSLQSNYLGLAAAPAIMSYAECSVPIGVTAPSLQPVQARGAVPTATIIEPPPPPPPPPPPPPPAPKMPPPEKTKKGRKDKAKKSKTKMPSLVKKWQSIQRELDEEDNSSSSEEDRESTAQKRIEEWKQQQLVSGMAERNANFEALPEDWRARLKRRKMAPNT

SEQ ID NO: 14538 - protein, 43 aa, Artificial Sequence
  Synthetic polypeptide
VHVLCRDMDEAGNHHSEQTIARTENQTPHILTHRRSMLAWCLC

SEQ ID NO: 14539 - protein, 61 aa, Artificial Sequence
  Synthetic polypeptide
AQWLTPVIPALWEAEAGGSRGQEIKTILANKMHQIAIWRRGSTSRSLGLASSQSALICHHY

SEQ ID NO: 14540 - protein, 211 aa, Artificial Sequence
  Synthetic polypeptide
SQHFGRPRRADHEARRSRPSWLTRCIKLQFGGEAAQAEAWAWLAANQLSSVITTKESSATDEAWRLLSTYLERYKVQNNLYHHCVINKLLSHGVPLPNWLINSYKKVDAAELLRLYLNYDLLEEAVDLVSEYVDAVLGKGHQYFGIEFPLSATAPMVWLPYSSIDQLLQALGENSANSHNIALSQKILDKLEDYQQKVDKATRDLLYRRTL

SEQ ID NO: 14541 - protein, 20 aa, Artificial Sequence
  Synthetic polypeptide
QDASNCNLEERQHKQKPGPG

SEQ ID NO: 14542 - protein, 124 aa, Artificial Sequence
  Synthetic polypeptide
SQHFGRPRRADHEARRSRPSWLTRCIKLQFGGEAAQAEAWAWLAANQLSSVITTKESSATDEAWRLLSTYLERYKVQNNLYHHCVINKLLSHGVPLPNWLINSYKDYQQKVDKATRDLLYRRTL

SEQ ID NO: 14543 - protein, 992 aa, Artificial Sequence
  Synthetic polypeptide
GRAWWLTPVIPALREAEADGSRGQEIETILANMIFCRGTERNLDLSWSELKKEVTLAVENELQGSVTEYEFSQEEFRNLQQEFWCKFYACCLQYQEALSHPLALHLNPHTNMVCLLKKGYLSFLIPSSLVDHLYLLPYENLLTEDETTISDDVDIARDVICLIKCLRLIEESVTVDMSVIMEMSCYNLQSPEKAAEQILEDMITIDVENVMEDICSKLQEIRNPIHAIGLLIREMDYETEVEMEKGFNPAQPLNIRMNLTQLYGSNTAGYIVCRGVHKIASTRFLICRDLLILQQLLMRLGDAVIWGTGQLFQAQQDLLHRTAPLLLSYYLIKWGSECLATDVPLDTLESNLQHLSVLELTDSGALMANRFVSSPQTIVELFFQEVARKHIISHLFSQPKAPLSQTGLNWPEMITAITSYLLQLLWPSNPGCLFLECLMGNCQYVQLQDYIQLLHPWCQVNVGSCRFMLGRCYLVTGEGQKALECFCQAASEVGKEEFLDRLIRSEDGEIVSTPRLQYYDKVLRLLDVIGLPELVIQLATSAITEAGDDWKSQATLRTCIFKHHLDLGHNSQAYEALTQIPDSSRQLDCLRQLVVVLCERSQLQDLVEFPYVNLHNEVVGIIESRARAVDLMTHNYYELLYAFHIYRHNYRKAGTVMFEYGMRLGREVRTLRGLEKQGNCYLAALNCLRLIRPEYAWIVQPVSGAVYDRPGASPKRNHDGECTAAPTNRQIEILELEDLEKECSLARIRLTLAQHDPSAVAVAGSSSAEEMVTLLVQAGLFDTAISLCQTFKLPLTPVFEGLAFKCIKLQFGGEAAQAEAWAWLAANQLSSVITTKESSATDEAWRLLSTYLERYKVQNNLYHHCVINKLLSHGVPLPNWLINSYKKVDAAELLRLYLNYDLLEEAVDLVSEYVDAVLGKGHQYFGIEFPLSATAPMVWLPYSSIDQLLQALGENSANSHNIALSQKILDKLEDYQQKVDKATRDLLYRRTL

SEQ ID NO: 14544 - protein, 22 aa, Artificial Sequence
  Synthetic polypeptide
GRWITGSRDRDHPGQHDFLPRN

SEQ ID NO: 14545 - protein, 905 aa, Artificial Sequence
  Synthetic polypeptide
GRAWWLTPVIPALREAEADGSRGQEIETILANMIFCRGTERNLDLSWSELKKEVTLAVENELQGSVTEYEFSQEEFRNLQQEFWCKFYACCLQYQEALSHPLALHLNPHTNMVCLLKKGYLSFLIPSSLVDHLYLLPYENLLTEDETTISDDVDIARDVICLIKCLRLIEESVTVDMSVIMEMSCYNLQSPEKAAEQILEDMITIDVENVMEDICSKLQEIRNPIHAIGLLIREMDYETEVEMEKGFNPAQPLNIRMNLTQLYGSNTAGYIVCRGVHKIASTRFLICRDLLILQQLLMRLGDAVIWGTGQLFQAQQDLLHRTAPLLLSYYLIKWGSECLATDVPLDTLESNLQHLSVLELTDSGALMANRFVSSPQTIVELFFQEVARKHIISHLFSQPKAPLSQTGLNWPEMITAITSYLLQLLWPSNPGCLFLECLMGNCQYVQLQDYIQLLHPWCQVNVGSCRFMLGRCYLVTGEGQKALECFCQAASEVGKEEFLDRLIRSEDGEIVSTPRLQYYDKVLRLLDVIGLPELVIQLATSAITEAGDDWKSQATLRTCIFKHHLDLGHNSQAYEALTQIPDSSRQLDCLRQLVVVLCERSQLQDLVEFPYVNLHNEVVGIIESRARAVDLMTHNYYELLYAFHIYRHNYRKAGTVMFEYGMRLGREVRTLRGLEKQGNCYLAALNCLRLIRPEYAWIVQPVSGAVYDRPGASPKRNHDGECTAAPTNRQIEILELEDLEKECSLARIRLTLAQHDPSAVAVAGSSSAEEMVTLLVQAGLFDTAISLCQTFKLPLTPVFEGLAFKCIKLQFGGEAAQAEAWAWLAANQLSSVITTKESSATDEAWRLLSTYLERYKVQNNLYHHCVINKLLSHGVPLPNWLINSYKDYQQKVDKATRDLLYRRTL

SEQ ID NO: 14546 - protein, 707 aa, Artificial Sequence
  Synthetic polypeptide
GRAWWLTPVIPALREAEADGSRGQEIETILANMIFCRGTERNLDLSWSELKKEVTLAVENELQGSVTEYEFSQEEFRNLQQEFWCKFYACCLQYQEALSHPLALHLNPHTNMVCLLKKGYLSFLIPSSLVDHLYLLPYENLLTEDETTISDDVDIARDVICLIKCLRLIEESVTVDMSVIMEMSCYNLQSPEKAAEQILEDMITIDVENVMEDICSKLQEIRNPIHAIGLLIREMDYETEVEMEKGFNPAQPLNIRMNLTQLYGSNTAGYIVCRGVHKIASTRFLICRDLLILQQLLMRLGDAVIWGTGQLFQAQQDLLHRTAPLLLSYYLIKWGSECLATDVPLDTLESNLQHLSVLELTDSGALMANRFVSSPQTIVELFFQEVARKHIISHLFSQPKAPLSQTGLNWPEMITAITSYLLQLLWPSNPGCLFLECLMGNCQYVQLQDYIQLLHPWCQVNVGSCRFMLGRCYLVTGEGQKALECFCQAASEVGKEEFLDRLIRSEDGEIVSTPRLQYYDKVLRLLDVIGLPELVIQLATSAITEAGDDWKSQATLRTCIFKHHLDLGHNSQAYEALTQIPDSSRQLDCLRQLVVVLCERSQLQDLVEFPYVNLHNEVVGIIESRARAVDLMTHNYYELLYAFHIYRHNYRKAGTVMFEYGMRLGREVRTLRGLEKQGNCYLAALNCLRLIRPEYAWIVQPVSGAVV

SEQ ID NO: 14547 - protein, 251 aa, Artificial Sequence
  Synthetic polypeptide
GRAWWLTPVIPALREAEADGSRGQEIETILANMIFCRGTERNLDLSWSELKKEVTLAVENELQGSVTEYEFSQEEFRNLQQEFWCKFYACCLQYQEALSHPLALHLNPHTNMVCLLKKGYLSFLIPSSLVDHLYLLPYENLLTEDETTISDDVDIARDVICLIKCLRLIEESVTVDMSVIMEMSCYNLQSPEKAAEQILEDMITIDVENVMEDICSKLQEIRNPIHAIGLLIREMDYETEVEMEKGFNPGK

SEQ ID NO: 14548 - protein, 40 aa, Artificial Sequence
  Synthetic polypeptide
VHVLCRDTDEAGNHHSEKTITRTENQTPRVLTHSSAFSSW

SEQ ID NO: 14549 - protein, 114 aa, Artificial Sequence
  Synthetic polypeptide
IPFDPAIPLLGIYPKDYKSCCYKDTCTHIFIVALFTIAKTWNQPKCPSMIDWIKKMWHIYTMEYYAAIKKDEFMSFVGTRMKLETIILRKLSQGQKTKHHVFSLIVLHFPVGEH

SEQ ID NO: 14550 - protein, 47 aa, Artificial Sequence
  Synthetic polypeptide
RVPFILTTQEAEVGGSDHATALQVGKREDLWRYIGADGGVTGHKSVE

SEQ ID NO: 14551 - protein, 1352 aa, Artificial Sequence
  Synthetic polypeptide
LLRRLRWEDPIMPLHSRWEKGKTSGDTLELMEESLDINLLNNAIRLKFQNCSVLPGGVYVSETQNRVIILMLTNQTVHRLLLPHPSRMYRSELVVDSQMQSIFTDIGKVDFTDPCNYQLIPAVPGISPNSTASTAWLSSDGEALFALPCASGGIFVLKLPPYDIPGMVSVVELKQSSVMQRLLTGWMPTAIRGDQSPSDRPLSLAVHCVEHDAFIFALCQDHKLRMWSYKEQMCLMVADMLEYVPVKKDLRLTAGTGHKLRLAYSPTMGLYLGIYMHAPKRGQFCIFQLVSTESNRYSLDHISSLFTSQETLIDFALTSTDIWALWHDAENQTVVKYINFEHNVAGQWNPVFMQPLPEEEIVIRDDQDPREMYLQSLFTPGQFTNEALCKALQIFCRGTERNLDLSWSELKKEVTLAVENELQGSVTEYEFSQEEFRNLQQEFWCKFYACCLQYQEALSHPLALHLNPHTNMVCLLKKGYLSFLIPSSLVDHLYLLPYENLLTEDETTISDDVDIARDVICLIKCLRLIEESVTVDMSVIMEMSCYNLQSPEKAAEQILEDMITIDVENVMEDICSKLQEIRNPIHAIGLLIREMDYETEVEMEKGFNPAQPLNIRMNLTQLYGSNTAGYIVCRGVHKIASTRFLICRDLLILQQLLMRLGDAVIWGTGQLFQAQQDLLHRTAPLLLSYYLIKWGSECLATDVPLDTLESNLQHLSVLELTDSGALMANRFVSSPQTIVELFFQEVARKHIISHLFSQPKAPLSQTGLNWPEMITAITSYLLQLLWPSNPGCLFLECLMGNCQYVQLQDYIQLLHPWCQVNVGSCRFMLGRCYLVTGEGQKALECFCQAASEVGKEEFLDRLIRSEDGEIVSTPRLQYYDKVLRLLDVIGLPELVIQLATSAITEAGDDWKSQATLRTCIFKHHLDLGHNSQAYEALTQIPDSSRQLDCLRQLVVVLCERSQLQDLVEFPYVNLHNEVVGIIESRARAVDLMTHNYYELLYAFHIYRHNYRKAGTVMFEYGMRLGREVRTLRGLEKQGNCYLAALNCLRLIRPEYAWIVQPVSGAVYDRPGASPKRNHDGECTAAPTNRQIEILELEDLEKECSLARIRLTLAQHDPSAVAVAGSSSAEEMVTLLVQAGLFDTAISLCQTFKLPLTPVFEGLAFKCIKLQFGGEAAQAEAWAWLAANQLSSVITTKESSATDEAWRLLSTYLERYKVQNNLYHHCVINKLLSHGVPLPNWLINSYKKVDAAELLRLYLNYDLLEEAVDLVSEYVDAVLGKGHQYFGIEFPLSATAPMVWLPYSSIDQLLQALGENSANSHNIALSQKILDKLEDYQQKVDKATRDLLYRRTL

SEQ ID NO: 14552 - protein, 24 aa, Artificial Sequence
  Synthetic polypeptide
GGRIRSCHCTPGGKKGRPLEIHWS

SEQ ID NO: 14553 - protein, 140 aa, Artificial Sequence
  Synthetic polypeptide
LLRRLRWEDPIMPLHSRWEKGKTSGDTLELMEESLDINLLNNAIRLKFQNCSVLPGGVYVSETQNRVIILMLTNQTVHRLLLPHPSRMYRSVSWLSAISFISQITLGVTNVVLERCLLELKEIWILVIPHQAYFDSYRLK

SEQ ID NO: 14554 - protein, 43 aa, Artificial Sequence
  Synthetic polypeptide
RVPFILTTQEAEVGGSDHATALQEDLWRYIGADGGVTGHKSVE

SEQ ID NO: 14555 - protein, 1348 aa, Artificial Sequence
  Synthetic polypeptide
LLRRLRWEDPIMPLHSRKTSGDTLELMEESLDINLLNNAIRLKFQNCSVLPGGVYVSETQNRVIILMLTNQTVHRLLLPHPSRMYRSELVVDSQMQSIFTDIGKVDFTDPCNYQLIPAVPGISPNSTASTAWLSSDGEALFALPCASGGIFVLKLPPYDIPGMVSVVELKQSSVMQRLLTGWMPTAIRGDQSPSDRPLSLAVHCVEHDAFIFALCQDHKLRMWSYKEQMCLMVADMLEYVPVKKDLRLTAGTGHKLRLAYSPTMGLYLGIYMHAPKRGQFCIFQLVSTESNRYSLDHISSLFTSQETLIDFALTSTDIWALWHDAENQTVVKYINFEHNVAGQWNPVFMQPLPEEEIVIRDDQDPREMYLQSLFTPGQFTNEALCKALQIFCRGTERNLDLSWSELKKEVTLAVENELQGSVTEYEFSQEEFRNLQQEFWCKFYACCLQYQEALSHPLALHLNPHTNMVCLLKKGYLSFLIPSSLVDHLYLLPYENLLTEDETTISDDVDIARDVICLIKCLRLIEESVTVDMSVIMEMSCYNLQSPEKAAEQILEDMITIDVENVMEDICSKLQEIRNPIHAIGLLIREMDYETEVEMEKGFNPAQPLNIRMNLTQLYGSNTAGYIVCRGVHKIASTRFLICRDLLILQQLLMRLGDAVIWGTGQLFQAQQDLLHRTAPLLLSYYLIKWGSECLATDVPLDTLESNLQHLSVLELTDSGALMANRFVSSPQTIVELFFQEVARKHIISHLFSQPKAPLSQTGLNWPEMITAITSYLLQLLWPSNPGCLFLECLMGNCQYVQLQDYIQLLHPWCQVNVGSCRFMLGRCYLVTGEGQKALECFCQAASEVGKEEFLDRLIRSEDGEIVSTPRLQYYDKVLRLLDVIGLPELVIQLATSAITEAGDDWKSQATLRTCIFKHHLDLGHNSQAYEALTQIPDSSRQLDCLRQLVVVLCERSQLQDLVEFPYVNLHNEVVGIIESRARAVDLMTHNYYELLYAFHIYRHNYRKAGTVMFEYGMRLGREVRTLRGLEKQGNCYLAALNCLRLIRPEYAWIVQPVSGAVYDRPGASPKRNHDGECTAAPTNRQIEILELEDLEKECSLARIRLTLAQHDPSAVAVAGSSSAEEMVTLLVQAGLFDTAISLCQTFKLPLTPVFEGLAFKCIKLQFGGEAAQAEAWAWLAANQLSSVITTKESSATDEAWRLLSTYLERYKVQNNLYHHCVINKLLSHGVPLPNWLINSYKKVDAAELLRLYLNYDLLEEAVDLVSEYVDAVLGKGHQYFGIEFPLSATAPMVWLPYSSIDQLLQALGENSANSHNIALSQKILDKLEDYQQKVDKATRDLLYRRTL

SEQ ID NO: 14556 - protein, 20 aa, Artificial Sequence
  Synthetic polypeptide
GGRIRSCHCTPGRPLEIHWS

SEQ ID NO: 14557 - protein, 136 aa, Artificial Sequence
  Synthetic polypeptide
LLRRLRWEDPIMPLHSRKTSGDTLELMEESLDINLLNNAIRLKFQNCSVLPGGVYVSETQNRVIILMLTNQTVHRLLLPHPSRMYRSVSWLSAISFISQITLGVTNVVLERCLLELKEIWILVIPHQAYFDSYRLK

SEQ ID NO: 14558 - protein, 14 aa, Artificial Sequence
  Synthetic polypeptide
QHLAIADPVRRWHP

SEQ ID NO: 14559 - protein, 1323 aa, Artificial Sequence
  Synthetic polypeptide
MALFTAVCQAADSIWLSQILCAGGTPSPIPDPSVATVATGENGITQISSTAESFHKQNGTGTPQVETNTSEDGESSGANDSLRTPEQGSNGTDGASQKTPSSTGPSPVFDIKAVSISPTNVILTWKSNDTAASEYKYVVKHKMENEKTITVVHQPWCNITGLRPATSYVFSITPGIGNETWGDPRVIKVITEPIPVSDLRVALTGVRKAALSWSNGNGTASCRVLLESIGSHEELTQDSRLQVNISGLKPGVQYNINPYLLQSNKTKGDPLGTEGGLDASNTERSRAGSPTAPVHDESLVGPVDPSSGQQSRDTEVLLVGLEPGTRYNATVYSQAANGTEGQPQAIEFRTNAIQVFDVTAVNISATSLTLIWKVSDNESSSNYTYKIHVAGETDSSNLNVSEPRAVIPGLRSSTFYNITVCPVLGDIEGTPGFLQVHTPPVPVSDFRVTVVSTTEIGLAWSSHDAESFQMHITQEGAGNSRVEITTNQSIIIGGLFPGTKYCFEIVPKGPNGTEGASRTVCNRTVPSAVFDIHVVYVTTTEMWLDWKSPDGASEYVYHLVIESKHGSNHTSTYDKAITLQGLIPGTLYNITISPEVDHVWGDPNSTAQYTRPSNVSNIDVSTNTTAATLSWQNFDDASPTYSYCLLIEKAGNSSNATQVVTDIGITDATVTELIPGSSYTVEIFAQVGDGIKSLEPGRKSFCTDPASMASFDCEVVPKEPALVLKWTCPPGANAGFELEVSSGAWNNATHLESCSSENGTEYRTEVTYLNFSTSYNISITTVSCGKMAAPTRNTCTTGITDPPPPDGSPNITSVSHNSVKVKFSGFEASHGPIKAYAVILTTGEAGHPSADVLKYTYEDFKKGASDTYVTYLIRTEEKGRSQSLSEVLKYEIDVGNESTTLGYYNGKLEPLGSYRACVAGFTNITFHPQNKGLIDGAESYVSFSRYSDAVSLPQDPGVICGAVFGCIFGALVIVTVGGFIFWRKKRKDAKNNEVSFSQIKPKKSKLIRVENFEAYFKKQQADSNCGFAEEYEDLKLVGISQPKYAAELAENRGKNRYNNVLPYDISRVKLSVQTHSTDDYINANYMPGYHSKKDFIATQGPLPNTLKDFWRMVWEKNVYAIIMLTKCVEQGRTKCEEYWPSKQAQDYGDITVAMTSEIVLPEWTIRDFTVKNIQTSESHPLRQFHFTSWPDHGVPDTTDLLINFRYLVRDYMKQSPPESPILVHCSAGVGRTGTFIAIDRLIYQIENENTVDVYGIVYDLRMHRPLMVQTEDQYVFLNQCVLDIVRSQKDSKVDLIYQNTTAMTIYENLAPVTTFGKTNGYIA

SEQ ID NO: 14560 - protein, 33 aa, Artificial Sequence
  Synthetic polypeptide
WPCSLLCAKLLTASGYRRSCAQVAPLVQFLTLQ

SEQ ID NO: 14561 - protein, 525 aa, Artificial Sequence
  Synthetic polypeptide
MALFTAVCQAADSIWLSQILCAGGTPSPIPDPSVATVATGENGITQISSTAESFHKQNGTGTPQVETNTSEDGESSGANDSLRTPEQGSNGTDGASQKTPSSTGPSPVFDIKAVSISPTNVILTWKSNDTAASEYKYVVKHKMENEKTITVVHQPWCNITGLRPATSYVFSITPGIGNETWGDPRVIKVITEPIPVSDLRVALTGVRKAALSWSNGNGTASCRVLLESIGSHEELTQDSRLQVNISGLKPGVQYNINPYLLQSNKTKGDPLGTEGGLDASNTERSRAGSPTAPVHDESLVGPVDPSSGQQSRDTEVLLVGLEPGTRYNATVYSQAANGTEGQPQAIEFRTNAIQVFDVTAVNISATSLTLIWKVSDNESSSNYTYKIHVAGETDSSNLNVSEPRAVIPGLRSSTFYNITVCPVLGDIEGTPGFLQVHTPPVPVSDFRVTVVSTTEIGLAWSSHDAESFQMHITQEGAGNSRVEITTNQSIIIGGLFPGTKYCFEIVPKGPNGTEGASRTVCNRTG

SEQ ID NO: 14562 - protein, 18 aa, Artificial Sequence
  Synthetic polypeptide
QHLAIADPVRRWQAQSCV

SEQ ID NO: 14563 - protein, 106 aa, Artificial Sequence
  Synthetic polypeptide
MALFTAVCQAADSIWLSQILCAGGRPSPVFDIKAVSISPTNVILTWKSNDTAASEYKYVVKHKMENEKTITVVHQPWCNITGLRPATSYVFSITPGIGNETWGDPR

SEQ ID NO: 14564 - protein, 41 aa, Artificial Sequence
  Synthetic polypeptide
WPCSLLCAKLLTASGYRRSCAQVAGPVLCLTLKLFPSVQPM

SEQ ID NO: 14565 - protein, 132 aa, Artificial Sequence
  Synthetic polypeptide
MALFTAVCQAADSIWLSQILCAGGTPSPIPDPSVATVATGENGITQISSTAESFHKQNGTGTPQVETNTSEDGESSGANDSLRTPEQGSNGTDGASQKTPSSTEPIPVSDLRVALTGVRKAALSWSNGNGTA

SEQ ID NO: 14566 - protein, 58 aa, Artificial Sequence
  Synthetic polypeptide
MGLTRSDGFKNRSCSTQALFLPAAIPVGCDLLLLAMVVRPPQLCGTAPGCLPMDPEVL

SEQ ID NO: 14567 - protein, 124 aa, Artificial Sequence
  Synthetic polypeptide
GLPSYVELLLVVYPWTQRFFDSFGNLSSASAIMGNPKVKAHGKKVLTSLGDATKHLDDLKGTFAQLSELHCDKLHVDPENFKLLGNVLVTVLAIHFGKEFTPEVQASWQKMVTAVASALSSRYH

SEQ ID NO: 14568 - protein, 54 aa, Artificial Sequence
  Synthetic polypeptide
LASPGHGCEASPAMWNCSWLSTHGPRGSLTALATCPLPLPSWATPKSRHMARRC

SEQ ID NO: 14569 - protein, 58 aa, Artificial Sequence; identical to SEQ ID NO: 14566
  Synthetic polypeptide

SEQ ID NO: 14570 - protein, 54 aa, Artificial Sequence; identical to SEQ ID NO: 14568
  Synthetic polypeptide

SEQ ID NO: 14571 - protein, 124 aa, Artificial Sequence
  Synthetic polypeptide
GLPSYVELLLVVYPWTQRFFDSFGNLSSASAIMGNPKVKAHGKKVLTSLGDAIKHLDDLKGTFAQLSELHCDKLHVDPENFKLLGNVLVTVLAIHFGKEFTPEVQASWQKMVTGVASALSSRYH

SEQ ID NO: 14572 - protein, 20 aa, Artificial Sequence
  Synthetic polypeptide
GLPSYVELLLVVYPWTQRFF

SEQ ID NO: 14573 - protein, 29 aa, Artificial Sequence
  Synthetic polypeptide
LASPGHGCEASPAMWNCSWLSTHGPRGSL

SEQ ID NO: 14574 - protein, 48 aa, Artificial Sequence
  Synthetic polypeptide
MGLTRSDGFKNRSCSTQALFLPAAIPVGCDLLLLAMVVRPPQLCGTGK

SEQ ID NO: 14575 - protein, 36 aa, Artificial Sequence
  Synthetic polypeptide
GLPSYVELGNEEESLASPFSSVHEAPGCLPMDPEVL

SEQ ID NO: 14576 - protein, 149 aa, Artificial Sequence
  Synthetic polypeptide
LASPGHGCEASPAMWNWEMKRKVLPLHFLPFMRLLVVYPWTQRFFDSFGNLSSASAIMGNPKVKAHGKKVLTSLGDAIKHLDDLKGTFAQLSELHCDKLHVDPENFKLLGNVLVTVLAIHFGKEFTPEVQASWQKMVTGVASALSSRYH

SEQ ID NO: 14577 - protein, 26 aa, Artificial Sequence
  Synthetic polypeptide
SASQTWGQVKEEEESKGKDGKEIHAL

SEQ ID NO: 14578 - protein, 91 aa, Artificial Sequence
  Synthetic polypeptide
VLLKPGDKSKKKKKVKVKMEKKSTPSRGSSSKSSSRQLSESFKSKEFVSSDESSSGENKSKKKRRRSEDSEEEELASTPPSSEDSASGSDE

SEQ ID NO: 14579 - protein, 14 aa, Artificial Sequence
  Synthetic polypeptide
CFSNLGTSQRRRRK

SEQ ID NO: 14580 - protein, 76 aa, Artificial Sequence
  Synthetic polypeptide
SSSFHFPCDSDLGEKKPMSHSTQVKRRKMWQRSLTATPLPAPPVMRVTVTGMRRSGNSSKRPRWPRTARAARSLWR

SEQ ID NO: 14581 - protein, 30 aa, Artificial Sequence
  Synthetic polypeptide
AHSRPDLQITPCDPPVFTFPVTVTWERRNR

SEQ ID NO: 14582 - protein, 237 aa, Artificial Sequence
  Synthetic polypeptide
PGREETDESFNPGEEEEDVAEEFDSNASASSSSNEGDSDRDEKKRKQLKKAKMAKDRKSRKKPVEVKKGKDPNAPKRPMSAYMLWLNASREKIKSDHPGISITDLSKKAGEIWKGMSKEKKEEWDRKAEDARRDYEKAMKEYEGGRGESSKRDKSKKKKKVKVKMEKKSTPSRGSSSKSSSRQLSESFKSKEFVSSDESSSGENKSKKKRRRSEDSEEEELASTPPSSEDSASGSDE

SEQ ID NO: 14583 - protein, 372 aa, Artificial Sequence
  Synthetic polypeptide
QSSAVLLFLAMPMLTIGGILFLITNLQIGNLFGQHRSTIITLYNGAFDSSSAVFLIIKLLYEKGISLRASFIFISVCSTWHVARTFLLMPRGHIPYPLPPNYSYGLCPGNGTTKEEKETAEHENRELQSKEFLSAKEETPGAGQKQELRSFWSYAFSRRFAWHLVWLSVIQLWHYLFIGTLNSLLTNMAGGDMARVSTYTNAFAFTQFGVLCAPWNGLLMDRLKQKYQKEARKTGSSTLAVALCSTVPSLALTSLLCLGFALCASVPILPLQYLTFILQVISRSFLYGSNAAFLTLAFPSEHFGKLFGLVMALSAVVSLLQFPIFTLIKGSLQNDPFYVNVMFMLAILLTFFHPFLVYRECRTWKESPSAIA

SEQ ID NO: 14584 - protein, 93 aa, Artificial Sequence
  Synthetic polypeptide
AKITPLHSSLGDKAQPCCSSWPCQCSPLGESCFSSPTCRLGTYLANTVRPSSLCTMEHLTLPRQSSLLLSFFMKKASASGPPSSSSLSAVPGM

SEQ ID NO: 14585 - protein, 80 aa, Artificial Sequence
  Synthetic polypeptide
SQPLRRLRQENCLNPGGRGCSEPRSHHCTPAWVTKLSRAALPGHANAHHWGNPVSHHQPADWEPIWPTPFDHHHSVQWSI

SEQ ID NO: 14586 - protein, 212 aa, Artificial Sequence
  Synthetic polypeptide
QSSAVLLFLAMPMLTIGGILFLITNLQIGNLFGQHRSTIITLYNGAFDSSSAVFLIIKLLYEKGISLRASFIFISVCSTWHVARTFLLMPRGHIPYPLPPNYSYGLCPGNGTTKEEKETAEHENRELQSKEFLSAKEETPGAGQKQELRSFWSYAFSRRFAWHLVWLSVIQLWHYLFIGTLNSLLTNMAGGDMARVSTYTNAFAFTQFGVLC

SEQ ID NO: 14587 - protein, 60 aa, Artificial Sequence
  Synthetic polypeptide
QSSAVLLFLAMPMLTIGGILFLITNLQIGNLFGQHRSTIITLYNGAFDSSSAVFLIIKLL

SEQ ID NO: 14588 - protein, 72 aa, Artificial Sequence
  Synthetic polypeptide
AKITPLHSSLGDKAQPCCSSWPCQCSPLGESCFSSPTCRLGTYLANTVRPSSLCTMEHLTLPRQSSLLLSFF

SEQ ID NO: 14589 - protein, 50 aa, Artificial Sequence
  Synthetic polypeptide
QSSAVLLFLAMPMLTIGGILFLITNLQIGNLFGQHRSTIITLYNGAFDSS

SEQ ID NO: 14590 - protein, 61 aa, Artificial Sequence
  Synthetic polypeptide
AKITPLHSSLGDKAQPCCSSWPCQCSPLGESCFSSPTCRLGTYLANTVRPSSLCTMEHLTL

SEQ ID NO: 14591 - protein, 29 aa, Artificial Sequence
  Synthetic polypeptide
QSSAVLLFLAMPMLTIGGILFLITNLQIG

SEQ ID NO: 14592 - protein, 40 aa, Artificial Sequence
  Synthetic polypeptide
AKITPLHSSLGDKAQPCCSSWPCQCSPLGESCFSSPTCRL

SEQ ID NO: 14593 - protein, 62 aa, Artificial Sequence
  Synthetic polypeptide
SQPLRRLRQENCLNPGGRGCSEPRSHHCTPAWVTKLSRAALPGHANAHHWGNPVSHHQPADW

SEQ ID NO: 14594 - protein, 19 aa, Artificial Sequence
  Synthetic polypeptide
QPHAGNANPLYQKREKWRS

SEQ ID NO: 14595 - protein, 36 aa, Artificial Sequence
  Synthetic polypeptide
NPMLGTQTLCTRKERSGDPDVSQCHCDDEEPQIQRN

SEQ ID NO: 14596 - protein, 53 aa, Artificial Sequence
  Synthetic polypeptide
TPCWERKPFVPEKREVEILMFLSAIVMMKNRRSRGTRTGQEGHLDCGVLCQLV

SEQ ID NO: 14597 - protein, 47 aa, Artificial Sequence
  Synthetic polypeptide
NPMLGTQTLCTRKERSGDPDVSQCHCDDEEPQIHVPDDVQTPPIYGP

SEQ ID NO: 14598 - protein, 208 aa, Artificial Sequence
  Synthetic polypeptide
TPCWERKPFVPEKREVEILMFLSAIVMMKNRRSMFLMTCKPPLYMGPEYIKYFNDKTIDEELERDKRVTWIVEFFANWSNDCQSFAPIYADLSLKYNCTGLNFGKVDVGRYTDVSTRYKVSTSPLTKQLPTLILFQGGKEAMRRPQIDKKGRAVSWTFSEENVIREFNLNELYQRAKKLSKAGDNIPEEQPVASTPTTVSDGENKKDK

SEQ ID NO: 14599 - protein, 54 aa, Artificial Sequence
  Synthetic polypeptide
NPMLGTQTLCTRKERSGDPDVSQCHCDDEEPQIHSLLPASSLLWWLGCFFHDFL

SEQ ID NO: 14600 - protein, 53 aa, Artificial Sequence
  Synthetic polypeptide
TPCWERKPFVPEKREVEILMFLSAIVMMKNRRSTLSFLLPPCCGGWDASSMIF

SEQ ID NO: 14601 - protein, 37 aa, Artificial Sequence
  Synthetic polypeptide
NPMLGTQTLCTRKERSGDPDVSQCHCDDEEPQIQYKV

SEQ ID NO: 14602 - protein, 36 aa, Artificial Sequence
  Synthetic polypeptide
TPCWERKPFVPEKREVEILMFLSAIVMMKNRRSSTK

SEQ ID NO: 14603 - protein, 46 aa, Artificial Sequence
  Synthetic polypeptide
NPMLGTQTLCTRKERSGDPDVSQCHCDDEEPQIHHCGATYRQHFHV

SEQ ID NO: 14604 - protein, 246 aa, Artificial Sequence
  Synthetic polypeptide
TPCWERKPFVPEKREVEILMFLSAIVMMKNRRSITVEQHIGNIFMFSKVANTILFFRLDIRMGLLYITLCIVFLMTCKPPLYMGPEYIKYFNDKTIDEELERDKRVTWIVEFFANWSNDCQSFAPIYADLSLKYNCTGLNFGKVDVGRYTDVSTRYKVSTSPLTKQLPTLILFQGGKEAMRRPQIDKKGRAVSWTFSEENVIREFNLNELYQRAKKLSKAGDNIPEEQPVASTPTTVSDGENKKDK

SEQ ID NO: 14605 - protein, 36 aa, Artificial Sequence
  Synthetic polypeptide
NPMLGTQTLCTRKERSGDPDVSQCHCDDEEPQIHAP

SEQ ID NO: 14606 - protein, 65 aa, Artificial Sequence
  Synthetic polypeptide
TPCWERKPFVPEKREVEILMFLSAIVMMKNRRSMPHEEGQRMGYRSAQPSLTCDISVFQSLWSNI

SEQ ID NO: 14607 - protein, 35 aa, Artificial Sequence
  Synthetic polypeptide
NPMLGTQTLCTRKERSGDPDVSQCHCDDEEPQIQL

SEQ ID NO: 14608 - protein, 34 aa, Artificial Sequence
  Synthetic polypeptide
TPCWERKPFVPEKREVEILMFLSAIVMMKNRRSS

SEQ ID NO: 14609 - protein, 638 aa, Artificial Sequence
  Synthetic polypeptide
SQHFGRPSWADHEVRRSRSSWLTRSYEDMIGEEVPSDQYYWAPLAQHERGSLASLDSLRKGGPPPPNWRQPELPEVIAMLGFRLDAVKSNAAAYLQHLCYRNDKVKTDVRKLKGIPVLVGLLDHPKKEVHLGACGALKNISFGRDQDNKIAIKNCDGVPALVRLLRKARDMDLTEVITGTLWNLSSHDSIKMEIVDHALHALTDEVIIPHSGWEREPNEDCKPRHIEWESVLTNTAGCLRNVSSERSEARRKLRECDGLVDALIFIVQAEIGQKDSDSKLVENCVCLLRNLSYQVHREIPQAERYQEAAPNVANNTGPHAASCFGAKKGKGKKPIEDPANDTVDFPKRTSPARGYELLFQPEVVRIYISLLKESKTPAILEASAGAIQNLCAGRWTYGRYIRSALRQEKALSAIADLLTNEHERVVKAASGALRNLAVDARNKELIGKHAIPNLVKNLPGGQQNSSWNFSEDTVISILNTINEVIAENLEAAKKLRETQGIEKLVLINKSGNRSEKEVRAAALVLQTIWGYKELRKPLEKEGWKKSDFQVNLNNASRSQSSHSYDDSTLPLIDRNQKSDKKPDREEIQMSNMGSNTKSLDNNYSTPNERGDHNRTLDRSGDLGDMEPLKGTTPLMQKI

SEQ ID NO: 14610 - protein, 6 aa, Artificial Sequence
  Synthetic polypeptide
HGAMKT

SEQ ID NO: 14611 - protein, 33 aa, Artificial Sequence
  Synthetic polypeptide
ARCLTLVIPALWEAELGGSRGQEIEIILANTEL

SEQ ID NO: 14612 - protein, 643 aa, Artificial Sequence
  Synthetic polypeptide
SQHFGRPSWADHEVRRSRSSWLTRSYEDMIGEEVPSDQYYWAPLAQHERGSLASLDSLRKGGPPPPNWRQPELPEVIAMLGFRLDAVKSNAAAYLQHLCYRNDKVKTDVRKLKGIPVLVGLLDHPKKEVHLGACGALKNISFGRDQDNKIAIKNCDGVPALVRLLRKARDMDLTEVITGTLWNLSSHDSIKMEIVDHALHALTDEVIIPHSGWEREPNEDCKPRHIEWESVLTNTAGCLRNVSSERSEARRKLRECDGLVDALIFIVQAEIGQKDSDSKLVENCVCLLRNLSYQVHREIPQAERYQEAAPNVANNTGPHAASCFGAKKGKDEWFSRGKKPIEDPANDTVDFPKRTSPARGYELLFQPEVVRIYISLLKESKTPAILEASAGAIQNLCAGRWTYGRYIRSALRQEKALSAIADLLTNEHERVVKAASGALRNLAVDARNKELIGKHAIPNLVKNLPGGQQNSSWNFSEDTVISILNTINEVIAENLEAAKKLRETQGIEKLVLINKSGNRSEKEVRAAALVLQTIWGYKELRKPLEKEGWKKSDFQVNLNNASRSQSSHSYDDSTLPLIDRNQKSDKKPDREEIQMSNMGSNTKSLDNNYSTPNERGDHNRTLDRSGDLGDMEPLKGTTPLMKI

SEQ ID NO: 14613 - protein, 652 aa, Artificial Sequence
  Synthetic polypeptide
SQHFGRPSWADHEVRRSRSSWLTRSYEDMIGEEVPSDQYYWAPLAQHERGSLASLDSLRKGGPPPPNWRQPELPEVIAMLGFRLDAVKSNAAAYLQHLCYRNDKVKTDVRKLKGIPVLVGLLDHPKKEVHLGACGALKNISFGRDQDNKIAIKNCDGVPALVRLLRKARDMDLTEVITGTLWNLSSHDSIKMEIVDHALHALTDEVIIPHSGWEREPNEDCKPRHIEWESVLTNTAGCLRNVSSERSEARRKLRECDGLVDALIFIVQAEIGQKDSDSKLVENCVCLLRNLSYQVHREIPQAERYQEAAPNVANNTGPHAASCFGAKKGKDEWFSRGKKPIEDPANDTVDFPKRTSPARGYELLFQPEVVRIYISLLKESKTPAILEASAGAIQNLCAGRWTYGRYIRSALRQEKALSAIADLLTNEHERVVKAASGALRNLAVDARNKELIGKHAIPNLVKNLPGGQQNSSWNFSEDTVISILNTINEVIAENLEAAKKLRETQGIEKLVLINKSGNRSEKEVRAAALVLQTIWGYKELRKPLEKEGWKKSDFQVNLNNASRSQSSHSYDDSTLPLIDRNQKSDNNYSTPNERGDHNRTLDRSGDLGDMEPLKGTTPLMQDEGQESLEEELDVLVLDDEGGQVSYPSMQKI

SEQ ID NO: 14614 - protein, 667 aa, Artificial Sequence
  Synthetic polypeptide
SQHFGRPSWADHEVRRSRSSWLTRSYEDMIGEEVPSDQYYWAPLAQHERGSLASLDSLRKGGPPPPNWRQPELPEVIAMLGFRLDAVKSNAAAYLQHLCYRNDKVKTDVRKLKGIPVLVGLLDHPKKEVHLGACGALKNISFGRDQDNKIAIKNCDGVPALVRLLRKARDMDLTEVITGTLWNLSSHDSIKMEIVDHALHALTDEVIIPHSGWEREPNEDCKPRHIEWESVLTNTAGCLRNVSSERSEARRKLRECDGLVDALIFIVQAEIGQKDSDSKLVENCVCLLRNLSYQVHREIPQAERYQEAAPNVANNTGPHAASCFGAKKGKGKKPIEDPANDTVDFPKRTSPARGYELLFQPEVVRIYISLLKESKTPAILEASAGAIQNLCAGRWTYGRYIRSALRQEKALSAIADLLTNEHERVVKAASGALRNLAVDARNKELIGKHAIPNLVKNLPGGQQNSSWNFSEDTVISILNTINEVIAENLEAAKKLRETQGIEKLVLINKSGNRSEKEVRAAALVLQTIWGYKELRKPLEKEGWKKSDFQVNLNNASRSQSSHSYDDSTLPLIDRNQKSDKKPDREEIQMSNMGSNTKSLDNNYSTPNERGDHNRTLDRSGDLGDMEPLKGTTPLMQDEGQESLEEELDVLVLDDEGGQVSYPSMQKI

SEQ ID NO: 14615 - protein, 646 aa, Artificial Sequence
  Synthetic polypeptide
SQHFGRPSWADHEVRRSRSSWLTRSYEDMIGEEVPSDQYYWAPLAQHERGSLASLDSLRKGGPPPPNWRQPELPEVIAMLGFRLDAVKSNAAAYLQHLCYRNDKVKTDVRKLKGIPVLVGLLDHPKKEVHLGACGALKNISFGRDQDNKIAIKNCDGVPALVRLLRKARDMDLTEVITGTLWNLSSHDSIKMEIVDHALHALTDEVIIPHSGWEREPNEDCKPRHIEWESVLTNTAGCLRNVSSERSEARRKLRECDGLVDALIFIVQAEIGQKDSDSKLVENCVCLLRNLSYQVHREIPQAERYQEAAPNVANNTGPHAASCFGAKKGKGKKPIEDPANDTVDFPKRTSPARGYELLFQPEVVRIYISLLKESKTPAILEASAGAIQNLCAGRWTYGRYIRSALRQEKALSAIADLLTNEHERVVKAASGALRNLAVDARNKELIGKHAIPNLVKNLPGGQQNSSWNFSEDTVISILNTINEVIAENLEAAKKLRETQGIEKLVLINKSGNRSEKEVRAAALVLQTIWGYKELRKPLEKEGWKKSDFQVNLNNASRSQSSHSYDDSTLPLIDRNQKSDNNYSTPNERGDHNRTLDRSGDLGDMEPLKGTTPLMQDEGQESLEEELDVLVLDDEGGQVSYPSMQKI

SEQ ID NO: 14616 - protein, 673 aa, Artificial Sequence
  Synthetic polypeptide
SQHFGRPSWADHEVRRSRSSWLTRSYEDMIGEEVPSDQYYWAPLAQHERGSLASLDSLRKGGPPPPNWRQPELPEVIAMLGFRLDAVKSNAAAYLQHLCYRNDKVKTDVRKLKGIPVLVGLLDHPKKEVHLGACGALKNISFGRDQDNKIAIKNCDGVPALVRLLRKARDMDLTEVITGTLWNLSSHDSIKMEIVDHALHALTDEVIIPHSGWEREPNEDCKPRHIEWESVLTNTAGCLRNVSSERSEARRKLRECDGLVDALIFIVQAEIGQKDSDSKLVENCVCLLRNLSYQVHREIPQAERYQEAAPNVANNTGPHAASCFGAKKGKDEWFSRGKKPIEDPANDTVDFPKRTSPARGYELLFQPEVVRIYISLLKESKTPAILEASAGAIQNLCAGRWTYGRYIRSALRQEKALSAIADLLTNEHERVVKAASGALRNLAVDARNKELIGKHAIPNLVKNLPGGQQNSSWNFSEDTVISILNTINEVIAENLEAAKKLRETQGIEKLVLINKSGNRSEKEVRAAALVLQTIWGYKELRKPLEKEGWKKSDFQVNLNNASRSQSSHSYDDSTLPLIDRNQKSDKKPDREEIQMSNMGSNTKSLDNNYSTPNERGDHNRTLDRSGDLGDMEPLKGTTPLMQDEGQESLEEELDVLVLDDEGGQVSYPSMQKI

SEQ ID NO: 14617 - protein, 644 aa, Artificial Sequence
  Synthetic polypeptide
SQHFGRPSWADHEVRRSRSSWLTRSYEDMIGEEVPSDQYYWAPLAQHERGSLASLDSLRKGGPPPPNWRQPELPEVIAMLGFRLDAVKSNAAAYLQHLCYRNDKVKTDVRKLKGIPVLVGLLDHPKKEVHLGACGALKNISFGRDQDNKIAIKNCDGVPALVRLLRKARDMDLTEVITGTLWNLSSHDSIKMEIVDHALHALTDEVIIPHSGWEREPNEDCKPRHIEWESVLTNTAGCLRNVSSERSEARRKLRECDGLVDALIFIVQAEIGQKDSDSKLVENCVCLLRNLSYQVHREIPQAERYQEAAPNVANNTGPHAASCFGAKKGKDEWFSRGKKPIEDPANDTVDFPKRTSPARGYELLFQPEVVRIYISLLKESKTPAILEASAGAIQNLCAGRWTYGRYIRSALRQEKALSAIADLLTNEHERVVKAASGALRNLAVDARNKELIGKHAIPNLVKNLPGGQQNSSWNFSEDTVISILNTINEVIAENLEAAKKLRETQGIEKLVLINKSGNRSEKEVRAAALVLQTIWGYKELRKPLEKEGWKKSDFQVNLNNASRSQSSHSYDDSTLPLIDRNQKSDKKPDREEIQMSNMGSNTKSLDNNYSTPNERGDHNRTLDRSGDLGDMEPLKGTTPLMQKI

SEQ ID NO: 14618 - protein, 623 aa, Artificial Sequence
  Synthetic polypeptide
SQHFGRPSWADHEVRRSRSSWLTRSYEDMIGEEVPSDQYYWAPLAQHERGSLASLDSLRKGGPPPPNWRQPELPEVIAMLGFRLDAVKSNAAAYLQHLCYRNDKVKTDVRKLKGIPVLVGLLDHPKKEVHLGACGALKNISFGRDQDNKIAIKNCDGVPALVRLLRKARDMDLTEVITGTLWNLSSHDSIKMEIVDHALHALTDEVIIPHSGWEREPNEDCKPRHIEWESVLTNTAGCLRNVSSERSEARRKLRECDGLVDALIFIVQAEIGQKDSDSKLVENCVCLLRNLSYQVHREIPQAERYQEAAPNVANNTGPHAASCFGAKKGKDEWFSRGKKPIEDPANDTVDFPKRTSPARGYELLFQPEVVRIYISLLKESKTPAILEASAGAIQNLCAGRWTYGRYIRSALRQEKALSAIADLLTNEHERVVKAASGALRNLAVDARNKELIGKHAIPNLVKNLPGGQQNSSWNFSEDTVISILNTINEVIAENLEAAKKLRETQGIEKLVLINKSGNRSEKEVRAAALVLQTIWGYKELRKPLEKEGWKKSDFQVNLNNASRSQSSHSYDDSTLPLIDRNQKSDNNYSTPNERGDHNRTLDRSGDLGDMEPLKGTTPLMQKI

SEQ ID NO: 14619 - protein, 44 aa, Artificial Sequence
  Synthetic polypeptide
SQHFGRPSWADHEVRRSRSSWLTRSYEDMIGEEVPSDQYYWAPL

SEQ ID NO: 14620 - protein, 76 aa, Artificial Sequence
  Synthetic polypeptide
GQVQWLRPVISALWKAEAGGSLEARSLRPAWAIWRSSCILPISRSSMSTVKPKSQRNHHHLLKRQQLLSWMSSWLT

SEQ ID NO: 14621 - protein, 22 aa, Artificial Sequence
  Synthetic polypeptide
DQPGPYGAARVYYQYPGAQCLQ

SEQ ID NO: 14622 - protein, 60 aa, Artificial Sequence
  Synthetic polypeptide
SQEFETSLGHMAQLVYTTNIQELNVYSEAQEPKESPPPSKTSAAAQLDELMAHLTEMQAK

SEQ ID NO: 14623 - protein, 340 aa, Artificial Sequence
  Synthetic polypeptide
SQEFETSLGHMAQLVYTTNIQELNVYSEAQEPKESPPPSKTSAAAQLDELMAHLTEMQAKVAVRADAGKKHLPDKQDHKASLDSMLGGLEQELQDLGIATVPKGHCASCQKPIAGKVIHALGQSWHPEHFVCTHCKEEIGSSPFFERSGLAYCPNDYHQLFSPRCAYCAAPILDKVLTAMNQTWHPEHFFCSHCGEVFGAEGFHEKDKKPYCRKDFLAMFSPKCGGCNRPVLENYLSAMDTVWHPECFVCGDCFTSFSTGSFFELDGRPFCELHYHHRRGTLCHGCGQPITGRCISAMGYKFHPEHFVCAFCLTQLSKGIFREQNDKTYCQPCFNKLFPL

SEQ ID NO: 14624 - protein, 726 aa, Artificial Sequence
  Synthetic polypeptide
GINHRIEVGLLEQLERRDGDTVMKQTHADTPVDHCLSGIRKCSSTFKLKSEVNKHETALEMQNPNLNNKECCFTFTLNGNSRKLDRSVFTAYGKPSESIYSALSANDYFSERIKNQFNKNIIVYEEKTIDGHINLGMPLKCLPSDSHFKITFGQRKSSKEDGHILRQCENPNMECILFHVVAIGRTRKKIVKINELHEKGSKLCIYALKGETIEGALCKDGRFRSDIGEFEWKLKEGHKKIYGKQSMVDEVSGKVLEMDISKKKALQQKDIHKKIKQNESATDEINHQSLIQSKKKVHKPKKDGETKDVEHSREQILPPQDLSHYIKDKTRQTIPRIRNYYFCSLPRKYRQINSQVRRRPHLGRRYAINLDVQKEAINLLKNYQTLNEAIMHQYPNFKEEAQWVRKYFREEQKRMNLSPAKQFNIYKKDFGKMTANSVSVATCEQLTYYSKSVGFMQWDNNGNTGNATCFVFNGGYIFTCRHVVHLMVGKNTHPSLWPDIISKCAKVTFTYTEFCPTPDNWFSIEPWLKVSNENLDYAILKLKENGNAFPPGLWRQISPQPSTGLIYLIGHPEGQIKKIDGCTVIPLNERLKKYPNDCQDGLVDLYDTTSNVYCMFTQRSFLSEVWNTHTLSYDTCFSDGSSGSPVFNASGKLVALHTFGLFYQRGFNVHALIEFGYSMDSILCDIKKTNESLYKSLNDEKLETYDEEKGKQESSLQDHQIEPMEC

SEQ ID NO: 14625 - protein, 28 aa, Artificial Sequence
  Synthetic polypeptide
HSNPFKESTIGLRLVSLSSWREEMGILS

SEQ ID NO: 14626 - protein, 16 aa, Artificial Sequence
  Synthetic polypeptide
AAGEKRWGYCHEADTC

SEQ ID NO: 14627 - protein, 245 aa, Artificial Sequence
  Synthetic polypeptide
PRLHPLCLNFCICKTPEEVLKKYLQKVRHPPDEDCTICMERLTAPSGYKGPQPTVKPDLVGKLSRCGHVYHIYCLVAMYNNGNKDGSLQCPTCKTIYGVKTGTQPPGKMEYHLIPHSLPGHPDCKTIRIIYSIPPGIQGPEHPNPGKSFSARGFPRHCYLPDSEKGRKVLKLLLVAWDRRLIFAIGTSSTTGESDTVIWNEVHHKTEFGSNLTGHGYPDANYLDNVLAELAAQGISEDSTAQEKD

SEQ ID NO: 14628 - protein, 39 aa, Artificial Sequence
  Synthetic polypeptide
MRVKDLAVSPESASTSKGHSHGFTLCASISASVKPQRKC

SEQ ID NO: 14629 - protein, 31 aa, Artificial Sequence
  Synthetic polypeptide
ESKTWLSALSLPQPPRVIATASPSVPQFLHL

SEQ ID NO: 14630 - protein, 120 aa, Artificial Sequence
  Synthetic polypeptide
ERSRGWKFAVSNLQDHLWGEDRHPTSREDGVPPHPPLLAWPPRLQNHPDHLQHPPRHSGTGTPESWEEFQRPRLPTTLLPSGQREREKSSEAAARGLGSPPHFCHWHLQHHRRVRHRHLE

SEQ ID NO: 14631 - protein, 165 aa, Artificial Sequence
  Synthetic polypeptide
KEVEDGSLQCPTCKTIYGVKTGTQPPGKMEYHLIPHSLPGHPDCKTIRIIYSIPPGIQGPEHPNPGKSFSARGFPRHCYLPDSEKGRKVLKLLLVAWDRRLIFAIGTSSTTGESDTVIWNEVHHKTEFGSNLTGHGYPDANYLDNVLAELAAQGISEDSTAQEKD

SEQ ID NO: 14632 - protein, 211 aa, Artificial Sequence
  Synthetic polypeptide
TQEVEAAMNQDSATALQPGPSDDHFVQIMCIRKGKRMVARILPFLSTEQAADILMTTARNLPFLIKKDAQDEVLPCLLSPFSLLLYHLPSVSITSLLRQLMNLPQSAATPALSNPHLTAVLQNKFGLSLLLILLSRGEDLQSSDPATESTQNNQWTEVMFMATRELLRIPQAALAKPISIPTNLVSLFSRYVDRQKLNLLETKLQLVQGIR

SEQ ID NO: 14633 - protein, 46 aa, Artificial Sequence
  Synthetic polypeptide
TKIAPLHSSLGLVMTTLYRSCVSEKGREWLPVFFLSSPQSKQLTFS

SEQ ID NO: 14634 - protein, 8 aa, Artificial Sequence
  Synthetic polypeptide
RHCTPAWA

SEQ ID NO: 14635 - protein, 24 aa, Artificial Sequence
  Synthetic polypeptide
AEIAPLHWILGDRIPGHSSPPVLA

SEQ ID NO: 14636 - protein, 55 aa, Artificial Sequence
  Synthetic polypeptide
SQLVRRLRQENLLNPGGGGCSEPRSRHCTGSWATEFLGTPPRQCWRKDTAPSTKF

SEQ ID NO: 14637 - protein, 254 aa, Artificial Sequence
  Synthetic polypeptide
TREAEVAVSRDRATALDPGRQNSWALLPASAGVKTLLPVPSFEDVSIPEKPKLRFIERAPLVPKVRREPKNLSDIRGPSTEATEFTEGNFAILALGGGYLHWGHFEMMRLTINRSMDPKNMFAIWRVPAPFKPITRKSVGHRMGGGKGAIDHYVTPVKAGRLVVEMGGRCEFEEVQGFLDQVAHKLPFAAKAVSRGTLEKMRKDQEERERNNQNPWTFERIATANMLGIRKVLSPYDLTHKGKYWGKFYMPKRV

SEQ ID NO: 14638 - protein, 61 aa, Artificial Sequence
  Synthetic polypeptide
ATPSNTATHLGTDQEAVQMTEENLRKAGQPVTMNNLMLFKYTAPSFGSLPGLNPRYFTICM

SEQ ID NO: 14639 - protein, 100 aa, Artificial Sequence
  Synthetic polypeptide
FNAIQVHCTQFWFFARIKPTIFYNLYVNPDEVFLGDGCHVTHVLPNVYYEFFYHPHDCGIVTQPLQEVLLLKTKIRYISRDSTVRSEMPLSCVVHKQKCQ

SEQ ID NO: 14640 - protein, 30 aa, Artificial Sequence
  Synthetic polypeptide
FTPVIPALWEAEVGGSPRSRVRDQPGQHVL

SEQ ID NO: 14641 - protein, 140 aa, Artificial Sequence
  Synthetic polypeptide
SQHFGRLRWVDHLGQEFETSLANMFCSSGTLSVVAGIKPTRTWIQNSFGMNIASATIALVGTAFLSLNIAVNIQSLRSCHSSSESPDLCNYMGSISNGMVSLLLILTLLELCVTISTIAMWCNANCCNSREEISSPPNSV

SEQ ID NO: 14642 - protein, 20 aa, Artificial Sequence
  Synthetic polypeptide
VKSSRPAWPTCSVVQEPCLL

SEQ ID NO: 14643 - protein, 34 aa, Artificial Sequence
  Synthetic polypeptide
SQHFGRLRWVDHLGQEFETSLANMFCSSGTLSVV

SEQ ID NO: 14644 - protein, 52 aa, Artificial Sequence
  Synthetic polypeptide
APWRVGDRNLSLVIDVSLASRISVDTEQFWNEHCQCYNCTSGDCFSLTKYSS

SEQ ID NO: 14645 - protein, 146 aa, Artificial Sequence
  Synthetic polypeptide
SLSKILCNLPIVCLLFSLFLLLEYKLHGGWGTEIFLWSLMLASHLGYQWIQNSFGMNIASATIALVGTAFLSLNIAVNIQSLRSCHSSSESPDLCNYMGSISNGMVSLLLILTLLELCVTISTIAMWCNANCCNSREEISSPPNSV

SEQ ID NO: 14646 - protein, 10 aa, Artificial Sequence
  Synthetic polypeptide
DISGYRTVLE

SEQ ID NO: 14647 - protein, 15 aa, Artificial Sequence
  Synthetic polypeptide
VKQILRALPAPFLLP

SEQ ID NO: 14648 - protein, 68 aa, Artificial Sequence
  Synthetic polypeptide
EHSQHLFCCHDNHARNGTGHARGWPWCAPAGKHGCHTFTSVERIAREVLEGRTQSPWGCADSDCPDEP

SEQ ID NO: 14649 - protein, 209 aa, Artificial Sequence
  Synthetic polypeptide
LMDGRDSSLGGLGLPCGAYLRGTPASLSEADPESTPSTFSAAMTTMQGMEQAMPGAGPGVPQLGNMAVIHSHLWKGLQEKFLKGEPKVLGVVQILTALMSLSMGITMMCMASNTYGSNPISVYIGYTIWGSVMFIISGSLSIAAGIRTTKGLGLDGMVLLLSVLEFCIAVSLSAFGCKVLCCTPGGVVLILPSHSHMAETASPTPLNEV

SEQ ID NO: 14650 - protein, 262 aa, Artificial Sequence
  Synthetic polypeptide
LMDGRDSSLGGLGLPCGAYLRGTPASLSEADPESTPSTFSAAMTTMQGMEQAMPGAGPGVPQLGNMAVIHSHLWKGLQEKFLKGEPKVLGVVQILTALMSLSMGITMMCMASNTYGSNPISVYIGYTIWGSVMFIISGSLSIAAGIRTTKGLVRGSLGMNITSSVLAASGILINTFSLAFYSFHHPYCNYYGNSNNCHGTMSILMGLDGMVLLLSVLEFCIAVSLSAFGCKVLCCTPGGVVLILPSHSHMAETASPTPLNEV

SEQ ID NO: 14651 - protein, 10 aa, Artificial Sequence
  Synthetic polypeptide
EHSQHLFCCH

SEQ ID NO: 14652 - protein, 43 aa, Artificial Sequence
  Synthetic polypeptide
LMDGRDSSLGGLGLPCGAYLRGTPASLSEADPESTPSTFSAAM

SEQ ID NO: 14653 - protein, 223 aa, Artificial Sequence
  Synthetic polypeptide
VKQILRALPGRQLPQWNASSEQCTAGPCGGSMQWLNTMKELALGVRTSKTCTFSAAMTTMQGMEQAMPGAGPGVPQLGNMAVIHSHLWKGLQEKFLKGEPKVLGVVQILTALMSLSMGITMMCMASNTYGSNPISVYIGYTIWGSVMFIISGSLSIAAGIRTTKGLGLDGMVLLLSVLEFCIAVSLSAFGCKVLCCTPGGVVLILPSHSHMAETASPTPLNEV

SEQ ID NO: 14654 - protein, 18 aa, Artificial Sequence
  Synthetic polypeptide
RNWHLESGHLKLAPFLLP

SEQ ID NO: 14655 - protein, 66 aa, Artificial Sequence
  Synthetic polypeptide
NLHLFCCHDNHARNGTGHARGWPWCAPAGKHGCHTFTSVERIAREVLEGRTQSPWGCADSDCPDEP

SEQ ID NO: 14656 - protein, 276 aa, Artificial Sequence
  Synthetic polypeptide
VKQILRALPGRQLPQWNASSEQCTAGPCGGSMQWLNTMKELALGVRTSKTCTFSAAMTTMQGMEQAMPGAGPGVPQLGNMAVIHSHLWKGLQEKFLKGEPKVLGVVQILTALMSLSMGITMMCMASNTYGSNPISVYIGYTIWGSVMFIISGSLSIAAGIRTTKGLVRGSLGMNITSSVLAASGILINTFSLAFYSFHHPYCNYYGNSNNCHGTMSILMGLDGMVLLLSVLEFCIAVSLSAFGCKVLCCTPGGVVLILPSHSHMAETASPTPLNEV

SEQ ID NO: 14657 - protein, 57 aa, Artificial Sequence
  Synthetic polypeptide
VKQILRALPGRQLPQWNASSEQCTAGPCGGSMQWLNTMKELALGVRTSKTCTFSAAM

SEQ ID NO: 14658 - protein, 8 aa, Artificial Sequence
  Synthetic polypeptide
NLHLFCCH

SEQ ID NO: 14659 - protein, 55 aa, Artificial Sequence
  Synthetic polypeptide
VKQILRALPGRQLPQWNASSEQCTAGPCGGSMQWLNTMKELALGVRTSKTWLCRF

SEQ ID NO: 14660 - protein, 23 aa, Artificial Sequence
  Synthetic polypeptide
RNWHLESGHLKLGCADSDCPDEP

SEQ ID NO: 14661 - protein, 121 aa, Artificial Sequence
  Synthetic polypeptide
NLVVQILTALMSLSMGITMMCMASNTYGSNPISVYIGYTIWGSVMFIISGSLSIAAGIRTTKGLGLDGMVLLLSVLEFCIAVSLSAFGCKVLCCTPGGVVLILPSHSHMAETASPTPLNEV

SEQ ID NO: 14662 - protein, 174 aa, Artificial Sequence
  Synthetic polypeptide
NLVVQILTALMSLSMGITMMCMASNTYGSNPISVYIGYTIWGSVMFIISGSLSIAAGIRTTKGLVRGSLGMNITSSVLAASGILINTFSLAFYSFHHPYCNYYGNSNNCHGTMSILMGLDGMVLLLSVLEFCIAVSLSAFGCKVLCCTPGGVVLILPSHSHMAETASPTPLNEV

SEQ ID NO: 14663 - protein, 78 aa, Artificial Sequence
  Synthetic polypeptide
VKQILRALPGRQLPQWNASSEQCTAGPCGGSMQWLNTMKELALGVRTSKTCLLFQDPCQLQQELELQKAWVWMAWCSS

SEQ ID NO: 14664 - protein, 25 aa, Artificial Sequence
  Synthetic polypeptide
RNWHLESGHLKLVYYFRILVNCSRN

SEQ ID NO: 14665 - protein, 78 aa, Artificial Sequence
  Synthetic polypeptide
NLFIISGSLSIAAGIRTTKGLGLDGMVLLLSVLEFCIAVSLSAFGCKVLCCTPGGVVLILPSHSHMAETASPTPLNEV

SEQ ID NO: 14666 - protein, 74 aa, Artificial Sequence
  Synthetic polypeptide
VKQILRALPGRQLPQWNASSEQCTAGPCGGSMQWLNTMKELALGVRTSKTCLLFQDPCQLQQELELQKAWSEVV

SEQ ID NO: 14667 - protein, 131 aa, Artificial Sequence
  Synthetic polypeptide
NLFIISGSLSIAAGIRTTKGLVRGSLGMNITSSVLAASGILINTFSLAFYSFHHPYCNYYGNSNNCHGTMSILMGLDGMVLLLSVLEFCIAVSLSAFGCKVLCCTPGGVVLILPSHSHMAETASPTPLNEV

SEQ ID NO: 14668 - protein, 11 aa, Artificial Sequence
  Synthetic polypeptide
TVLYGGWSAVA

SEQ ID NO: 14669 - protein, 107 aa, Artificial Sequence
  Synthetic polypeptide
QYCMVAGVQWRDLGSLQPPPPSRLPWPPKVPRVQPLPGRHPVWEVRSVSAWPPIVWDVRSPSAWLPSLESEERLCPAAIPSRKWGAPLPGHHPIWEVRSVSARPPIF

SEQ ID NO: 14670 - protein, 44 aa, Artificial Sequence
  Synthetic polypeptide
STVWWLECSGVISAPYNLHLPAACLGLPKCRECSLCPAATPSGK

SEQ ID NO: 14671 - protein, 192 aa, Artificial Sequence
  Synthetic polypeptide
WCFTGYKVKGKMIMNSLSLFAAISGMILSIMDILNIKISHFLKMESLNFIRAHTPYINIYNCEPANPSEKNSPSTQYCYSIQSLFLGILSVMLIFAFFQELVIAGIVENEWKRTCSRPKSNIVLLSAEEKKEQTIEIKEEVVGLTETSSQPKNEEDIEIIPIQEEEEEETETNFPEPPQDQESSPIENDSSP

SEQ ID NO: 14672 - protein, 23 aa, Artificial Sequence
  Synthetic polypeptide
RPMEMKGSRVCDGASQAIKSKEK

SEQ ID NO: 14673 - protein, 179 aa, Artificial Sequence
  Synthetic polypeptide
WCFTGYKVKGKMIMNSLSLFAAISGMILSIMDILNIKISHFLKMESLNFIRAHTPYINIYNCEPANPSEKNSPSTQYCYSIQSLFLELVIAGIVENEWKRTCSRPKSNIVLLSAEEKKEQTIEIKEEVVGLTETSSQPKNEEDIEIIPIQEEEEEETETNFPEPPQDQESSPIENDSSP

SEQ ID NO: 14674 - protein, 15 aa, Artificial Sequence
  Synthetic polypeptide
WCFTGYKVKGKMIMN

SEQ ID NO: 14675 - protein, 547 aa, Artificial Sequence
  Synthetic polypeptide
ISLMRSDGFEKQEFPCTSSLFLPAAIHVRCDLLLLAFCHDCEVSPATWNFSNEVPEHPCVSPVSNHVYERRLIEKYIAENGTDPINNQPLSEEQLIDIKVAHPIRPKPPSATSIPAILKALQDEWDAVMLHSFTLRQQLQTTRQELSHALYQHDAACRVIARLTKEVTAAREALATLKPQAGLIVPQAVPSSQPSVVGAGEPMDLGELVGMTPEIIQKLQDKATVLTTERKKRGKTVPEELVKPEELSKYRQVASHVGLHSASIPGILALDLCPSDTNKILTGGADKNVVVFDKSSEQILATLKGHTKKVTSVVFHPSQDLVFSASPDATIRIWSVPNASCVQVVRAHESAVTGLSLHATGDYLLSSSDDQYWAFSDIQTGRVLTKVTDETSGCSLTCAQFHPDGLIFGTGTMDSQIKIWDLKERTNVANFPGHSGPITSIAFSENGYYLATAADDSSVKLWDLRKLKNFKTLQLDNNFEVKSLIFDQSGTYLALGGTDVQIYICKQWTEILHFTEHSGLTTGVAFGHHAKFIASTGMDRSLKFYSL

SEQ ID NO: 14676 - protein, 89 aa, Artificial Sequence
  Synthetic polypeptide
DVTCSSLPSAMIVRFPQPRGTSLTKCRSTHVYPLSLIMFMSGGSSRSTLRRMVPTPSTTSLSPRSSSSTSKLLTQSGPSLPQPPASRPF

SEQ ID NO: 14677 - protein, 9 aa, Artificial Sequence
  Synthetic polypeptide
GFPSHVELL

SEQ ID NO: 14678 - protein, 295 aa, Artificial Sequence
  Synthetic polypeptide
ISLMRSDGFEKQEFPCTSSLFLPAAIHVRCDLLLLAFCHDCEVSPATWNFSNEVPEHPCVSPVSNHVYERRLIEKYIAENGTDPINNQPLSEEQLIDIKVAHPIRPKPPSATSIPAILKALQDEWDAVMLHSFTLRQQLQTTRQELSHALYQHDAACRVIARLTKEVTAAREALATLKPQAGLIVPQAVPSSQPSVVGAGEPMDLGELVGMTPEIIQKLQDKATVLTTERKKRGKTVPEELVKPEELSKYRQVASHVGLHSASIPGILALDLCPSDTNKILTGTMDSQIKIWDLK

SEQ ID NO: 14679 - protein, 62 aa, Artificial Sequence
  Synthetic polypeptide
HPPLPNLRLRNPLQRRRMRPSGAPVAATCSTSGPVCASSPPSRPTRWTAAAASRTCLAPTGC

SEQ ID NO: 14680 - protein, 32 aa, Artificial Sequence
  Synthetic polypeptide
LPHPSPPSLPHFSRSTLHFLIYACGTRCRGVG

SEQ ID NO: 14681 - protein, 505 aa, Artificial Sequence
  Synthetic polypeptide
STPAEPAAEASDEAERRARGCHLQYQRAGVRFLAPFAAHPLDGGRRLTHLLGPDWLLDVSHLVAPHARVLDSRVASLEGGRVVVGREPGVTSIEVRSPLSDSILGEQALAVTDDKVSVLELRVQPVMGISLTLSRGTAHPGEVTATCWAQSALPAPKQEVALSLWLSFSDHTVAPAELYDRRDLGLSVSAEEPGAILPAEEQGAQLGVVVSGAGAEGLPLHVALHPPEPCRRGRHRVPLASGTAWLGLPPASTPAPALPSSPAWSPPATEATMGGKRQVAGSVGGNTGVRGKFERAEEEARKEETEAREEEEEEEEEMVPAPQHVTELELGMYALLGVFCVAIFIFLVNGVVFVLRYQRKEPPDSATDPTSPQPHNWVWLGTDQEELSRQLDRQSPGPPKGEGSCPCESGGGGEAPTLAPGPPGGTTSSSSTLARKEAGGRRKRVEFVTFAPAPPAQSPEEPVGAPAVQSILVAGEEDIRWVCEDMGLKDPEELRNYMERIRGSS

SEQ ID NO: 14682 - protein, 47 aa, Artificial Sequence
  Synthetic polypeptide
HPPLPNLRLRNPLQRRRMRPSGAPVAATCSTSGPVCASSPPSRPTRW

SEQ ID NO: 14683 - protein, 42 aa, Artificial Sequence
  Synthetic polypeptide
STPAEPAAEASDEAERRARGCHLQYQRAGVRFLAPFAAHPLD

SEQ ID NO: 14684 - protein, 96 aa, Artificial Sequence
  Synthetic polypeptide
DVGSASAPPPRLGCEDRLCPAATPSGRSRTYSWNGRWHWPPTGAWQSGTWSSRVPWRSAAQTSRIDTRSSGSSWSGARSRRQSWRNFLQHCSQGPC

SEQ ID NO: 14685 - protein, 75 aa, Artificial Sequence
  Synthetic polypeptide
GASLPGHPSSEMWGAPLLHRPVWDVRTASARPRPRLGGPGPTAGTGDGTGHQPEPGRAELGVPGSPGDQPLKPLG

SEQ ID NO: 14686 - protein, 336 aa, Artificial Sequence
  Synthetic polypeptide
GPPLPGRDPVWEVQDLQLEREMALATNRSLAERNLEFQGPLEISRSNLSDRYQELRKLVERCQEQKAKLEKFSSALQPGTLLDLLQVEGMKIEEESEAMAEKFLEGEVPLETFLENFSSMRMLSHLRRVRVEKLQEVVRKPRASQELAGDAPPPRPPPPVRPVPQGTPPVVEEQPQPPLAMPPYPLPYSPSPSLPVGPTAHGALPPAPFPVVSQPSFYSGPLGPTYPAAQLGPRGAAGYSWSPQRSMPPRPGYPGTPMGASGPGYPLRGGRAPSPGYPQQSPYPATGGKPPYPIQPQLPSFPGQPQPSVPLQPPYPPGPAPPYGFPPPPGPAWPGY

SEQ ID NO: 14687 - protein, 129 aa, Artificial Sequence
  Synthetic polypeptide
GPPLPGRDPVWEVQDLQLEREMALATNRSLAERNLEFQGPLEISRSNLSDRYQELRKLVERCQEQKAKLEKFSSALQPGTLLDLLQVEGMKIEEESEAMAEKFLEGEVPLETFLENFSSMRMLSHLRRV

SEQ ID NO: 14688 - protein, 43 aa, Artificial Sequence
  Synthetic polypeptide
SQHFGRLSQADCVSPRSSRLAWAIWQNPISTKSTKIRPLLLSA

SEQ ID NO: 14689 - protein, 20 aa, Artificial Sequence
  Synthetic polypeptide
PGQYGKTPSLQKVQKLDLYC

SEQ ID NO: 14690 - protein, 48 aa, Artificial Sequence
  Synthetic polypeptide
TVVRVVPGLCCLPPALGVHVAAQPPKTYPRLFWSRHPLSVHRIRHFGH

SEQ ID NO: 14691 - protein, 115 aa, Artificial Sequence
  Synthetic polypeptide
MWLGWFLGFAVFLLPWASMWLRSLLKPIHVFFGAAILSLSIASVISGINEKLFFSLKNTTRPYHSLPSEAVFANSTGMLVVAFGLLVLYILLASSWKRPEPGILTDRQPLLHDGE

SEQ ID NO: 14692 - protein, 136 aa, Artificial Sequence
  Synthetic polypeptide
MWLGWFLGFAVFLLPWASMWLRSLLKPIHVFFGAAILSLSIASVISGINEKLFFSLKNTTRPYHSLPSEAVFANSTGMLVVAFGLLVLYILLASSWKRPEPGILTDRQLLLQLRPGSRPFPVTYVSVTGRQPYKSW

SEQ ID NO: 14693 - protein, 25 aa, Artificial Sequence
  Synthetic polypeptide
TVVRVVPGLCCLPPALGVHVAAQPP

SEQ ID NO: 14694 - protein, 25 aa, Artificial Sequence
  Synthetic polypeptide
MWLGWFLGFAVFLLPWASMWLRSLL

SEQ ID NO: 14695 - protein, 48 aa, Artificial Sequence
  Synthetic polypeptide
MWLGWFLGFAVFLLPWASMWLRSLLKPIHVFFGAAILSLSIASVISGI

SEQ ID NO: 14696 - protein, 85 aa, Artificial Sequence
  Synthetic polypeptide
MWLGWFLGFAVFLLPWASMWLRSLLKPIHVFFGAAILSLSIASVISGINEKLFFSLKNTTRPYHSLPSEAVFANSTGMLVVAFGL

SEQ ID NO: 14697 - protein, 72 aa, Artificial Sequence
  Synthetic polypeptide
MWLGWFLGFAVFLLPWASMWLRSLLKPIHVFFGAAILSLSIASVISGINEKLFFSLKNTTRPYHSLPSEAVF

SEQ ID NO: 14698 - protein, 55 aa, Artificial Sequence
  Synthetic polypeptide
MWLGWFLGFAVFLLPWASMWLRSLLKPIHVFFGAAILSLSIASVISGINEKLFFS

SEQ ID NO: 14699 - protein, 183 aa, Artificial Sequence
  Synthetic polypeptide
HCASLVYRLPQSWVGPKLPWKLLHAALHLMAFVLTVVGLVAVFTFHNHGRTANLYSLHSWLGITTVFLFACQWFLGFAVFLLPWASMWLRSLLKPIHVFFGAAILSLSIASVISGINEKLFFSLKNTTRPYHSLPSEAVFANSTGMLVVAFGLLVLYILLASSWKRPEPGILTDRQPLLHDGE

SEQ ID NO: 14700 - protein, 28 aa, Artificial Sequence
  Synthetic polypeptide
TVRHWCTACPSRGWGPNCPGNSSMQRCT

SEQ ID NO: 14701 - protein, 115 aa, Artificial Sequence
  Synthetic polypeptide
MCVTGVPPAPVVGGAQTALETPPCSAAPDGLRPHCCGAGCCLYVSQPWKDCQPLLPSQLAGHHHCLPLRLPVVPGLCCLPPALGVHVAAQPPKTYPRLFWSRHPLSVHRIRHFGH

SEQ ID NO: 14702 - protein, 204 aa, Artificial Sequence
  Synthetic polypeptide
HCASLVYRLPQSWVGPKLPWKLLHAALHLMAFVLTVVGLVAVFTFHNHGRTANLYSLHSWLGITTVFLFACQWFLGFAVFLLPWASMWLRSLLKPIHVFFGAAILSLSIASVISGINEKLFFSLKNTTRPYHSLPSEAVFANSTGMLVVAFGLLVLYILLASSWKRPEPGILTDRQLLLQLRPGSRPFPVTYVSVTGRQPYKSW

SEQ ID NO: 14703 - protein, 140 aa, Artificial Sequence
  Synthetic polypeptide
HCASLVYRLPQSWVGPKLPWKLLHAALHLMAFVLTVVGLVAVFTFHNHGRTANLYSLHSWLGITTVFLFACQWFLGFAVFLLPWASMWLRSLLKPIHVFFGAAILSLSIASVISGINEKLFFSLKNTTRPYHSLPSEAVF

SEQ ID NO: 14704 - protein, 123 aa, Artificial Sequence
  Synthetic polypeptide
HCASLVYRLPQSWVGPKLPWKLLHAALHLMAFVLTVVGLVAVFTFHNHGRTANLYSLHSWLGITTVFLFACQWFLGFAVFLLPWASMWLRSLLKPIHVFFGAAILSLSIASVISGINEKLFFS

SEQ ID NO: 14705 - protein, 56 aa, Artificial Sequence
  Synthetic polypeptide
HCASLVYRLPQSWVGPKLPWKLLHAALHLMAFVLTVVGLVAVFTFHNHGRTANLYS

SEQ ID NO: 14706 - protein, 55 aa, Artificial Sequence
  Synthetic polypeptide
MCVTGVPPAPVVGGAQTALETPPCSAAPDGLRPHCCGAGCCLYVSQPWKDCQPLL

SEQ ID NO: 14707 - protein, 43 aa, Artificial Sequence
  Synthetic polypeptide
AMIMPLHSNQHPGYCSPLQHHHHFPHVLQHLRLPGWPGQPPIP

SEQ ID NO: 14708 - protein, 127 aa, Artificial Sequence
  Synthetic polypeptide
SCHCTPTSIQDIAVLFNIIIIFLMFFNTFVFQAGLVNLLFHKFKGTIILTAVYFALSISLHVWVMNLRWKNSNSFIWTDGLQMLFVFQRLAAVLYCYFYKRTAVRLGDPHFYQDSLWLRKEFMQVRR

SEQ ID NO: 14709 - protein, 59 aa, Artificial Sequence
  Synthetic polypeptide
AQEFKATVSHDHATALQPASRILQSSSTSSSFSSCSSTPSSSRLAWSTSYSISSKGPSS

SEQ ID NO: 14710 - protein, 70 aa, Artificial Sequence
  Synthetic polypeptide
SCHCTPTSIQDIAVLFNIIIIFLMFFNTFVFQAGLVNLLFHKFKGTIILTAVYFALSISLHVWVMVRVAV

SEQ ID NO: 14711 - protein, 105 aa, Artificial Sequence
  Synthetic polypeptide
AMIMPLHSNQAGLVNLLFHKFKGTIILTAVYFALSISLHVWVMNLRWKNSNSFIWTDGLQMLFVFQRLAAVLYCYFYKRTAVRLGDPHFYQDSLWLRKEFMQVRR

SEQ ID NO: 14712 - protein, 24 aa, Artificial Sequence
  Synthetic polypeptide
SCHCTPTRLAWSTSYSISSKGPSS

SEQ ID NO: 14713 - protein, 27 aa, Artificial Sequence
  Synthetic polypeptide
AQEFKATVSHDHATALQPGWPGQPPIP

SEQ ID NO: 14714 - protein, 48 aa, Artificial Sequence
  Synthetic polypeptide
AMIMPLHSNQAGLVNLLFHKFKGTIILTAVYFALSISLHVWVMVRVAV

SEQ ID NO: 14715 - protein, 49 aa, Artificial Sequence
  Synthetic polypeptide
WVAGLVTSFSGLIPLPGPRHQRCPGALQHRHQHPGGVHQQGGCLRPLLP

SEQ ID NO: 14716 - protein, 1146 aa, Artificial Sequence
  Synthetic polypeptide
LPSLASFPSQGHDINGALEPSNIDTSILEEYISKEDASDLCFPDISAPASSASYSHGQPAMPGSSGVHHLSPPGGGPSPGRHGPLPPPGYGTPLNCNNNNGMGAAPKPFPGGTGPPIKAEPKAPYAPGTLPDSPPDSGSEAYSPQQVNEPHLLRTITPETLCHVGVPSRLEHPPPPPAHLPGPPPPPPPPPHYPVLQRDLYMKAEPPIPHYAAMGQGLVPTDLHHTQQSQMLHQLLQQHGAELPTHPSKKRKHSESPPSTLNAQMLNGMIKQEPGTVTALPLHPTRAPSPPWPPQGPLSPGPGSLPLSIARVQTPPWHPPGAPSPGLLQDSDSLSGSYLDPNYQSIKWQPHQQNKWATLYDANYKELPMLTYRVDADKGFNFSVGDDAFVCQKKNHFQVTVYIGMLGEPKYVKTPEGLKPLDCFYLKLHGVKLEALNQSINIEQSQSDRSKRPFNPVTVNLPPEQVTKVTVGRLHFSETTANNMRKKGKPNPDQRYFMLVVALQAHAQNQNYTLAAQISERIIVRASNPGQFESDSDVLWQRAQVPDTVFHHGRVGINTDRPDEALVVHGNVKVMGSLMHPSDLRAKEHVQEVDTTEQLKRISRMRLVHYRYKPEFAASAGIEATAPETGVIAQEVKEILPEAVKDTGDMVFANGKTIENFLVVNKERIFMENVGAVKELCKLTDNLETRIDELERWSHKLAKLRRLDSLKSTGSSGAFSHAGSQFSRAGSVPHKKRPPKVASKSSSVVPDQACISQRFLQGTIIALVVVMAFSVVSMSTLYVLSLRTEEDLVDTDGSFAVSTSCLLALLRPQPPGGSEALCPWSSQSFGTTQLRQSPLTTGLPGIQPSLLLVTTSLTSSAPGSAVRTLDMCSSHPCPVICCSSPTTNPTTGPSLGPSFNPGHVLSPSPSPSTNRSGPSQMALLPVTNIRAKSWGLSVNGIGHSKHHKSLEPLASPAVPFPGGQGKAKNSPSLGFHGRARRGALQSSVGPAEPTWAQGQSASLLAEPVPSLTSIQVLENSMSITSQYCAPGDACRPGNFTYHIPVSSGTPLHLSLTLQMNSSSPVSVVLCSLRSKEEPCEEGSLPQSLHTHQDTQGTSHRWPITILSFREFTYHFRVALLGQANCSSEALAQPATDYHFHFYRLCD

SEQ ID NO: 14717 - protein, 43 aa, Artificial Sequence
  Synthetic polypeptide
AGGGRPGISPLLKLMGGWTGDFLLWPHSPPRATTSTVPWSPPT

SEQ ID NO: 14718 - protein, 1115 aa, Artificial Sequence
  Synthetic polypeptide
LPSLASFPSQGHDINGALEPSNIDTSILEEYISKEDASDLCFPDISAPASSASYSHGQPAMPGSSGVHHLSPPGGGPSPGRHGPLPPPGYGTPLNCNNNNGMGAAPKPFPGGTGPPIKAEPKAPYAPGTLPDSPPDSGSEAYSPQQVNEPHLLRTITPETLCHVGVPSRLEHPPPPPAHLPGPPPPPPPPPHYPVLQRDLYMKAEPPIPHYAAMGQGLVPTDLHHTQQSQMLHQLLQQHGAELPTHPSKKRKHSESPPSTLNAQMLNGMIKQEPGTVTALPLHPTRAPSPPWPPQGPLSPGPGSLPLSIARVQTPPWHPPGAPSPGLLQDSDSLSGSYLDPNYQSIKWQPHQQNKWATLYDANYKELPMLTYRVDADKGFNFSVGDDAFVCQKKNHFQVTVYIGMLGEPKYVKTPEGLKPLDCFYLKLHGVKLEALNQSINIEQSQSDRSKRPFNPVTVNLPPEQVTKVTVGRLHFSETTANNMRKKGKPNPDQRYFMLVVALQAHAQNQNYTLAAQISERIIVRASNPGQFESDSDVLWQRAQVPDTVFHHGRVGINTDRPDEALVVHGNVKVMGSLMHPSDLRAKEHVQEVDTTEQLKRISRMRLVHYRYKPEFAASAGIEATAPETGVIAQEVKEILPEAVKDTGDMVFANGKTIENFLVVNKERIFMENVGAVKELCKLTDNLETRIDELERWSHKLAKLRRLDSLKSTGSSGAFSHAGSQFSRAGSVPHKKRPPKVASKSSSVVPDQACISQRFLQGTIIALVVVMAFSVVSMSTLYVLSLRTEEDLVDTDGRSSQSFGTTQLRQSPLTTGLPGIQPSLLLVTTSLTSSAPGSAVRTLDMCSSHPCPVICCSSPTTNPTTGPSLGPSFNPGHVLSPSPSPSTNRSGPSQMALLPVTNIRAKSWGLSVNGIGHSKHHKSLEPLASPAVPFPGGQGKAKNSPSLGFHGRARRGALQSSVGPAEPTWAQGQSEPVPSLTSIQVLENSMSITSQYCAPGDACRPGNFTYHIPVSSGTPLHLSLTLQMNSSSPVSVVLCSLRSKEEPCEEGSLPQSLHTHQDTQGTSHRWPITILSFREFTYHFRVALLGQANCSSEALAQPATDYHFHFYRLCD

SEQ ID NO: 14719 - protein, 39 aa, Artificial Sequence
  Synthetic polypeptide
GQLWWLTPVIPALWEAEVGEVLEPRSSRPAWATYTARRS

SEQ ID NO: 14720 - protein, 66 aa, Artificial Sequence
  Synthetic polypeptide
SQRFGRLKWEKCLSPGVQDQPGLHIRQEEAEIPALQSPARILLPDWAAAAHPHVFPVPDHHDHDRP

SEQ ID NO: 14721 - protein, 207 aa, Artificial Sequence
  Synthetic polypeptide
AQEFKTSLGYIYGKKKLKYLPYNHQHEYFFLIGPPLLIPMYFQYQIIMTMIVHKNWVDLAWAVSYYIRFFITYIPFYGILGALLFLNFIRFLESHWFVWVTQMNHIVMEIDQEAYRDWFSSQLTATCNVEQSFFNDWFSGHLNFQIEHHLFPTMPRHNLHKIAPLVKSLCAKHGIEYQEKPLLRALLDIIRSLKKSGKLWLDAYLHK

SEQ ID NO: 14722 - protein, 149 aa, Artificial Sequence
  Synthetic polypeptide
AQEFKTSLGYIYGKKKLKYLPYNHQHEYFFLIGPPLLIPMYFQYQIIMTMIVHKNWVDLAWAVSYYIRFFITYIPFYGILGALLFLNFIRFLESHWFVWVTQMNHIVMEIDQEAYRDWFSSQLTATCNVEQSFFNDWFSGHLNFQIEHQ

SEQ ID NO: 14723 - protein, 92 aa, Artificial Sequence
  Synthetic polypeptide
AQEFKTSLGYIYGKKKLKYLPYNHQHEYFFLIGPPLLIPMYFQYQIIMTMIVHKNWVDLAWAVSYYIRFFITYIPFYGILGALLFLNFIRCL

SEQ ID NO: 14724 - protein, 148 aa, Artificial Sequence
  Synthetic polypeptide
AQEFKTSLGYIYGKKKLKYLPYNHQHEYFFLIGPPLLIPMYFQYQIIMTMIVHKNWVDLAWAVSYYIRFFITYIPFYGILGALLFLNFIRFLESHWFVWVTQMNHIVMEIDQEAYRDWFSSQLTATCNVEQSFFNDWFSGHLNFQIEH

SEQ ID NO: 14725 - protein, 157 aa, Artificial Sequence
  Synthetic polypeptide
TREAELADLAWAVSYYIRFFITYIPFYGILGALLFLNFIRFLESHWFVWVTQMNHIVMEIDQEAYRDWFSSQLTATCNVEQSFFNDWFSGHLNFQIEHHLFPTMPRHNLHKIAPLVKSLCAKHGIEYQEKPLLRALLDIIRSLKKSGKLWLDAYLHK

SEQ ID NO: 14726 - protein, 119 aa, Artificial Sequence
  Synthetic polypeptide
PGAVTHACYPSTLRGRGGQIMRSGVRDQPGQHGETPSLLKIQKISLAWWCAPVVPATQEAEAGELLEPGRRSLQTWPGPSATTSGSSSPTSLSTASWEPSFSSTSSGSWRATGLCGSHR

SEQ ID NO: 14727 - protein, 73 aa, Artificial Sequence
  Synthetic polypeptide
SQLLRRLRQENCLNPGGGACRPGLGRQLLHPVLHHLHPFLRHPGSPPFPQLHQVPGEPLVCVGHTDESHRHGD

SEQ ID NO: 14728 - protein, 99 aa, Artificial Sequence
  Synthetic polypeptide
TREAELADLAWAVSYYIRFFITYIPFYGILGALLFLNFIRFLESHWFVWVTQMNHIVMEIDQEAYRDWFSSQLTATCNVEQSFFNDWFSGHLNFQIEHQ

SEQ ID NO: 14729 - protein, 42 aa, Artificial Sequence
  Synthetic polypeptide
TREAELADLAWAVSYYIRFFITYIPFYGILGALLFLNFIRCL

SEQ ID NO: 14730 - protein, 109 aa, Artificial Sequence
  Synthetic polypeptide
PGAVTHACYPSTLRGRGGQIMRSGVRDQPGQHGETPSLLKIQKISLAWWCAPVVPATQEAEAGELLEPGRRSLQTWPGPSATTSGSSSPTSLSTASWEPSFSSTSSGAW

SEQ ID NO: 14731 - protein, 55 aa, Artificial Sequence
  Synthetic polypeptide
SQLLRRLRQENCLNPGGGACRPGLGRQLLHPVLHHLHPFLRHPGSPPFPQLHQVP

SEQ ID NO: 14732 - protein, 98 aa, Artificial Sequence
  Synthetic polypeptide
TREAELADLAWAVSYYIRFFITYIPFYGILGALLFLNFIRFLESHWFVWVTQMNHIVMEIDQEAYRDWFSSQLTATCNVEQSFFNDWFSGHLNFQIEH

SEQ ID NO: 14733 - protein, 17 aa, Artificial Sequence
  Synthetic polypeptide
AVQRAFCSEVTVTWRGS

SEQ ID NO: 14734 - protein, 19 aa, Artificial Sequence
  Synthetic polypeptide
MSRELSAVRSQLPGEAPEC

SEQ ID NO: 14735 - protein, 74 aa, Artificial Sequence
  Synthetic polypeptide
LGVVARACNPTTWEAEAGESLEPVPLCWMNLSASTPMRTHSLWHCHISGSTLIRTAGPCGTQSIASLKNSLRPS

SEQ ID NO: 14736 - protein, 25 aa, Artificial Sequence
  Synthetic polypeptide
WHVPVIPLLGRLRQENRLNPYLCVG

SEQ ID NO: 14737 - protein, 153 aa, Artificial Sequence
  Synthetic polypeptide
TRTFVLDEFKRKYSNEDTLSVALPYFWEHFDKDGWSLWYSEYRFPEELTQTFMSCNLITGMFQRLDKLRKNAFASVILFGTNNSSSISGVWVFRGQELAFPLSPDWQVDYESYTWRKLDPGSEETQTLVREYFSWEGAFQHVGKAFNQGKIFK

SEQ ID NO: 14738 - protein, 253 aa, Artificial Sequence
  Synthetic polypeptide
AQDVEAANGIQTNKPALRAVRQRSEFTLMAKRIGKDLSNTFAKLEKLTILAKRKSLFDDKAVEIEELTYIIKQDINSLNKQIAQLQDFVRAKGSQSGRHLQTHSNTIVVSLQSKLASMSNDFKSVLEVRTENLKQQRSRREQFSRAPVSALPLAPNHLGGGAVVLGAESHASKDVAIDMMDSRTSQQLQLIDEQDSYIQSRADTMQNIESTIVELGSIFQQLAHMVKEQEETIQSVLLFPLLPALSPGSTRTC

SEQ ID NO: 14739 - protein, 68 aa, Artificial Sequence
  Synthetic polypeptide
LGVVVCPVVPATWEAEVGGSLEPRMSRPQMESRQISQLCVLSDNAVNSPSWPSALGKTLATHLPSWRS

SEQ ID NO: 14740 - protein, 26 aa, Artificial Sequence
  Synthetic polypeptide
SQLLGRLKLEDHLSPGCRGRKWNPDK

SEQ ID NO: 14741 - protein, 287 aa, Artificial Sequence
  Synthetic polypeptide
AQDVEAANGIQTNKPALRAVRQRSEFTLMAKRIGKDLSNTFAKLEKLTILAKRKSLFDDKAVEIEELTYIIKQDINSLNKQIAQLQDFVRAKGSQSGRHLQTHSNTIVVSLQSKLASMSNDFKSVLEVRTENLKQQRSRREQFSRAPVSALPLAPNHLGGGAVVLGAESHASKDVAIDMMDSRTSQQLQLIDEQDSYIQSRADTMQNIESTIVELGSIFQQLAHMVKEQEETIQRIDENVLGAQLDVEAAHSEILKYFQSVTSNRWLMVKIFLILIVFFIIFVVFLA

SEQ ID NO: 14742 - protein, 182 aa, Artificial Sequence
  Synthetic polypeptide
AQDVEAANGIQTNKPALRAVRQRSEFTLMAKRIGKDLSNTFAKLEKLTILAKRKSLFDDKAVEIEELTYIIKQDINSLNKQIAQLQDFVRAKGSQSGRHLQTHSNTIVVSLQSKLASMSNDFKSVLEVRTENLKQQRSRREQFSRAPVSALPLAPNHLGKSQAVVLWFWGQSPMPPRMSPST

SEQ ID NO: 14743 - protein, 31 aa, Artificial Sequence
  Synthetic polypeptide
PGQHSEIPSLQKILKLAKDNGQTKTETWRPD

SEQ ID NO: 14744 - protein, 163 aa, Artificial Sequence
  Synthetic polypeptide
PRIMARPRPRLGDLIEISRFGYAHWAIYVGDGYVVHLAPASEIAGAGAASVLSALTNKAIVKKELLSVVAGGDNYRVNNKHDDRYTPLPSNKIVKRAEELVGQELPYSLTSDNCEHFVNHLRYGVSRSDQVTGAVTTVGVAAGLLAAASLVGILLARSKRERQ

SEQ ID NO: 14745 - protein, 40 aa, Artificial Sequence
  Synthetic polypeptide
ESGISPACTHSILLPCEEGACFSFAFCHDCQTKTETWRPD

SEQ ID NO: 14746 - protein, 194 aa, Artificial Sequence
  Synthetic polypeptide
IWWFYKNLAFPLLALTPSCCPVKKVPASPLPSVMTARPRPRLGDLIEISRFGYAHWAIYVGDGYVVHLAPASEIAGAGAASVLSALTNKAIVKKELLSVVAGGDNYRVNNKHDDRYTPLPSNKIVKRAEELVGQELPYSLTSDNCEHFVNHLRYGVSRSDQVTGAVTTVGVAAGLLAAASLVGILLARSKRERQ

SEQ ID NO: 14747 - protein, 43 aa, Artificial Sequence
  Synthetic polypeptide
HTVEANKYSLNKELAVGLTSCFVTFLLPAGWILSHLETYRRPE

SEQ ID NO: 14748 - protein, 12 aa, Artificial Sequence
  Synthetic polypeptide
IKNWPLGLPPAS

SEQ ID NO: 14749 - protein, 22 aa, Artificial Sequence
  Synthetic polypeptide
TREADLEVSRDCATALQTGSMS

SEQ ID NO: 14750 - protein, 12 aa, Artificial Sequence
  Synthetic polypeptide
AEIAPLHSRLGQ

SEQ ID NO: 14751 - protein, 552 aa, Artificial Sequence
  Synthetic polypeptide
SEPRLRHCTPDWVNELKEKGNKALSVGNIDDALQCYSEAIKLDPHNHVLYSNRSAAYAKKGDYQKAYEDGCKTVDLKPDWGKGYSRKAAALEFLNRFEEAKRTYEEGLKHEANNPQLKEGLQNMEARLAERKFMNPFNMPNLYQKLESDPRTRTLLSDPTYRELIEQLRNKPSDLGTKLQDPRIMTTLSVLLGVDLGSMDEEEEIATPPPPPPPKKETKPEPMEEDLPENKKQALKEKELGNDAYKKKDFDTALKHYDKAKELDPTNMTYITNQAAVYFEKGDYNKCRELCEKAIEVGRENREDYRQIAKAYARIGNSYFKEEKYKDAIHFYNKSLAEHRTPDVLKKCQQAEKILKEQERLAYINPDLALEEKNKGNECFQKGDYPQAMKHYTEAIKRNPKDAKLYSNRAACYTKLLEFQLALKDCEECIQLEPTFIKGYTRKAAALEAMKDYTKAMDVYQKALDLDSSCKEAADGYQRCMMAQYNRHDSPEDVKRRAMADPEVQQIMSDPAMRLILEQMQKDPQALSEHLKNPVIAQKIQKLMDVGLIAIR

SEQ ID NO: 14752 - protein, 147 aa, Artificial Sequence
  Synthetic polypeptide
SEPRLRHCTPDWVNELKEKGNKALSVGNIDDALQCYSEAIKLDPHNHVLYSNRSAAYAKKGDYQKAYEDGCKTVDLKPDWGKGYSRKAAALEFLNRFEEAKRTYEEGLKHEANNPQLKEGLQNMEARLAVQPARQPRRCEATSHGRP

SEQ ID NO: 14753 - protein, 528 aa, Artificial Sequence
  Synthetic polypeptide
SEPRLRHCTPDWVNELKEKGNKALSVGNIDDALQCYSEAIKLDPHNHVLYSNRSAAYAKKGDYQKAYEDGCKTVDLKPDWGKGLKHEANNPQLKEGLQNMEARLAERKFMNPFNMPNLYQKLESDPRTRTLLSDPTYRELIEQLRNKPSDLGTKLQDPRIMTTLSVLLGVDLGSMDEEEEIATPPPPPPPKKETKPEPMEEDLPENKKQALKEKELGNDAYKKKDFDTALKHYDKAKELDPTNMTYITNQAAVYFEKGDYNKCRELCEKAIEVGRENREDYRQIAKAYARIGNSYFKEEKYKDAIHFYNKSLAEHRTPDVLKKCQQAEKILKEQERLAYINPDLALEEKNKGNECFQKGDYPQAMKHYTEAIKRNPKDAKLYSNRAACYTKLLEFQLALKDCEECIQLEPTFIKGYTRKAAALEAMKDYTKAMDVYQKALDLDSSCKEAADGYQRCMMAQYNRHDSPEDVKRRAMADPEVQQIMSDPAMRLILEQMQKDPQALSEHLKNPVIAQKIQKLMDVGLIAIR

SEQ ID NO: 14754 - protein, 245 aa, Artificial Sequence
  Synthetic polypeptide
SEPRLRHCTPDWVNELKEKGNKALSVGNIDDALQCYSEAIKLDPHNHVLYSNRSAAYAKKGDYQKAYEDGCKTVDLKPDWGKGYSRKAAALEFLNRFEEAKRTYEEGLKHEANNPQLKEGLQNMEARLAERKFMNPFNMPNLYQKLESDPRTRTLLSDPTYRELIEQLRNKPSDLGTKLQDPRIMTTLSVLLGVDLGSMDEEEEIATPPPPPPPKKETKPEPMEEDLPENKKQVLFFSLLTVTYL

SEQ ID NO: 14755 - protein, 44 aa, Artificial Sequence
  Synthetic polypeptide
APAIWGAGLGLPALLADRPRRAAVQGSVLCPAPWGLEAGASHGS

SEQ ID NO: 14756 - protein, 247 aa, Artificial Sequence
  Synthetic polypeptide
HQRSGVRGSASLRSWLTDRDVQLSKALSYALRHGALKLGLPMGADGFVPLGTLLQLPQFRGFSAEDVQRVVDTNRKQRFALQLGDPSTGLLIRANQGHSLQVGVPKLELMPLETPQALPPMLVHGTFWKHWPSILLKGLSCQGRTHIHLAPGLPGDPGIISGMRSHCEIAVFIDGPLALADGIPFFRSANGVILTPGNTDGFLLPKYFKEALQLRPTRKPLSLAGDEETECQSSPKHSSRERRRIQQ

SEQ ID NO: 14757 - protein, 208 aa, Artificial Sequence
  Synthetic polypeptide
HQRSGVRGSASLRSWLTDRDVQLSKALSYALRHGALKLGLPMGADGFVPLGTLLQLPQFRGFSAEDVQRVVDTNRKQRFALQLGDPSTGLLIRANQGHSLQVPKLELMPLETPQALPPMLVHGTFWKHWPSILLKGLSCQGRTHIHLAPGLPGDPGIISGMRSHCEIAVFIDGPLALAGKPLSLAGDEETECQSSPKHSSRERRRIQQ

SEQ ID NO: 14758 - protein, 245 aa, Artificial Sequence
  Synthetic polypeptide
HQRSGVRGSASLRSWLTDRDVQLSKALSYALRHGALKLGLPMGADGFVPLGTLLQLPQFRGFSAEDVQRVVDTNRKQRFALQLGDPSTGLLIRANQGHSLQVPKLELMPLETPQALPPMLVHGTFWKHWPSILLKGLSCQGRTHIHLAPGLPGDPGIISGMRSHCEIAVFIDGPLALADGIPFFRSANGVILTPGNTDGFLLPKYFKEALQLRPTRKPLSLAGDEETECQSSPKHSSRERRRIQQ

SEQ ID NO: 14759 - protein, 183 aa, Artificial Sequence
  Synthetic polypeptide
HQRSGVRGSASLRSWLTDRDVQLSKALSYALRHGALKLGLPMGADGFVPLGTLLQLPQFRGFSAEDVQRVVDTNRKQRFALQLGDPSTGLLIRANQGHSLQVGVPKLELMPLETPQALPPMLVHGTFWKHWPSILLKGLSCQGRTHIHLAPGLPGDPGIISGMRSHCEIAVFIDGPLALADGI

SEQ ID NO: 14760 - protein, 34 aa, Artificial Sequence
  Synthetic polypeptide
ARHGGSSCNSSTLGGQGSRLHHQLPQERDAQCLW

SEQ ID NO: 14761 - protein, 245 aa, Artificial Sequence
  Synthetic polypeptide
PGMVAHPVIPALWEAKVHAYIISSLKKEMPNVFGKESKKKELVNNLGEIYQKIEREHQISPGDFPSLRKMQELLQTQDFSKFQALKPKLLDTVDDMLANDIARLMVMVRQEESLMPSQVVKGGAFDGTMNGPFGHGYGEGAGEGIDDVEWVVGKDKPTYDEIFYTLSPVNGKITGANAKKEMVKSKLPNTVLGKIWKLADVDKDGLLDDEEFALANHLIKVKLEGHELPADLPPHLVPPSKRRHE

SEQ ID NO: 14762 - protein, 34 aa, Artificial Sequence
  Synthetic polypeptide
FQHFGRPRFTPTSSAPSRKRCPMSLVKRAKRKSW

SEQ ID NO: 14763 - protein, 153 aa, Artificial Sequence
  Synthetic polypeptide
PGMVAHPVIPALWEAKVHAYIISSLKKEMPNVFGKESKKKELVNNLGEIYQKIEREHQISPGDFPSLRKMQELLQTQDFSKFQALKPKLLDTVDDMLANDIARLMVMVRQEESLMPSQVVKGGAFDGTMNGPFGHGYGEGAGEGIDDVEWVVG

SEQ ID NO: 14764 - protein, 71 aa, Artificial Sequence
  Synthetic polypeptide
PGMVAHPVIPALWEAKVHAYIISSLKKEMPNVFGKESKKKELVNNLGEIYQKIEREHQISPGDFPSLRKMQ

SEQ ID NO: 14765 - protein, 102 aa, Artificial Sequence
  Synthetic polypeptide
TSQLLALFSPLDCTCLEGRDVSHSPLGSQPLAQGLHELGVQISVNIFRTLPPSENPEFDPEEDEPNLEPSWPHLQLVYEFFLRFLESPDFQPSVAKRYVDQK

SEQ ID NO: 14766 - protein, 5 aa, Artificial Sequence
  Synthetic polypeptide
AFRSQ

SEQ ID NO: 14767 - protein, 105 aa, Artificial Sequence
  Synthetic polypeptide
GPAPRPHLCLCLPETWSALPHTPYHPWPGSGAASAKKPLSITKLEISLFLPVDLTASSLVLPTGLHLPRRQGCVPFTPGFPAPGPGLARTRRSDLSEYLPDSAAQ

SEQ ID NO: 14768 - protein, 406 aa, Artificial Sequence
  Synthetic polypeptide
TSQLLALFSPLDCTCLEGRDVSHSPLGSQPLAQGLHELGVQISVNIFRTLPPSENPEFDPEEDEPNLEPSWPHLQLVYEFFLRFLESPDFQPSVAKRYVDQKFVLMLLELFDSEDPREREYLKTILHRVYGKFLGLRAYIRKQCNHIFLRFIYEFEHFNGVAELLEILGSIINGFALPLKTEHKQFLVRVLIPLHSVKSLSVFHAQLAYCVVQFLEKDATLTEHVIRGLLKYWPKTCTQKEVMFLGEMEEILDVIEPSQFVKIQEPLFKQVARCVSSPHFQVAERALYFWNNEYILSLIEDNCHTVLPAVFGTLYQVSKEHWNQTIVSLIYNVLKTFMEMNGKLFDELTASYKLEKQQEQQKAQERQELWQGLEELRLRRLQGTQGAKEAPLQRLTPQVAASGGQS

SEQ ID NO: 14769 - protein, 106 aa, Artificial Sequence
  Synthetic polypeptide
TSQLLALFSPLDCTCLEGRDVSHSPLGSQPLAQGLHELGVQISVNIFRTLPPSENPEFDPEEDEPNLEPSWPHLQLVYEFFLRFLESPDFQPSVAKRYVDQKFVLM

SEQ ID NO: 14770 - protein, 104 aa, Artificial Sequence
  Synthetic polypeptide
VSLTRSDAFIRGFFFCVFLIFLLLLSCKKCLLPPAMLRPPQPCGTNRERKTQQGLQETLASDITDVQKQDSEWGHSLPGRIVPPLQHNSPPPKERAATGFFGFL

SEQ ID NO: 14771 - protein, 66 aa, Artificial Sequence
  Synthetic polypeptide
GLPSHVELIGKEKPNKDCRRLWPLISLMSRNKILSGDTACQGELSHPCSTTHLHLRSEQPPASLGF

SEQ ID NO: 14772 - protein, 120 aa, Artificial Sequence
  Synthetic polypeptide
VSLTRSDAFIRGFFFCVFLIFLLLLSCKKCLLPPAMLRPPQPCGTNRERKTQQGLQETLASDITDVQKQDSEWGHSLPGRIVPPLQHNSPPPKERAATGFFGFLSSLFPFRYFFRKSSHS

SEQ ID NO: 14773 - protein, 51 aa, Artificial Sequence
  Synthetic polypeptide
VSLTRSDAFIRGFFFCVFLIFLLLLSCKKCLLPPAMLRPPQPCGTRRRDRK

SEQ ID NO: 14774 - protein, 150 aa, Artificial Sequence
  Synthetic polypeptide
GLPSHVELGEEIENKEVITQELEVPVEKKAVGAVMRKRKHMDEPSSPSRPGLDRAKIGTSSQGPSKKKPPVETRRNRERKTQQGLQETLASDITDVQKQDSEWGHSLPGRIVPPLQHNSPPPKERAATGFFGFLSSLFPFRYFFRKSSHS

SEQ ID NO: 14775 - protein, 88 aa, Artificial Sequence
  Synthetic polypeptide
GLPSHVELGEEIENKEVITQELEVGKEAYDFWKSYSLRMHPHSGFNYFLQTESQPPLDNLASSCYISFAKELYVFPWEFKACILSQFS

SEQ ID NO: 14776 - protein, 190 aa, Artificial Sequence
  Synthetic polypeptide
GLPSHVELGEEIENKEVITQELEDSVRVVLGNLDNLQPFATEHFIVFPYKSKWERVSHLKFKHGEIILIPYPFVFTLYVEMKWFHENLSPGKPISDSPLGLVPVEKKAVGAVMRKRKHMDEPSSPSRPGLDRIGKEKPNKDCRRLWPLISLMSRNKILSGDTACQGELSHPCSTTHLHLRSEQPPASLGF

SEQ ID NO: 14777 - protein, 35 aa, Artificial Sequence
  Synthetic polypeptide
QALGPDCAASNPNSPLHEVHDCAQGCNYGRNQHHW

SEQ ID NO: 14778 - protein, 322 aa, Artificial Sequence
  Synthetic polypeptide
RLWDLTAQPQIPTPRSMRCMTVHKVVIMEGINTTGRKLVATKLYEGVPLPFYQPTEEDADFEQSMVLVACGPYTTSDSITYDPLLDLIAVINHDRPDVCILFGPFLDAKHEQVENCLLTSPFEDIFKQCLRTIIEGTRSSGSHLVFVPSLRDVHHEPVYPQPPFSYSDLSREDKKQVQFVSEPCSLSINGVIFGLTSTDLLFHLGAEEISSSSGTSDRFSRILKHILTQRSYYPLYPPQEDMAIDYESFYVYAQLPVTPDVLIIPSELRYFVKDVLGCVCVNPGRLTKGQVGGTFARLYLRRPAADGAERQSPCIAVQVVRI

SEQ ID NO: 14779 - protein, 5 aa, Artificial Sequence
  Synthetic polypeptide
LCTRL

SEQ ID NO: 14780 - protein, 293 aa, Artificial Sequence
  Synthetic polypeptide
RLWDLTAQPQIPTPRSMRCMTVHKVVIMEGINTTGRKLVATKLYEGVPLPFYQPTEEDADFEQSMVLVACGPYTTSDSITYDPLLDLIAVINHDRPDVCILFGPFLDAKHEQVENCLLTSPFEDIFKQCLRTIIEGTRSSGSHLVFVPSLRDVHHEPVYPQPPFSYSDLSREDKKQVQFVSEPCSLSINGVIFGLTSTDLLFHLGAEEISSSSGTSDRFSRILKHILTQRSYYPLYPPQEDMAIDYESFYVYAQLPVTPDVLIIPSELRYFVKVGLNSAFSQKHQNPVFDFPF

SEQ ID NO: 14781 - protein, 217 aa, Artificial Sequence
  Synthetic polypeptide
GQAQWITPVIPALWEAEAGTSPEVRSLRPAWPICSGSHLVFVPSLRDVHHEPVYPQPPFSYSDLSREDKKQVQFVSEPCSLSINGVIFGLTSTDLLFHLGAEEISSSSGTSDRFSRILKHILTQRSYYPLYPPQEDMAIDYESFYVYAQLPVTPDVLIIPSELRYFVKDVLGCVCVNPGRLTKGQVGGTFARLYLRRPAADGAERQSPCIAVQVVRI

SEQ ID NO: 14782 - protein, 17 aa, Artificial Sequence
  Synthetic polypeptide
DQPGQYAPAPTLSLSRH

SEQ ID NO: 14783 - protein, 27 aa, Artificial Sequence
  Synthetic polypeptide
GQEFETSLANMLRLPPCLCPVIERCAP

SEQ ID NO: 14784 - protein, 188 aa, Artificial Sequence
  Synthetic polypeptide
GQAQWITPVIPALWEAEAGTSPEVRSLRPAWPICSGSHLVFVPSLRDVHHEPVYPQPPFSYSDLSREDKKQVQFVSEPCSLSINGVIFGLTSTDLLFHLGAEEISSSSGTSDRFSRILKHILTQRSYYPLYPPQEDMAIDYESFYVYAQLPVTPDVLIIPSELRYFVKVGLNSAFSQKHQNPVFDFPF

SEQ ID NO: 14785 - protein, 210 aa, Artificial Sequence
  Synthetic polypeptide
GQAQWITPVIPALWEAEAGTSPEVRSLRPAWPICSGSHLVFVPSLRDVHHEPVYPQPPFSYSDLSREDKKQVQFVSEPCSLSINGVIFGLTSTDLLFHLGAEEISSSSGTSDRFSRILKHILTQRSYYPLYPPQEDMAIDYESFYVYAQLPVTPDVLIIPSELRYFVKFLPFRWTKIKIGGNQGLVSLRRNSPVDCVGAWYLAQSPRRTS

SEQ ID NO: 14786 - protein, 83 aa, Artificial Sequence
  Synthetic polypeptide
GQARCLMPVIPAPGEAEAGGSSEVRSSRPANMHGGAGLGAKVRAAEPRAAGHAGHRRLAENVRSAAPRAAPTGGAGVAGEPAR

SEQ ID NO: 14787 - protein, 118 aa, Artificial Sequence
  Synthetic polypeptide
SQHLGRPRQADHLRSGVQDQPTCMEEQDLERRFELLSRELRAMLAIEDWQKTSAQQHREQLLLEELVSLVNQRDELVRDLDHKERIALEEDERLERGLEQRRRKLSRQLSRRERCVLS

SEQ ID NO: 14788 - protein, 22 aa, Artificial Sequence
  Synthetic polypeptide
GQEFKTSQHAWRSRTWSEGSSC

SEQ ID NO: 14789 - protein, 285 aa, Artificial Sequence
  Synthetic polypeptide
NPSLVKIQKLARSFSELYTLSLQEPSRRGAPDPVQDEVQGVTLLPTTKQLLHLCLQDGGSPPGPGDLAEERTEFLHSQNSLSPRSSLSDEAPVLPNTTPDLLLATTAKPSVPSADSETPLTQDRPGSPSGSEDKGNPAPELRASFLPRTLSLRNSISRIMSEAGSGTLEDEWQAISEIASTCNTILESLSREGQPIPESGDPKGTPKSDAEPEPGNLSEKVSHLESMLRKLQEDLQKEKADRAALEEEVRSLRHNNRRLQAESESAATRLLLASKQLGSPTADLA

SEQ ID NO: 14790 - protein, 30 aa, Artificial Sequence
  Synthetic polypeptide
PGVFRSCTRCRCRSLAGGGPQILCRMRSRG

SEQ ID NO: 14791 - protein, 37 aa, Artificial Sequence
  Synthetic polypeptide
GQEFETSLANMLKPVSSKNTKISQEFFGAVHAVAAGA

SEQ ID NO: 14792 - protein, 286 aa, Artificial Sequence
  Synthetic polypeptide
DANFLGADTLCAYSRPHPQCLEGRLAHNDRHRIEEKRKRTYETFKSIMKKSPFSGPTDPRPPPRRIAVPSRSSASVPKPAPQPYPFTSSLSTINYDEFPTMVFPSGQISQASALAPAPPQVLPQAPAPAPAPAMVSALAQAPAPVPVLAPGPPQAVAPPAPKPTQAGEGTLSEALLQLQFDDEDLGALLGNSTDPAVFTDLASVDNSEFQQLLNQGIPVAPHTTEPMLMEYPEAITRLVTGAQRPPDPAPAPLGAPGLPNGLLSGDEDFSSIADMDFSALLSQISS

SEQ ID NO: 14793 - protein, 26 aa, Artificial Sequence
  Synthetic polypeptide
KGGWHITIVTGLRRNVKGHMRPSRAS

SEQ ID NO: 14794 - protein, 112 aa, Artificial Sequence
  Synthetic polypeptide
DANFLGADTLCAYSRPHPQCLEGRLAHNDRHRIEEKRKRTYETFKSIMKKSPFSGPTDPRPPPRRIAVPSRSSASVPKPGKDFLLSHWNDRFSSVQLRSSGDEDSWAPLQTY

SEQ ID NO: 14795 - protein, 33 aa, Artificial Sequence
  Synthetic polypeptide
DANFLGADTLCAYSRPHPQCLEGRLAHNDRHRI

SEQ ID NO: 14796 - protein, 12 aa, Artificial Sequence
  Synthetic polypeptide
KGGWHITIVTGL

SEQ ID NO: 14797 - protein, 142 aa, Artificial Sequence
  Synthetic polypeptide
DANFLGADTLCAYSRPHPQCLEGRLAHNDRHRIEEKRKRTYETFKSIMKKSPFSGPTDPRPPPRRIAVPSRSSASVPKPAPQPYPFTSSLSTINYDEFPTMVFPSGQISQASALAPAPPQVLPQAPAPAPAPAMVSALAQAP

SEQ ID NO: 14798 - protein, 73 aa, Artificial Sequence
  Synthetic polypeptide
DANFLGADTLCAYSRPHPQCLEGRLAHNDRHRIEEKRKRTYETFKSIMKKSPFSGPTDPRPPPRRIAVPSRSS

SEQ ID NO: 14799 - protein, 30 aa, Artificial Sequence
  Synthetic polypeptide
LWNHKRLTNWKMRNLGCSERLRSCRSRRSA

SEQ ID NO: 14800 - protein, 6 aa, Artificial Sequence
  Synthetic polypeptide
SGTIRD

SEQ ID NO: 14801 - protein, 7 aa, Artificial Sequence
  Synthetic polypeptide
LWNHKRL

SEQ ID NO: 14802 - protein, 15 aa, Artificial Sequence
  Synthetic polypeptide
LWNHKSARRKRSAAE

SEQ ID NO: 14803 - protein, 42 aa, Artificial Sequence
  Synthetic polypeptide
SGTINQPGGRGAPPSKARAEQAGCGQVQEPEEGTDRLPAGGD

SEQ ID NO: 14804 - protein, 88 aa, Artificial Sequence
  Synthetic polypeptide
SQHFGRPRRVDHLRLGAGDQPGKHEVPPGAKHQHHEWQSGAAVDGTASFPGAQQLPQASDLPSVQPPTTPARSHPGPGAASRGTSKAL

SEQ ID NO: 14805 - protein, 249 aa, Artificial Sequence
  Synthetic polypeptide
GWELETSLANMKFHLVPSINTMSGSQELQWMVQPHFLGPSSYPRPLTYPQYSPPQPRPGVIRALGPPPGVRRRPCEQISPEEEERRRVRRERNKLAAAKCRNRRKELTDFLQAETDKLEDEKSGLQREIEELQKQKERLELVLEAHRPICKIPEGAKEGDTGSTSGTSSPPAPCRPVPCISLSPGPVLEPEALHTPTLMTTPSLTPFTPSLVFTYPSTPEPCASAHRKSSSSSGDPSSDPLGSPTLLAL

SEQ ID NO: 14806 - protein, 213 aa, Artificial Sequence
  Synthetic polypeptide
GWELETSLANMKFHLVPSINTMSGSQELQWMVQPHFLGPSSYPRPLTYPQYSPPQPRPGVIRALGPPPGVRRRPCEQETDKLEDEKSGLQREIEELQKQKERLELVLEAHRPICKIPEGAKEGDTGSTSGTSSPPAPCRPVPCISLSPGPVLEPEALHTPTLMTTPSLTPFTPSLVFTYPSTPEPCASAHRKSSSSSGDPSSDPLGSPTLLAL

SEQ ID NO: 14807 - protein, 113 aa, Artificial Sequence
  Synthetic polypeptide
GWELETSLANMKFHLVPSINTMSGSQELQWMVQPHFLGPSSYPRPLTYPQYSPPQPRPGVIRALGPPPGVRRRPCEQPGGRGAPPSKARAEQAGCGQVQEPEEGTDRLPAGGD

SEQ ID NO: 14808 - protein, 77 aa, Artificial Sequence
  Synthetic polypeptide
MGRSLEARSSRPAWATYSLEFPCHHHLWDSPLCSLLRHPHHLHQALALAFLWPTHQIWGPRLLSVWVSQWHCQRRSG

SEQ ID NO: 14809 - protein, 74 aa, Artificial Sequence
  Synthetic polypeptide
SHHFGMLRWDDRLKPGVRDQPGQHTPWNSHATTTFGTPPSAASSATPTTSTRPWPWLSYGPPTKFGAPASSPCG

SEQ ID NO: 14810 - protein, 803 aa, Artificial Sequence
  Synthetic polypeptide
SQEFETSLGNILPGIPMPPPPLGLPPLQPPPPPPPPPPGLGLGFPMAHPPNLGPPPPLRVGEPVALSEEERLKLAQQQAALLMQQEERAKQAAVLLEQERQQEIAKMGTPVPRPPQDMGQIGVRTPLGPRVAAPVGPVGPTPTVLPMGAPVPRPRGPPPPPGDENREMDDPSVGPKIPQALEKILQLKESRQEEMNSQQEEEEMETDARSSLGQSASETEEDTVSVSKKEKNRKRRNRKKKKKPQRVRGVSSESSGDREKDSTRSRGSDSPAADVEIEYVTEEPEIYEPNFIFFKRIFEAFKLTDDVKKEKEKEPEKLDKLENSAAPKKKGFEEEHKDSDDDSSDDEQEKKPEAPKLSKKKLRRMNRFTVAELKQLVARPDVVEMHDVTAQDPKLLVHLKATRNSVPVPRHWCFKRKYLQGKRGIEKPPFELPDFIKRTGIQEMREALQEKEEQKTMKSKMREKVRPKMGKIDIDYQKLHDAFFKWQTKPKLTIHGDLYYEGKEFETRLKEKKPGDLSDELRISLGMPVGPNAHKVPPPWLIAMQRYGPPPSYPNLKIPGLNSPIPESCSFGYHAGGWGKPPVDETGKPLYGDVFGTNAAEFQTKTEEEEIDRTPWGELEPSDEESSEEEEEEESDEDKPDETGFITPADSGLITPGGFSSVPAGMETPELIELRKKKIEEAMDGSETPQLFTVLPEKRTATVGGAMMGSTHIYDMSTVMSRKGPAPELQGVEVALAPEELELDPMAMTQKYEEHVREQQAQVEKEDFSDMVAEHAAKQKQKKRKAQPQDSRGGSKKYKEFKF

SEQ ID NO: 14811 - protein, 820 aa, Artificial Sequence
  Synthetic polypeptide
SQEFETSLGNILPGIPMPPPPLGLPPLQPPPPPPPPPPGLGLGFPMAHPPNLGPPPPLRVGEPVALSEEERLKLAQQQAALLMQQEERAKQQGDHSLKEHELLEQQKRAAVLLEQERQQEIAKMGTPVPRPPQDMGQIGVRTPLGPRVAAPVGPVGPTPTVLPMGAPVPRPRGPPPPPGDENREMDDPSVGPKIPQALEKILQLKESRQEEMNSQQEEEEMETDARSSLGQSASETEEDTVSVSKKEKNRKRRNRKKKKKPQRVRGVSSESSGDREKDSTRSRGSDSPAADVEIEYVTEEPEIYEPNFIFFKRIFEAFKLTDDVKKEKEKEPEKLDKLENSAAPKKKGFEEEHKDSDDDSSDDEQEKKPEAPKLSKKKLRRMNRFTVAELKQLVARPDVVEMHDVTAQDPKLLVHLKATRNSVPVPRHWCFKRKYLQGKRGIEKPPFELPDFIKRTGIQEMREALQEKEEQKTMKSKMREKVRPKMGKIDIDYQKLHDAFFKWQTKPKLTIHGDLYYEGKEFETRLKEKKPGDLSDELRISLGMPVGPNAHKVPPPWLIAMQRYGPPPSYPNLKIPGLNSPIPESCSFGYHAGGWGKPPVDETGKPLYGDVFGTNAAEFQTKTEEEEIDRTPWGELEPSDEESSEEEEEEESDEDKPDETGFITPADSGLITPGGFSSVPAGMETPELIELRKKKIEEAMDGSETPQLFTVLPEKRTATVGGAMMGSTHIYDMSTVMSRKGPAPELQGVEVALAPEELELDPMAMTQKYEEHVREQQAQVEKEDFSDMVAEHAAKQKQKKRKAQPQDSRGGSKKYKEFKF

SEQ ID NO: 14812 - protein, 198 aa, Artificial Sequence
  Synthetic polypeptide
SQEFETSLGNILPGIPMPPPPLGLPPLQPPPPPPPPPPGLGLGFPMAHPPNLGPPPPLRVGEPVALSEEERLKLAQQQAALLMQQEERAKQGDHSLKEHELLEQQKRAAVLLEQERQQEIAKMGTPVPRPPQDMGQIGVRTPLGPRVAAPVGPVGPTPTVLPMGAPVPRPRGPPPPPGDENREMDDPSVGPKIPQALE

SEQ ID NO: 14813 - protein, 278 aa, Artificial Sequence
  Synthetic polypeptide
SQEFETSLGNILPGIPMPPPPLGLPPLQPPPPPPPPPPGLGLGFPMAHPPNLGPPPPLRVGEPVALSEEERLKLAQQQAALLMQQEERAKQGDHSLKEHELLEQQKRAAVLLEQERQQEIAKMGTPVPRPPQDMGQIGVRTPLGPRAAPVGPVGPTPTVLPMGAPVPRPRGPPPPPGDENREMDDPSVGPKIPQALEKILQLKESRQEEMNSQQEEEEMETDARSSLGQSASETEEDTVSVSKKEKNRKRRNRKKKKKPQRVRGVSSESSGDREKDST

SEQ ID NO: 14814 - protein, 317 aa, Artificial Sequence
  Synthetic polypeptide
SQEFETSLGNILPGIPMPPPPLGLPPLQPPPPPPPPPPGLGLGFPMAHPPNLGPPPPLRVGEPVALSEEERLKLAQQQAALLMQQEERAKQQGDHSLKEHELLEQQKRAAVLLEQERQQEIAKMGTPVPRPPQDMGQIGVRTPLGPRAAPVGPVGPTPTVLPMGAPVPRPRGPPPPPGDENREMDDPSVGPKIPQALEKILQLKESRQEEMNSQQEEEEMETDARSSLGQSASETEEDTVSVSKKEKNRKRRNRKKKKKPQRVRGVSSESSGDREKDSTRSRGSDSPAADVEIEYVTEEPEIYEPNFIFFKRIFEAF

SEQ ID NO: 14815 - protein, 87 aa, Artificial Sequence
  Synthetic polypeptide
SQEFETSLGNILPGIPMPPPPLGLPPLQPPPPPPPPPPGLGLGFPMAHPPNLGPPPPLRVGEPVALSEEERLKLAQQQAALLMQQEE

SEQ ID NO: 14816 - protein, 45 aa, Artificial Sequence
  Synthetic polypeptide
QDPVSTKIQKLAGATGRGRAGDAVRQRGSHDTPASRGRSHADLPA

SEQ ID NO: 14817 - protein, 263 aa, Artificial Sequence
  Synthetic polypeptide
LEQLDVAGRVMQYVNGAATTHQLPVAEAMLTCRHKFPDEDSYQKFIPFIGVVKVGLVEDSPSTAGDGDDSPVVSLTVPSTSPPSSSGLSRDATATPPSSPSMSSALAIVGSPNSPYGDVIGLQVDYWLGHPGERRREGDKRDASSKNTLKSVFRSVQVSRLPHSGEAQLSGTMAMTVVTKEKNKKVPTIFLSKKPREKEVDSKSQVIEGISRLICSAKQQQTMLRVSIDGVEWSDIKFFQLAAQWPTHVKHFPVGLFSGSKAT

SEQ ID NO: 14818 - protein, 32 aa, Artificial Sequence
  Synthetic polypeptide
TQEFKTSLGNIARPCLYKNTKISWSNWTWQGG

SEQ ID NO: 14819 - protein, 200 aa, Artificial Sequence
  Synthetic polypeptide
SDKLDYLFKLLLIGDSGVGKSCLLLRFADDTYTESYISTIGVDFKIRTIELDGKTIKLQIWDTAGQERFRTITSSYYRGAHGIIVVYDVTDQESYANVKQWLQEIDRYASENVNKLLVGNKSDLTTKKVVDNTTAKEFADSLGIPFLETSAKNATNVEQAFMTMAAEIKKRMGPGAASGGERPNLKIDSTPVKPAGGGCC

SEQ ID NO: 14820 - protein, 23 aa, Artificial Sequence
  Synthetic polypeptide
TLESEKPGLSLKAINLTTCLSCF

SEQ ID NO: 14821 - protein, 168 aa, Artificial Sequence
  Synthetic polypeptide
SDKLDYLFKLLLIGDSGVGKSCLLLRFADDTYTESYISTIGVDFKIRTIELDGKTIKLQIESYANVKQWLQEIDRYASENVNKLLVGNKSDLTTKKVVDNTTAKEFADSLGIPFLETSAKNATNVEQAFMTMAAEIKKRMGPGAASGGERPNLKIDSTPVKPAGGGCC

SEQ ID NO: 14822 - protein, 206 aa, Artificial Sequence
  Synthetic polypeptide
DDAFKVLHTGDYLFKLLLIGDSGVGKSCLLLRFADDTYTESYISTIGVDFKIRTIELDGKTIKLQIWDTAGQERFRTITSSYYRGAHGIIVVYDVTDQESYANVKQWLQEIDRYASENVNKLLVGNKSDLTTKKVVDNTTAKEFADSLGIPFLETSAKNATNVEQAFMTMAAEIKKRMGPGAASGGERPNLKIDSTPVKPAGGGCC

SEQ ID NO: 14823 - protein, 21 aa, Artificial Sequence
  Synthetic polypeptide
RLNEMMHLKYFTQVTTCLSCF

SEQ ID NO: 14824 - protein, 174 aa, Artificial Sequence
  Synthetic polypeptide
DDAFKVLHTGDYLFKLLLIGDSGVGKSCLLLRFADDTYTESYISTIGVDFKIRTIELDGKTIKLQIESYANVKQWLQEIDRYASENVNKLLVGNKSDLTTKKVVDNTTAKEFADSLGIPFLETSAKNATNVEQAFMTMAAEIKKRMGPGAASGGERPNLKIDSTPVKPAGGGCC

SEQ ID NO: 14825 - protein, 210 aa, Artificial Sequence
  Synthetic polypeptide
DDAFKVLHTGSVHSDYLFKLLLIGDSGVGKSCLLLRFADDTYTESYISTIGVDFKIRTIELDGKTIKLQIWDTAGQERFRTITSSYYRGAHGIIVVYDVTDQESYANVKQWLQEIDRYASENVNKLLVGNKSDLTTKKVVDNTTAKEFADSLGIPFLETSAKNATNVEQAFMTMAAEIKKRMGPGAASGGERPNLKIDSTPVKPAGGGCC

SEQ ID NO: 14826 - protein, 25 aa, Artificial Sequence
  Synthetic polypeptide
RLNEMMHLKYFTQGPSTVTTCLSCF

SEQ ID NO: 14827 - protein, 178 aa, Artificial Sequence
  Synthetic polypeptide
DDAFKVLHTGSVHSDYLFKLLLIGDSGVGKSCLLLRFADDTYTESYISTIGVDFKIRTIELDGKTIKLQIESYANVKQWLQEIDRYASENVNKLLVGNKSDLTTKKVVDNTTAKEFADSLGIPFLETSAKNATNVEQAFMTMAAEIKKRMGPGAASGGERPNLKIDSTPVKPAGGGCC

SEQ ID NO: 14828 - protein, 214 aa, Artificial Sequence
  Synthetic polypeptide
SNDENGIPSSPQKVALTLDLDLEKEPESEPDEPQKPGKPSVFTVFQKIWLTALCLVLVFTVTLSVFPAITAMVTSSTSPGKWSQFFNPICCFLLFNIMDWLGRSLTSYFLWPDEDSRLLPLLVCLRFLFVPLFMLCHVPQRSRLPILFPQDAYFITFMLLFAVSNGYLVSLTMCLAPRQVLPHEREVAGALMTFFLALGLSCGASLSFLFKALL

SEQ ID NO: 14829 - protein, 26 aa, Artificial Sequence
  Synthetic polypeptide
PLHPSEPQCVICKAMMRTGFPVVPRK

SEQ ID NO: 14830 - protein, 59 aa, Artificial Sequence
  Synthetic polypeptide
SNDENGIPSSPQKVALTLDLDLEKEPESEPDEPQKPGKPSVFTVFQKSPCPSSPPSQPW

SEQ ID NO: 14831 - protein, 43 aa, Artificial Sequence
  Synthetic polypeptide
TPPEGRNSEHIQTSEGTNSRHAAFKKCNTHQRRFHQPVLQGVQ

SEQ ID NO: 14832 - protein, 198 aa, Artificial Sequence
  Synthetic polypeptide
HSPRRSAASLLSHRDHEPHQKEEIQNTSKHQKEQTPDTQPLRNVTLTRGVSINQFCKEFNERTKDIKEGIPLPTKILVKPDRTFEIKIGQPTVSYFLKAAAGIEKGARQTGKEVAGLVTLKHVYEIARIKAQDEAFALQDVPLSSVVRSIIGSARSLGIRVVKDLSSEELAAFQKERAIFLAAQKEADLAAQEEAAKK

SEQ ID NO: 14833 - protein, 32 aa, Artificial Sequence
  Synthetic polypeptide
HSPEAFPSTSFARSSMRGQRTSRKAFLCLPRF

SEQ ID NO: 14834 - protein, 81 aa, Artificial Sequence
  Synthetic polypeptide
HSPRRSAASLLSHRDHEPHQKEEIQNTSKHQKEQTPDTQPLRNVTLTRGVSINQFCKEFNERTKDIKEGIPLPTKILVKDI

SEQ ID NO: 14835 - protein, 187 aa, Artificial Sequence
  Synthetic polypeptide
HSPRRSAASLLSHRDHEPHQKEEIQNTSKHQKEQTPDTQPLRNVTLTRGVSINQFCKEFNERTKDIKEGIPLPTKILVKPDRTFEIKIGQPTVSYFLKAAAGIEKGARQTGKEVAGLVTLKHVYEIARIKAQDEAFALQDVPLSSVVRSIIGSARSLGIRVVKERCSANVLRNGKISMKDPSGRSSV

SEQ ID NO: 14836 - protein, 69 aa, Artificial Sequence
  Synthetic polypeptide
AARGRAGARRGGSGAQRGPERGQLQWLSGKWGQGPPAKPPGTEPPVARQRGEARRHAPHLHAARLQGTE

SEQ ID NO: 14837 - protein, 417 aa, Artificial Sequence
  Synthetic polypeptide
RPGAEQGLGGEGAAPSGARSVASYNGCLASGDKGRRRSRLALSRRSHANGVKPDVMHHISTPLVSKALSNRGQHSISYTLSRSHSVIVEYTHDSDTDMFQIGRSTENMIDFVVTDTSPGGGAAEGPSAQSTISRYACRILCDRRPPYTARIYAAGFDASSNIFLGERAAKWRTPDGLMDGLTTNGVLVMHPAGGFSEDSAPGVWREISVCGNVYTLRDSRSAQQRGKLVENESNVLQDGSLIDLCGATLLWRTPAGLLRAPTLKQLEAQRQEANAARPQCPVGLSTLAFPSPARGRTAPDKQQPWVYVRCGHVHGYHGWGCRRERGPQERECPLCRLVGPYVPLWLGQEAGLCLDPGPPSHAFAPCGHVCSEKTARYWAQTPLPHGTHAFHAACPFCGAWLTGEHGCVRLIFQGPLD

SEQ ID NO: 14838 - protein, 33 aa, Artificial Sequence
  Synthetic polypeptide
AGRERRPAGPGAWPATMVVWQVGTRAAGEAAWH

SEQ ID NO: 14839 - protein, 64 aa, Artificial Sequence
  Synthetic polypeptide
AARGRAGARRGGSGAQRGPERGQLQWLSGKWGQGPPAKPPGTEPPVARQRGEARRHAPHLHAAL

SEQ ID NO: 14840 - protein, 63 aa, Artificial Sequence
  Synthetic polypeptide
RPGAEQGLGGEGAAPSGARSVASYNGCLASGDKGRRRSRLALSRRSHANGVKPDVMHHISTPL

SEQ ID NO: 14841 - protein, 279 aa, Artificial Sequence
  Synthetic polypeptide
RPGAEQGLGGEGAAPSGARSVASYNGCLASGDKGRRRSRLALSRRSHANGVKPDVMHHISTPLVSKALSNRGQHSISYTLSRSHSVIVEYTHDSDTDMFQIGRSTENMIDFVVTDTSPGGGAAEGPSAQSTISRYACRILCDRRPPYTARIYAAGFDASSNIFLGERAAKWRTPDGLMDGLTTNGVLVMHPAGGFSEDSAPGVWREISVCGNVYTLRDSRSAQQRGKLVGGPLHSPPLSLPGPHKLPIPLPKPGDDLQSFCPREPQQAPYQGIPGPGGS

SEQ ID NO: 14842 - protein, 67 aa, Artificial Sequence
  Synthetic polypeptide
AARGRAGARRGGSGAQRGPERGQLQWLSGKWGQGPPAKPPGTEPPVARQRGEARRHAPHLHAARLQG

SEQ ID NO: 14843 - protein, 67 aa, Artificial Sequence
  Synthetic polypeptide
RPGAEQGLGGEGAAPSGARSVASYNGCLASGDKGRRRSRLALSRRSHANGVKPDVMHHISTPLVSKA

SEQ ID NO: 14844 - protein, 56 aa, Artificial Sequence
  Synthetic polypeptide
GASLPGRPSSEMWGVPLPRGPIWDVRSTSARPRPRLGGEERLCPATPSENWSSRCR

SEQ ID NO: 14845 - protein, 121 aa, Artificial Sequence
  Synthetic polypeptide
GAPLPGRDPVWEVRSVSARPPRLRIGVRGADDLSELCGRGAQIPARGGRCPGCGGALGGPDGLGTHHSTQPGGAGSPGRHGAAGGTQGHGQRPVAESGGSSGHPGGAWHRAGGGALPTADP

SEQ ID NO: 14846 - protein, 262 aa, Artificial Sequence
  Synthetic polypeptide
ELEFAVQMTCQSCVDAVRKSLQGVAGVQDVEVHLEDQMVLVHTTLPSQEVQALLEGTGRQAVLKGMGSGQLQNLGAAVAILGGPGTVQGVVRFLQLTPERCLIEGTIDGLEPGLHGLHVHQYGDLTNNCNSCGNHFNPDGASHGGPQDSDRHRGDLGNVRADADGRAIFRMEDEQLKVWDVIGRSLIIDEGEDDLGRGGHPLSKITGNSGERLACGIIARSAGLFQNPKQICSCDGLTIWEERGRPIAGKGRKESAQPPAHL

SEQ ID NO: 14847 - protein, 237 aa, Artificial Sequence
  Synthetic polypeptide
ELEFAVQMTCQSCVDAVRKSLQGVAGVQDVEVHLEDQMVLVHTTLPSQEVQALLEGTGRQAVLKGMGSGQLQNLGAAVAILGGPGTVQGVVRFLQLTPERCLIEGTIDGLEPGLHGLHVHQYGDLTNNCNSCGNHFNPDGASHGGPQDSDRTGPRGPCLPSPWGAQILRDWYPQEEMGTLGKQEEASESGNQKIAAWHHVAHIPYTHTGSHSSTAETWAMSVLMLTAAPSSEWRMSS

SEQ ID NO: 14848 - protein, 262 aa, Artificial Sequence; identical to SEQ ID NO: 14846
  Synthetic polypeptide

SEQ ID NO: 14849 - protein, 44 aa, Artificial Sequence
  Synthetic polypeptide
GAPLPGRDPVWEVRSVSARPPRLRSEETLCLATTPSENWSSRCR

SEQ ID NO: 14850 - protein, 111 aa, Artificial Sequence
  Synthetic polypeptide
EVRRPSAWQPPRLRIGVRGADDLSELCGRGAQIPARGGRCPGCGGALGGPDGLGTHHSTQPGGAGSPGRHGAAGGTQGHGQRPVAESGGSSGHPGGAWHRAGGGALPTADP

SEQ ID NO: 14851 - protein, 237 aa, Artificial Sequence; identical to SEQ ID NO: 14847
  Synthetic polypeptide

SEQ ID NO: 14852 - protein, 100 aa, Artificial Sequence
  Synthetic polypeptide
EVRSPSARQLPRLRSEEPLRPAATPSGKCPGCGGALGGPDGLGTHHSTQPGGAGSPGRHGAAGGTQGHGQRPVAESGGSSGHPGGAWHRAGGGALPTADP

SEQ ID NO: 14853 - protein, 251 aa, Artificial Sequence
  Synthetic polypeptide
EVRSLSARQPPHLGSVQDVEVHLEDQMVLVHTTLPSQEVQALLEGTGRQAVLKGMGSGQLQNLGAAVAILGGPGTVQGVVRFLQLTPERCLIEGTIDGLEPGLHGLHVHQYGDLTNNCNSCGNHFNPDGASHGGPQDSDRHRGDLGNVRADADGRAIFRMEDEQLKVWDVIGRSLIIDEGEDDLGRGGHPLSKITGNSGERLACGIIARSAGLFQNPKQICSCDGLTIWEERGRPIAGKGRKESAQPPAHL

SEQ ID NO: 14854 - protein, 82 aa, Artificial Sequence
  Synthetic polypeptide
GASPPGSHPIWEVSRMWRCTWRTRWSWYTPLYPARRCRLSWKARGGRRYSRAWAAASCRIWGQQWPSWGGLAPCRGWCASYS

SEQ ID NO: 14855 - protein, 226 aa, Artificial Sequence
  Synthetic polypeptide
EVRSLSARQPPHLGSVQDVEVHLEDQMVLVHTTLPSQEVQALLEGTGRQAVLKGMGSGQLQNLGAAVAILGGPGTVQGVVRFLQLTPERCLIEGTIDGLEPGLHGLHVHQYGDLTNNCNSCGNHFNPDGASHGGPQDSDRTGPRGPCLPSPWGAQILRDWYPQEEMGTLGKQEEASESGNQKIAAWHHVAHIPYTHTGSHSSTAETWAMSVLMLTAAPSSEWRMSS

SEQ ID NO: 14856 - protein, 185 aa, Artificial Sequence
  Synthetic polypeptide
ASARPPLLGSEEPLCPASRPVWEGGGGVSPPPGQPPSPGGRWGGQPPALPAAQSGREVGWSAPRPASHPVREGGGGVSPPPGQPPRPGVGVRGADDLSELCGRGAQIPARGGRCPGCGGALGGPDGLGTHHSTQPGGAGSPGRHGAAGGTQGHGQRPVAESGGSSGHPGGAWHRAGGGALPTADP

SEQ ID NO: 14857 - protein, 349 aa, Artificial Sequence
  Synthetic polypeptide
PLPGRPYWEVRSPSARPVAPSGREVGGSAPRPASRPVREGGGGVSPPPCQPPSPGGRWGGQPPARPATPSGREVGGSAPRPASRPVRELEFAVQMTCQSCVDAVRKSLQGVAGVQDVEVHLEDQMVLVHTTLPSQEVQALLEGTGRQAVLKGMGSGQLQNLGAAVAILGGPGTVQGVVRFLQLTPERCLIEGTIDGLEPGLHGLHVHQYGDLTNNCNSCGNHFNPDGASHGGPQDSDRHRGDLGNVRADADGRAIFRMEDEQLKVWDVIGRSLIIDEGEDDLGRGGHPLSKITGNSGERLACGIIARSAGLFQNPKQICSCDGLTIWEERGRPIAGKGRKESAQPPAHL

SEQ ID NO: 14858 - protein, 84 aa, Artificial Sequence
  Synthetic polypeptide
GAPLPGQSPRLGGRWGGQPPARPAAQSGREVGGSAPRPASRPVREGGGVVSPPPGQPPRPGGRWGGQPPARPAAPSGSWSSRCR

SEQ ID NO: 14859 - protein, 324 aa, Artificial Sequence
  Synthetic polypeptide
PLPGRPYWEVRSPSARPVAPSGREVGGSAPRPASRPVREGGGGVSPPPCQPPSPGGRWGGQPPARPATPSGREVGGSAPRPASRPVRELEFAVQMTCQSCVDAVRKSLQGVAGVQDVEVHLEDQMVLVHTTLPSQEVQALLEGTGRQAVLKGMGSGQLQNLGAAVAILGGPGTVQGVVRFLQLTPERCLIEGTIDGLEPGLHGLHVHQYGDLTNNCNSCGNHFNPDGASHGGPQDSDRTGPRGPCLPSPWGAQILRDWYPQEEMGTLGKQEEASESGNQKIAAWHHVAHIPYTHTGSHSSTAETWAMSVLMLTAAPSSEWRMSS

SEQ ID NO: 14860 - protein, 206 aa, Artificial Sequence
  Synthetic polypeptide
VQEFETSLGNMAKPCLYEKRRKISQAWWPTPVIPATQEAESYTPTVFERYMVNLQVKGKPVHLHIWDTAGQDDYDRLRPLFYPDASVLLLCFDVTSPNSFDNIFNRWYPEVNHFCKKVPIIVVGCKTDLCKDKSLVNKLRRNGLEPVTYHRGQEMARSVGAVAYLECSARLHDNVHAVFQEAAEVALSSRGRNFWRRITQGFCVVT

SEQ ID NO: 14861 - protein, 23 aa, Artificial Sequence
  Synthetic polypeptide
SQLLRRLRATPPRCLSGTWSTCK

SEQ ID NO: 14862 - protein, 114 aa, Artificial Sequence
  Synthetic polypeptide
VQEFETSLGNMAKPCLYEKRRKISQAWWPTPVIPATQEAESYTPTVFERYMVNLQVKGKPVHLHIWDTAGQDDYDRLRPLFYPDASVLLLCFDVTSPNSFDNIFNRFLPRCWLC

SEQ ID NO: 14863 - protein, 85 aa, Artificial Sequence
  Synthetic polypeptide
SQLLRRLSQENRLNLRVGGCSEPRSRHCTSSSLLTGVVPCDDAMKMMAFQMMKLKEKELLTWKRNCTPTNIMPILLLLWKEKILM

SEQ ID NO: 14864 - protein, 9 aa, Artificial Sequence
  Synthetic polypeptide
QAWYHATTL

SEQ ID NO: 14865 - protein, 782 aa, Artificial Sequence
  Synthetic polypeptide
AEIAPLHFIQPADRRGTMRRRYEDDGISDDEIEGKRTFDLEEKLHTNKYNANFVTFMEGKDFNVEYIQRGGLRDPLIFKNSDGLGIKMPDPDFTVNDVKMCVGSRRMVDVMDVNTQKGIEMTMAQWTRYYETPEEEREKLYNVISLEFSHTRLENMVQRPSTVDFIDWVDNMWPRHLKESQTESTNAILEMQYPKVQKYCLMSVRGCYTDFHVDFGGTSVWYHIHQGGKVFWLIPPTAHNLELYENWLLSGKQGDIFLGDRVSDCQRIELKQGYTFVIPSGWIHAVYTPTDTLVFGGNFLHSFNIPMQLKIYNIEDRTRVPNKFRYPFYYEMCWYVLERYVYCITNRSHLTKEFQKESLSMDLELNGLESGNGDEEAVDREPRRLSSRRSVLTSPVANGVNLDYDGLGKTCRSLPSLKKTLAGDSSSDCSRGSHNGQVWDPQCAPRKDRQVHLTHFELEGLRCLVDKLESLPLHKKCVPTGIEDEDALIADVKILLEELANSDPKLALTGVPIVQWPKRDKLKFPTRPKVRVPTIPITKPHTMKPAPRLTPVRPAAASPIVSGARRRRVRCRKCKACVQGECGVCHYCRDMKKFGGPGRMKQSCVLRQCLAPRLPHSVTCSLCGEVDQNEETQDFEKKLMECCICNEIVHPGCLQMDGEGLLNEELPNCWECPKCYQEDSSEKAQKRKMEESDEEAVQAKVLRPLRSCDEPLTPPPHSPTSMLQLIHDPVSPRGMVTRSSPGAGPSDHHSASRDERFKRRQLLRLQATERTMVLRQETLDKN

SEQ ID NO: 14866 - protein, 1162 aa, Artificial Sequence
  Synthetic polypeptide
AEIAPLHFIQPADRRGTMRRRYEDDGISDDEIEGKRTFDLEEKLHTNKYNANFVTFMEGKDFNVEYIQRGGLRDPLIFKNSDGLGIKMPDPDFTVNDVKMCVGSRRMVDVMDVNTQKGIEMTMAQWTRYYETPEEEREKLYNVISLEFSHTRLENMVQRPSTVDFIDWVDNMWPRHLKESQTESTNAILEMQYPKVQKYCLMSVRGCYTDFHVDFGGTSVWYHIHQGGKVFWLIPPTAHNLELYENWLLSGKQGDIFLGDRVSDCQRIELKQGYTFVIPSGWIHAVYTPTDTLVFGGNFLHSFNIPMQLKIYNIEDRTRVPNKFRYPFYYEMCWYVLERYVYCITNRSHLTKEFQKESLSMDLELNGLESGNGDEEAVDREPRRLSSRRSVLTSPVANGVNLDYDGLGKTCRSLPSLKKTLAGDSSSDCSRGSHNGQVWDPQCAPRKDRQVHLTHFELEGLRCLVDKLESLPLHKKCVPTGIEDEDALIADVKILLEELANSDPKLALTGVPIVQWPKRDKLKFPTRPKVRVPTIPITKPHTMKPAPRLTPVRPAAASPIVSGARRRRVRCRKCKACVQGECGVCHYCRDMKKFGGPGRMKQSCVLRQCLAPRLPHSVTCSLCGEVDQNEETQDFEKKLMECCICNEIVHPGCLQMDGEGLLNEELPNCWECPKCYQEDSSEKAQKRKMEESDEEAVQAKVLRPLRSCDEPLTPPPHSPTSMLQLIHDPVSPRGMVTRSSPGAGPSDHHSASRDERFKRRQLLRLQATERTMVREKENNPSGKKELSEVEKAKIRGSYLTVTLQRPTKELHGTSIVPKLQAITASSANLRHSPRVLVQHCPARTPQRGDEEGLGGEEEEEEEEEEEDDSAEEGGAARLNGRGSWAQDGDESWMQREVWMSVFRYLSRRELCECMRVCKTWYKWCCDKRLWTKIDLSRCKAIVPQALSGIIKRQPVSLDLSWTNISKKQLTWLVNRLPGLKDLLLAGCSWSAVSALSTSSCPLLRTLDLRWAVGIKDPQIRDLLTPPADKPGQDNRSKLRNMTDFRLAGLDITDATLRLIIRHMPLLSRLDLSHCSHLTDQSSNLLTAVGSSTRYSLTELNMAGCNKLTDQTLIYLRRIANVTLIDLRGCKQITRKACEHFISDLSINSLYCLSDEKLIQKIS

SEQ ID NO: 14867 - protein, 690 aa, Artificial Sequence
  Synthetic polypeptide
AHCGDLLRKKGSRRMVDVMDVNTQKGIEMTMAQWTRYYETPEEEREKLYNVISLEFSHTRLENMVQRPSTVDFIDWVDNMWPRHLKESQTESTNAILEMQYPKVQKYCLMSVRGCYTDFHVDFGGTSVWYHIHQGGKVFWLIPPTAHNLELYENWLLSGKQGDIFLGDRVSDCQRIELKQGYTFVIPSGWIHAVYTPTDTLVFGGNFLHSFNIPMQLKIYNIEDRTRVPNKFRYPFYYEMCWYVLERYVYCITNRSHLTKEFQKESLSMDLELNGLESGNGDEEAVDREPRRLSSRRSVLTSPVANGVNLDYDGLGKTCRSLPSLKKTLAGDSSSDCSRGSHNGQVWDPQCAPRKDRQVHLTHFELEGLRCLVDKLESLPLHKKCVPTGIEDEDALIADVKILLEELANSDPKLALTGVPIVQWPKRDKLKFPTRPKVRVPTIPITKPHTMKPAPRLTPVRPAAASPIVSGARRRRVRCRKCKACVQGECGVCHYCRDMKKFGGPGRMKQSCVLRQCLAPRLPHSVTCSLCGEVDQNEETQDFEKKLMECCICNEIVHPGCLQMDGEGLLNEELPNCWECPKCYQEDSSEKAQKRKMEESDEEAVQAKVLRPLRSCDEPLTPPPHSPTSMLQLIHDPVSPRGMVTRSSPGAGPSDHHSASRDERFKRRQLLRLQATERTMVLRQETLDKN

SEQ ID NO: 14868 - protein, 34 aa, Artificial Sequence
  Synthetic polypeptide
YHICFTAWFTEFIKPTVEICSGKKGVVAWWMSWT

SEQ ID NO: 14869 - protein, 78 aa, Artificial Sequence
  Synthetic polypeptide
LETKFNIPKKAYLPFQNPRALKNYAKSTLLMEQQSLDDITSVLQHGLLNLLSPLWRSAQEKRESSHGGCHGREHTERH

SEQ ID NO: 14870 - protein, 1070 aa, Artificial Sequence
  Synthetic polypeptide
AHCGDLLRKKGSRRMVDVMDVNTQKGIEMTMAQWTRYYETPEEEREKLYNVISLEFSHTRLENMVQRPSTVDFIDWVDNMWPRHLKESQTESTNAILEMQYPKVQKYCLMSVRGCYTDFHVDFGGTSVWYHIHQGGKVFWLIPPTAHNLELYENWLLSGKQGDIFLGDRVSDCQRIELKQGYTFVIPSGWIHAVYTPTDTLVFGGNFLHSFNIPMQLKIYNIEDRTRVPNKFRYPFYYEMCWYVLERYVYCITNRSHLTKEFQKESLSMDLELNGLESGNGDEEAVDREPRRLSSRRSVLTSPVANGVNLDYDGLGKTCRSLPSLKKTLAGDSSSDCSRGSHNGQVWDPQCAPRKDRQVHLTHFELEGLRCLVDKLESLPLHKKCVPTGIEDEDALIADVKILLEELANSDPKLALTGVPIVQWPKRDKLKFPTRPKVRVPTIPITKPHTMKPAPRLTPVRPAAASPIVSGARRRRVRCRKCKACVQGECGVCHYCRDMKKFGGPGRMKQSCVLRQCLAPRLPHSVTCSLCGEVDQNEETQDFEKKLMECCICNEIVHPGCLQMDGEGLLNEELPNCWECPKCYQEDSSEKAQKRKMEESDEEAVQAKVLRPLRSCDEPLTPPPHSPTSMLQLIHDPVSPRGMVTRSSPGAGPSDHHSASRDERFKRRQLLRLQATERTMVREKENNPSGKKELSEVEKAKIRGSYLTVTLQRPTKELHGTSIVPKLQAITASSANLRHSPRVLVQHCPARTPQRGDEEGLGGEEEEEEEEEEEDDSAEEGGAARLNGRGSWAQDGDESWMQREVWMSVFRYLSRRELCECMRVCKTWYKWCCDKRLWTKIDLSRCKAIVPQALSGIIKRQPVSLDLSWTNISKKQLTWLVNRLPGLKDLLLAGCSWSAVSALSTSSCPLLRTLDLRWAVGIKDPQIRDLLTPPADKPGQDNRSKLRNMTDFRLAGLDITDATLRLIIRHMPLLSRLDLSHCSHLTDQSSNLLTAVGSSTRYSLTELNMAGCNKLTDQTLIYLRRIANVTLIDLRGCKQITRKACEHFISDLSINSLYCLSDEKLIQKIS

SEQ ID NO: 14871 - protein, 41 aa, Artificial Sequence
  Synthetic polypeptide
KKLLYPPQPSATTTTLISQQPSTMRQSSHGGCHGREHTERH

SEQ ID NO: 14872 - protein, 680 aa, Artificial Sequence
  Synthetic polypeptide
GNRRMVDVMDVNTQKGIEMTMAQWTRYYETPEEEREKLYNVISLEFSHTRLENMVQRPSTVDFIDWVDNMWPRHLKESQTESTNAILEMQYPKVQKYCLMSVRGCYTDFHVDFGGTSVWYHIHQGGKVFWLIPPTAHNLELYENWLLSGKQGDIFLGDRVSDCQRIELKQGYTFVIPSGWIHAVYTPTDTLVFGGNFLHSFNIPMQLKIYNIEDRTRVPNKFRYPFYYEMCWYVLERYVYCITNRSHLTKEFQKESLSMDLELNGLESGNGDEEAVDREPRRLSSRRSVLTSPVANGVNLDYDGLGKTCRSLPSLKKTLAGDSSSDCSRGSHNGQVWDPQCAPRKDRQVHLTHFELEGLRCLVDKLESLPLHKKCVPTGIEDEDALIADVKILLEELANSDPKLALTGVPIVQWPKRDKLKFPTRPKVRVPTIPITKPHTMKPAPRLTPVRPAAASPIVSGARRRRVRCRKCKACVQGECGVCHYCRDMKKFGGPGRMKQSCVLRQCLAPRLPHSVTCSLCGEVDQNEETQDFEKKLMECCICNEIVHPGCLQMDGEGLLNEELPNCWECPKCYQEDSSEKAQKRKMEESDEEAVQAKVLRPLRSCDEPLTPPPHSPTSMLQLIHDPVSPRGMVTRSSPGAGPSDHHSASRDERFKRRQLLRLQATERTMVLRQETLDKN

SEQ ID NO: 14873 - protein, 34 aa, Artificial Sequence
  Synthetic polypeptide
EVAISTPTFSNHHHSDQSAALNNEAIVAWWMSWT

SEQ ID NO: 14874 - protein, 1060 aa, Artificial Sequence
  Synthetic polypeptide
GNRRMVDVMDVNTQKGIEMTMAQWTRYYETPEEEREKLYNVISLEFSHTRLENMVQRPSTVDFIDWVDNMWPRHLKESQTESTNAILEMQYPKVQKYCLMSVRGCYTDFHVDFGGTSVWYHIHQGGKVFWLIPPTAHNLELYENWLLSGKQGDIFLGDRVSDCQRIELKQGYTFVIPSGWIHAVYTPTDTLVFGGNFLHSFNIPMQLKIYNIEDRTRVPNKFRYPFYYEMCWYVLERYVYCITNRSHLTKEFQKESLSMDLELNGLESGNGDEEAVDREPRRLSSRRSVLTSPVANGVNLDYDGLGKTCRSLPSLKKTLAGDSSSDCSRGSHNGQVWDPQCAPRKDRQVHLTHFELEGLRCLVDKLESLPLHKKCVPTGIEDEDALIADVKILLEELANSDPKLALTGVPIVQWPKRDKLKFPTRPKVRVPTIPITKPHTMKPAPRLTPVRPAAASPIVSGARRRRVRCRKCKACVQGECGVCHYCRDMKKFGGPGRMKQSCVLRQCLAPRLPHSVTCSLCGEVDQNEETQDFEKKLMECCICNEIVHPGCLQMDGEGLLNEELPNCWECPKCYQEDSSEKAQKRKMEESDEEAVQAKVLRPLRSCDEPLTPPPHSPTSMLQLIHDPVSPRGMVTRSSPGAGPSDHHSASRDERFKRRQLLRLQATERTMVREKENNPSGKKELSEVEKAKIRGSYLTVTLQRPTKELHGTSIVPKLQAITASSANLRHSPRVLVQHCPARTPQRGDEEGLGGEEEEEEEEEEEDDSAEEGGAARLNGRGSWAQDGDESWMQREVWMSVFRYLSRRELCECMRVCKTWYKWCCDKRLWTKIDLSRCKAIVPQALSGIIKRQPVSLDLSWTNISKKQLTWLVNRLPGLKDLLLAGCSWSAVSALSTSSCPLLRTLDLRWAVGIKDPQIRDLLTPPADKPGQDNRSKLRNMTDFRLAGLDITDATLRLIIRHMPLLSRLDLSHCSHLTDQSSNLLTAVGSSTRYSLTELNMAGCNKLTDQTLIYLRRIANVTLIDLRGCKQITRKACEHFISDLSINSLYCLSDEKLIQKIS

SEQ ID NO: 14875 - protein, 455 aa, Artificial Sequence
  Synthetic polypeptide
HFGRPRWANGLSPGVKTSLGNMAKPHLYRNYRKLDLELNGLESGNGDEEAVDREPRRLSSRRSVLTSPVANGVNLDYDGLGKTCRSLPSLKKTLAGDSSSDCSRGSHNGQVWDPQCAPRKDRQVHLTHFELEGLRCLVDKLESLPLHKKCVPTGIEDEDALIADVKILLEELANSDPKLALTGVPIVQWPKRDKLKFPTRPKVRVPTIPITKPHTMKPAPRLTPVRPAAASPIVSGARRRRVRCRKCKACVQGECGVCHYCRDMKKFGGPGRMKQSCVLRQCLAPRLPHSVTCSLCGEVDQNEETQDFEKKLMECCICNEIVHPGCLQMDGEGLLNEELPNCWECPKCYQEDSSEKAQKRKMEESDEEAVQAKVLRPLRSCDEPLTPPPHSPTSMLQLIHDPVSPRGMVTRSSPGAGPSDHHSASRDERFKRRQLLRLQATERTMVLRQETLDKN

SEQ ID NO: 14876 - protein, 26 aa, Artificial Sequence
  Synthetic polypeptide
AQELRPAWETWQNPISTETTENWIWS

SEQ ID NO: 14877 - protein, 31 aa, Artificial Sequence
  Synthetic polypeptide
DQPGKHGKTPSLQKLQKIGFGVKWVGVWEWG

SEQ ID NO: 14878 - protein, 835 aa, Artificial Sequence
  Synthetic polypeptide
HFGRPRWANGLSPGVKTSLGNMAKPHLYRNYRKLDLELNGLESGNGDEEAVDREPRRLSSRRSVLTSPVANGVNLDYDGLGKTCRSLPSLKKTLAGDSSSDCSRGSHNGQVWDPQCAPRKDRQVHLTHFELEGLRCLVDKLESLPLHKKCVPTGIEDEDALIADVKILLEELANSDPKLALTGVPIVQWPKRDKLKFPTRPKVRVPTIPITKPHTMKPAPRLTPVRPAAASPIVSGARRRRVRCRKCKACVQGECGVCHYCRDMKKFGGPGRMKQSCVLRQCLAPRLPHSVTCSLCGEVDQNEETQDFEKKLMECCICNEIVHPGCLQMDGEGLLNEELPNCWECPKCYQEDSSEKAQKRKMEESDEEAVQAKVLRPLRSCDEPLTPPPHSPTSMLQLIHDPVSPRGMVTRSSPGAGPSDHHSASRDERFKRRQLLRLQATERTMVREKENNPSGKKELSEVEKAKIRGSYLTVTLQRPTKELHGTSIVPKLQAITASSANLRHSPRVLVQHCPARTPQRGDEEGLGGEEEEEEEEEEEDDSAEEGGAARLNGRGSWAQDGDESWMQREVWMSVFRYLSRRELCECMRVCKTWYKWCCDKRLWTKIDLSRCKAIVPQALSGIIKRQPVSLDLSWTNISKKQLTWLVNRLPGLKDLLLAGCSWSAVSALSTSSCPLLRTLDLRWAVGIKDPQIRDLLTPPADKPGQDNRSKLRNMTDFRLAGLDITDATLRLIIRHMPLLSRLDLSHCSHLTDQSSNLLTAVGSSTRYSLTELNMAGCNKLTDQTLIYLRRIANVTLIDLRGCKQITRKACEHFISDLSINSLYCLSDEKLIQKIS

SEQ ID NO: 14879 - protein, 44 aa, Artificial Sequence
  Synthetic polypeptide
GRAWWLTPVIPALWEAKERRSLETTPWARTASCMATCPRWATPS

SEQ ID NO: 14880 - protein, 97 aa, Artificial Sequence
  Synthetic polypeptide
SQHFGRPRSADHLRLRPGQGLHHAWLHVQDGQPLPDPVAAAVLLPVPQPPRVAGRGRGPAEPADHGGDPVGGGDADQGAQVPAPQDPRWETVHFAVR

SEQ ID NO: 14881 - protein, 23 aa, Artificial Sequence
  Synthetic polypeptide
TVRSTKAGPRQETLQHQTVENLH

SEQ ID NO: 14882 - protein, 201 aa, Artificial Sequence
  Synthetic polypeptide
RLCAPRRRGPGKRRYNIKLWKTFTDCFNCLPIAAIVDEKIFCCHGGLSPDLQSMEQIRRIMRPTDVPDQGLLCDLLWSDPDKDVQGWGENDRGVSFTFGAEVVAKFLHKHDLDLICRAHQVVEDGYEFFAKRQLVTLFSAPNYCGEFDNAGAMMSVDETLMCSFQILKPADKNKGKYGQFSGLNPGGRPITPPRNSAKAKK

SEQ ID NO: 14883 - protein, 34 aa, Artificial Sequence
  Synthetic polypeptide
DCALHEGGAQARDATTSNCGKPSLTASTACPSRP

SEQ ID NO: 14884 - protein, 467 aa, Artificial Sequence
  Synthetic polypeptide
GAVWCRDAAVGLATDRPGLKLDLLLLTTAPKKTSFGSLKDEDRIFTNLYGRHDWRLKGSLSRGDWYKTKEILLKGPDWILGEIKTSGLRGRGGAGFPTGLKWSFMNKPSDGRPKYLVVNADEGEPGTCKDREILRHDPHKLLEGCLVGGRAMGARAAYIYIRGEFYNEASNLQVAIREAYEAGLIGKNACGSGYDFDVFVVRGAGAYICGEETALIESIEGKQGKPRLKPPFPADVGVFGCPTTVANVETVAVSPTICRRGGTWFAGFGRERNSGTKLFNISGHVNHPCTVEEEMSVPLKELIEKHAGGVTGGWDNLLAVIPGGSSTPLIPKSVCETVLMDFDALVQAQTGLGTAAVIVMDRSTDIVKAIARLIEFYKHESCGQCTPCREGVDWMNKVMARFVRGDARPAEIDSLWEISKQIEGHTICALGDGAAWPVQGLIRHFRPELEERMQRFAQQHQARQAAS

SEQ ID NO: 14885 - protein, 33 aa, Artificial Sequence
  Synthetic polypeptide
CSCGFGHRQTWAQIGPAAFDYSTQENLIWLAEG

SEQ ID NO: 14886 - protein, 38 aa, Artificial Sequence
  Synthetic polypeptide
GAVWCRDAAVGLATDRPGLKLDLLLLTTAPKKTSFGSL

SEQ ID NO: 14887 - protein, 31 aa, Artificial Sequence
  Synthetic polypeptide
CSCGFGHRQTWAQIGPAAFDYSTQENLIWLA

SEQ ID NO: 14888 - protein, 181 aa, Artificial Sequence
  Synthetic polypeptide
GAVWCRDAAVGLATDRPGLKLDLLLLTTAPKKTSFGSLKDEDRIFTNLLKGSLSRGDWYKTKEILLKGPDWILGEIKTSGLRGRGGAGFPTGLKWSFMNKPSDGRPKYLVVNADEGEPGTCKDREILRHDPHKLLEGCLVGGRAMGARAAYIYIRGEFYNEASNLQVAIREAYEAGLIGKN

SEQ ID NO: 14889 - protein, 790 aa, Artificial Sequence
  Synthetic polypeptide
SPHFGRPSAFPSRSSRHFSKSDSFSHNNPVRFRPIKGRQEELKEVIERFKKDEHLEKAFKCLTSGEWARHYFLNKNKMQEKLFKEHVFIYLRMFATDSGFEILPCNRYSSEQNGAKIVATKEWKRNDKIELLVGCIAELSEIEENMLLRHGENDFSVMYSTRKNCAQLWLGPAAFINHDCRPNCKFVSTGRDTACVKALRDIEPGEEISCYYGDGFFGENNEFCECYTCERRGTGAFKSRVGLPAPAPVINSKYGLRETDKRLNRLKKLGDSSKNSDSQSVSSNTDADTTQEKNNATSNRKSSVGVKKNSKSRTLTRQSMSRIPASSNSTSSKLTHINNSRVPKKLKKPAKPLLSKIKLRNHCKRLEQKNASRKLEMGNLVLKEPKVVLYKNLPIKKDKEPEGPAQAAVASGCLTRHAAREHRQNPVRGAHSQGESSPCTYITRRSVRTRTNLKEASDIKLEPNTLNGYKSSVTEPCPDSGEQLQPAPVLQEEELAHETAQKGEAKCHKSDTGMSKKKSRQGKLVKQFAKIEESTPVHDSPGKDDAVPDLMGPHSDQGEHSGTVGVPVSYTDCAPSPVGCSVVTSDSFKTKDSFRTAKSKKKRRITRYDAQLILENNSGIPKLTLRRRHDSSSKTNDQENDGMNSSKISIKLSKDHDNDNNLYVAKLNNGFNSGSGSSSTKLKIQLKRDEENRGSYTEGLHENGVCCSDPLSLLESRMEVDDYSQYEEESTDDSSSSEGDEEEDDYDDDFEDDFIPLPPAKRLRLIVGKDSIDIDISSRRREDQSLRLNA

SEQ ID NO: 14890 - protein, 38 aa, Artificial Sequence
  Synthetic polypeptide
PGMVAHACNPHTLGGQAPFLRGAQGIFQNLTVFLTTTL

SEQ ID NO: 14891 - protein, 29 aa, Artificial Sequence
  Synthetic polypeptide
QAWWLTPVIPTLWEAKRLSFEELKAFFKI

SEQ ID NO: 14892 - protein, 183 aa, Artificial Sequence
  Synthetic polypeptide
SPHFGRPSAFPSRSSRHFSKSDSFSHNNPVRFRPIKGRQEELKEVIERFKKDEHLEKAFKCLTSGEWARHYFLNKNKMQEKLFKEHVFIYLRMFATDSGFEILPCNRYSSEQNGAKIVATKEWKRNDKIELLVGCIAELSEIEENMLLRHGENDFSVMYSTRKNCAQLWLGPAAFINHDLINS

SEQ ID NO: 14893 - protein, 64 aa, Artificial Sequence
  Synthetic polypeptide
SPHFGRPSAFPSRSSRHFSKSDSFSHNNPVSGETEKPNSKKTWEVSLWKEWGTDLGLLKEGRKN

SEQ ID NO: 14894 - protein, 298 aa, Artificial Sequence
  Synthetic polypeptide
SPHFGRPSAFPSRSSRHFSKSDSFSHNNPVRFRPIKGRQEELKEVIERFKKDEHLEKAFKCLTSGEWARHYFLNKNKMQEKLFKEHVFIYLRMFATDSGFEILPCNRYSSEQNGAKIVATKEWKRNDKIELLVGCIAELSEIEENMLLRHGENDFSVMYSTRKNCAQLWLGPAAFINHDCRPNCKFVSTGRDTACVKALRDIEPGEEISCYYGDGFFGENNEFCECYTCERRGTGAFKSRVGLPAPAPVINSKYGLRETDKRLNRLKKLGDSSKNSDSQSVSSNTDADTTQEKNNASK

SEQ ID NO: 14895 - protein, 307 aa, Artificial Sequence
  Synthetic polypeptide
SPHFGRPSAFPSRSSRHFSKSDSFSHNNPVRFRPIKGRQEELKEVIERFKKDEHLEKAFKCLTSGEWARHYFLNKNKMQEKLFKEHVFIYLRMFATDSGFEILPCNRYSSEQNGAKIVATKEWKRNDKIELLVGCIAELSEIEENMLLRHGENDFSVMYSTRKNCAQLWLGPAAFINHDCRPNCKFVSTGRDTACVKALRDIEPGEEISCYYGDGFFGENNEFCECYTCERRGTGAFKSRVGLPAPAPVINSKYGLRETDKRLNRLKKLGDSSKNSDSQSVSSNTDADTTQEKNNAKNPEEKGRCFP

SEQ ID NO: 14896 - protein, 96 aa, Artificial Sequence
  Synthetic polypeptide
SPHFGRPSAFPSRSSRHFSKSDSFSHNNPVRFRPIKGRQEELKEVIERFKKDEHLEKAFKCLTSGEWARHYFLNKNKMQEKLFKEHVFIYLRMFAT

SEQ ID NO: 14897 - protein, 76 aa, Artificial Sequence
  Synthetic polypeptide
SPHFGRPSAFPSRSSRHFSKSDSFSHNNPVRFRPIKGRQEELKEVIERFKKDEHLEKAFKCLTSGEWARHYFLNKN

SEQ ID NO: 14898 - protein, 23 aa, Artificial Sequence
  Synthetic polypeptide
SPHFGRPSAFPSRSSRHFSKSDS

SEQ ID NO: 14899 - protein, 31 aa, Artificial Sequence
  Synthetic polypeptide
PGMVAHACNPHTLGGQAPFLRGAQGIFQNLT

SEQ ID NO: 14900 - protein, 61 aa, Artificial Sequence
  Synthetic polypeptide
SQHSGRPRRADHLSPGIQDHTGQHGTCTGQTGVRRPGLSGQGWMAAPGRSLWTRTFTGPMD

SEQ ID NO: 14901 - protein, 19 aa, Artificial Sequence
  Synthetic polypeptide
VQEFKTTLGNMVHVLDRLG

SEQ ID NO: 14902 - protein, 1484 aa, Artificial Sequence
  Synthetic polypeptide
GCWLRPVIPALWEAKAGRSPESRNSRPHWATWYMYWTDWGETPRIERAGMDGSTRKIIVDSDIYWPNGLTIDLEEQKLYWADAKLSFIHRANLDGSFRQKVVEGSLTHPFALTLSGDTLYWTDWQTRSIHACNKRTGGKRKEILSALYSPMDIQVLSQERQPFFHTRCEEDNGGCSHLCLLSPSEPFYTCACPTGVQLQDNGRTCKAGAEEVLLLARRTDLRRISLDTPDFTDIVLQVDDIRHAIAIDYDPLEGYVYWTDDEVRAIRRAYLDGSGAQTLVNTEINDPDGIAVDWVARNLYWTDTGTDRIEVTRLNGTSRKILVSEDLDEPRAIALHPVMGLMYWTDWGENPKIECANLDGQERRVLVNASLGWPNGLALDLQEGKLYWGDAKTDKIEVINVDGTKRRTLLEDKLPHIFGFTLLGDFIYWTDWQRRSIERVHKVKASRDVIIDQLPDLMGLKAVNVAKVVGTNPCADRNGGCSHLCFFTPHATRCGCPIGLELLSDMKTCIVPEAFLVFTSRAAIHRISLETNNNDVAIPLTGVKEASALDFDVSNNHIYWTDVSLKTISRAFMNGSSVEHVVEFGLDYPEGMAVDWMGKNLYWADTGTNRIEVARLDGQFRQVLVWRDLDNPRSLALDPTKGYIYWTEWGGKPRIVRAFMDGTNCMTLVDKVGRANDLTIDYADQRLYWTDLDTNMIESSNMLGQERVVIADDLPHPFGLTQYSDYIYWTDWNLHSIERADKTSGRNRTLIQGHLDFVMDILVFHSSRQDGLNDCMHNNGQCGQLCLAIPGGHRCGCASHYTLDPSSRNCSPPTTFLLFSQKSAISRMIPDDQHSPDLILPLHGLRNVKAIDYDPLDKFIYWVDGRQNIKRAKDDGTQPFVLTSLSQGQNPDRQPHDLSIDIYSRTLFWTCEATNTINVHRLSGEAMGVVLRGDRDKPRAIVVNAERGYLYFTNMQDRAAKIERAALDGTEREVLFTTGLIRPVALVVDNTLGKLFWVDADLKRIESCDLSGANRLTLEDANIVQPLGLTILGKHLYWIDRQQQMIERVEKTTGDKRTRIQGRVAHLTGIHAVEEVSLEEFSAHPCARDNGGCSHICIAKGDGTPRCSCPVHLVLLQNLLTCGEPPTCSPDQFACATGEIDCIPGAWRCDGFPECDDQSDEEGCPVCSAAQFPCARGQCVDLRLRCDGEADCQDRSDEADCDAICLPNQFRCASGQCVLIKQQCDSFPDCIDGSDELMCEITKPPSDDSPAHSSAIGPVIGIILSLFVMGGVYFVCQRVVCQRYAGANGPFPHEYVSGTPHVPLNFIAPGGSQHGPFTGIACGKSMMSSVSLMGGRGGVPLYDRNHVTGASSSSSSSTKATLYPPILNPPPSPATDPSLYNMDMFYSSNIPATARPYRPYIIRGMAPPTTPCSTDVCDSDYSASRWKASKYYLDLNSDSDPYPPPPTPHSQYLSAEDSCPPSPATERSYFHLFPPPPSPCTDSS

SEQ ID NO: 14903 - protein, 340 aa, Artificial Sequence
  Synthetic polypeptide
GCWLRPVIPALWEAKAGRSPESRNSRPHWATWYMYWTDWGETPRIERAGMDGSTRKIIVDSDIYWPNGLTIDLEEQKLYWADAKLSFIHRANLDGSFRQKVVEGSLTHPFALTLSGDTLYWTDWQTRSIHACNKRTGGKRKEILSALYSPMDIQVLSQERQPFFHTRCEEDNGGCSHLCLLSPSEPFYTCACPTGVQLQDNGRTCKAGAEEVLLLARRTDLRRISLDTPDFTDIVLQVDDIRHAIAIDYDPLEGYVYWTDDEVRAIRRAYLDGSGAQTLVNTEINDPDGIAVDWVARNLYWTDTGTDRIEVTRLNGTSRKILVSEDLDEPRAIALHPVMG

SEQ ID NO: 14904 - protein, 73 aa, Artificial Sequence
  Synthetic polypeptide
FKSVVPATREAELGGLLEPRRSRGGAAAGPADGPTEDLAGHAGLHRHRAAGGRHPARHCHRLRPARGLCLLDR

SEQ ID NO: 14905 - protein, 1301 aa, Artificial Sequence
  Synthetic polypeptide
GCGDSSLWSQLLGKLSWEDCLSPGGAEEVLLLARRTDLRRISLDTPDFTDIVLQVDDIRHAIAIDYDPLEGYVYWTDDEVRAIRRAYLDGSGAQTLVNTEINDPDGIAVDWVARNLYWTDTGTDRIEVTRLNGTSRKILVSEDLDEPRAIALHPVMGLMYWTDWGENPKIECANLDGQERRVLVNASLGWPNGLALDLQEGKLYWGDAKTDKIEVINVDGTKRRTLLEDKLPHIFGFTLLGDFIYWTDWQRRSIERVHKVKASRDVIIDQLPDLMGLKAVNVAKVVGTNPCADRNGGCSHLCFFTPHATRCGCPIGLELLSDMKTCIVPEAFLVFTSRAAIHRISLETNNNDVAIPLTGVKEASALDFDVSNNHIYWTDVSLKTISRAFMNGSSVEHVVEFGLDYPEGMAVDWMGKNLYWADTGTNRIEVARLDGQFRQVLVWRDLDNPRSLALDPTKGYIYWTEWGGKPRIVRAFMDGTNCMTLVDKVGRANDLTIDYADQRLYWTDLDTNMIESSNMLGQERVVIADDLPHPFGLTQYSDYIYWTDWNLHSIERADKTSGRNRTLIQGHLDFVMDILVFHSSRQDGLNDCMHNNGQCGQLCLAIPGGHRCGCASHYTLDPSSRNCSPPTTFLLFSQKSAISRMIPDDQHSPDLILPLHGLRNVKAIDYDPLDKFIYWVDGRQNIKRAKDDGTQPFVLTSLSQGQNPDRQPHDLSIDIYSRTLFWTCEATNTINVHRLSGEAMGVVLRGDRDKPRAIVVNAERGYLYFTNMQDRAAKIERAALDGTEREVLFTTGLIRPVALVVDNTLGKLFWVDADLKRIESCDLSGANRLTLEDANIVQPLGLTILGKHLYWIDRQQQMIERVEKTTGDKRTRIQGRVAHLTGIHAVEEVSLEEFSAHPCARDNGGCSHICIAKGDGTPRCSCPVHLVLLQNLLTCGEPPTCSPDQFACATGEIDCIPGAWRCDGFPECDDQSDEEGCPVCSAAQFPCARGQCVDLRLRCDGEADCQDRSDEADCDAICLPNQFRCASGQCVLIKQQCDSFPDCIDGSDELMCEITKPPSDDSPAHSSAIGPVIGIILSLFVMGGVYFVCQRVVCQRYAGANGPFPHEYVSGTPHVPLNFIAPGGSQHGPFTGIACGKSMMSSVSLMGGRGGVPLYDRNHVTGASSSSSSSTKATLYPPILNPPPSPATDPSLYNMDMFYSSNIPATARPYRPYIIRGMAPPTTPCSTDVCDSDYSASRWKASKYYLDLNSDSDPYPPPPTPHSQYLSAEDSCPPSPATERSYFHLFPPPPSPCTDSS

SEQ ID NO: 14906 - protein, 47 aa, Artificial Sequence
  Synthetic polypeptide
AQEEPRRCCCWPGGRTYGGSRWTRRTSPTSCCRWTTSGTPLPSTTTR

SEQ ID NO: 14907 - protein, 157 aa, Artificial Sequence
  Synthetic polypeptide
GCGDSSLWSQLLGKLSWEDCLSPGGAEEVLLLARRTDLRRISLDTPDFTDIVLQVDDIRHAIAIDYDPLEGYVYWTDDEVRAIRRAYLDGSGAQTLVNTEINDPDGIAVDWVARNLYWTDTGTDRIEVTRLNGTSRKILVSEDLDEPRAIALHPVMG

SEQ ID NO: 14908 - protein, 47 aa, Artificial Sequence
  Synthetic polypeptide
SYEEPRRCCCWPGGRTYGGSRWTRRTSPTSCCRWTTSGTPLPSTTTR

SEQ ID NO: 14909 - protein, 66 aa, Artificial Sequence
  Synthetic polypeptide
DRLHGLCDLCSHMRSRGGAAAGPADGPTEDLAGHAGLHRHRAAGGRHPARHCHRLRPARGLCLLDR

SEQ ID NO: 14910 - protein, 47 aa, Artificial Sequence
  Synthetic polypeptide
GEEEPRRCCCWPGGRTYGGSRWTRRTSPTSCCRWTTSGTPLPSTTTR

SEQ ID NO: 14911 - protein, 55 aa, Artificial Sequence
  Synthetic polypeptide
ARRSRGGAAAGPADGPTEDLAGHAGLHRHRAAGGRHPARHCHRLRPARGLCLLDR

SEQ ID NO: 14912 - protein, 1279 aa, Artificial Sequence
  Synthetic polypeptide
RGGAEEVLLLARRTDLRRISLDTPDFTDIVLQVDDIRHAIAIDYDPLEGYVYWTDDEVRAIRRAYLDGSGAQTLVNTEINDPDGIAVDWVARNLYWTDTGTDRIEVTRLNGTSRKILVSEDLDEPRAIALHPVMGLMYWTDWGENPKIECANLDGQERRVLVNASLGWPNGLALDLQEGKLYWGDAKTDKIEVINVDGTKRRTLLEDKLPHIFGFTLLGDFIYWTDWQRRSIERVHKVKASRDVIIDQLPDLMGLKAVNVAKVVGTNPCADRNGGCSHLCFFTPHATRCGCPIGLELLSDMKTCIVPEAFLVFTSRAAIHRISLETNNNDVAIPLTGVKEASALDFDVSNNHIYWTDVSLKTISRAFMNGSSVEHVVEFGLDYPEGMAVDWMGKNLYWADTGTNRIEVARLDGQFRQVLVWRDLDNPRSLALDPTKGYIYWTEWGGKPRIVRAFMDGTNCMTLVDKVGRANDLTIDYADQRLYWTDLDTNMIESSNMLGQERVVIADDLPHPFGLTQYSDYIYWTDWNLHSIERADKTSGRNRTLIQGHLDFVMDILVFHSSRQDGLNDCMHNNGQCGQLCLAIPGGHRCGCASHYTLDPSSRNCSPPTTFLLFSQKSAISRMIPDDQHSPDLILPLHGLRNVKAIDYDPLDKFIYWVDGRQNIKRAKDDGTQPFVLTSLSQGQNPDRQPHDLSIDIYSRTLFWTCEATNTINVHRLSGEAMGVVLRGDRDKPRAIVVNAERGYLYFTNMQDRAAKIERAALDGTEREVLFTTGLIRPVALVVDNTLGKLFWVDADLKRIESCDLSGANRLTLEDANIVQPLGLTILGKHLYWIDRQQQMIERVEKTTGDKRTRIQGRVAHLTGIHAVEEVSLEEFSAHPCARDNGGCSHICIAKGDGTPRCSCPVHLVLLQNLLTCGEPPTCSPDQFACATGEIDCIPGAWRCDGFPECDDQSDEEGCPVCSAAQFPCARGQCVDLRLRCDGEADCQDRSDEADCDAICLPNQFRCASGQCVLIKQQCDSFPDCIDGSDELMCEITKPPSDDSPAHSSAIGPVIGIILSLFVMGGVYFVCQRVVCQRYAGANGPFPHEYVSGTPHVPLNFIAPGGSQHGPFTGIACGKSMMSSVSLMGGRGGVPLYDRNHVTGASSSSSSSTKATLYPPILNPPPSPATDPSLYNMDMFYSSNIPATARPYRPYIIRGMAPPTTPCSTDVCDSDYSASRWKASKYYLDLNSDSDPYPPPPTPHSQYLSAEDSCPPSPATERSYFHLFPPPPSPCTDSS

SEQ ID NO: 14913 - protein, 135 aa, Artificial Sequence
  Synthetic polypeptide
RGGAEEVLLLARRTDLRRISLDTPDFTDIVLQVDDIRHAIAIDYDPLEGYVYWTDDEVRAIRRAYLDGSGAQTLVNTEINDPDGIAVDWVARNLYWTDTGTDRIEVTRLNGTSRKILVSEDLDEPRAIALHPVMG

SEQ ID NO: 14914 - protein, 351 aa, Artificial Sequence
  Synthetic polypeptide
MAAMACTCSLAALEAEAFSDYQMQQMTSNFIDQFGFNDEKFADQDDIGNVSFDRVSDINFTLNTNESGNIALFEACCKERIQQFDDGGSDEEDIWEEKHIAFTPESQRRSSSGSTDSEESTDSEEEDGAKQDLFEPSSANTEDKMEVDLSEPPNWSANFDVPMETTHGAPLDSVGSDVWSTEEPMPTKETGWASFSEFTSSLSTKDSLRSNSPVEMETSTEPMDPLTPSAAALAVQPEAAGSVAMEASSDGEEDAESTDKVTETVMNGGMKETLSLTVDAKTETAVFKRLLGGCSEEGKLSTSQDAACKDAEECPETAEAKCAAPRPPSSSPEQRTGQPSAPGDTSVNGPV

SEQ ID NO: 14915 - protein, 25 aa, Artificial Sequence
  Synthetic polypeptide
WLRWHAPVVWLLWRLRPFLIIRCNK

SEQ ID NO: 14916 - protein, 345 aa, Artificial Sequence
  Synthetic polypeptide
MAAMACTCSLAALEAEAFSDYQMQQMTSNFIDQFGFNDEKFADQDDIGNVSFDRVSDINFTLNTNESGNIALFEACCKERIQQFDDGGSDEEDIWEEKHIAFTPESQRRSSSGSTDSEESTDSEEEDGAKQDLFEPSSANTEDKMEVDLSEPPNWSANFDVPMETTHGAPLDSVGSDVWSTEEPMPTKETGWASFSEFTSSLSTKDSLRSNSPVEMETSTEPMDPLTPSAAALAVQPEAAGSVAMEASSDGEEDAESTDKVTETVMNGGMKETLSLTVDAKTETAVFKSEEGKLSTSQDAACKDAEECPETAEAKCAAPRPPSSSPEQRTGQPSAPGDTSVNGPV

SEQ ID NO: 14917 - protein, 351 aa, Artificial Sequence
  Synthetic polypeptide
MAAMACTCSLAALEAEAFSDYQMQQMTSNFIDQFGFNDEKFADQDDIGNVSFDRVSDINFTLNTNESGNIALFEACCKERIQQFDDGGSDEEDIWEEKHIAFTPESQRRSSSGSTDSEESTDSEEEDGAKQDLFEPSSANTEDKMEVDLSEPPNWSANFDVPMETTHGAPLDSVGSDVWSTEEPMPTKETGWASFSEFTSSLSTKDSLRSNSPVEMETSTEPMDPLTPSAAALAVQPEAAGSVAMEASSDGEEDAESTDKVTETVMNGGMKETLSLTVDAKTETAVFKRVLKSYREEGKLSTSQDAACKDAEECPETAEAKCAAPRPPSSSPEQRTGQPSAPGDTSVNGPV

SEQ ID NO: 14918 - protein, 343 aa, Artificial Sequence
  Synthetic polypeptide
MAAMACTCSLAALEAEAFSDYQMQQMTSNFIDQFGFNDEKFADQDDIGNVSFDRVSDINFTLNTNESGNIALFEACCKERIQQFDDGGSDEEDIWEEKHIAFTPESQRRSSSGSTDSEESTDSEEEDGAKQDLFEPSSANTEDKMEVDLSEPPNWSANFDVPMETTHGAPLDSVGSDVWSTEEPMPTKETGWASFSEFTSSLSTKDSLRSNSPVEMETSTEPMDPLTPSAAALAVQPEAAGSVAMEASSDGEEDAESTDKVTETVMNGGMKETLSLTVDAKTETAVFKSEEGKLSTSQDAACKDAEECPETAEAKCAAPRPPSSSPEQSGVEIPALPGQWSQQ

SEQ ID NO: 14919 - protein, 53 aa, Artificial Sequence
  Synthetic polypeptide
LVRKGNCLPLKMLLVKTQRSVPRLQRRSARRPGLPAAVPSRGLANQAHQVTLQ

SEQ ID NO: 14920 - protein, 61 aa, Artificial Sequence
  Synthetic polypeptide
ISLTCEEGKLSTSQDAACKDAEECPETAEAKCAAPRPPSSSPEQRTGQPSAPGDTSVNGPV

SEQ ID NO: 14921 - protein, 56 aa, Artificial Sequence
  Synthetic polypeptide
LVRKGNCLPLKMLLVKTQRSVPRLQRRSARRPGLPAAVPSRVVWRFQHSQDSGVSS

SEQ ID NO: 14922 - protein, 59 aa, Artificial Sequence
  Synthetic polypeptide
ISLTCEEGKLSTSQDAACKDAEECPETAEAKCAAPRPPSSSPEQSGVEIPALPGQWSQQ

SEQ ID NO: 14923 - protein, 188 aa, Artificial Sequence
  Synthetic polypeptide
HAPVVPATQEAEDMGKFCLTYEASMTRLFREGRTETVRSCTTESCDFVRAMVDPAQTVEQRLKLFKLASEKHQHMYRLAMTGSGIDRHLFCLYVVSKYLAVESPFLKEVLSEPWRLSTSQTPQQQVELFDLENNPEYVSSGGGFGPVADDGYGVSYILVGENLINFHISSKFSCPETGIISQGPSSDT

SEQ ID NO: 14924 - protein, 20 aa, Artificial Sequence
  Synthetic polypeptide
SQLLRRLRTWASFASHTRPP

SEQ ID NO: 14925 - protein, 205 aa, Artificial Sequence
  Synthetic polypeptide
HAPVVPATQEAEDMGKFCLTYEASMTRLFREGRTETVRSCTTESCDFVRAMVDPAQTVEQRLKLFKLASEKHQHMYRLAMTGSGIDRHLFCLYVVSKYLAVESPFLKEVLSEPWRLSTSQTPQQQVELFDLENNPEYVSSGGGFGPVADDGYGVSYILVGENLINFHISSKFSCPETDSHRFGRHLKEAMTDIITLFGLSSNSKK

SEQ ID NO: 14926 - protein, 35 aa, Artificial Sequence
  Synthetic polypeptide
SQHSGRPRWADHEVRRWRPSWLTRLVGRPFRSGTA

SEQ ID NO: 14927 - protein, 3 aa, Artificial Sequence
  Synthetic polypeptide
HVW

SEQ ID NO: 14928 - protein, 372 aa, Artificial Sequence
  Synthetic polypeptide
GQKMETILANTSGRTALQIGDSLNTEKATLIVVHTDGSIVETTGLKGPAAPLTPGPQSPPTPLAPGQEKGGTKYNWDPSVYDSELPVRCRNISGTLYKNRLGSGWDLKPSRCLLHLCCLLRRHDLITVTPSGQITTSGALTFDRASTVEATAVISESPAQGDVFAGATVQEASVQPPCRASHPEPHYPGYQDSCQIAPFPEAALPTSHPKIVLTSLPALAVPPPTPTKAAPPALVNGLELSEPRSWLYLEEMVNSLLNTAQQLKTLFEQAKHASTYREAATNQAKIHADAERKEVIHPPRLPKVLGLQQSCVNCGREAMSECTGCHKVNYCSTFCQRKDWKDHQHICGQSAAVTVQADEVHVAESVMEKVTV

SEQ ID NO: 14929 - protein, 447 aa, Artificial Sequence
  Synthetic polypeptide
GQKMETILANTSGRTALQIGDSLNTEKATLIVVHTDGSIVETTGLKGPAAPLTPGPQSPPTPLAPGQEKGGTKYNWDPSVYDSELPVRCRNISGTLYKNRLGSGGRGRCIKQGENWYSPTEFEAMAGRASSKDWKRSIRYAGRPLQCLIQDGILNPHAASCTCAACCDDMTLSGPVRLFVPYKRRKKENELPTTPVKKDSPKNITLLPATAATTFTVTPSGQITTSGALTFDRASTVEATAVISESPAQGDVFAGATVQEASVQPPCRASHPEPHYPGYQDSCQIAPFPEAALPTSHPKIVLTSLPALAVPPPTPTKAAPPALVNGLELSEPRSWLYLEEMVNSLLNTAQQLKTLFEQAKHASTYREAATNQAKIHADAERKEQSCVNCGREAMSECTGCHKVNYCSTFCQRKDWKDHQHICGQSAAVTVQADEVHVAESVMEKVTV

SEQ ID NO: 14930 - protein, 374 aa, Artificial Sequence
  Synthetic polypeptide
SQHSGRPRWADHESGRTALQIGDSLNTEKATLIVVHTDGSIVETTGLKGPAAPLTPGPQSPPTPLAPGQEKGGTKYNWDPSVYDSELPVRCRNISGTLYKNRLGSGWDLKPSRCLLHLCCLLRRHDLITVTPSGQITTSGALTFDRASTVEATAVISESPAQGDVFAGATVQEASVQPPCRASHPEPHYPGYQDSCQIAPFPEAALPTSHPKIVLTSLPALAVPPPTPTKAAPPALVNGLELSEPRSWLYLEEMVNSLLNTAQQLKTLFEQAKHASTYREAATNQAKIHADAERKEVIHPPRLPKVLGLQQSCVNCGREAMSECTGCHKVNYCSTFCQRKDWKDHQHICGQSAAVTVQADEVHVAESVMEKVTV

SEQ ID NO: 14931 - protein, 33 aa, Artificial Sequence
  Synthetic polypeptide
MGAVAPACNPSTLGGRDGQIMSLVGRPFRSGTA

SEQ ID NO: 14932 - protein, 449 aa, Artificial Sequence
  Synthetic polypeptide
SQHSGRPRWADHESGRTALQIGDSLNTEKATLIVVHTDGSIVETTGLKGPAAPLTPGPQSPPTPLAPGQEKGGTKYNWDPSVYDSELPVRCRNISGTLYKNRLGSGGRGRCIKQGENWYSPTEFEAMAGRASSKDWKRSIRYAGRPLQCLIQDGILNPHAASCTCAACCDDMTLSGPVRLFVPYKRRKKENELPTTPVKKDSPKNITLLPATAATTFTVTPSGQITTSGALTFDRASTVEATAVISESPAQGDVFAGATVQEASVQPPCRASHPEPHYPGYQDSCQIAPFPEAALPTSHPKIVLTSLPALAVPPPTPTKAAPPALVNGLELSEPRSWLYLEEMVNSLLNTAQQLKTLFEQAKHASTYREAATNQAKIHADAERKEQSCVNCGREAMSECTGCHKVNYCSTFCQRKDWKDHQHICGQSAAVTVQADEVHVAESVMEKVTV

SEQ ID NO: 14933 - protein, 23 aa, Artificial Sequence
  Synthetic polypeptide
ISGDRVLPRFCFCMEMSTAQLHH

SEQ ID NO: 14934 - protein, 111 aa, Artificial Sequence
  Synthetic polypeptide
IPGPCSRRTESLGIGCYQGFAFAWKCLLHSCTTEKDSRKMKVLESLIGMIQKFPYDDPTYDKLHEDLDKIRGKFKQTGLSPSAVMVRPPSYVELAGYMLVLGSAAVQPEMH

SEQ ID NO: 14935 - protein, 42 aa, Artificial Sequence
  Synthetic polypeptide
KSRFQGLAPDVLNLWGSGATKVLLLHGNVYCTVAPLRRTAER

SEQ ID NO: 14936 - protein, 98 aa, Artificial Sequence
  Synthetic polypeptide
IPGPCSRRTESLGIGCYQGFAFAWKCLLHSCTTEKDSRKMKVLESLIGMIQKFPYDDPTYDKLHEDLDKIRGKFKQFCSLLNVQPDFKISAEGSGLSF

SEQ ID NO: 14937 - protein, 40 aa, Artificial Sequence
  Synthetic polypeptide
IPGPCSRRTESLGIGCYQGFAFAWKCLLHSCTTEKDSRKM

SEQ ID NO: 14938 - protein, 85 aa, Artificial Sequence
  Synthetic polypeptide
IPGPCSRRTESLGIGCYQGFAFAWKCLLHSCTTEKDSRKMKVLESLIGMIQKFPYDDPTYDKLHEDLDKIRGKFKQVRALCVSSC

SEQ ID NO: 14939 - protein, 37 aa, Artificial Sequence
  Synthetic polypeptide
IPGPCSRRTESLGIGCYQGFAFAWKCLLHSCTTEKDR

SEQ ID NO: 14940 - protein, 40 aa, Artificial Sequence
  Synthetic polypeptide
KSRFQGLAPDVLNLWGSGATKVLLLHGNVYCTVAPLRRTG

SEQ ID NO: 14941 - protein, 21 aa, Artificial Sequence
  Synthetic polypeptide
ISGGFMGKGIGKAMKKAVVWV

SEQ ID NO: 14942 - protein, 23 aa, Artificial Sequence
  Synthetic polypeptide
IPGPCSRRTESLGVSWGRVSGRL

SEQ ID NO: 14943 - protein, 149 aa, Artificial Sequence
  Synthetic polypeptide
KSRFQGLAPDVLNLWGFHGEGYREGYEEGSSLGVMEGRQHGTLHGAKIGSEIGCYQGFAFAWKCLLHSCTTEKDSRKMKVLESLIGMIQKFPYDDPTYDKLHEDLDKIRGKFKQTGLSPSAVMVRPPSYVELAGYMLVLGSAAVQPEMH

SEQ ID NO: 14944 - protein, 136 aa, Artificial Sequence
  Synthetic polypeptide
KSRFQGLAPDVLNLWGFHGEGYREGYEEGSSLGVMEGRQHGTLHGAKIGSEIGCYQGFAFAWKCLLHSCTTEKDSRKMKVLESLIGMIQKFPYDDPTYDKLHEDLDKIRGKFKQFCSLLNVQPDFKISAEGSGLSF

SEQ ID NO: 14945 - protein, 123 aa, Artificial Sequence
  Synthetic polypeptide
KSRFQGLAPDVLNLWGFHGEGYREGYEEGSSLGVMEGRQHGTLHGAKIGSEIGCYQGFAFAWKCLLHSCTTEKDSRKMKVLESLIGMIQKFPYDDPTYDKLHEDLDKIRGKFKQVRALCVSSC

SEQ ID NO: 14946 - protein, 69 aa, Artificial Sequence
  Synthetic polypeptide
KSRFQGLAPDVLNLWGFHGEGYREGYEEGSSLGVMEGRQHGTLHGAKIGSEQKDEGLRIIDWNDPEIPL

SEQ ID NO: 14947 - protein, 75 aa, Artificial Sequence
  Synthetic polypeptide
KSRFQGLAPDVLNLWGFHGEGYREGYEEGSSLGVMEGRQHGTLHGAKIGSEIGCYQGFAFAWKCLLHSCTTEKDR

SEQ ID NO: 14948 - protein, 28 aa, Artificial Sequence
  Synthetic polypeptide
ARSGATKVLLLHGNVYCTVAPLRRTAER

SEQ ID NO: 14949 - protein, 21 aa, Artificial Sequence
  Synthetic polypeptide
PDRVLPRFCFCMEMSTAQLHH

SEQ ID NO: 14950 - protein, 99 aa, Artificial Sequence
  Synthetic polypeptide
QIGCYQGFAFAWKCLLHSCTTEKDSRKMKVLESLIGMIQKFPYDDPTYDKLHEDLDKIRGKFKQTGLSPSAVMVRPPSYVELAGYMLVLGSAAVQPEMH

SEQ ID NO: 14951 - protein, 86 aa, Artificial Sequence
  Synthetic polypeptide
QIGCYQGFAFAWKCLLHSCTTEKDSRKMKVLESLIGMIQKFPYDDPTYDKLHEDLDKIRGKFKQFCSLLNVQPDFKISAEGSGLSF

SEQ ID NO: 14952 - protein, 28 aa, Artificial Sequence
  Synthetic polypeptide
QIGCYQGFAFAWKCLLHSCTTEKDSRKM

SEQ ID NO: 14953 - protein, 73 aa, Artificial Sequence
  Synthetic polypeptide
QIGCYQGFAFAWKCLLHSCTTEKDSRKMKVLESLIGMIQKFPYDDPTYDKLHEDLDKIRGKFKQVRALCVSSC

SEQ ID NO: 14954 - protein, 26 aa, Artificial Sequence
  Synthetic polypeptide
ARSGATKVLLLHGNVYCTVAPLRRTG

SEQ ID NO: 14955 - protein, 25 aa, Artificial Sequence
  Synthetic polypeptide
QIGCYQGFAFAWKCLLHSCTTEKDR

SEQ ID NO: 14956 - protein, 135 aa, Artificial Sequence
  Synthetic polypeptide
ARFHGEGYREGYEEGSSLGVMEGRQHGTLHGAKIGSEIGCYQGFAFAWKCLLHSCTTEKDSRKMKVLESLIGMIQKFPYDDPTYDKLHEDLDKIRGKFKQTGLSPSAVMVRPPSYVELAGYMLVLGSAAVQPEMH

SEQ ID NO: 14957 - protein, 19 aa, Artificial Sequence
  Synthetic polypeptide
PGFMGKGIGKAMKKAVVWV

SEQ ID NO: 14958 - protein, 11 aa, Artificial Sequence
  Synthetic polypeptide
QVSWGRVSGRL

SEQ ID NO: 14959 - protein, 122 aa, Artificial Sequence
  Synthetic polypeptide
ARFHGEGYREGYEEGSSLGVMEGRQHGTLHGAKIGSEIGCYQGFAFAWKCLLHSCTTEKDSRKMKVLESLIGMIQKFPYDDPTYDKLHEDLDKIRGKFKQFCSLLNVQPDFKISAEGSGLSF

SEQ ID NO: 14960 - protein, 109 aa, Artificial Sequence
  Synthetic polypeptide
ARFHGEGYREGYEEGSSLGVMEGRQHGTLHGAKIGSEIGCYQGFAFAWKCLLHSCTTEKDSRKMKVLESLIGMIQKFPYDDPTYDKLHEDLDKIRGKFKQVRALCVSSC

SEQ ID NO: 14961 - protein, 55 aa, Artificial Sequence
  Synthetic polypeptide
ARFHGEGYREGYEEGSSLGVMEGRQHGTLHGAKIGSEQKDEGLRIIDWNDPEIPL

SEQ ID NO: 14962 - protein, 61 aa, Artificial Sequence
  Synthetic polypeptide
ARFHGEGYREGYEEGSSLGVMEGRQHGTLHGAKIGSEIGCYQGFAFAWKCLLHSCTTEKDR

SEQ ID NO: 14963 - protein, 40 aa, Artificial Sequence
  Synthetic polypeptide
GQMRWLTPVIPALWEAEAGGSRGFMGKGIGKAMKKAVVWV

SEQ ID NO: 14964 - protein, 23 aa, Artificial Sequence
  Synthetic polypeptide
SQHFGRPRRADHEVSWGRVSGRL

SEQ ID NO: 14965 - protein, 155 aa, Artificial Sequence
  Synthetic polypeptide
PDAVADACNPSTLGGRGGRITRFHGEGYREGYEEGSSLGVMEGRQHGTLHGAKIGSEIGCYQGFAFAWKCLLHSCTTEKDSRKMKVLESLIGMIQKFPYDDPTYDKLHEDLDKIRGKFKQTGLSPSAVMVRPPSYVELAGYMLVLGSAAVQPEMH

SEQ ID NO: 14966 - protein, 142 aa, Artificial Sequence
  Synthetic polypeptide
PDAVADACNPSTLGGRGGRITRFHGEGYREGYEEGSSLGVMEGRQHGTLHGAKIGSEIGCYQGFAFAWKCLLHSCTTEKDSRKMKVLESLIGMIQKFPYDDPTYDKLHEDLDKIRGKFKQFCSLLNVQPDFKISAEGSGLSF

SEQ ID NO: 14967 - protein, 129 aa, Artificial Sequence
  Synthetic polypeptide
PDAVADACNPSTLGGRGGRITRFHGEGYREGYEEGSSLGVMEGRQHGTLHGAKIGSEIGCYQGFAFAWKCLLHSCTTEKDSRKMKVLESLIGMIQKFPYDDPTYDKLHEDLDKIRGKFKQVRALCVSSC

SEQ ID NO: 14968 - protein, 75 aa, Artificial Sequence
  Synthetic polypeptide
PDAVADACNPSTLGGRGGRITRFHGEGYREGYEEGSSLGVMEGRQHGTLHGAKIGSEQKDEGLRIIDWNDPEIPL

SEQ ID NO: 14969 - protein, 81 aa, Artificial Sequence
  Synthetic polypeptide
PDAVADACNPSTLGGRGGRITRFHGEGYREGYEEGSSLGVMEGRQHGTLHGAKIGSEIGCYQGFAFAWKCLLHSCTTEKDR

SEQ ID NO: 14970 - protein, 57 aa, Artificial Sequence
  Synthetic polypeptide
GWARCLTPVIPALWEAEAGGSQVSCRPRISVETFQALLAGGLGPWLRRQVWCPDGQS

SEQ ID NO: 14971 - protein, 429 aa, Artificial Sequence
  Synthetic polypeptide
SQHFGRPRRVDHKSAVGHEYQSKLSKHCSQVDSVRGFGGKFGVQMDRVDQSAVGFEYQGKTEKHASQKDYSSGFGGKYGVQADRVDKSAVGFDYQGKTEKHESQRDYSKGFGGKYGIDKDKVDKSAVGFEYQGKTEKHESQKDYVKGFGGKFGVQTDRQDKCALGWDHQEKLQLHESQKDYSKGFGGKYGVQKDRMDKNASTFEDVTQVSSAYQKTVPVEAVTSKTSNIRANFENLAKEKEQEDRRKAEAERAQRMAKERQEQEEARRKLEEQARAKTQTPPVSPAPQPTEERLPSSPVYEDAASFKAELSYRGPVSGTEPEPVYSMEAADYREASSQQGLAYATEAVYESAEAPGHYPAEDSTYDEYENDLGITAVALYDYQAAGDDEISFDPDDIITNIEMIDDGWWRGVCKGRYGLFPANYVELRQ

SEQ ID NO: 14972 - protein, 61 aa, Artificial Sequence
  Synthetic polypeptide
MGAVSHACNPSTLGGRGGWITSQLSATNISRNFPSTARRWTRSVASEASLVSRWTELISLL

SEQ ID NO: 14973 - protein, 466 aa, Artificial Sequence
  Synthetic polypeptide
SQHFGRPRRVDHKSAVGHEYQSKLSKHCSQVDSVRGFGGKFGVQMDRVDQSAVGFEYQGKTEKHASQKDYSSGFGGKYGVQADRVDKSAVGFDYQGKTEKHESQRDYSKGFGGKYGIDKDKVDKSAVGFEYQGKTEKHESQKDYVKGFGGKFGVQTDRQDKCALGWDHQEKLQLHESQKDYKTGFGGKFGVQSERQDSAAVGFDYKEKLAKHESQQDYSKGFGGKYGVQKDRMDKNASTFEDVTQVSSAYQKTVPVEAVTSKTSNIRANFENLAKEKEQEDRRKAEAERAQRMAKERQEQEEARRKLEEQARAKTQTPPVSPAPQPTEERLPSSPVYEDAASFKAELSYRGPVSGTEPEPVYSMEAADYREASSQQGLAYATEAVYESAEAPGHYPAEDSTYDEYENDLGITAVALYDYQAAGDDEISFDPDDIITNIEMIDDGWWRGVCKGRYGLFPANYVELRQ

SEQ ID NO: 14974 - protein, 550 aa, Artificial Sequence
  Synthetic polypeptide
SQHFGRPRRVDHKSAVGHEYQSKLSKHCSQVDSVRGFGGKFGVQMDRVDQSAVGFEYQGKTEKHASQKDYSSGFGGKYGVQADRVDKSAVGFDYQGKTEKHESQRDYSKGFGGKYGIDKDKVDKSAVGFEYQGKTEKHESQKDYVKGFGGKFGVQTDRQDKCALGWDHQEKLQLHESQKDYSKGFGGKYGVQKDRMDKNASTFEDVTQVSSAYQKTVPVEAVTSKTSNIRANFENLAKEKEQEDRRKAEAERAQRMAKERQEQEEARRKLEEQARAKTQTPPVSPAPQPTEERLPSSPVYEDAASFKAELSYRGPVSGTEPEPVYSMEAADYREASSQQGLAYATEAVYESAEAPGHYPAEDSTYDEYENDLGITAVALYDYQAAGDDEISFDPDDIITNIEMIDDGWWRGVCKGRFRELAFSCVRVALVPIKCSRDLPGQARGLRSALWRVGRKDCPRRGASSRVSLLGRRGLGLMEVNPELSHPEHRSCHVRWEICLCHTVTARRIRKLISFLRSREAGPVPSCSQVGGVSFQKVTWKCLGTWVPECP

SEQ ID NO: 14975 - protein, 157 aa, Artificial Sequence
  Synthetic polypeptide
SQHFGRPRRVDHKSAVGHEYQSKLSKHCSQVDSVRGFGGKFGVQMDRVDQSAVGFEYQGKTEKHASQKDYSSGFGGKYGVQADRVDKSAVGFDYQGKTEKHESQRDYSKGFGGKYGIDKDKVDKSAVGFEYQGKTEKHESQKGVFRFILPSSQQLVM

SEQ ID NO: 14976 - protein, 52 aa, Artificial Sequence
  Synthetic polypeptide
AEAVDPAASPAAAIPAAASPAAVSPCAASLAAASPAAVSPAAVSPCAASVRS

SEQ ID NO: 14977 - protein, 83 aa, Artificial Sequence
  Synthetic polypeptide
RHLLGDECVHSDLVVRKCVAPPHPLLPFSPCGVPTPASPSTMRKTSLRASPEAEQRLWILLPVQLLQSLLLPVQLLCPRVLPV

SEQ ID NO: 14978 - protein, 58 aa, Artificial Sequence
  Synthetic polypeptide
GPPQKLSRGCGSCCQSSCCNPCCCQSSCCVPVCCQSSCCKPCCCQSSCCVPVCCQCKI

SEQ ID NO: 14979 - protein, 68 aa, Artificial Sequence
  Synthetic polypeptide
AEAVDPAASPAAAIPAAASPAAVSPCAASLAAASPAAVSPAAVSPPAAAGPAAPSPAAVSLFAVSTRS

SEQ ID NO: 14980 - protein, 74 aa, Artificial Sequence
  Synthetic polypeptide
GPPQKLSRGCGSCCQSSCCNPCCCQSSCCVPVCCQSSCCKPCCCQSSCCVPSSCCRSCCSKSSCCVPICCQYKI

SEQ ID NO: 14981 - protein, 25 aa, Artificial Sequence
  Synthetic polypeptide
GRARGSGLSSQHFRWLREHLEMAKL

SEQ ID NO: 14982 - protein, 11 aa, Artificial Sequence
  Synthetic polypeptide
VAKRALGDGKA

SEQ ID NO: 14983 - protein, 14 aa, Artificial Sequence
  Synthetic polypeptide
RVAASSPIMRKQMP

SEQ ID NO: 14984 - protein, 608 aa, Artificial Sequence
  Synthetic polypeptide
ENKCLEEKNEILQGKLSQLEEHLSQLQDNPPQEKGEVLGDVLQVEELSKKLADSDQASKVQQQKLKAVQAQGGESQQEAQRLQAQLNELQAQLSQKEQAAEHYKLQMEKAKTHYDAKKQQNQELQEQLRSLEQLQKENKELRAEAERLGHELQQAGLKTKEAEQTCRHLTAQVRSLEAQVAHADQQLRDLGKFQVATDALKSREPQAKPQLDLSIDSLDLSCEEGTPLSITSKLPRTQPDGTSVPGEPASPISQRLPPKVESLESLYFTPIPARSQAPLESSLDSLGDVFLDSGRKTRSARRRTTQIINITMTKKLDVEEPDSANSSFYSTRSAPASQASLRATSSTQSLARLGSPDYGNSALLSLPGYRPTTRSSARRSQAGVSSGAPPGRNSFYMGTCQDEPEQLDDWNRIAELQQRNRVCPPHLKTCYPLESRPSLSLGTITDEEMKTGDPQETLRRASMQPIQIAEGTGITTRQQRKRVSLEPHQGPGTPESKKATSCFPRPMTPRDRHEGRKQSTTEAQKKAAPASTKQADRRQSMAFSILNTPKKLGNSLLRRGASKKALSKASPNTRSGTRRSPRIATTTASAATAAAIGATPRAKGKAKH

SEQ ID NO: 14985 - protein, 71 aa, Artificial Sequence
  Synthetic polypeptide
SVCFSKHPFPKMGVVTSSCLITYYEKTNALKRRTKSFRENFHSWKNTCPSCRITHPRRRARCWVMSCRWKN

SEQ ID NO: 14986 - protein, 1730 aa, Artificial Sequence
  Synthetic polypeptide
ENKCLEEKNEILQGKLSQLEEHLSQLQDNPPQEKGEVLGDVLQLETLKQEAATLAANNTQLQARVEMLETERGQQEAKLLAERGHFEEEKQQLSSLITDLQSSISNLSQAKEELEQASQAHGARLTAQVASLTSELTTLNATIQQQDQELAGLKQQAKEKQAQLAQTLQQQEQASQGLRHQVEQLSSSLKQKEQQLKEVAEKQEATRQDHAQQLATAAEEREASLRERDAALKQLEALEKEKAAKLEILQQQLQVANEARDSAQTSVTQAQREKAELSRKVEELQACVETARQEQHEAQAQVAELELQLRSEQQKATEKERVAQEKDQLQEQLQALKESLKVTKGSLEEEKRRAADALEEQQRCISELKAETRSLVEQHKRERKELEEERAGRKGLEARLQQLGEAHQAETEVLRRELAEAMAAQHTAESECEQLVKEVAAWRERYEDSQQEEAQYGAMFQEQLMTLKEECEKARQELQEAKEKVAGIESHSELQISRQQNELAELHANLARALQQVQEKEVRAQKLADDLSTLQEKMAATSKEVARLETLVRKAGEQQETASRELVKEPARAGDRQPEWLEEQQGRQFCSTQAALQAMEREAEQMGNELERLRAALMESQGQQQEERGQQEREVARLTQERGRAQADLALEKAARAELEMRLQNALNEQRVEFATLQEALAHALTEKEGKDQELAKLRGLEAAQIKELEELRQTVKQLKEQLAKKEKEHASGSGAQSEAAGRTEPTGPKLEALRAEVSKLEQQCQKQQEQADSLERSLEAERASRAERDSALETLQGQLEEKAQELGHSQSALASAQRELAAFRTKVQDHSKAEDEWKAQVARGRQEAERKNSLISSLEEEVSILNRQVLEKEGESKELKRLVMAESEKSQKLEERLRLLQAETASNSARAAERSSALREEVQSLREEAEKQRVASENLRQELTSQAERAEELGQELKAWQEKFFQKEQALSTLQLEHTSTQALVSELLPAKHLCQQLQAEQAAAEKRHREELEQSKQAAGGLRAELLRAQRELGELIPLRQKVAEQERTAQQLRAEKASYAEQLSMLKKAHGLLAEENRGLGERANLGRQFLEVELDQAREKYVQELAAVRADAETRLAEVQREAQSTARELEVMTAKYEGAKVKVLEERQRFQEERQKLTAQVEELSKKLADSDQASKVQQQKLKAVQAQGGESQQEAQRLQAQLNELQAQLSQKEQAAEHYKLQMEKAKTHYDAKKQQNQELQEQLRSLEQLQKENKELRAEAERLGHELQQAGLKTKEAEQTCRHLTAQVRSLEAQVAHADQQLRDLGKFQVATDALKSREPQAKPQLDLSIDSLDLSCEEGTPLSITSKLPRTQPDGTSVPGEPASPISQRLPPKVESLESLYFTPIPARSQAPLESSLDSLGDVFLDSGRKTRSARRRTTQIINITMTKKLDVEEPDSANSSFYSTRSAPASQASLRATSSTQSLARLGSPDYGNSALLSLPGYRPTTRSSARRSQAGVSSGAPPGRNSFYMGTCQDEPEQLDDWNRIAELQQRNRVCPPHLKTCYPLESRPSLSLGTITDEEMKTGDPQETLRRASMQPIQIAEGTGITTRQQRKRVSLEPHQGPGTPESKKATSCFPRPMTPRDRHEGRKQSTTEAQKKAAPASTKQADRRQSMAFSILNTPKKLGNSLLRRGASKKALSKASPNTRSGTRRSPRIATTTASAATAAAIGATPRAKGKAKH

SEQ ID NO: 14987 - protein, 71 aa, Artificial Sequence
  Synthetic polypeptide
SVCFSKHPFPKMGVVTSSCLITYYEKTNALKRRTKSFRENFHSWKNTCPSCRITHPRRRARCWVMSCSWKP

SEQ ID NO: 14988 - protein, 1744 aa, Artificial Sequence
  Synthetic polypeptide
ENKCLEEKNEILQGKLSQLEEHLSQLQDNPPQEKGEVLGDVLQLETLKQEAATLAANNTQLQARVEMLETERGQQEAKLLAERGHFEEEKQQLSSLITDLQSSISNLSQAKEELEQASQAHGARLTAQVASLTSELTTLNATIQQQDQELAGLKQQAKEKQAQLAQTLQQQEQASQGLRHQVEQLSSSLKQKEQQLKEVAEKQEATRQDHAQQLATAAEEREASLRERDAALKQLEALEKEKAAKLEILQQQLQVANEARDSAQTSVTQAQREKAELSRKVEELQACVETARQEQHEAQAQVAELELQLRSEQQKATEKERVAQEKDQLQEQLQALKESLKVTKGSLEEEKRRAADALEEQQRCISELKAETRSLVEQHKRERKELEEERAGRKGLEARLQQLGEAHQAETEVLRRELAEAMAAQHTAESECEQLVKEVAAWRERYEDSQQEEAQYGAMFQEQLMTLKEECEKARQELQEAKEKVAGIESHSELQISRQQNELAELHANLARALQQVQEKEVRAQKLADDLSTLQEKMAATSKEVARLETLVRKAGEQQETASRELVKEPARAGDRQPEWLEEQQGRQFCSTQAALQAMEREAEQMGNELERLRAALMESQGQQQEERGQQEREVARLTQERGRAQADLALEKAARAELEMRLQNALNEQRVEFATLQEALAHALTEKEGKDQELAKLRGLEAAQIKELEELRQTVKQLKEQLAKKEKEHASGSGAQSEAAGRTEPTGPKLEALRAEVSKLEQQCQKQQEQADSLERSLEAERASRAERDSALETLQGQLEEKAQELGHSQSALASAQRELAAFRTKVQDHSKAEDEWKAQVARGRQEAERKNSLISSLEEEVSILNRQVLEKEGESKELKRLVMAESEKSQKLEERLRLLQAETASNSARAAERSSALREEVQSLREEAEKQRVASENLRQELTSQAERAEELGQELKAWQEKFFQKEQALSTLQLEHTSTQALVSELLPAKHLCQQLQAEQAAAEKRHREELEQSKQAAGGLRAELLRAQRELGELIPLRQKVAEQERTAQQLRAEKASYAEQLSMLKKAHGLLAEENRGLGERANLGRQFLEVELDQAREKYVQELAAVRADAETRLAEVQREAQSTARELEVMTAKYEGAKVKVLEERQRFQEERQKLTAQVEQLEVFQREQTKQVEELSKKLADSDQASKVQQQKLKAVQAQGGESQQEAQRLQAQLNELQAQLSQKEQAAEHYKLQMEKAKTHYDAKKQQNQELQEQLRSLEQLQKENKELRAEAERLGHELQQAGLKTKEAEQTCRHLTAQVRSLEAQVAHADQQLRDLGKFQVATDALKSREPQAKPQLDLSIDSLDLSCEEGTPLSITSKLPRTQPDGTSVPGEPASPISQRLPPKVESLESLYFTPIPARSQAPLESSLDSLGDVFLDSGRKTRSARRRTTQIINITMTKKLDVEEPDSANSSFYSTRSAPASQASLRATSSTQSLARLGSPDYGNSALLSLPGYRPTTRSSARRSQAGVSSGAPPGRNSFYMGTCQDEPEQLDDWNRIAELQQRNRVCPPHLKTCYPLESRPSLSLGTITDEEMKTGDPQETLRRASMQPIQIAEGTGITTRQQRKRVSLEPHQGPGTPESKKATSCFPRPMTPRDRHEGRKQSTTEAQKKAAPASTKQADRRQSMAFSILNTPKKLGNSLLRRGASKKALSKASPNTRSGTRRSPRIATTTASAATAAAIGATPRAKGKAKH

SEQ ID NO: 14989 - protein, 480 aa, Artificial Sequence
  Synthetic polypeptide
ENKCLEEKNEILQGKLSQLEEHLSQLQDNPPQEKGEVLGDVLQLETLKQEAATLAANNTQLQARVEMLETERGQQEAKLLAERGHFEEEKQQLSSLITDLQSSISNLSQAKEELEQASQAHGARLTAQVASLTSELTTLNATIQQQDQELAGLKQQAKEKQAQLAQTLQQQEQASQGLRHQVEQLSSSLKQKEQQLKEVAEKQEATRQDHAQQLATAAEEREASLRERDAALKQLEALEKEKAAKLEILQQQLQVANEARDSAQTSVTQAQREKAELSRKVEELQACVETARQEQHEAQAQVAELELQLRSEQQKATEKERVAQEKDQLQEQLQALKESLKVTKGSLEEEKRRAADALEEQQRCISELKAETRSLVEQHKRERKELEEERAGRKGLEARLQQLGEAHQAETEVLRRELAEAMAAQHTAESECEQLVKEVAAWRERYEDSQQEEAQYGAMFQEQLMTLKEECEKARQELQE

SEQ ID NO: 14990 - protein, 320 aa, Artificial Sequence
  Synthetic polypeptide
ENKCLEEKNEILQGKLSQLEEHLSQLQDNPPQEKGEVLGDVLQLETLKQEAATLAANNTQLQARVEMLETERGQQEAKLLAERGHFEEEKQQLSSLITDLQSSISNLSQAKEELEQASQAHGARLTAQVASLTSELTTLNATIQQQDQELAGLKQQAKEKQAQLAQTLQQQEQASQGLRHQVEQLSSSLKQKEQQLKEVAEKQEATRQDHAQQLATAAEEREASLRERDAALKQLEALEKEKAAKLEILQQQLQVANEARDSAQTSVTQAQREKAELSRKVEELQACVETARQEQHEAQAQVAELELQLRSEQQKATEKE

SEQ ID NO: 14991 - protein, 102 aa, Artificial Sequence
  Synthetic polypeptide
GDRDGAGRSSTPAVAQTSHAPSPAHCSPEMPWTSCAATWSLRRCRCGSHWERAGCGPVPSGRGSHRCPSTCPSSTAAGSLLWMCCRRPPGRWRGWRLPPSRR

SEQ ID NO: 14992 - protein, 40 aa, Artificial Sequence
  Synthetic polypeptide
GTGTGPADRQHLQWPRHRTLRLLPTALPRCRGLPARPPGP

SEQ ID NO: 14993 - protein, 369 aa, Artificial Sequence
  Synthetic polypeptide
GQGRGRQIVNTCSGPDIARSVSCPLLSRDAVDFLRGHLVPKEMSLWESLGESWMRPRSEWPREPQVPLYVPKFHSGWEPPVDVLQEAPWEVEGLASAPIEEVSPVSRQSIRNSQKHSPTSEPTPPGDALPPVSSPHTHRGYQPTPAMAKYVKILYDFTARNANELSVLKDEVLEVLEDGRQWWKLRSRSGQAGYVPCNILGEARPEDAGAPFEQAGQKYWGPASPTHKLPPSFPGNKDELMQHMDEVNDELIRKISNIRAQPQRHFRVERSQPVSQPLTYESGPDEVRAWLEAKAFSPRIVENLGILTGPQLFSLNKEELKKVCGEEGVRVYSQLTMQKAFLEKQQSGSELEELMNKFHSMNQRRGEDS

SEQ ID NO: 14994 - protein, 41 aa, Artificial Sequence
  Synthetic polypeptide
GDRDGAGRSSTPAVAQTSHAPSPAHCSPEMPWTSCAATWSL

SEQ ID NO: 14995 - protein, 40 aa, Artificial Sequence
  Synthetic polypeptide
GQGRGRQIVNTCSGPDIARSVSCPLLSRDAVDFLRGHLVP

SEQ ID NO: 14996 - protein, 13 aa, Artificial Sequence
  Synthetic polypeptide
PLVFSTKRYAEVG

SEQ ID NO: 14997 - protein, 714 aa, Artificial Sequence
  Synthetic polypeptide
FFQLKGMQKLASQYLKRDWPGVKADDRNDYRSMYPVWKSFLEGTMQVAQSRMNICENYKNFISEPARTVRSLKEQQLKRCVDQLTKIQTELQETVKDLAKGKKKYFETEQMAHAVREKADIEAKSKLSLFQSRISLQKASVKLKARRSECNSKATHARNDYLLTLAAANAHQDRYYQTDLVNIMKALDGNVYDHLKDYLIAFSRTELETCQAVQNTFQFLLENSSKVVRDYNLQLFLQENAVFHKPQPFQFQPCDSDTSLKAAQLVDIELSPVSALRMTIAESRQLESETGTTEEHSLNKEARKWATRVAREHKNIVHQQRVLNDLECHGAAVSEQSRAELEQKIDEARENIRKAEIIKLKAEARLDLLKQIGVSVDTWLKSAMNQVMEELENERWARPPAVTSNGTLHSLNADTEREEGEEFEDNMDVFDDSSSSPSGTLRNYPLTCKVVYSYKASQPDELTIEEHEVLEVIEDGDMEDWVKARNKVGQVGYVPEKYLQFPTSNSLLSMLQSLAALDSRSHTSSNSTEAELVSGSLNGDASVCFVKALYDYEGQTDDELSFPEGAIIRILNKENQDDDGFWEGEFNGRIGVFPSVLVEELSASENGDTPWMREIQISPSPKPHASLPPLPLYDQPPSSPYPSPDKRSSLYFPRSPSANEKSLHAESPGFSQASRHTPETSYGKLRPVRAAPPPPTQNHRRPAEKIEDVEITLV

SEQ ID NO: 14998 - protein, 690 aa, Artificial Sequence
  Synthetic polypeptide
FFQLKGMQKLASQYLKRDWPGVKADDRNDYRSMYPVWKSFLEGTMQVAQSRMNICENYKNFISEPARTVRSLKEQQLKRCVDQLTKIQTELQETVKDLAKGKKKYFETEQMAHAVREKADIEAKSKLSLFQSRISLQKASVKLKARRSECNSKATHARNDYLLTLAAANAHQDRYYQTDLVNIMKALDGNVYDHLKDYLIAFSRTELETCQAVQNTFQFLLENSSKVVRDYNLQLFLQENAVFHKPQPFQFQPCDSDTSRQLESETGTTEEHSLNKEARKWATRVAREHKNIVHQQRVLNDLECHGAAVSEQSRAELEQKIDEARENIRKAEIIKLKAEARLDLLKQIGVSVDTWLKSAMNQVMEELENERWARPPAVTSNGTLHSLNADTEREEGEEFEDNMDVFDDSSSSPSGTLRNYPLTCKVVYSYKASQPDELTIEEHEVLEVIEDGDMEDWVKARNKVGQVGYVPEKYLQFPTSNSLLSMLQSLAALDSRSHTSSNSTEAELVSGSLNGDASVCFVKALYDYEGQTDDELSFPEGAIIRILNKENQDDDGFWEGEFNGRIGVFPSVLVEELSASENGDTPWMREIQISPSPKPHASLPPLPLYDQPPSSPYPSPDKRSSLYFPRSPSANEKSLHAESPGFSQASRHTPETSYGKLRPVRAAPPPPTQNHRRPAEKIEDVEITLV

SEQ ID NO: 14999 - protein, 111 aa, Artificial Sequence
  Synthetic polypeptide
FFQLKGMQKLASQYLKRDWPGVKADDRNDYRSMYPVWKSFLEGTMQVAQSRMNICENYKNFISEPARTVRSLKEQQLKRCVDQLTKIQTELQETVKDLAKGKKKYFETEQM

SEQ ID NO: 15000 - protein, 21 aa, Artificial Sequence
  Synthetic polypeptide
FHLHEVPGVVRLRDGRATCSR

SEQ ID NO: 15001 - protein, 21 aa, Artificial Sequence
  Synthetic polypeptide
SDSEMEGLHAAAEAARELRAL

SEQ ID NO: 15002 - protein, 984 aa, Artificial Sequence
  Synthetic polypeptide
GSWGSQTQRWKGYMQPLKQPENSVLCDPSLVDEIFDQIPELLEHHEQFLEQVRHCMQTWHAQQKVGALLVQSFSKDVLVNIYSAYIDNFLNAKDAVRVAKEARPAFLKFLEQSMRENKEKQALSDLMIKPVQRIPRYELLVKDLLKHTPEDHPDHPLLLEAQRNIKQVAERINKGVRSAEEAERHARVLQEIEAHIEGMEDLQAPLRRFLRQEMVIEVKAIGGKKDRSLFLFTDLIVCTTLKRKSGSLRRSSMSLYTAASVIDTASKYKMLWKLPLEDADIIKGASQATNRENIQKAISRLDEDLTTLGQMSKLSESLGFPHQSLDDALRDLSAAMHRDLSEKQALCYALSFPPTKLELCATRPEGTDSYIFEFPHPDARLGFEQAFDEAKRKLASSKSCLDPEFLKAIPIMKTRSGMQFSCAAPTLNSCPEPSPEVWVCNSDGYVGQVCLLSLRAEPDVEACIAVCSARILCIGAVPGLQPRCHREPPPSLRSPPETAPEPAGPELDVEAAADEEAATLAEPGPQPCLHISIAGSGLEMTPGLGEGDPRPELVPFDSDSDDESSPSPSGTLQSQASRSTISSSFGNEETPSSKEATAETTSSEEEQEPGFLPLSGSFGPGGPCGTSPMDGRALRRSSHGSFTRGSLEDLLSVDPEAYQSSVWLGTEDGCVHVYQSSDSIRDRRNSMKLQHAASVTCILYLNNQVFVSLANGELVVYQREAGHFWDPQNFKSVTLGTQGSPITKMVSVGGRLWCGCQNRVLVLSPDTLQLEHMFYVGQDSSRCVACMVDSSLGVWVTLKGSAHVCLYHPDTFEQLAEVDVTPPVHRMLAGSDAIIRQHKAACLRITALLVCEELLWVGTSAGVVLTMPTSPGTVSCPRAPLSPTGLGQGHTGHVRFLAAVQLPDGFNLLCPTPPPPPDTGPEKLPSLEHRDSPWHRGPAPARPKMLVISGGDGYEDFRLSSGGGSSSETVGRDDSTNHLLLWRV

SEQ ID NO: 15003 - protein, 379 aa, Artificial Sequence
  Synthetic polypeptide
PTWKDEGEAWLSCHPPGKPSLYGSLTCQGIGLDGIPEVTASEGFTVNEINKKSIHISCPKENASSKFLAPYTTFSRIHTKSITCLDISSRGGLGVSSSTDGTMKIWQASNGELRRVLEGHVFDVNCCRFFPSGLVVLSGGMDAQLKIWSAEDASCVVTFKGHKGGILDTAIVDRGRNVVSASRDGTARLWDCGRSACLGVLADCGSSINGVAVGAADNSINLGSPEQMPSEREVGTEAKMLLLAREDKKLQCLGLQSRQLVFLFIGSDAFNCCTFLSGFLLLAGTQDGNIYQLDVRSPRAPVQVIHRSGAPVLSLLSVRDGFIASQGDGSCFIVQQDLDYVTELTGADCDPVYKVATWEKQIYTCCRDGLVRRYQLSDL

SEQ ID NO: 15004 - protein, 32 aa, Artificial Sequence
  Synthetic polypeptide
SQHFGKLRLVDQLRSEVRDQPDQHGRMKGRPG

SEQ ID NO: 15005 - protein, 13 aa, Artificial Sequence
  Synthetic polypeptide
GQKFETSLTNMEG

SEQ ID NO: 15006 - protein, 25 aa, Artificial Sequence
  Synthetic polypeptide
CNGKKSKVRVRKPWFFSMLVNQGAP

SEQ ID NO: 15007 - protein, 24 aa, Artificial Sequence
  Synthetic polypeptide
LTREPLDRAESIDTQLLCILCNSR

SEQ ID NO: 15008 - protein, 272 aa, Artificial Sequence
  Synthetic polypeptide
PGSPLTERKVSIPSCCVSFATADESSPVYTQVVENTDSPIWNFQQQSRLSKELLLDPQQTLVFKVWHKGDEERVIGFASVDLSPLLSGFQFVCGWYNITDFSGECQGQIKVAVSPLESLIHFKEERQARRGVETSKSLIPIYSPFSFPASDTYAAFSSHMARQTLDQLAHASSKELDFSSPGRSDTTRSQASRHEEHVQNIRRFHESLHLQGEAPLPCDDKLTTSPLSSQTSILTSLRSSPSLSYPSALRLKRPSHSTRRAVGTILGQVPAA

SEQ ID NO: 15009 - protein, 704 aa, Artificial Sequence
  Synthetic polypeptide
PGSPLTERKVSIPSCCVSFATADESSPVYTQVVENTDSPIWNFQQQSRLSKELLLDPQQTLVFKVWHKGDEERVIGFASVDLSPLLSGFQFVCGWYNITDFSGECQGQIKVAVSPLESLIHFKEERQARRGVETSKSLIPIYSPFSFPASDTYAAFSSHMARQTLDQLAHASSKELDFSSPGRSDTTRSQASRHEEHVQNIRRFHESLHLQGEAPLPCDDKLTTSPLSSQTSILTSLRKNLSELDQIQRYFRQKLTKPFLPLSPQTQTAISQHQESCRDHLGPGASSLDPGSQCILEKSSNLVLQVSSLITDLQTITRDSQAALSSHRARSRSNKATTLPDAQDTEALQERCTMPDEPLVRAPDKGTDSPSPPPLEETSNGGRMLHESLRHAVPITRMQSSEDTEAGPAYSDEDYEEDIIEPRTLNEITTVTDKTSPWSSVISDTSEVISPQPDEVQREGPSCPSPGPFCREELMVKSSFLSSPERAVNPHLPRQGSPSQSLVACECEASKARVGGESASANPQPIPCPTLSGAQQSSTFVGWSSPQTDQNKEPKSEAPAENEAATSELGDSADSFKKLPLNLASQSRRENHKGPPIDSSDIRQRQVTTGSETSTKQSLLLPGPIVVPNFFLPPQQLEASLRMLSLSATLPPAATTDQDKSEATRGALSQRPCRPRPNSLPLNLPEEETLRIARIFSSQYSQKD

SEQ ID NO: 15010 - protein, 314 aa, Artificial Sequence
  Synthetic polypeptide
PGSPLTERKVSIPSCCVSFATADESSPVYTQVVENTDSPIWNFQQQSRLSKELLLDPQQTLVFKVWHKGDEERVIGFASVDLSPLLSGFQFVCGWYNITDFSGECQGQIKVAVSPLESLIHFKEERQARRGVETSKSLIPIYSPFSFPASDTYAAFSSHMARQTLDQLAHASSKELDFSSPGRSDTTRSQASRHEEHVQNIRRFHESLHLQGEAPLPCDDKLTTSPLSSQTSILTSLRKNLSELDQIQRYFRQKLTKPFLPLSPQTQTAISQHQESCRDHLGPGASSLDPGSQCILEKSSNLVLQVSSLITGSY

SEQ ID NO: 15011 - protein, 319 aa, Artificial Sequence
  Synthetic polypeptide
PGSPLTERKVSIPSCCVSFATADESSPVYTQVVENTDSPIWNFQQQSRLSKELLLDPQQTLVFKVWHKGDEERVIGFASVDLSPLLSGFQFVCGWYNITDFSGECQGQIKVAVSPLESLIHFKEERQARRGVETSKSLIPIYSPFSFPASDTYAAFSSHMARQTLDQLAHASSKELDFSSPGRSDTTRSQASRHEEHVQNIRRFHESLHLQGEAPLPCDDKLTTSPLSSQTSILTSLRKNLSELDQIQRYFRQKLTKPFLPLSPQTQTAISQHQESCRDHLGPGASSLDPGSQCILEKSSNLVLQVSSLITGLPAPNDS

SEQ ID NO: 15012 - protein, 626 aa, Artificial Sequence
  Synthetic polypeptide
EIHTAVFKASDIISIESCKEYLLGVVKVPTKELLIKRSGITGWYPIILPEDGGLPHGLELMQKIVGGLELSISFTHRGDRERVLEAAEHLGWSFENSLKDFVRMDEGEPATVTISTPRLWLPIHCVLLAGHNHIHKNTYCYLRYKFYDHEAFWTPLKKPKESVNKKQIMVTFKASKRAEVTRGPSLLWYFREERLEIQVWRAYGNDSVERPHQTDSWIGSAYVDLARLGERSARTLTVSGVYPLFGRNASNLSGAALRVHVVLSSLSSHLEPTHELDSMDCSSHSESEQLPRRNDEVQLSPPEVISCHQKSPASTQVPCSSTTAEVRLTQEGPADLDGTFAVSILVERAMHLSLKGSPLTERKVSIPSCCVSFATADESSPVYTQVVENTDSPIWNFQQQSRLSKELLLDPQQTLVFKVWHKGDEERVIGFASVDLSPLLSGFQFVCGWYNITDFSGECQGQIKVAVSPLESLIHFKEERQARRGVETSKSLIPIYSPFSFPASDTYAAFSSHMARQTLDQLAHASSKELDFSSPGRSDTTRSQASRHEEHVQNIRRFHESLHLQGEAPLPCDDKLTTSPLSSQTSILTSLRSSPSLSYPSALRLKRPSHSTRRAVGTILGQVPAA

SEQ ID NO: 15013 - protein, 12 aa, Artificial Sequence
  Synthetic polypeptide
RRYILQYLKQVI

SEQ ID NO: 15014 - protein, 1058 aa, Artificial Sequence
  Synthetic polypeptide
EIHTAVFKASDIISIESCKEYLLGVVKVPTKELLIKRSGITGWYPIILPEDGGLPHGLELMQKIVGGLELSISFTHRGDRERVLEAAEHLGWSFENSLKDFVRMDEGEPATVTISTPRLWLPIHCVLLAGHNHIHKNTYCYLRYKFYDHEAFWTPLKKPKESVNKKQIMVTFKASKRAEVTRGPSLLWYFREERLEIQVWRAYGNDSVERPHQTDSWIGSAYVDLARLGERSARTLTVSGVYPLFGRNASNLSGAALRVHVVLSSLSSHLEPTHELDSMDCSSHSESEQLPRRNDEVQLSPPEVISCHQKSPASTQVPCSSTTAEVRLTQEGPADLDGTFAVSILVERAMHLSLKGSPLTERKVSIPSCCVSFATADESSPVYTQVVENTDSPIWNFQQQSRLSKELLLDPQQTLVFKVWHKGDEERVIGFASVDLSPLLSGFQFVCGWYNITDFSGECQGQIKVAVSPLESLIHFKEERQARRGVETSKSLIPIYSPFSFPASDTYAAFSSHMARQTLDQLAHASSKELDFSSPGRSDTTRSQASRHEEHVQNIRRFHESLHLQGEAPLPCDDKLTTSPLSSQTSILTSLRKNLSELDQIQRYFRQKLTKPFLPLSPQTQTAISQHQESCRDHLGPGASSLDPGSQCILEKSSNLVLQVSSLITDLQTITRDSQAALSSHRARSRSNKATTLPDAQDTEALQERCTMPDEPLVRAPDKGTDSPSPPPLEETSNGGRMLHESLRHAVPITRMQSSEDTEAGPAYSDEDYEEDIIEPRTLNEITTVTDKTSPWSSVISDTSEVISPQPDEVQREGPSCPSPGPFCREELMVKSSFLSSPERAVNPHLPRQGSPSQSLVACECEASKARVGGESASANPQPIPCPTLSGAQQSSTFVGWSSPQTDQNKEPKSEAPAENEAATSELGDSADSFKKLPLNLASQSRRENHKGPPIDSSDIRQRQVTTGSETSTKQSLLLPGPIVVPNFFLPPQQLEASLRMLSLSATLPPAATTDQDKSEATRGALSQRPCRPRPNSLPLNLPEEETLRIARIFSSQYSQKD

SEQ ID NO: 15015 - protein, 668 aa, Artificial Sequence
  Synthetic polypeptide
EIHTAVFKASDIISIESCKEYLLGVVKVPTKELLIKRSGITGWYPIILPEDGGLPHGLELMQKIVGGLELSISFTHRGDRERVLEAAEHLGWSFENSLKDFVRMDEGEPATVTISTPRLWLPIHCVLLAGHNHIHKNTYCYLRYKFYDHEAFWTPLKKPKESVNKKQIMVTFKASKRAEVTRGPSLLWYFREERLEIQVWRAYGNDSVERPHQTDSWIGSAYVDLARLGERSARTLTVSGVYPLFGRNASNLSGAALRVHVVLSSLSSHLEPTHELDSMDCSSHSESEQLPRRNDEVQLSPPEVISCHQKSPASTQVPCSSTTAEVRLTQEGPADLDGTFAVSILVERAMHLSLKGSPLTERKVSIPSCCVSFATADESSPVYTQVVENTDSPIWNFQQQSRLSKELLLDPQQTLVFKVWHKGDEERVIGFASVDLSPLLSGFQFVCGWYNITDFSGECQGQIKVAVSPLESLIHFKEERQARRGVETSKSLIPIYSPFSFPASDTYAAFSSHMARQTLDQLAHASSKELDFSSPGRSDTTRSQASRHEEHVQNIRRFHESLHLQGEAPLPCDDKLTTSPLSSQTSILTSLRKNLSELDQIQRYFRQKLTKPFLPLSPQTQTAISQHQESCRDHLGPGASSLDPGSQCILEKSSNLVLQVSSLITGSY

SEQ ID NO: 15016 - protein, 673 aa, Artificial Sequence
  Synthetic polypeptide
EIHTAVFKASDIISIESCKEYLLGVVKVPTKELLIKRSGITGWYPIILPEDGGLPHGLELMQKIVGGLELSISFTHRGDRERVLEAAEHLGWSFENSLKDFVRMDEGEPATVTISTPRLWLPIHCVLLAGHNHIHKNTYCYLRYKFYDHEAFWTPLKKPKESVNKKQIMVTFKASKRAEVTRGPSLLWYFREERLEIQVWRAYGNDSVERPHQTDSWIGSAYVDLARLGERSARTLTVSGVYPLFGRNASNLSGAALRVHVVLSSLSSHLEPTHELDSMDCSSHSESEQLPRRNDEVQLSPPEVISCHQKSPASTQVPCSSTTAEVRLTQEGPADLDGTFAVSILVERAMHLSLKGSPLTERKVSIPSCCVSFATADESSPVYTQVVENTDSPIWNFQQQSRLSKELLLDPQQTLVFKVWHKGDEERVIGFASVDLSPLLSGFQFVCGWYNITDFSGECQGQIKVAVSPLESLIHFKEERQARRGVETSKSLIPIYSPFSFPASDTYAAFSSHMARQTLDQLAHASSKELDFSSPGRSDTTRSQASRHEEHVQNIRRFHESLHLQGEAPLPCDDKLTTSPLSSQTSILTSLRKNLSELDQIQRYFRQKLTKPFLPLSPQTQTAISQHQESCRDHLGPGASSLDPGSQCILEKSSNLVLQVSSLITGLPAPNDS

SEQ ID NO: 15017 - protein, 25 aa, Artificial Sequence
  Synthetic polypeptide
GASPPGSHPVPEGVLNYPKAISGMG

SEQ ID NO: 15018 - protein, 30 aa, Artificial Sequence
  Synthetic polypeptide
EVRSPSAQQPPRLGSEERLRPAATPSRREC

SEQ ID NO: 15019 - protein, 1974 aa, Artificial Sequence
  Synthetic polypeptide
GAPPPSSHPVWEVRSVSARQPPRPGGSAELSQGNFWDGLGSPPDSPSPGSDVYCISELNDPQYDQSLLENLFYTAPKSDTSISDFLSEEDDIVPSKKISQSTALARSSKVLESSDHKLKKRSAGKRNRNLVEQQMLSETPEDAQTMTLSVDRLALLGRTHSVRIIIETMGVPPDSPQMTPGKKSYAGPPPKVTTAKKRTFFVEYHFPVGFSESGLGKTALITEVVRLASSKITDGKVKFQQRFVFPVQFGGPMIEHWWNSNLTFQIYVKKTPQKKPEVIGSVSLSLRAVIQSELLSFSDQLPVQQENGQSPFGPLKVTMELITDNKDFTGINTKLSGNTHYTPLCAPTSPNKALPELNQDMTCTKNPQNLNQIHEETAKKAQNLVLPNRKSPSPVAPHPSTFVATPASHNLVNQTNGTTKESALLLHVLLMVPDGKDFISGESEKQSPCNVYLNCKLFSTEEVTRSVIAWGTTQPVFNFSQVIPVSLSSKYLERLKNNVMVIETWNKVRSPGQDKLLGLVKLPLHQFYMSFKDAKISRLLLDAQYPVVAVDSYMPVIDVFSGHQNGSLRVFLAMGSSNQIMALQRLKNEEGTLPPFSPRPAHFLDQPTAASVAMAEDRGNGLMEHCFEIHIEMVKGLAPLQATVWGEADCYVQYYFPVQHSQSSVLKGPEFLENGITLKPFRTATTLCVPDPIFNSEHHHSLLLPAEVPVQRLLLSAFSAQGLVPGGGVQFEIWCRYYYPNVRDQKVAKGTLPLSRICAMVTTQHREDVGIQTFNLPLTPRIENRKELRNQSSGLLDVGLRYRRSPRTAEGVLAARTVSISVQIIRACGLQAAAKALAEREPALQFSATVGVNASVTTHLSFLPQGEQRRTHPVACSFCPEFSHHVEFTCNLVTQHCSGEACFLAELLEFAEVIFAVYHENTKSASDIISIESCKEYLLGVVKVPTKELLIKRSGITGWYPIILPEDGGLPHGLELMQKIVGGLELSISFTHRGDRERVLEAAEHLGWSFENSLKDFVRMDEGEPATVTISTPRLWLPIHCVLLAGHNHIHKNTYCYLRYKFYDHEAFWTPLKKPKESVNKKQIMVTFKASKRAEVTRGPSLLWYFREERLEIQVWRAYGNDSVERPHQTDSWIGSAYVDLARLGERSARTLTVSGVYPLFGRNASNLSGAALRVHVVLSSLSSHLEPTHELDSMDCSSHSESEQLPRRNDEVQLSPPEVISCHQKSPASTQVPCSSTTAEVRLTQEGPADLDGTFAVSILVERAMHLSLKGSPLTERKVSIPSCCVSFATADESSPVYTQVVENTDSPIWNFQQQSRLSKELLLDPQQTLVFKVWHKGDEERVIGFASVDLSPLLSGFQFVCGWYNITDFSGECQGQIKVAVSPLESLIHFKEERQARRGVETSKSLIPIYSPFSFPASDTYAAFSSHMARQTLDQLAHASSKELDFSSPGRSDTTRSQASRHEEHVQNIRRFHESLHLQGEAPLPCDDKLTTSPLSSQTSILTSLRKNLSELDQIQRYFRQKLTKPFLPLSPQTQTAISQHQESCRDHLGPGASSLDPGSQCILEKSSNLVLQVSSLITDLQTITRDSQAALSSHRARSRSNKATTLPDAQDTEALQERCTMPDEPLVRAPDKGTDSPSPPPLEETSNGGRMLHESLRHAVPITRMQSSEDTEAGPAYSDEDYEEDIIEPRTLNEITTVTDKTSPWSSVISDTSEVISPQPDEVQREGPSCPSPGPFCREELMVKSSFLSSPERAVNPHLPRQGSPSQSLVACECEASKARVGGESASANPQPIPCPTLSGAQQSSTFVGWSSPQTDQNKEPKSEAPAENEAATSELGDSADSFKKLPLNLASQSRRENHKGPPIDSSDIRQRQVTTGSETSTKQSLLLPGPIVVPNFFLPPQQLEASLRMLSLSATLPPAATTDQDKSEATRGALSQRPCRPRPNSLPLNLPEEETLRIARIFSSQYSQKD

SEQ ID NO: 15020 - protein, 1584 aa, Artificial Sequence
  Synthetic polypeptide
GAPPPSSHPVWEVRSVSARQPPRPGGSAELSQGNFWDGLGSPPDSPSPGSDVYCISELNDPQYDQSLLENLFYTAPKSDTSISDFLSEEDDIVPSKKISQSTALARSSKVLESSDHKLKKRSAGKRNRNLVEQQMLSETPEDAQTMTLSVDRLALLGRTHSVRIIIETMGVPPDSPQMTPGKKSYAGPPPKVTTAKKRTFFVEYHFPVGFSESGLGKTALITEVVRLASSKITDGKVKFQQRFVFPVQFGGPMIEHWWNSNLTFQIYVKKTPQKKPEVIGSVSLSLRAVIQSELLSFSDQLPVQQENGQSPFGPLKVTMELITDNKDFTGINTKLSGNTHYTPLCAPTSPNKALPELNQDMTCTKNPQNLNQIHEETAKKAQNLVLPNRKSPSPVAPHPSTFVATPASHNLVNQTNGTTKESALLLHVLLMVPDGKDFISGESEKQSPCNVYLNCKLFSTEEVTRSVIAWGTTQPVFNFSQVIPVSLSSKYLERLKNNVMVIETWNKVRSPGQDKLLGLVKLPLHQFYMSFKDAKISRLLLDAQYPVVAVDSYMPVIDVFSGHQNGSLRVFLAMGSSNQIMALQRLKNEEGTLPPFSPRPAHFLDQPTAASVAMAEDRGNGLMEHCFEIHIEMVKGLAPLQATVWGEADCYVQYYFPVQHSQSSVLKGPEFLENGITLKPFRTATTLCVPDPIFNSEHHHSLLLPAEVPVQRLLLSAFSAQGLVPGGGVQFEIWCRYYYPNVRDQKVAKGTLPLSRICAMVTTQHREDVGIQTFNLPLTPRIENRKELRNQSSGLLDVGLRYRRSPRTAEGVLAARTVSISVQIIRACGLQAAAKALAEREPALQFSATVGVNASVTTHLSFLPQGEQRRTHPVACSFCPEFSHHVEFTCNLVTQHCSGEACFLAELLEFAEVIFAVYHENTKSASDIISIESCKEYLLGVVKVPTKELLIKRSGITGWYPIILPEDGGLPHGLELMQKIVGGLELSISFTHRGDRERVLEAAEHLGWSFENSLKDFVRMDEGEPATVTISTPRLWLPIHCVLLAGHNHIHKNTYCYLRYKFYDHEAFWTPLKKPKESVNKKQIMVTFKASKRAEVTRGPSLLWYFREERLEIQVWRAYGNDSVERPHQTDSWIGSAYVDLARLGERSARTLTVSGVYPLFGRNASNLSGAALRVHVVLSSLSSHLEPTHELDSMDCSSHSESEQLPRRNDEVQLSPPEVISCHQKSPASTQVPCSSTTAEVRLTQEGPADLDGTFAVSILVERAMHLSLKGSPLTERKVSIPSCCVSFATADESSPVYTQVVENTDSPIWNFQQQSRLSKELLLDPQQTLVFKVWHKGDEERVIGFASVDLSPLLSGFQFVCGWYNITDFSGECQGQIKVAVSPLESLIHFKEERQARRGVETSKSLIPIYSPFSFPASDTYAAFSSHMARQTLDQLAHASSKELDFSSPGRSDTTRSQASRHEEHVQNIRRFHESLHLQGEAPLPCDDKLTTSPLSSQTSILTSLRKNLSELDQIQRYFRQKLTKPFLPLSPQTQTAISQHQESCRDHLGPGASSLDPGSQCILEKSSNLVLQVSSLITGSY

SEQ ID NO: 15021 - protein, 2042 aa, Artificial Sequence
  Synthetic polypeptide
TRICGFKALLEQGNKLRNAMVISAMKSSPETSMLLDQVHPPINEDSLRASTQIRAFSRNRFKDHIEDHLLPSTENTFWRHDTKADTRAIQLLLGSAELSQGNFWDGLGSPPDSPSPGSDVYCISELNDPQYDQSLLENLFYTAPKSDTSISDFLSEEDDIVPSKKISQSTALARSSKVLESSDHKLKKRSAGKRNRNLVEQQMLSETPEDAQTMTLSVDRLALLGRTHSVRIIIETMGVPPDSPQMTPGKKSYAGPPPKVTTAKKRTFFVEYHFPVGFSESGLGKTALITEVVRLASSKITDGKVKFQQRFVFPVQFGGPMIEHWWNSNLTFQIYVKKTPQKKPEVIGSVSLSLRAVIQSELLSFSDQLPVQQENGQSPFGPLKVTMELITDNKDFTGINTKLSGNTHYTPLCAPTSPNKALPELNQDMTCTKNPQNLNQIHEETAKKAQNLVLPNRKSPSPVAPHPSTFVATPASHNLVNQTNGTTKESALLLHVLLMVPDGKDFISGESEKQSPCNVYLNCKLFSTEEVTRSVIAWGTTQPVFNFSQVIPVSLSSKYLERLKNNVMVIETWNKVRSPGQDKLLGLVKLPLHQFYMSFKDAKISRLLLDAQYPVVAVDSYMPVIDVFSGHQNGSLRVFLAMGSSNQIMALQRLKNEEGTLPPFSPRPAHFLDQPTAASVAMAEDRGNGLMEHCFEIHIEMVKGLAPLQATVWGEADCYVQYYFPVQHSQSSVLKGPEFLENGITLKPFRTATTLCVPDPIFNSEHHHSLLLPAEVPVQRLLLSAFSAQGLVPGGGVQFEIWCRYYYPNVRDQKVAKGTLPLSRICAMVTTQHREDVGIQTFNLPLTPRIENRKELRNQSSGLLDVGLRYRRSPRTAEGVLAARTVSISVQIIRACGLQAAAKALAEREPALQFSATVGVNASVTTHLSFLPQGEQRRTHPVACSFCPEFSHHVEFTCNLVTQHCSGEACFLAELLEFAEVIFAVYHENTKSASDIISIESCKEYLLGVVKVPTKELLIKRSGITGWYPIILPEDGGLPHGLELMQKIVGGLELSISFTHRGDRERVLEAAEHLGWSFENSLKDFVRMDEGEPATVTISTPRLWLPIHCVLLAGHNHIHKNTYCYLRYKFYDHEAFWTPLKKPKESVNKKQIMVTFKASKRAEVTRGPSLLWYFREERLEIQVWRAYGNDSVERPHQTDSWIGSAYVDLARLGERSARTLTVSGVYPLFGRNASNLSGAALRVHVVLSSLSSHLEPTHELDSMDCSSHSESEQLPRRNDEVQLSPPEVISCHQKSPASTQVPCSSTTAEVRLTQEGPADLDGTFAVSILVERAMHLSLKGSPLTERKVSIPSCCVSFATADESSPVYTQVVENTDSPIWNFQQQSRLSKELLLDPQQTLVFKVWHKGDEERVIGFASVDLSPLLSGFQFVCGWYNITDFSGECQGQIKVAVSPLESLIHFKEERQARRGVETSKSLIPIYSPFSFPASDTYAAFSSHMARQTLDQLAHASSKELDFSSPGRSDTTRSQASRHEEHVQNIRRFHESLHLQGEAPLPCDDKLTTSPLSSQTSILTSLRKNLSELDQIQRYFRQKLTKPFLPLSPQTQTAISQHQESCRDHLGPGASSLDPGSQCILEKSSNLVLQVSSLITDLQTITRDSQAALSSHRARSRSNKATTLPDAQDTEALQERCTMPDEPLVRAPDKGTDSPSPPPLEETSNGGRMLHESLRHAVPITRMQSSEDTEAGPAYSDEDYEEDIIEPRTLNEITTVTDKTSPWSSVISDTSEVISPQPDEVQREGPSCPSPGPFCREELMVKSSFLSSPERAVNPHLPRQGSPSQSLVACECEASKARVGGESASANPQPIPCPTLSGAQQSSTFVGWSSPQTDQNKEPKSEAPAENEAATSELGDSADSFKKLPLNLASQSRRENHKGPPIDSSDIRQRQVTTGSETSTKQSLLLPGPIVVPNFFLPPQQLEASLRMLSLSATLPPAATTDQDKSEATRGALSQRPCRPRPNSLPLNLPEEETLRIARIFSSQYSQKD

SEQ ID NO: 15022 - protein, 9 aa, Artificial Sequence
  Synthetic polypeptide
LGSVDLKLC

SEQ ID NO: 15023 - protein, 1652 aa, Artificial Sequence
  Synthetic polypeptide
TRICGFKALLEQGNKLRNAMVISAMKSSPETSMLLDQVHPPINEDSLRASTQIRAFSRNRFKDHIEDHLLPSTENTFWRHDTKADTRAIQLLLGSAELSQGNFWDGLGSPPDSPSPGSDVYCISELNDPQYDQSLLENLFYTAPKSDTSISDFLSEEDDIVPSKKISQSTALARSSKVLESSDHKLKKRSAGKRNRNLVEQQMLSETPEDAQTMTLSVDRLALLGRTHSVRIIIETMGVPPDSPQMTPGKKSYAGPPPKVTTAKKRTFFVEYHFPVGFSESGLGKTALITEVVRLASSKITDGKVKFQQRFVFPVQFGGPMIEHWWNSNLTFQIYVKKTPQKKPEVIGSVSLSLRAVIQSELLSFSDQLPVQQENGQSPFGPLKVTMELITDNKDFTGINTKLSGNTHYTPLCAPTSPNKALPELNQDMTCTKNPQNLNQIHEETAKKAQNLVLPNRKSPSPVAPHPSTFVATPASHNLVNQTNGTTKESALLLHVLLMVPDGKDFISGESEKQSPCNVYLNCKLFSTEEVTRSVIAWGTTQPVFNFSQVIPVSLSSKYLERLKNNVMVIETWNKVRSPGQDKLLGLVKLPLHQFYMSFKDAKISRLLLDAQYPVVAVDSYMPVIDVFSGHQNGSLRVFLAMGSSNQIMALQRLKNEEGTLPPFSPRPAHFLDQPTAASVAMAEDRGNGLMEHCFEIHIEMVKGLAPLQATVWGEADCYVQYYFPVQHSQSSVLKGPEFLENGITLKPFRTATTLCVPDPIFNSEHHHSLLLPAEVPVQRLLLSAFSAQGLVPGGGVQFEIWCRYYYPNVRDQKVAKGTLPLSRICAMVTTQHREDVGIQTFNLPLTPRIENRKELRNQSSGLLDVGLRYRRSPRTAEGVLAARTVSISVQIIRACGLQAAAKALAEREPALQFSATVGVNASVTTHLSFLPQGEQRRTHPVACSFCPEFSHHVEFTCNLVTQHCSGEACFLAELLEFAEVIFAVYHENTKSASDIISIESCKEYLLGVVKVPTKELLIKRSGITGWYPIILPEDGGLPHGLELMQKIVGGLELSISFTHRGDRERVLEAAEHLGWSFENSLKDFVRMDEGEPATVTISTPRLWLPIHCVLLAGHNHIHKNTYCYLRYKFYDHEAFWTPLKKPKESVNKKQIMVTFKASKRAEVTRGPSLLWYFREERLEIQVWRAYGNDSVERPHQTDSWIGSAYVDLARLGERSARTLTVSGVYPLFGRNASNLSGAALRVHVVLSSLSSHLEPTHELDSMDCSSHSESEQLPRRNDEVQLSPPEVISCHQKSPASTQVPCSSTTAEVRLTQEGPADLDGTFAVSILVERAMHLSLKGSPLTERKVSIPSCCVSFATADESSPVYTQVVENTDSPIWNFQQQSRLSKELLLDPQQTLVFKVWHKGDEERVIGFASVDLSPLLSGFQFVCGWYNITDFSGECQGQIKVAVSPLESLIHFKEERQARRGVETSKSLIPIYSPFSFPASDTYAAFSSHMARQTLDQLAHASSKELDFSSPGRSDTTRSQASRHEEHVQNIRRFHESLHLQGEAPLPCDDKLTTSPLSSQTSILTSLRKNLSELDQIQRYFRQKLTKPFLPLSPQTQTAISQHQESCRDHLGPGASSLDPGSQCILEKSSNLVLQVSSLITGSY

SEQ ID NO: 15024 - protein, 195 aa, Artificial Sequence
  Synthetic polypeptide
TRICGFKALLEQGNKLRNAMVISAMKSSPETSMLLDQVHPPINEDSLRASTQIRAFSRNRFKDHIEDHLLPSTENTFWRHDTKADTRAIQLLLGSLGLTRCRDCRRSLVHAVLNGAQAGVQWRDIGSLQPPPPSRLPWPPKVPRLQPLPGRHPVWEVRSVSAWPPIVWDVRIPSAWLPSLESEERLCPPAIPSRK

SEQ ID NO: 15025 - protein, 27 aa, Artificial Sequence
  Synthetic polypeptide
DLCHLQQHGWNWRSLRQRLLVEFSVGL

SEQ ID NO: 15026 - protein, 53 aa, Artificial Sequence
  Synthetic polypeptide
PRFGSNQCLSVDEWIRKMWYIYTKEYYLVIKKTEISVICNNMDGTGGHYGSDY

SEQ ID NO: 15027 - protein, 309 aa, Artificial Sequence
  Synthetic polypeptide
KRLRSLSFATTWMELEVITAAIISRVQCRIVALDLRSHGETKVKNPEDLSAETMAKDVGNVVEAMYGDLPPPIMLIGHSMGGAIAVHTASSNLVPSLLGLCMIDVVEGTAMDALNSMQNFLRGRPKTFKSLENAIEWSVKSGQIRNLESARVSMVGQVKQCEGITSPEGSKSIVEGIIEEEEEDEEGSESISKRKKEDDMETKKDHPYTWRIELAKTEKYWDGWFRGLSNLFLSCPIPKLLLLAGVDRLDKDLTIGQMQGKFQMQVLPQCGHAVHEDAPDKVAEAVATFLIRHRFAEPIGGFQCVFPGC

SEQ ID NO: 15028 - protein, 323 aa, Artificial Sequence
  Synthetic polypeptide
KRLRSLSFATTWMELEVITAAIISRVQCRIVALDLRSHGETKVKNPEDLSAETMAKDVGNVVEAMYGDLPPPIMLIGHSMGGAIAVHTASSNLVPSLLGLCMIDVVEGTAMDALNSMQNFLRGRPKTFKSLENAIEWSVKSGQIRNLESARVSMVGQVKQCEGITSPEGSKSIVEGIIEEEEEDEEGSESISKRKKEDDMEGLPSETQNLLLFLQTKKDHPYTWRIELAKTEKYWDGWFRGLSNLFLSCPIPKLLLLAGVDRLDKDLTIGQMQGKFQMQVLPQCGHAVHEDAPDKVAEAVATFLIRHRFAEPIGGFQCVFPGC

SEQ ID NO: 15029 - protein, 59 aa, Artificial Sequence
  Synthetic polypeptide
KRLRSLSFATTWMELEVITAAIISRVQCRIVALDLRSHVETGFHHVGQADIKLLTSSDP

SEQ ID NO: 15030 - protein, 23 aa, Artificial Sequence
  Synthetic polypeptide
NGGNTYFAGLLLRPRDHALRCCL

SEQ ID NO: 15031 - protein, 94 aa, Artificial Sequence
  Synthetic polypeptide
HLLCRIIVEAQRSCIEVLPVSKNSQMITFTFQNGCVATLRTSGTEPKIKYYAEMCASPDQSDTALLEEELKKLIDALIENFLQPSKNGLIWRSV

SEQ ID NO: 15032 - protein, 490 aa, Artificial Sequence
  Synthetic polypeptide
WFYKGLFCFPSLTCSLSCCLVKKVLASPSAVAVSFLRPPQPCETVTYKWLSYTLGVHVNQAKQMLYDYVERKRKENSGAQLHVTYLVSGSLIQNGHSCHKVAVVREDKLEAVKSKLAVTASIHVYSIQKAMLKDSGPLFNTDYDILKSNLQNCSKFSAIQCAAAVPRAPAESSSSSKKFEQSHLHMSSETQANNELTTNGHGPPASKQVSQQPKGIMGMFASKAAAKTQETNKETKTEAKEVTNASAAGNKAPGKGNMMSNFFGKAAMNKFKVNLDSEQAVKEEKIVEQPTVSVTEPKLATPAGLKKSSKKAEPVKVLQKEKKRGKRVALSDDETKETENMRKKRRRIKLPESDSSEDEVFPDSPGAYEAESPSPPPPPSPPLEPVPKTEPEPPSVKSSSGENKRKRKRVLKSKTYLDGEGCIVTEKVYESESCTDSEEELNMKTSSVHRPPAMTVKKEPREERKGPKKGTAALGKANRQVSITGFFQRK

SEQ ID NO: 15033 - protein, 11 aa, Artificial Sequence
  Synthetic polypeptide
VSCGLPSHVKL

SEQ ID NO: 15034 - protein, 15 aa, Artificial Sequence
  Synthetic polypeptide
NCDIQMAELYTRGSC

SEQ ID NO: 15035 - protein, 2 aa, Artificial Sequence
  Synthetic polypeptide
WM

SEQ ID NO: 15036 - protein, 31 aa, Artificial Sequence
  Synthetic polypeptide
RFDPLHTGEEKIERIDGCDIQMAELYTRGSC

SEQ ID NO: 15037 - protein, 487 aa, Artificial Sequence
  Synthetic polypeptide
TVLSYKLRNLQILFPLPGNLSIDRGLIRFTRVRKRSSELMDVTYKWLSYTLGVHVNQAKQMLYDYVERKRKENSGAQLHVTYLVSGSLIQNGHSCHKVAVVREDKLEAVKSKLAVTASIHVYSIQKAMLKDSGPLFNTDYDILKSNLQNCSKFSAIQCAAAVPRAPAESSSSSKKFEQSHLHMSSETQANNELTTNGHGPPASKQVSQQPKGIMGMFASKAAAKTQETNKETKTEAKEVTNASAAGNKAPGKGNMMSNFFGKAAMNKFKVNLDSEQAVKEEKIVEQPTVSVTEPKLATPAGLKKSSKKAEPVKVLQKEKKRGKRVALSDDETKETENMRKKRRRIKLPESDSSEDEVFPDSPGAYEAESPSPPPPPSPPLEPVPKTEPEPPSVKSSSGENKRKRKRVLKSKTYLDGEGCIVTEKVYESESCTDSEEELNMKTSSVHRPPAMTVKKEPREERKGPKKGTAALGKANRQVSITGFFQRK

SEQ ID NO: 15038 - protein, 190 aa, Artificial Sequence
  Synthetic polypeptide
MFKYTNTVVLQLPTVLSTVTMMYRGKRVALSDDETKETENMRKKRRRIKLPESDSSEDEVFPDSPGAYEAESPSPPPPPSPPLEPVPKTEPEPPSVKSSSGENKRKRKRVLKSKTYLDGEGCIVTEKVYESESCTDSEEELNMKTSSVHRPPAMTVKKEPREERKGPKKGTAALGKANRQVSITGFFQRK

SEQ ID NO: 15039 - protein, 6 aa, Artificial Sequence
  Synthetic polypeptide
CTGGSE

SEQ ID NO: 15040 - protein, 28 aa, Artificial Sequence
  Synthetic polypeptide
IHKYRCVTVAYSIEYSNNDVQGEASSII

SEQ ID NO: 15041 - protein, 149 aa, Artificial Sequence
  Synthetic polypeptide
MFKYTNTVVLQLPTVLSTVTMMYRGKRVALSDDETKETENMRKKRRRIKLPESDSSEDEVFPDSPGAYEAESPSPPPPPSPPLEPVPKTEPEPPSVKSSSGENKRKRKRVLKSKTYLDGEGCIVVLDMQSHSLDILEHYVEMPIQRLER

SEQ ID NO: 15042 - protein, 10 aa, Artificial Sequence
  Synthetic polypeptide
FLHFQLRASG

SEQ ID NO: 15043 - protein, 66 aa, Artificial Sequence
  Synthetic polypeptide
MISAFPTEGQRVRYPRYQTRKPKPQWAQKTHLEAKPAQTLRTCGQVCSITSSCSFCATACCSWRSS

SEQ ID NO: 15044 - protein, 82 aa, Artificial Sequence
  Synthetic polypeptide
LPLALHLSVTLGLVMVDRSLPLSEPQFLPGGSASGSCSSPSPLASRSPGFTSGGKSTMTMMNSTGTSTTAWATGATGPYPSL

SEQ ID NO: 15045 - protein, 43 aa, Artificial Sequence
  Synthetic polypeptide
WWTGHFPSLNLSFSQVGAPLVPAPHLHLWPHAHLALLLVGSPQ

SEQ ID NO: 15046 - protein, 102 aa, Artificial Sequence
  Synthetic polypeptide
TSVSPRWERLWFLLLTFTFGLTLTWLYFWWEVHNDYDEFNWYLYNRMGYWSDWPVPILVTTAAAFAYIAGLLVLALCHIAVGQQMNLHWLHKASSGLPLSPL

SEQ ID NO: 15047 - protein, 572 aa, Artificial Sequence
  Synthetic polypeptide
TSVSPRWERLWFLLLTFTFGLTLTWLYFWWEVHNDYDEFNWYLYNRMGYWSDWPVPILVTTAAAFAYIAGLLVLALCHIAVGQQMNLHWLHKIGLVVILASTVVAMSAVAQLWEDEWEVLLISLQGTAPFLHVGAVAAVTMLSWIVAGQFARAERTSSQVTILCTFFTVVFALYLAPLTISSPCIMEKKDLGPKPALIGHRGAPMLAPEHTLMSFRKALEQKLYGLQADITISLDGVPFLMHDTTLRRTTNVEEEFPELARRPASMLNWTTLQRLNAGQWFLKTDPFWTASSLSPSDHREAQNQSICSLAELLELAKGNATLLLNLRDPPREHPYRSSFINVTLEAVLHSGFPQHQVMWLPSRQRPLVRKVAPGFQQTSGSKEAVASLRRGHIQRLNLRYTQVSRQELRDYASWNLSVNLYTVNAPWLFSLLWCAGVPSVTSDNSHALSQVPSPLWIMPPDEYCLMWVTADLVSFTLIVGIFVLQKWRLGGIRSYNPEQIMLSAAVRRTSRDVSIMKEKLIFSEISDGVEVSDVLSVCSDNSYDTYANSTATPVGPRGGGSHTKTLIERSGR

SEQ ID NO: 15048 - protein, 64 aa, Artificial Sequence
  Synthetic polypeptide
LPLALHLSVTLGLVMVDRSLPLSEPQFLPGGSASGSCSSPSPLASRSPGFTSGGKSTMTMMNST

SEQ ID NO: 15049 - protein, 40 aa, Artificial Sequence
  Synthetic polypeptide
TSVSPRWERLWFLLLTFTFGLTLTWLYFWWEVHNDYDEFN

SEQ ID NO: 15050 - protein, 25 aa, Artificial Sequence
  Synthetic polypeptide
LCELGQVTSPLWAPVPNKEIRPESL

SEQ ID NO: 15051 - protein, 714 aa, Artificial Sequence
  Synthetic polypeptide
NCVSLAKSLPLFGPQFLIRRLGQSPYRTVLRDNAIPTIFDLTSHLNNPHSRHRKRIKELSEDEIRTLKQKKIDETSEQEQKHKETNNSNAQNPSEEEGEGQDEDILPLTLEEKENKEYLKSLFEILILMGKQNIPLDGHEADEIPEGLFTPDNFQALLECRINSGEEVLRKRFETTAVNTLFCSKTQQRQMLEICESCIREETLREVRDSHFFSIITDDVVDIAGEEHLPVLVRFVDESHNLREEFIGFLPYEADAEILAVKFHTMITEKWGLNMEYCRGQAYIVSSGFSSKMKVVASRLLEKYPQAIYTLCSSCALNMWLAKSVPVMGVSVALGTIEEVCSFFHRSPQLLLELDNVISVLFQNSKERGKELKEICHSQWTGRHDAFEILVELLQALVLCLDGINSDTNIRWNNYIAGRAFVLCSAVSDFDFIVTIVVLKNVLSFTRAFGKNLQGQTSDVFFAAGSLTAVLHSLNEVMENIEVYHEFWFEEATNLATKLDIQMKLPGKFRRAHQGNLESQLTSESYYKETLSVPTVEHIIQELKDIFSEQHLKALKCLSLVPSVMGQLKFNTSEEHHADMYRSDLPNPDTLSAELHCWRIKWKHRGKDIELPSTIYEALHLPDIKFFPNVYALLKVLCILPVMKVENERYENGRKRLKAYLRNTLTDQRSSNLALLNINFDIKHDLDLMVDTYIKLYTSKSELPTDNSETVENT

SEQ ID NO: 15052 - protein, 23 aa, Artificial Sequence
  Synthetic polypeptide
ARVLIGQFFEIMQYQQYLILPVI

SEQ ID NO: 15053 - protein, 32 aa, Artificial Sequence
  Synthetic polypeptide
LCELGQVTSPLWAPVPNKEIRPDTFCRGIRKL

SEQ ID NO: 15054 - protein, 32 aa, Artificial Sequence
  Synthetic polypeptide
NCVSLAKSLPLFGPQFLIRRLGQIHFAEASEN

SEQ ID NO: 15055 - protein, 11 aa, Artificial Sequence
  Synthetic polypeptide
ARYILQRHQKT

SEQ ID NO: 15056 - protein, 158 aa, Artificial Sequence
  Synthetic polypeptide
TGTYTTGSPFPQASGLRLESHCWLSWVYSLPETEPHYVAQAGLELLVSRDPPTLASQSSGIISMSHHAKPKPGVQWCKFQSESTGRRARSADVQGQEKMDVTAQEARTNLPFYLFVLFRSSMNWMMSMHIREGCLFITRSTNSNANLFRKHPHRHTQK

SEQ ID NO: 15057 - protein, 99 aa, Artificial Sequence
  Synthetic polypeptide
EETPPAWLLGHQSFPASRLKLKHQLFFWVSRLQDFELELTPLALLFLRPLDSGWKVTVGSPGSTACQRRNLTMLPRLVSNSLSQGILPPWPPKALGLSA

SEQ ID NO: 15058 - protein, 91 aa, Artificial Sequence
  Synthetic polypeptide
NTSSFFGSQDCRILNWNLHHWLSFSSGLWTQAGKSLLALLGLQLARDGTSLCCPGWSRTPCLKGSSHLGLPKLWDYQHEPPCQAKTRSSMV

SEQ ID NO: 15059 - protein, 64 aa, Artificial Sequence
  Synthetic polypeptide
TGTYTTGSPFPQASGLRLESHCWLSWVYSLPETEPHYVAQAGLELLVSRDPPTLASQSSGIISM

SEQ ID NO: 15060 - protein, 78 aa, Artificial Sequence
  Synthetic polypeptide
NTSSFFGSQDCRILNWNLHHWLSFSSGLWTQAGKSLLALLGLQLARDGTSLCCPGWSRTPCLKGSSHLGLPKLWDYQH

SEQ ID NO: 15061 - protein, 171 aa, Artificial Sequence
  Synthetic polypeptide
RHRRRVTSAFPTELLDELPMIYSCCIFVYCMFECFKIKNSVNYHLLFTLVLFSLIVTTVYLKVKEPIFHQVMYGMLVFTLVLRSIYIVTWVYPWLRGLGYTSLGIFLLGFLFWNIDNIFCESLRNFRKKVPPIIGITTQFHAWWHILTGLGSYLHILFSLYTRTLYLRYRP

SEQ ID NO: 15062 - protein, 13 aa, Artificial Sequence
  Synthetic polypeptide
LLHFQLSYWMNSQ

SEQ ID NO: 15063 - protein, 191 aa, Artificial Sequence
  Synthetic polypeptide
RHRRRVTSAFPTELLDELPMIYSCCIFVYCMFECFKIKNSVNYHLLFTLVLFSLIVTTVYLKVKEPIFHQVMYGMLVFTLVLRSIYIVTWVYPWLRGLGYTSLGIFLLGFLFWNIDNIFCESLRNFRKKVPPIIGITTQFHAWWHILTGLGSYLHILFSLYTRTLYLRYRPKVKFLFGIWPVILFEPLRKH

SEQ ID NO: 15064 - protein, 16 aa, Artificial Sequence
  Synthetic polypeptide
RHRRRVTSAFPTELLD

SEQ ID NO: 15065 - protein, 10 aa, Artificial Sequence
  Synthetic polypeptide
LLHFQLSYWM

SEQ ID NO: 15066 - protein, 27 aa, Artificial Sequence
  Synthetic polypeptide
ASGHVWNVGLYISTSIYLYCYMGLSMA

SEQ ID NO: 15067 - protein, 107 aa, Artificial Sequence
  Synthetic polypeptide
LLRELQVMYGMLVFTLVLRSIYIVTWVYPWLRGLGYTSLGIFLLGFLFWNIDNIFCESLRNFRKKVPPIIGITTQFHAWWHILTGLGSYLHILFSLYTRTLYLRYRP

SEQ ID NO: 15068 - protein, 17 aa, Artificial Sequence
  Synthetic polypeptide
GNCYVSFRSCMECWSLH

SEQ ID NO: 15069 - protein, 127 aa, Artificial Sequence
  Synthetic polypeptide
LLRELQVMYGMLVFTLVLRSIYIVTWVYPWLRGLGYTSLGIFLLGFLFWNIDNIFCESLRNFRKKVPPIIGITTQFHAWWHILTGLGSYLHILFSLYTRTLYLRYRPKVKFLFGIWPVILFEPLRKH

SEQ ID NO: 15070 - protein, 20 aa, Artificial Sequence
  Synthetic polypeptide
TPYPPERLSTVSCMECWSLH

SEQ ID NO: 15071 - protein, 38 aa, Artificial Sequence
  Synthetic polypeptide
NFKHRILQKDFLLCHVWNVGLYISTSIYLYCYMGLSMA

SEQ ID NO: 15072 - protein, 124 aa, Artificial Sequence
  Synthetic polypeptide
GNCYVSFRYKILNTVSSRKTFYCVMYGMLVFTLVLRSIYIVTWVYPWLRGLGYTSLGIFLLGFLFWNIDNIFCESLRNFRKKVPPIIGITTQFHAWWHILTGLGSYLHILFSLYTRTLYLRYRP

SEQ ID NO: 15073 - protein, 144 aa, Artificial Sequence
  Synthetic polypeptide
GNCYVSFRYKILNTVSSRKTFYCVMYGMLVFTLVLRSIYIVTWVYPWLRGLGYTSLGIFLLGFLFWNIDNIFCESLRNFRKKVPPIIGITTQFHAWWHILTGLGSYLHILFSLYTRTLYLRYRPKVKFLFGIWPVILFEPLRKH

SEQ ID NO: 15074 - protein, 215 aa, Artificial Sequence
  Synthetic polypeptide
SRQFGRPGHADHLRPGVQDQPVQHESYLSKNSEDDELAKESKRSVRKRGRSTDEYSEADEEEEEEEGKPSRKRLHRIETDEEESCDNAHGDANQPARDSQPRVLPSEQESTKKPYRIESDEEEDFENVGKVGSPLDYSLVDLPSTNGQSPGKAIENLIGKPTEKSQTPKDNSTASASLASNGTSGGQEAGAPEEEEDELLRVTDLVDYVCNSEQL

SEQ ID NO: 15075 - protein, 23 aa, Artificial Sequence
  Synthetic polypeptide
GQEFKTSLSNMRAICPRTLKMMS

SEQ ID NO: 15076 - protein, 13 aa, Artificial Sequence
  Synthetic polypeptide
VLGFIQRYSRGSS

SEQ ID NO: 15077 - protein, 524 aa, Artificial Sequence
  Synthetic polypeptide
SFFYYQCLAAVSGTIRCSDSSRDIREALHELLCCTNVSTKEGIHLALVELLKNLTKYPTDRDSIWKCLKFLGSRHPTLVLPLVPELLSTHPFFDTAEPDMDDPAYIAVLVLIFNAAKTCPTMPALFSDHTFRHYAYLRDSLSHLVPALRLPGRKLVSSAVSPSIIPQEDPSQQFLQQSLERVYSLQHLDPQGAQELLEFTIRDLQRLGELQSELAGVADFSATYLRCQLLLIKALQEKLWNVAAPLYLKQSDLASAAAKQIMEETYKMEFMYSGVENKQVVIIHHMRLQAKALQLIVTARTTRGLDPLFGMCEKFLQEVDFFQRYFIADLPHLQDSFVDKLLDLMPRLMTSKPAEVVKILQTMLRQSAFLHLPLPEQIHKASATIIEPAGESDNPLRFTSGLVVALDVDATLEHVQDPQNTVKVQVLYPDGQAQMIHPKPADFRNPGPGRHRLITQVYLSHTAWTEACQVEVRLLLAYNSSARIPKCPWMEGGEMSPQVETSIEGTIPFSKPVKVYIMPKPARR

SEQ ID NO: 15078 - protein, 50 aa, Artificial Sequence
  Synthetic polypeptide
HFFITNVLQQCLAQLGARIHPEIFERLFMNSYAVLMFQPKKGFILHWWSC

SEQ ID NO: 15079 - protein, 66 aa, Artificial Sequence
  Synthetic polypeptide
SFFYYQCLAAVSGTIRCSDSSRDIREALHELLCCTNVSTKEGIHLALVELLKNLTKYPTDRDSIWK

SEQ ID NO: 15080 - protein, 26 aa, Artificial Sequence
  Synthetic polypeptide
DLICAKELAGVMVHICSPSYFGRLSI

SEQ ID NO: 15081 - protein, 19 aa, Artificial Sequence
  Synthetic polypeptide
PQLLWEAEHLTDTSHGVRN

SEQ ID NO: 15082 - protein, 814 aa, Artificial Sequence
  Synthetic polypeptide
PQLLWEAEHLTDTSHGVRNKCLQLLGNLGSLEKSVTKDAEGLAARDVQKIIGDYFSDQDPRVRTAAIKAMLQLHERGLKLHQTIYNQACKLLSDDYEQVRSAAVQLIWVVSQLYPESIVPIPSSNEEIRLVDDAFGKICHMVSDGSWVVRVQAAKLLGSMEQVSSHFLEQTLDKKLMSDLRRKRTAHERAKELYSSGEFSSGRKWGDDAPKEEVDTGAVNLIESGACGAFVHGLEDEMYEVRIAAVEALCMLAQSSPSFAEKCLDFLVDMFNDEIEEVRLQSIHTMRKISNNITLREDQLDTVLAVLEDSSRDIREALHELLCCTNVSTKEGIHLALVELLKNLTKYPTDRDSIWKCLKFLGSRHPTLVLPLVPELLSTHPFFDTAEPDMDDPAYIAVLVLIFNAAKTCPTMPALFSDHTFRHYAYLRDSLSHLVPALRLPGRKLVSSAVSPSIIPQEDPSQQFLQQSLERVYSLQHLDPQGAQELLEFTIRDLQRLGELQSELAGVADFSATYLRCQLLLIKALQEKLWNVAAPLYLKQSDLASAAAKQIMEETYKMEFMYSGVENKQVVIIHHMRLQAKALQLIVTARTTRGLDPLFGMCEKFLQEVDFFQRYFIADLPHLQDSFVDKLLDLMPRLMTSKPAEVVKILQTMLRQSAFLHLPLPEQIHKASATIIEPAGESDNPLRFTSGLVVALDVDATLEHVQDPQNTVKVQVLYPDGQAQMIHPKPADFRNPGPGRHRLITQVYLSHTAWTEACQVEVRLLLAYNSSARIPKCPWMEGGEMSPQVETSIEGTIPFSKPVKVYIMPKPARR

SEQ ID NO: 15083 - protein, 356 aa, Artificial Sequence
  Synthetic polypeptide
PQLLWEAEHLTDTSHGVRNKCLQLLGNLGSLEKSVTKDAEGLAARDVQKIIGDYFSDQDPRVRTAAIKAMLQLHERGLKLHQTIYNQACKLLSDDYEQVRSAAVQLIWVVSQLYPESIVPIPSSNEEIRLVDDAFGKICHMVSDGSWVVRVQAAKLLGSMEQVSSHFLEQTLDKKLMSDLRRKRTAHERAKELYSSGEFSSGRKWGDDAPKEEVDTGAVNLIESGACGAFVHGLEDEMYEVRIAAVEALCMLAQSSPSFAEKCLDFLVDMFNDEIEEVRLQSIHTMRKISNNITLREDQLDTVLAVLEDSSRDIREALHELLCCTNVSTKEGIHLALVELLKNLTKYPTDRDSIWK

SEQ ID NO: 15084 - protein, 13 aa, Artificial Sequence
  Synthetic polypeptide
GQHLTDTSHGVRN

SEQ ID NO: 15085 - protein, 3 aa, Artificial Sequence
  Synthetic polypeptide
ASI

SEQ ID NO: 15086 - protein, 12 aa, Artificial Sequence
  Synthetic polypeptide
PASDRYVSWCKK

SEQ ID NO: 15087 - protein, 808 aa, Artificial Sequence
  Synthetic polypeptide
GQHLTDTSHGVRNKCLQLLGNLGSLEKSVTKDAEGLAARDVQKIIGDYFSDQDPRVRTAAIKAMLQLHERGLKLHQTIYNQACKLLSDDYEQVRSAAVQLIWVVSQLYPESIVPIPSSNEEIRLVDDAFGKICHMVSDGSWVVRVQAAKLLGSMEQVSSHFLEQTLDKKLMSDLRRKRTAHERAKELYSSGEFSSGRKWGDDAPKEEVDTGAVNLIESGACGAFVHGLEDEMYEVRIAAVEALCMLAQSSPSFAEKCLDFLVDMFNDEIEEVRLQSIHTMRKISNNITLREDQLDTVLAVLEDSSRDIREALHELLCCTNVSTKEGIHLALVELLKNLTKYPTDRDSIWKCLKFLGSRHPTLVLPLVPELLSTHPFFDTAEPDMDDPAYIAVLVLIFNAAKTCPTMPALFSDHTFRHYAYLRDSLSHLVPALRLPGRKLVSSAVSPSIIPQEDPSQQFLQQSLERVYSLQHLDPQGAQELLEFTIRDLQRLGELQSELAGVADFSATYLRCQLLLIKALQEKLWNVAAPLYLKQSDLASAAAKQIMEETYKMEFMYSGVENKQVVIIHHMRLQAKALQLIVTARTTRGLDPLFGMCEKFLQEVDFFQRYFIADLPHLQDSFVDKLLDLMPRLMTSKPAEVVKILQTMLRQSAFLHLPLPEQIHKASATIIEPAGESDNPLRFTSGLVVALDVDATLEHVQDPQNTVKVQVLYPDGQAQMIHPKPADFRNPGPGRHRLITQVYLSHTAWTEACQVEVRLLLAYNSSARIPKCPWMEGGEMSPQVETSIEGTIPFSKPVKVYIMPKPARR

SEQ ID NO: 15088 - protein, 350 aa, Artificial Sequence
  Synthetic polypeptide
GQHLTDTSHGVRNKCLQLLGNLGSLEKSVTKDAEGLAARDVQKIIGDYFSDQDPRVRTAAIKAMLQLHERGLKLHQTIYNQACKLLSDDYEQVRSAAVQLIWVVSQLYPESIVPIPSSNEEIRLVDDAFGKICHMVSDGSWVVRVQAAKLLGSMEQVSSHFLEQTLDKKLMSDLRRKRTAHERAKELYSSGEFSSGRKWGDDAPKEEVDTGAVNLIESGACGAFVHGLEDEMYEVRIAAVEALCMLAQSSPSFAEKCLDFLVDMFNDEIEEVRLQSIHTMRKISNNITLREDQLDTVLAVLEDSSRDIREALHELLCCTNVSTKEGIHLALVELLKNLTKYPTDRDSIWK

SEQ ID NO: 15089 - protein, 524 aa, Artificial Sequence
  Synthetic polypeptide
GVRLPWLESGSAAYWLHDRASCFSTPLVKCHSTDFEVHRNWLAITHSLPISQWYYEATSEWTLDYPPFFAWFEYILSHVAKYFDQEMLNVHNLNYSSSRTLLFQRFSVIFMDVLFVYAVRECCKCIDGKKVGKELTEKPKFILSVLLLWNFGLLIVDHIHFQYNGFLFGLMLLSIARLFQKRHMEGAFLFAVLLHFKHIYLYVAPAYGVYLLRSYCFTANKPDGSIRWKSFSFVRVISLGLVVFLVSALSLGPFLALNQLPQVFSRLFPFKRGLCHAYWAPNFWALYNALDKVLSVIGLKLKFLDPNNIPKASMTSGLVQQFQHTVLPSVTPLATLICTLIAILPSIFCLWFKPQGPRGFLRCLTLCALSSFMFGWHVHEKAILLAILPMSLLSVGKAGDASIFLILTTTGHYSLFPLLFTAPELPIKILLMLLFTIYSISSLKTLFRKEKPLFNWMETFYLLGLGPLEVCCEFVFPFTSWKVKYPFIPLLLTSVYCAVGITYAWFKLYVSVLIDSAIGKTKKQ

SEQ ID NO: 15090 - protein, 59 aa, Artificial Sequence
  Synthetic polypeptide
NAIPQILKYTETGLLSLTVCQYHSGIMRQLQSGRWITPLSLHGLSISCHMLPNILIKKC

SEQ ID NO: 15091 - protein, 17 aa, Artificial Sequence
  Synthetic polypeptide
QGKLLLYATGEMPFHRF

SEQ ID NO: 15092 - protein, 465 aa, Artificial Sequence
  Synthetic polypeptide
GVRLPWLESGSAAYWLHDRASCFSTPLVKCHSTDFEVHRNWLAITHSLPISQWYYEATSEWTLDYPPFFAWFEYILSHVAKYFDQEMLNVHNLNYSSSRTLLFQRFSVIFMDVLFVYAVRECCKCIDGKKVGKELTEKPKFILSVLLLWNFGLLIVDHIHFQYNGFLFGLMLLSIARLFQKRHMEGAFLFAVLLHFKHIYLYVAPAYGVYLLRSYCFTANKPDGSIRWKSFSFVRVISLGLVVFLVSALSLGPFLALNQLPQVFSRLFPFKRGLCHAYWAPNFWALYNALDKVLSVIGLKLKFLDPNNIPKASMTSGLVQQFQHTVLPSVTPLATLICTLIAILPSIFCLWFKPQGPRGFLRCLTLCALSSFMFGWHVHEKAILLAILPMSLLSVGKAGDASIFLILTTTGHYSLFPLLFTAPELPIKILLMLLFTIYSISSLKTLFRRSFTLVAQAGVQWHDLS

SEQ ID NO: 15093 - protein, 131 aa, Artificial Sequence
  Synthetic polypeptide
GVRLPWLESGSAAYWLHDRASCFSTPLVKCHSTDFEVHRNWLAITHSLPISQWYYEATSEWTLDYPPFFAWFEYILSHVAKYFDQEMLNVHNLNYSSSRTLLFQRFSVIFMDVLFVYAVRDCFCFFPNVSM

SEQ ID NO: 15094 - protein, 279 aa, Artificial Sequence
  Synthetic polypeptide
GVRLPWLESGSAAYWLHDRASCFSTPLVKCHSTDFEVHRNWLAITHSLPISQWYYEATSEWTLDYPPFFAWFEYILSHVAKYFDQEMLNVHNLNYSSSRTLLFQRFSVIFMDVLFVYAVRECCKCIDGKKVGKELTEKPKFILSVLLLWNFGLLIVDHIHFQYNGFLFGLMLLSIARLFQKRHMEGAFLFAVLLHFKHIYLYVAPAYGVYLLRSYCFTANKPDGSIRWKSFSFVRVISLGLVVFLVSALSLGPFLALNQLPQVFSRLFPFKRGLCHAYW

SEQ ID NO: 15095 - protein, 234 aa, Artificial Sequence
  Synthetic polypeptide
GVRLPWLESGSAAYWLHDRASCFSTPLVKCHSTDFEVHRNWLAITHSLPISQWYYEATSEWTLDYPPFFAWFEYILSHVAKYFDQEMLNVHNLNYSSSRTLLFQRFSVIFMDVLFVYAVRECCKCIDGKKVGKELTEKPKFILSVLLLWNFGLLIVDHIHFQYNGFLFGLMLLSIARLFQRQGLPILSRLVLNSWGQAILPRRLTKVLGLQVKGIWKEHFSLLFSYISSISTSM

SEQ ID NO: 15096 - protein, 133 aa, Artificial Sequence
  Synthetic polypeptide
GVRLPWLESGSAAYWLHDRASCFSTPLVKCHSTDFEVHRNWLAITHSLPISQWYYEATSEWTLDYPPFFAWFEYILSHVAKYFDQEMLNVHNLNYSSSRTLLFQRFSVIFMDVLFVYAVRECCKCIDGKKVGK

SEQ ID NO: 15097 - protein, 121 aa, Artificial Sequence
  Synthetic polypeptide
GVRLPWLESGSAAYWLHDRASCFSTPLVKCHSTDFEVHRNWLAITHSLPISQWYYEATSEWTLDYPPFFAWFEYILSHVAKYFDQEMLNVHNLNYSSSRTLLFQRFSVIFMDVLFVYAVRE

SEQ ID NO: 15098 - protein, 95 aa, Artificial Sequence
  Synthetic polypeptide
PVCHKSPQSSAPINLINQQPSTLKQNPPPAKRLGLAEAIPQILKYTETGLLSLTVCQYHSGIMRQLQSGRWITPLSLHGLSISCHMLPNILIKKC

SEQ ID NO: 15099 - protein, 9 aa, Artificial Sequence
  Synthetic polypeptide
DLPKPFHRF

SEQ ID NO: 15100 - protein, 531 aa, Artificial Sequence
  Synthetic polypeptide
SLPQVTPIFSTHKPDQSTAINIEAKSSTSKKIRTCRSHSTDFEVHRNWLAITHSLPISQWYYEATSEWTLDYPPFFAWFEYILSHVAKYFDQEMLNVHNLNYSSSRTLLFQRFSVIFMDVLFVYAVRECCKCIDGKKVGKELTEKPKFILSVLLLWNFGLLIVDHIHFQYNGFLFGLMLLSIARLFQKRHMEGAFLFAVLLHFKHIYLYVAPAYGVYLLRSYCFTANKPDGSIRWKSFSFVRVISLGLVVFLVSALSLGPFLALNQLPQVFSRLFPFKRGLCHAYWAPNFWALYNALDKVLSVIGLKLKFLDPNNIPKASMTSGLVQQFQHTVLPSVTPLATLICTLIAILPSIFCLWFKPQGPRGFLRCLTLCALSSFMFGWHVHEKAILLAILPMSLLSVGKAGDASIFLILTTTGHYSLFPLLFTAPELPIKILLMLLFTIYSISSLKTLFRKEKPLFNWMETFYLLGLGPLEVCCEFVFPFTSWKVKYPFIPLLLTSVYCAVGITYAWFKLYVSVLIDSAIGKTKKQ

SEQ ID NO: 15101 - protein, 472 aa, Artificial Sequence
  Synthetic polypeptide
SLPQVTPIFSTHKPDQSTAINIEAKSSTSKKIRTCRSHSTDFEVHRNWLAITHSLPISQWYYEATSEWTLDYPPFFAWFEYILSHVAKYFDQEMLNVHNLNYSSSRTLLFQRFSVIFMDVLFVYAVRECCKCIDGKKVGKELTEKPKFILSVLLLWNFGLLIVDHIHFQYNGFLFGLMLLSIARLFQKRHMEGAFLFAVLLHFKHIYLYVAPAYGVYLLRSYCFTANKPDGSIRWKSFSFVRVISLGLVVFLVSALSLGPFLALNQLPQVFSRLFPFKRGLCHAYWAPNFWALYNALDKVLSVIGLKLKFLDPNNIPKASMTSGLVQQFQHTVLPSVTPLATLICTLIAILPSIFCLWFKPQGPRGFLRCLTLCALSSFMFGWHVHEKAILLAILPMSLLSVGKAGDASIFLILTTTGHYSLFPLLFTAPELPIKILLMLLFTIYSISSLKTLFRRSFTLVAQAGVQWHDLS

SEQ ID NO: 15102 - protein, 138 aa, Artificial Sequence
  Synthetic polypeptide
SLPQVTPIFSTHKPDQSTAINIEAKSSTSKKIRTCRSHSTDFEVHRNWLAITHSLPISQWYYEATSEWTLDYPPFFAWFEYILSHVAKYFDQEMLNVHNLNYSSSRTLLFQRFSVIFMDVLFVYAVRDCFCFFPNVSM

SEQ ID NO: 15103 - protein, 286 aa, Artificial Sequence
  Synthetic polypeptide
SLPQVTPIFSTHKPDQSTAINIEAKSSTSKKIRTCRSHSTDFEVHRNWLAITHSLPISQWYYEATSEWTLDYPPFFAWFEYILSHVAKYFDQEMLNVHNLNYSSSRTLLFQRFSVIFMDVLFVYAVRECCKCIDGKKVGKELTEKPKFILSVLLLWNFGLLIVDHIHFQYNGFLFGLMLLSIARLFQKRHMEGAFLFAVLLHFKHIYLYVAPAYGVYLLRSYCFTANKPDGSIRWKSFSFVRVISLGLVVFLVSALSLGPFLALNQLPQVFSRLFPFKRGLCHAYW

SEQ ID NO: 15104 - protein, 241 aa, Artificial Sequence
  Synthetic polypeptide
SLPQVTPIFSTHKPDQSTAINIEAKSSTSKKIRTCRSHSTDFEVHRNWLAITHSLPISQWYYEATSEWTLDYPPFFAWFEYILSHVAKYFDQEMLNVHNLNYSSSRTLLFQRFSVIFMDVLFVYAVRECCKCIDGKKVGKELTEKPKFILSVLLLWNFGLLIVDHIHFQYNGFLFGLMLLSIARLFQRQGLPILSRLVLNSWGQAILPRRLTKVLGLQVKGIWKEHFSLLFSYISSISTSM

SEQ ID NO: 15105 - protein, 140 aa, Artificial Sequence
  Synthetic polypeptide
SLPQVTPIFSTHKPDQSTAINIEAKSSTSKKIRTCRSHSTDFEVHRNWLAITHSLPISQWYYEATSEWTLDYPPFFAWFEYILSHVAKYFDQEMLNVHNLNYSSSRTLLFQRFSVIFMDVLFVYAVRECCKCIDGKKVGK

SEQ ID NO: 15106 - protein, 128 aa, Artificial Sequence
  Synthetic polypeptide
SLPQVTPIFSTHKPDQSTAINIEAKSSTSKKIRTCRSHSTDFEVHRNWLAITHSLPISQWYYEATSEWTLDYPPFFAWFEYILSHVAKYFDQEMLNVHNLNYSSSRTLLFQRFSVIFMDVLFVYAVRE

SEQ ID NO: 15107 - protein, 497 aa, Artificial Sequence
  Synthetic polypeptide
KLHHSTDFEVHRNWLAITHSLPISQWYYEATSEWTLDYPPFFAWFEYILSHVAKYFDQEMLNVHNLNYSSSRTLLFQRFSVIFMDVLFVYAVRECCKCIDGKKVGKELTEKPKFILSVLLLWNFGLLIVDHIHFQYNGFLFGLMLLSIARLFQKRHMEGAFLFAVLLHFKHIYLYVAPAYGVYLLRSYCFTANKPDGSIRWKSFSFVRVISLGLVVFLVSALSLGPFLALNQLPQVFSRLFPFKRGLCHAYWAPNFWALYNALDKVLSVIGLKLKFLDPNNIPKASMTSGLVQQFQHTVLPSVTPLATLICTLIAILPSIFCLWFKPQGPRGFLRCLTLCALSSFMFGWHVHEKAILLAILPMSLLSVGKAGDASIFLILTTTGHYSLFPLLFTAPELPIKILLMLLFTIYSISSLKTLFRKEKPLFNWMETFYLLGLGPLEVCCEFVFPFTSWKVKYPFIPLLLTSVYCAVGITYAWFKLYVSVLIDSAIGKTKKQ

SEQ ID NO: 15108 - protein, 62 aa, Artificial Sequence
  Synthetic polypeptide
CRSCTIPQILKYTETGLLSLTVCQYHSGIMRQLQSGRWITPLSLHGLSISCHMLPNILIKKC

SEQ ID NO: 15109 - protein, 23 aa, Artificial Sequence
  Synthetic polypeptide
HLHNKVQGEAASADVEAAPFHRF

SEQ ID NO: 15110 - protein, 438 aa, Artificial Sequence
  Synthetic polypeptide
KLHHSTDFEVHRNWLAITHSLPISQWYYEATSEWTLDYPPFFAWFEYILSHVAKYFDQEMLNVHNLNYSSSRTLLFQRFSVIFMDVLFVYAVRECCKCIDGKKVGKELTEKPKFILSVLLLWNFGLLIVDHIHFQYNGFLFGLMLLSIARLFQKRHMEGAFLFAVLLHFKHIYLYVAPAYGVYLLRSYCFTANKPDGSIRWKSFSFVRVISLGLVVFLVSALSLGPFLALNQLPQVFSRLFPFKRGLCHAYWAPNFWALYNALDKVLSVIGLKLKFLDPNNIPKASMTSGLVQQFQHTVLPSVTPLATLICTLIAILPSIFCLWFKPQGPRGFLRCLTLCALSSFMFGWHVHEKAILLAILPMSLLSVGKAGDASIFLILTTTGHYSLFPLLFTAPELPIKILLMLLFTIYSISSLKTLFRRSFTLVAQAGVQWHDLS

SEQ ID NO: 15111 - protein, 104 aa, Artificial Sequence
  Synthetic polypeptide
KLHHSTDFEVHRNWLAITHSLPISQWYYEATSEWTLDYPPFFAWFEYILSHVAKYFDQEMLNVHNLNYSSSRTLLFQRFSVIFMDVLFVYAVRDCFCFFPNVSM

SEQ ID NO: 15112 - protein, 252 aa, Artificial Sequence
  Synthetic polypeptide
KLHHSTDFEVHRNWLAITHSLPISQWYYEATSEWTLDYPPFFAWFEYILSHVAKYFDQEMLNVHNLNYSSSRTLLFQRFSVIFMDVLFVYAVRECCKCIDGKKVGKELTEKPKFILSVLLLWNFGLLIVDHIHFQYNGFLFGLMLLSIARLFQKRHMEGAFLFAVLLHFKHIYLYVAPAYGVYLLRSYCFTANKPDGSIRWKSFSFVRVISLGLVVFLVSALSLGPFLALNQLPQVFSRLFPFKRGLCHAYW

SEQ ID NO: 15113 - protein, 207 aa, Artificial Sequence
  Synthetic polypeptide
KLHHSTDFEVHRNWLAITHSLPISQWYYEATSEWTLDYPPFFAWFEYILSHVAKYFDQEMLNVHNLNYSSSRTLLFQRFSVIFMDVLFVYAVRECCKCIDGKKVGKELTEKPKFILSVLLLWNFGLLIVDHIHFQYNGFLFGLMLLSIARLFQRQGLPILSRLVLNSWGQAILPRRLTKVLGLQVKGIWKEHFSLLFSYISSISTSM

SEQ ID NO: 15114 - protein, 106 aa, Artificial Sequence
  Synthetic polypeptide
KLHHSTDFEVHRNWLAITHSLPISQWYYEATSEWTLDYPPFFAWFEYILSHVAKYFDQEMLNVHNLNYSSSRTLLFQRFSVIFMDVLFVYAVRECCKCIDGKKVGK

SEQ ID NO: 15115 - protein, 94 aa, Artificial Sequence
  Synthetic polypeptide
KLHHSTDFEVHRNWLAITHSLPISQWYYEATSEWTLDYPPFFAWFEYILSHVAKYFDQEMLNVHNLNYSSSRTLLFQRFSVIFMDVLFVYAVRE

SEQ ID NO: 15116 - protein, 505 aa, Artificial Sequence
  Synthetic polypeptide
LGVVEHACDPSHSTDFEVHRNWLAITHSLPISQWYYEATSEWTLDYPPFFAWFEYILSHVAKYFDQEMLNVHNLNYSSSRTLLFQRFSVIFMDVLFVYAVRECCKCIDGKKVGKELTEKPKFILSVLLLWNFGLLIVDHIHFQYNGFLFGLMLLSIARLFQKRHMEGAFLFAVLLHFKHIYLYVAPAYGVYLLRSYCFTANKPDGSIRWKSFSFVRVISLGLVVFLVSALSLGPFLALNQLPQVFSRLFPFKRGLCHAYWAPNFWALYNALDKVLSVIGLKLKFLDPNNIPKASMTSGLVQQFQHTVLPSVTPLATLICTLIAILPSIFCLWFKPQGPRGFLRCLTLCALSSFMFGWHVHEKAILLAILPMSLLSVGKAGDASIFLILTTTGHYSLFPLLFTAPELPIKILLMLLFTIYSISSLKTLFRKEKPLFNWMETFYLLGLGPLEVCCEFVFPFTSWKVKYPFIPLLLTSVYCAVGITYAWFKLYVSVLIDSAIGKTKKQ

SEQ ID NO: 15117 - protein, 73 aa, Artificial Sequence
  Synthetic polypeptide
KYKISWAWWSMPVIPAIPQILKYTETGLLSLTVCQYHSGIMRQLQSGRWITPLSLHGLSISCHMLPNILIKKC

SEQ ID NO: 15118 - protein, 7 aa, Artificial Sequence
  Synthetic polypeptide
SQPFHRF

SEQ ID NO: 15119 - protein, 446 aa, Artificial Sequence
  Synthetic polypeptide
LGVVEHACDPSHSTDFEVHRNWLAITHSLPISQWYYEATSEWTLDYPPFFAWFEYILSHVAKYFDQEMLNVHNLNYSSSRTLLFQRFSVIFMDVLFVYAVRECCKCIDGKKVGKELTEKPKFILSVLLLWNFGLLIVDHIHFQYNGFLFGLMLLSIARLFQKRHMEGAFLFAVLLHFKHIYLYVAPAYGVYLLRSYCFTANKPDGSIRWKSFSFVRVISLGLVVFLVSALSLGPFLALNQLPQVFSRLFPFKRGLCHAYWAPNFWALYNALDKVLSVIGLKLKFLDPNNIPKASMTSGLVQQFQHTVLPSVTPLATLICTLIAILPSIFCLWFKPQGPRGFLRCLTLCALSSFMFGWHVHEKAILLAILPMSLLSVGKAGDASIFLILTTTGHYSLFPLLFTAPELPIKILLMLLFTIYSISSLKTLFRRSFTLVAQAGVQWHDLS

SEQ ID NO: 15120 - protein, 112 aa, Artificial Sequence
  Synthetic polypeptide
LGVVEHACDPSHSTDFEVHRNWLAITHSLPISQWYYEATSEWTLDYPPFFAWFEYILSHVAKYFDQEMLNVHNLNYSSSRTLLFQRFSVIFMDVLFVYAVRDCFCFFPNVSM

SEQ ID NO: 15121 - protein, 260 aa, Artificial Sequence
  Synthetic polypeptide
LGVVEHACDPSHSTDFEVHRNWLAITHSLPISQWYYEATSEWTLDYPPFFAWFEYILSHVAKYFDQEMLNVHNLNYSSSRTLLFQRFSVIFMDVLFVYAVRECCKCIDGKKVGKELTEKPKFILSVLLLWNFGLLIVDHIHFQYNGFLFGLMLLSIARLFQKRHMEGAFLFAVLLHFKHIYLYVAPAYGVYLLRSYCFTANKPDGSIRWKSFSFVRVISLGLVVFLVSALSLGPFLALNQLPQVFSRLFPFKRGLCHAYW

SEQ ID NO: 15122 - protein, 215 aa, Artificial Sequence
  Synthetic polypeptide
LGVVEHACDPSHSTDFEVHRNWLAITHSLPISQWYYEATSEWTLDYPPFFAWFEYILSHVAKYFDQEMLNVHNLNYSSSRTLLFQRFSVIFMDVLFVYAVRECCKCIDGKKVGKELTEKPKFILSVLLLWNFGLLIVDHIHFQYNGFLFGLMLLSIARLFQRQGLPILSRLVLNSWGQAILPRRLTKVLGLQVKGIWKEHFSLLFSYISSISTSM

SEQ ID NO: 15123 - protein, 114 aa, Artificial Sequence
  Synthetic polypeptide
LGVVEHACDPSHSTDFEVHRNWLAITHSLPISQWYYEATSEWTLDYPPFFAWFEYILSHVAKYFDQEMLNVHNLNYSSSRTLLFQRFSVIFMDVLFVYAVRECCKCIDGKKVGK

SEQ ID NO: 15124 - protein, 102 aa, Artificial Sequence
  Synthetic polypeptide
LGVVEHACDPSHSTDFEVHRNWLAITHSLPISQWYYEATSEWTLDYPPFFAWFEYILSHVAKYFDQEMLNVHNLNYSSSRTLLFQRFSVIFMDVLFVYAVRE

SEQ ID NO: 15125 - protein, 508 aa, Artificial Sequence
  Synthetic polypeptide
GRTRWLMPVIPALRHSTDFEVHRNWLAITHSLPISQWYYEATSEWTLDYPPFFAWFEYILSHVAKYFDQEMLNVHNLNYSSSRTLLFQRFSVIFMDVLFVYAVRECCKCIDGKKVGKELTEKPKFILSVLLLWNFGLLIVDHIHFQYNGFLFGLMLLSIARLFQKRHMEGAFLFAVLLHFKHIYLYVAPAYGVYLLRSYCFTANKPDGSIRWKSFSFVRVISLGLVVFLVSALSLGPFLALNQLPQVFSRLFPFKRGLCHAYWAPNFWALYNALDKVLSVIGLKLKFLDPNNIPKASMTSGLVQQFQHTVLPSVTPLATLICTLIAILPSIFCLWFKPQGPRGFLRCLTLCALSSFMFGWHVHEKAILLAILPMSLLSVGKAGDASIFLILTTTGHYSLFPLLFTAPELPIKILLMLLFTIYSISSLKTLFRKEKPLFNWMETFYLLGLGPLEVCCEFVFPFTSWKVKYPFIPLLLTSVYCAVGITYAWFKLYVSVLIDSAIGKTKKQ

SEQ ID NO: 15126 - protein, 62 aa, Artificial Sequence
  Synthetic polypeptide
SQHFAIPQILKYTETGLLSLTVCQYHSGIMRQLQSGRWITPLSLHGLSISCHMLPNILIKKC

SEQ ID NO: 15127 - protein, 18 aa, Artificial Sequence
  Synthetic polypeptide
PDAVAHACDPSTSPFHRF

SEQ ID NO: 15128 - protein, 449 aa, Artificial Sequence
  Synthetic polypeptide
GRTRWLMPVIPALRHSTDFEVHRNWLAITHSLPISQWYYEATSEWTLDYPPFFAWFEYILSHVAKYFDQEMLNVHNLNYSSSRTLLFQRFSVIFMDVLFVYAVRECCKCIDGKKVGKELTEKPKFILSVLLLWNFGLLIVDHIHFQYNGFLFGLMLLSIARLFQKRHMEGAFLFAVLLHFKHIYLYVAPAYGVYLLRSYCFTANKPDGSIRWKSFSFVRVISLGLVVFLVSALSLGPFLALNQLPQVFSRLFPFKRGLCHAYWAPNFWALYNALDKVLSVIGLKLKFLDPNNIPKASMTSGLVQQFQHTVLPSVTPLATLICTLIAILPSIFCLWFKPQGPRGFLRCLTLCALSSFMFGWHVHEKAILLAILPMSLLSVGKAGDASIFLILTTTGHYSLFPLLFTAPELPIKILLMLLFTIYSISSLKTLFRRSFTLVAQAGVQWHDLS

SEQ ID NO: 15129 - protein, 115 aa, Artificial Sequence
  Synthetic polypeptide
GRTRWLMPVIPALRHSTDFEVHRNWLAITHSLPISQWYYEATSEWTLDYPPFFAWFEYILSHVAKYFDQEMLNVHNLNYSSSRTLLFQRFSVIFMDVLFVYAVRDCFCFFPNVSM

SEQ ID NO: 15130 - protein, 263 aa, Artificial Sequence
  Synthetic polypeptide
GRTRWLMPVIPALRHSTDFEVHRNWLAITHSLPISQWYYEATSEWTLDYPPFFAWFEYILSHVAKYFDQEMLNVHNLNYSSSRTLLFQRFSVIFMDVLFVYAVRECCKCIDGKKVGKELTEKPKFILSVLLLWNFGLLIVDHIHFQYNGFLFGLMLLSIARLFQKRHMEGAFLFAVLLHFKHIYLYVAPAYGVYLLRSYCFTANKPDGSIRWKSFSFVRVISLGLVVFLVSALSLGPFLALNQLPQVFSRLFPFKRGLCHAYW

SEQ ID NO: 15131 - protein, 218 aa, Artificial Sequence
  Synthetic polypeptide
GRTRWLMPVIPALRHSTDFEVHRNWLAITHSLPISQWYYEATSEWTLDYPPFFAWFEYILSHVAKYFDQEMLNVHNLNYSSSRTLLFQRFSVIFMDVLFVYAVRECCKCIDGKKVGKELTEKPKFILSVLLLWNFGLLIVDHIHFQYNGFLFGLMLLSIARLFQRQGLPILSRLVLNSWGQAILPRRLTKVLGLQVKGIWKEHFSLLFSYISSISTSM

SEQ ID NO: 15132 - protein, 117 aa, Artificial Sequence
  Synthetic polypeptide
GRTRWLMPVIPALRHSTDFEVHRNWLAITHSLPISQWYYEATSEWTLDYPPFFAWFEYILSHVAKYFDQEMLNVHNLNYSSSRTLLFQRFSVIFMDVLFVYAVRECCKCIDGKKVGK

SEQ ID NO: 15133 - protein, 105 aa, Artificial Sequence
  Synthetic polypeptide
GRTRWLMPVIPALRHSTDFEVHRNWLAITHSLPISQWYYEATSEWTLDYPPFFAWFEYILSHVAKYFDQEMLNVHNLNYSSSRTLLFQRFSVIFMDVLFVYAVRE

SEQ ID NO: 15134 - protein, 67 aa, Artificial Sequence
  Synthetic polypeptide
VFNSLKPKRAIPQILKYTETGLLSLTVCQYHSGIMRQLQSGRWITPLSLHGLSISCHMLPNILIKKC

SEQ ID NO: 15135 - protein, 9 aa, Artificial Sequence
  Synthetic polypeptide
SLREPFHRF

SEQ ID NO: 15136 - protein, 496 aa, Artificial Sequence
  Synthetic polypeptide
ESHSTDFEVHRNWLAITHSLPISQWYYEATSEWTLDYPPFFAWFEYILSHVAKYFDQEMLNVHNLNYSSSRTLLFQRFSVIFMDVLFVYAVRECCKCIDGKKVGKELTEKPKFILSVLLLWNFGLLIVDHIHFQYNGFLFGLMLLSIARLFQKRHMEGAFLFAVLLHFKHIYLYVAPAYGVYLLRSYCFTANKPDGSIRWKSFSFVRVISLGLVVFLVSALSLGPFLALNQLPQVFSRLFPFKRGLCHAYWAPNFWALYNALDKVLSVIGLKLKFLDPNNIPKASMTSGLVQQFQHTVLPSVTPLATLICTLIAILPSIFCLWFKPQGPRGFLRCLTLCALSSFMFGWHVHEKAILLAILPMSLLSVGKAGDASIFLILTTTGHYSLFPLLFTAPELPIKILLMLLFTIYSISSLKTLFRKEKPLFNWMETFYLLGLGPLEVCCEFVFPFTSWKVKYPFIPLLLTSVYCAVGITYAWFKLYVSVLIDSAIGKTKKQ

SEQ ID NO: 15137 - protein, 437 aa, Artificial Sequence
  Synthetic polypeptide
ESHSTDFEVHRNWLAITHSLPISQWYYEATSEWTLDYPPFFAWFEYILSHVAKYFDQEMLNVHNLNYSSSRTLLFQRFSVIFMDVLFVYAVRECCKCIDGKKVGKELTEKPKFILSVLLLWNFGLLIVDHIHFQYNGFLFGLMLLSIARLFQKRHMEGAFLFAVLLHFKHIYLYVAPAYGVYLLRSYCFTANKPDGSIRWKSFSFVRVISLGLVVFLVSALSLGPFLALNQLPQVFSRLFPFKRGLCHAYWAPNFWALYNALDKVLSVIGLKLKFLDPNNIPKASMTSGLVQQFQHTVLPSVTPLATLICTLIAILPSIFCLWFKPQGPRGFLRCLTLCALSSFMFGWHVHEKAILLAILPMSLLSVGKAGDASIFLILTTTGHYSLFPLLFTAPELPIKILLMLLFTIYSISSLKTLFRRSFTLVAQAGVQWHDLS

SEQ ID NO: 15138 - protein, 103 aa, Artificial Sequence
  Synthetic polypeptide
ESHSTDFEVHRNWLAITHSLPISQWYYEATSEWTLDYPPFFAWFEYILSHVAKYFDQEMLNVHNLNYSSSRTLLFQRFSVIFMDVLFVYAVRDCFCFFPNVSM

SEQ ID NO: 15139 - protein, 251 aa, Artificial Sequence
  Synthetic polypeptide
ESHSTDFEVHRNWLAITHSLPISQWYYEATSEWTLDYPPFFAWFEYILSHVAKYFDQEMLNVHNLNYSSSRTLLFQRFSVIFMDVLFVYAVRECCKCIDGKKVGKELTEKPKFILSVLLLWNFGLLIVDHIHFQYNGFLFGLMLLSIARLFQKRHMEGAFLFAVLLHFKHIYLYVAPAYGVYLLRSYCFTANKPDGSIRWKSFSFVRVISLGLVVFLVSALSLGPFLALNQLPQVFSRLFPFKRGLCHAYW

SEQ ID NO: 15140 - protein, 206 aa, Artificial Sequence
  Synthetic polypeptide
ESHSTDFEVHRNWLAITHSLPISQWYYEATSEWTLDYPPFFAWFEYILSHVAKYFDQEMLNVHNLNYSSSRTLLFQRFSVIFMDVLFVYAVRECCKCIDGKKVGKELTEKPKFILSVLLLWNFGLLIVDHIHFQYNGFLFGLMLLSIARLFQRQGLPILSRLVLNSWGQAILPRRLTKVLGLQVKGIWKEHFSLLFSYISSISTSM

SEQ ID NO: 15141 - protein, 105 aa, Artificial Sequence
  Synthetic polypeptide
ESHSTDFEVHRNWLAITHSLPISQWYYEATSEWTLDYPPFFAWFEYILSHVAKYFDQEMLNVHNLNYSSSRTLLFQRFSVIFMDVLFVYAVRECCKCIDGKKVGK

SEQ ID NO: 15142 - protein, 93 aa, Artificial Sequence
  Synthetic polypeptide
ESHSTDFEVHRNWLAITHSLPISQWYYEATSEWTLDYPPFFAWFEYILSHVAKYFDQEMLNVHNLNYSSSRTLLFQRFSVIFMDVLFVYAVRE

SEQ ID NO: 15143 - protein, 21 aa, Artificial Sequence
  Synthetic polypeptide
MDWQSGLEETLVYPAEWPDER

SEQ ID NO: 15144 - protein, 656 aa, Artificial Sequence
  Synthetic polypeptide
WTGNQAWKKRWFILRSGRMSGDPDVLEYYKNDHSKKPLRIINLNFCEQVDAGLTFNKKELQDSFVFDIKTSERTFYLVAETEEDMNKWVQSICQICGFNQAEESTDSLRNVSSAGHGPRSSPAELSSSSQHLLRERKSSAPSHSSQPTLFTFEPPVSNHMQPTLSTSAPQEYLYLHQCISRRAENARSASFSQGTRASFLMRSDTAVQKLAQGNGHCVNGISGQVHGFYSLPKPSRHNTEFRDSTYDLPRSLASHGHTKGSLTGSETDNEDVYTFKTPSNTLCREFGDLLVDNMDVPATPLSAYQIPRTFTLDKNHNAMTVATPGDSAIAPPPRPPKPSQAETPRWGSPQQRPPISENSRSVAATIPRRNTLPAMDNSRLHRASSCETYEYPQRGGESAGRSAESMSDGVGSFLPGKMIVGRSDSTNSEDNYVPMNPGSSTLLAMERAGDNSQSVYIPMSPGAHHFDSLGYPSTTLPVHRGPSRGSEIQPPPVNRNLKPDRKAKPTPLDLRNNTVIDELPFKSPITKSWSRANHTFNSSSSQYCRPISTQSITSTDSGDSEENYVPMQNPVSASPVPSGTNSPAPKKSTGSVDYLALDFQPSSPSPHRKPSTSSVTSDEKVDYVQVDKEKTQALQNTMQEWTDVRQSSEPSKGAKL

SEQ ID NO: 15145 - protein, 18 aa, Artificial Sequence
  Synthetic polypeptide
GLAIRPGRNAGLSCGVAG

SEQ ID NO: 15146 - protein, 6 aa, Artificial Sequence
  Synthetic polypeptide
CLHFLY

SEQ ID NO: 15147 - protein, 172 aa, Artificial Sequence
  Synthetic polypeptide
ALFLSPVPRIVCSAYISYTEAVEILKQASQNFTFTPEWGADLRTEHEKYLVKHCGNIPVFVINYPLTLKPFYMRDNEDGPQHTVAAVDLLVPGVGELFGGGLREERYHFLEERLARSGLTEVYQWYLDLRRFGSVPHGGFGMGFERYLQCILGVDNIKDVIPFPRFPHSCLL

SEQ ID NO: 15148 - protein, 38 aa, Artificial Sequence
  Synthetic polypeptide
HTHARTHIVSMKAELYFYLQCLELCVVPTFLILKQWRS

SEQ ID NO: 15149 - protein, 197 aa, Artificial Sequence
  Synthetic polypeptide
LPFLFCEQAKLFLTSGPCTCCSFCLEYSSQDTSMVHFLTRISYTEAVEILKQASQNFTFTPEWGADLRTEHEKYLVKHCGNIPVFVINYPLTLKPFYMRDNEDGPQHTVAAVDLLVPGVGELFGGGLREERYHFLEERLARSGLTEVYQWYLDLRRFGSVPHGGFGMGFERYLQCILGVDNIKDVIPFPRFPHSCLL

SEQ ID NO: 15150 - protein, 65 aa, Artificial Sequence
  Synthetic polypeptide
FPVHSSSCSVCSSHADCPFCSVNKPNCFSLQVLVLAVPFAWNTPPKILLWFISLLAFLILKQWRS

SEQ ID NO: 15151 - protein, 37 aa, Artificial Sequence
  Synthetic polypeptide
TSQTVSHFRSLYLLFLLPGILLPRYFYGSFPYSHFLY

SEQ ID NO: 15152 - protein, 38 aa, Artificial Sequence
  Synthetic polypeptide
LPFLFCEQAKLFLTSGPCTCCSFCLEYSSQDTSMHFLY

SEQ ID NO: 15153 - protein, 207 aa, Artificial Sequence
  Synthetic polypeptide
FPVHSSSCSVCSSHADCPFCSVNKPNCFSLQVLVLAVPFAWNTPPKILLCISYTEAVEILKQASQNFTFTPEWGADLRTEHEKYLVKHCGNIPVFVINYPLTLKPFYMRDNEDGPQHTVAAVDLLVPGVGELFGGGLREERYHFLEERLARSGLTEVYQWYLDLRRFGSVPHGGFGMGFERYLQCILGVDNIKDVIPFPRFPHSCLL

SEQ ID NO: 15154 - protein, 37 aa, Artificial Sequence
  Synthetic polypeptide
TSQTVSHFRSLYLLFLLPGILLPRYFYAFLILKQWRS

SEQ ID NO: 15155 - protein, 25 aa, Artificial Sequence
  Synthetic polypeptide
LPFLFCEQAKLFLTSAFLILKQWRS

SEQ ID NO: 15156 - protein, 35 aa, Artificial Sequence
  Synthetic polypeptide
FPVHSSSCSVCSSHADCPFCSVNKPNCFSLQHFLY

SEQ ID NO: 15157 - protein, 166 aa, Artificial Sequence
  Synthetic polypeptide
TSQTVSHFSISYTEAVEILKQASQNFTFTPEWGADLRTEHEKYLVKHCGNIPVFVINYPLTLKPFYMRDNEDGPQHTVAAVDLLVPGVGELFGGGLREERYHFLEERLARSGLTEVYQWYLDLRRFGSVPHGGFGMGFERYLQCILGVDNIKDVIPFPRFPHSCLL

SEQ ID NO: 15158 - protein, 29 aa, Artificial Sequence
  Synthetic polypeptide
CLYGLILSVVLGVHWGSWNISPVGFPHQI

SEQ ID NO: 15159 - protein, 365 aa, Artificial Sequence
  Synthetic polypeptide
ASTGGLGTYPLWDFPIKYKERHPLEYLRQYPHFRCRTNVLGSILRIRSEATAAIHSFFKDSGFVHIHTPIITSNDSEGAGELFQLEPSGKLKVPEENFFNVPAFLTVSGQLHLEVMSGAFTQVFTFGPTFRAENSQSRRHLAEFYMIEAEISFVDSLQDLMQVIEELFKATTMMVLSKCPEDVELCHKFIAPGQKDRLEHMLKNNFLIISYTEAVEILKQASQNFTFTPEWGADLRTEHEKYLVKHCGNIPVFVINYPLTLKPFYMRDNEDGPQHTVAAVDLLVPGVGELFGGGLREERYHFLEERLARSGLTEVYQWYLDLRRFGSVPHGGFGMGFERYLQCILGVDNIKDVIPFPRFPHSCLL

SEQ ID NO: 15160 - protein, 78 aa, Artificial Sequence
  Synthetic polypeptide
IILLSCLSVLYTLPGHCCGRKNIMFIWFDTVRGFRRPLGVLEHIPCGISPSNIKRGILWSICDNILTLGVGLTFWVLY

SEQ ID NO: 15161 - protein, 129 aa, Artificial Sequence
  Synthetic polypeptide
ASTGGLGTYPLWDFPIKYKERHPLEYLRQYPHFRCRTNVLGSILRIRSEATAAIHSFFKDSGFVHIHTPIITSNDSEGAGELFQLEWGADLRTEHEKYLVKHCGNIPVFVINYPLTLKPFYMRDNEDGP

SEQ ID NO: 15162 - protein, 124 aa, Artificial Sequence
  Synthetic polypeptide
GRSQDGRIGTAPVYSSQRERRRRWVISAFPSETKSGTATTSGPMAPCGCCWPTAWRWRCRLSPTCWLAPSTPPWARGMSRCPSTTASTWWSGASAKSRLGARSLSLGAGCGFTTEISYLWTLIA

SEQ ID NO: 15163 - protein, 35 aa, Artificial Sequence
  Synthetic polypeptide
FLHFHLRPSPEQLLHRGRWLLAAAAGQRHGGGAAD

SEQ ID NO: 15164 - protein, 12 aa, Artificial Sequence
  Synthetic polypeptide
MEIQYLLHGILC

SEQ ID NO: 15165 - protein, 451 aa, Artificial Sequence
  Synthetic polypeptide
WRYNIYFTGFYVDHFGFNTVKTFNQRYLVADKYWKKNGGSILFYTGNEGDIIWFCNNTGFMWDVAEELKAMLVFAEHRYYGESLPFGDNSFKDSRHLNFLTSEQALADFAELIKHLKRTIPGAENQPVIAIGGSYGGMLAAWFRMKYPHMVVGALAASAPIWQFEDLVPCGVFMKIVTTDFRKSGPHCSESIHRSWDAINRLSNTGSGLQWLTGALHLCSPLTSQDIQHLKDWISETWVNLAMVDYPYASNFLQPLPAWPIKVVCQYLKNPNVSDSLLLQNIFQALNVYYNYSGQVKCLNISETATSSLGTLGWSYQACTEVVMPFCTNGVDDMFEPHSWNLKELSDDCFQQWGVRPRPSWITTMYGGKNISSHTNIVFSNGELDPWSGGGVTKDITDTLVAVTISEGAHHLDLRTKNALDPMSVLLARSLEVRHMKNWIRDFYDSAGKQH

SEQ ID NO: 15166 - protein, 19 aa, Artificial Sequence
  Synthetic polypeptide
GDTISTSRDFMLIILDLIL

SEQ ID NO: 15167 - protein, 159 aa, Artificial Sequence
  Synthetic polypeptide
WRYNIYFTGFYVDHFGFNTVKTFNQRYLVADKYWKKNGGSILFYTGNEGDIIWFCNNTGFMWDVAEELKAMLVFAEHRYYGESLPFGDNSFKDSRHLNFLTSEQALADFAELIKHLKRTIPGAENQPVIAIGGSYGGMLAAWFRMKYPHMVVGALAASA

SEQ ID NO: 15168 - protein, 125 aa, Artificial Sequence
  Synthetic polypeptide
WRYNIYFTGFYVDHFGFNTVKTFNQRYLVADKYWKKNGGSILFYTGNEGDIIWFCNNTGFMWDVAEELKAMLVFAEHRYYGESLPFGDNSFKDSRHLNFLTSEQALADFAELIKHLKRTIPGAEN

SEQ ID NO: 15169 - protein, 369 aa, Artificial Sequence
  Synthetic polypeptide
MSNYARFEAKIHDLREQMMNHSMSSGSGSLRTNQKRSLYVRAMFDYDKSKDSGLPSQGLSFKYGDILHVINASDDEWWQARRVMLEGDSEEMGVIPSKRRVERKERARLKTVKFNAKPGVIDSKGSFNDKRKKSFIFSRKFPFYKNKEQSEQETSDPERGQEDLILSYEPVTRQEINYTRPVIILGPMKDRINDDLISEFPDKFGSCVPHTTRPKRDYEVDGRDYHFVISREQMEKDIQEHKFIEAGQYNDNLYGTSVQSVRFVAERGKHCILDVSGNAIKRLQVAQLYPIAIFIKPRSLEPLMEMNKRLTEEQAKKTYDRAIKLEQEFGEYFTAIVQGDTLEDIYNQCKLVIEEQSGPFIWIPSKEKL

SEQ ID NO: 15170 - protein, 42 aa, Artificial Sequence
  Synthetic polypeptide
NLDTGTTLQRTPYWCSSSHLTSLLKCLITLDLRPKSMTYESR

SEQ ID NO: 15171 - protein, 351 aa, Artificial Sequence
  Synthetic polypeptide
MSNYARFEAKIHDLREQMMNHSMSSGSGSLRTNQKRSLYVRAMFDYDKSKDSGLPSQGLSFKYGDILHVINASDDEWWQARRVMLEGDSEEMGVIPSKRRVERKERARLKTVKFNAKPGVIDSKGDIPGLGDDGYGTKTLRGQEDLILSYEPVTRQEINYTRPVIILGPMKDRINDDLISEFPDKFGSCVPHTTRPKRDYEVDGRDYHFVISREQMEKDIQEHKFIEAGQYNDNLYGTSVQSVRFVAERGKHCILDVSGNAIKRLQVAQLYPIAIFIKPRSLEPLMEMNKRLTEEQAKKTYDRAIKLEQEFGEYFTAIVQGDTLEDIYNQCKLVIEEQSGPFIWIPSKEKL

SEQ ID NO: 15172 - protein, 365 aa, Artificial Sequence
  Synthetic polypeptide
MSNYARFEAKIHDLREQMMNHSMSSGSGSLRTNQKRSLYVRAMFDYDKSKDSGLPSQGLSFKYGDILHVINASDDEWWQARRVMLEGDSEEMGVIPSKRRVERKERARLKTVKFNAKPGVIDSKGDIPGLGDDGYGTKTLKHVSSNASDSESSYRGQEDLILSYEPVTRQEINYTRPVIILGPMKDRINDDLISEFPDKFGSCVPHTTRPKRDYEVDGRDYHFVISREQMEKDIQEHKFIEAGQYNDNLYGTSVQSVRFVAERGKHCILDVSGNAIKRLQVAQLYPIAIFIKPRSLEPLMEMNKRLTEEQAKKTYDRAIKLEQEFGEYFTAIVQGDTLEDIYNQCKLVIEEQSGPFIWIPSKEKL

SEQ ID NO: 15173 - protein, 343 aa, Artificial Sequence
  Synthetic polypeptide
MSNYARFEAKIHDLREQMMNHSMSSGSGSLRTNQKRSLYVRAMFDYDKSKDSGLPSQGLSFKYGDILHVINASDDEWWQARRVMLEGDSEEMGVIPSKRRVERKERARLKTVKFNAKPGVIDSKGSFNDKRKKSFIFSRKFPFYKNKEQSEQETSDPERGQEDLILSYEPVTRQEINYTRPVIILGPMKDRINDDLISEFPDKFGSCVPHTTRPKRDYEVDGRDYHFVISREQMEKDIQEHKFIEAGQYNDNLYGTSVQSVRFVAERGKHCILDVSGNAIKRLQVAQLYPIAIFIKPRSLEPLMEMNKRLTEEQAKKTYDRAIKLEQEFGEYFTGKFTFTLVV

SEQ ID NO: 15174 - protein, 132 aa, Artificial Sequence
  Synthetic polypeptide
MSNYARFEAKIHDLREQMMNHSMSSGSGSLRTNQKRSLYVRAMFDYDKSKDSGLPSQGLSFKYGDILHVINASDDEWWQARRVMLEGDSEEMGVIPSKRRVERKERARLKTVKFNAKPGVIDSKGLLEFKYA

SEQ ID NO: 15175 - protein, 96 aa, Artificial Sequence
  Synthetic polypeptide
MSNYARFEAKIHDLREQMMNHSMSSGSGSLRTNQKRSLYVRAMFDYDKSKDSGLPSQGLSFKYGDILHVINASDDEWWQARRVMLEGDSEEMGVIP

SEQ ID NO: 15176 - protein, 118 aa, Artificial Sequence
  Synthetic polypeptide
VGTEALRHGARLPPGRQVPHVRLQPALLAGRLWRAGCRHLAGRHTGELRHAVLFLPVPVGCQLAHHHRRLCHGHRLRGLPGCHQGEQVPPAHFLPAAAAGVPAGGHHRHPLLRLHGQD

SEQ ID NO: 15177 - protein, 245 aa, Artificial Sequence
  Synthetic polypeptide
WELKRCGMARACLQAVKYLMFAFNLLFWLGGCGVLGVGIWLAATQGSFATLSSSFPSLSAANLLIITGAFVMAIGFVGCLGAIKENKCLLLTFFLLLLLVFLLEATIAILFFAYTDKIDRYAQQDLKKGLHLYGTQGNVGLTNAWSIIQTDFRCCGVSNYTDWFEVYNATRVPDSCCLEFSESCGLHAPGTWWKAPCYETVKVWLQENLLAVGIFGLCTALVQILGLTFAMTMYCQVVKADTYCA

SEQ ID NO: 15178 - protein, 2 aa, Artificial Sequence
  Synthetic polypeptide
GN

SEQ ID NO: 15179 - protein, 422 aa, Artificial Sequence
  Synthetic polypeptide
DVTCSSLPSAMIVRPPQPCGTEIYTFGRILGKGSFGIVIEATDKETETKWAIKKVNKEKAGSSAVKLLEREVNILKSVKHEHIIHLEQVFETPKKMYLVMELCEDGELKEILDRKGHFSENETRWIIQSLASAIAYLHNNDIVHRDLKLENIMVKSSLIDDNNEINLNIKVTDFGLAVKKQSRSEAMLQATCGTPIYMAPEVISAHDYSQQCDIWSIGVVMYMLLRGEPPFLASSEEKLFELIRKGELHFENAVWNSISDCAKSVLKQLMKVDPAHRITAKELLDNQWLTGNKLSSVRPTNVLEMMKEWKNNPESVEENTTEEKNKPSTEEKLKSYQPWGNVPDANYTSDEEEEKQSTAYEKQFPATSKDNFDMCSSSFTSSKLLPAEIKGEMEKTPVTPSQGTATKYPAKSGALSRTKKKL

SEQ ID NO: 15180 - protein, 23 aa, Artificial Sequence
  Synthetic polypeptide
GLPSHVELKSIPLEEYWEKGALE

SEQ ID NO: 15181 - protein, 356 aa, Artificial Sequence
  Synthetic polypeptide
DVTCSSLPSAMIVRPPQPCGTEIYTFGRILGKGSFGIVIEATDKETETKWAIKKVNKEKAGSSAVKLLEREVNILKSVKHEHIIHLEQVFETPKKMYLVMELCEDGELKEILDRKGHFSENETRWIIQSLASAIAYLHNNDIVHRDLKLENIMVKSSLIDDNNEINLNIKVTDFGLAVKKQSRSEAMLQATCGTPIYMAPEVISAHDYSQQCDIWSIGVVMYMLLRGEPPFLASSEEKLFELIRKGELHFENAVWNSISDCAKSVLKQLMKVDPAHRITAKELLDNQWLTSTAYEKQFPATSKDNFDMCSSSFTSSKLLPAEIKGEMEKTPVTPSQGTATKYPAKSGALSRTKKKL

SEQ ID NO: 15182 - protein, 164 aa, Artificial Sequence
  Synthetic polypeptide
DVTCSSLPSAMIVRPPQPCGTEIYTFGRILGKGSFGIVIEATDKETETKWAIKKVNKEKAGSSAVKLLEREVNILKSVKHEHIIHLEQVFETPKKMYLVMELCEDGELKEILDRKGHFSENETRWIIQSLASAIAYLHNNDIVHRDLKLENIMVKSSLIDDNNE

SEQ ID NO: 15183 - protein, 140 aa, Artificial Sequence
  Synthetic polypeptide
DVTCSSLPSAMIVRPPQPCGTEIYTFGRILGKGSFGIVIEATDKETETKWAIKKVNKEKAGSSAVKLLEREVNILKSVKHEHIIHLEQVFETPKKMYLVMELCEDGELKEILDRKGHFSENETRWIIQSLASAIAYLHNN

SEQ ID NO: 15184 - protein, 79 aa, Artificial Sequence
  Synthetic polypeptide
DVTCSSLPSAMIVRPPQPCGTEIYTFGRILGKGSFGIVIEATDKETETKWAIKKVNKEKAGSSAVKLLEREVNILKSVK

SEQ ID NO: 15185 - protein, 27 aa, Artificial Sequence
  Synthetic polypeptide
WEKNWLWHTTHIISVCYLLPLKFCDIQ

SEQ ID NO: 15186 - protein, 124 aa, Artificial Sequence
  Synthetic polypeptide
GKRIGCGIQRTSFQYATSCHLSFVTFNNISKENCVFRSSLIGIVCGVFYPSSLAFTKNGRLATKYHTVPLPPKGRVLIHWMTLCQTQMKLMAIPLVFQIMFGILNGLYHYAVFEETLEKTIHEE

SEQ ID NO: 15187 - protein, 4 aa, Artificial Sequence
  Synthetic polypeptide
HSII

SEQ ID NO: 15188 - protein, 64 aa, Artificial Sequence
  Synthetic polypeptide
GKRIGCGIQRTSFQYATSCHLSFVTFNNISKENCVFRSSLIGIVCGVFYPSSLAFTKNGRLATK

SEQ ID NO: 15189 - protein, 101 aa, Artificial Sequence
  Synthetic polypeptide
GKRIGCGIQRTSFQYATSCHLSFVTFNNISKENCVFRSSLIGIVCGVFYPSSLAFTKNGRLATKYHTVPLPPKGRVLIHWMTLCQTQMKLMAIPLVFQIMF

SEQ ID NO: 15190 - protein, 218 aa, Artificial Sequence
  Synthetic polypeptide
LASLLSIHLLYLHKENPSKHRSGQVSPLISDLRMAPWCIQDKVQTPSHDFHTRHFITRPSFPLQPHFWCLPNIDLTNVLFSISCPCSLSPPSICMGHSLSPNSCFVLQVSACDTSEKPFLYMVDRILPSSMPQIAQEVSEQHLSQGRLYPPLSTIRDVSLRIAIKVLDYAYKHNLASYYPEPKDKEAFVRSLVYTPDYDSFTLDSYTWPKEAMNVQTV

SEQ ID NO: 15191 - protein, 36 aa, Artificial Sequence
  Synthetic polypeptide
TGSCHPPCLKLPRKSLSSICPRGDSTHHSAPSETCL

SEQ ID NO: 15192 - protein, 23 aa, Artificial Sequence
  Synthetic polypeptide
EAFPIHGRQDPAILHASNCPGSL

SEQ ID NO: 15193 - protein, 194 aa, Artificial Sequence
  Synthetic polypeptide
LASLLSIHLLYLHKENPSKHRSGQVSPLISDLRMAPWCIQDKVQTPSHDFHTRHFITRPSFPLQPHFWCLPNIDLTNVLFSISCPCSLSPPSICMGHSLSPNSCFVLQVSACDTSEKPFLYMVDRILPSSMPQIAQEVSEQHLSQGRLYPPLSTIRDVSLRIAIKVLDYAYKHNLASYYPEPKDKEAFVRSLVY

SEQ ID NO: 15194 - protein, 43 aa, Artificial Sequence
  Synthetic polypeptide
EIPGCFILCLYPQGPAQCEAHGAAQRPSVHRPETPARAREGIR

SEQ ID NO: 15195 - protein, 390 aa, Artificial Sequence
  Synthetic polypeptide
KFLVVSFYACIPRAQHNVRHMELLRDPLYIGLKHQRVHGKAYDDLLDEFMQAVTDKFGINCLIQFEDFANANAFRLLNKYRNKYCMFNDDIQGTASVAVAGILAALRITKNKLSNHVFVFQGAGEAAMGIAHLLVMALEKEGVPKAEATRKIWMVDSKGLIVKGRSHLNHEKEMFAQDHPEVNSLEEVVRLVKPTAIIGVAAIAGAFTEQILRDMASFHERPIIFALSNPTSKAECTAEKCYRVTEGRGIFASGSPFKSVTLEDGKTFIPGQGNNAYVFPGVALGVIAGGIRHIPDEIFLLTAEQIAQEVSEQHLSQGRLYPPLSTIRDVSLRIAIKVLDYAYKHNLASYYPEPKDKEAFVRSLVYTPDYDSFTLDSYTWPKEAMNVQTV

SEQ ID NO: 15196 - protein, 13 aa, Artificial Sequence
  Synthetic polypeptide
GTWSCSETLCTSA

SEQ ID NO: 15197 - protein, 366 aa, Artificial Sequence
  Synthetic polypeptide
KFLVVSFYACIPRAQHNVRHMELLRDPLYIGLKHQRVHGKAYDDLLDEFMQAVTDKFGINCLIQFEDFANANAFRLLNKYRNKYCMFNDDIQGTASVAVAGILAALRITKNKLSNHVFVFQGAGEAAMGIAHLLVMALEKEGVPKAEATRKIWMVDSKGLIVKGRSHLNHEKEMFAQDHPEVNSLEEVVRLVKPTAIIGVAAIAGAFTEQILRDMASFHERPIIFALSNPTSKAECTAEKCYRVTEGRGIFASGSPFKSVTLEDGKTFIPGQGNNAYVFPGVALGVIAGGIRHIPDEIFLLTAEQIAQEVSEQHLSQGRLYPPLSTIRDVSLRIAIKVLDYAYKHNLASYYPEPKDKEAFVRSLVY

SEQ ID NO: 15198 - protein, 128 aa, Artificial Sequence
  Synthetic polypeptide
KFLVVSFYACIPRAQHNVRHMELLRDPLYIGLKHQRVHGKAYDDLLDEFMQAVTDKFGINCLIQFEDFANANAFRLLNKYRNKYCMFNDDIQGTTCHTFSCPWHLWAQVMFQHIPGPMGFSEWLPRNS

SEQ ID NO: 15199 - protein, 107 aa, Artificial Sequence
  Synthetic polypeptide
KFLVVSFYACIPRAQHNVRHMELLRDPLYIGLKHQRVHGKAYDDLLDEFMQAVTDKFGINCLIQFEDFANANAFRLLNKYRNKYCMFNDDIQDDFSRGPKRSQLFFK

SEQ ID NO: 15200 - protein, 78 aa, Artificial Sequence
  Synthetic polypeptide
FFSSRGHLPTSGDILGCHNVVRGAIGIWKVEAKDVAKHATMCRTTTPLTAKNYPTQNVNSAKVDCSSPFMTKVILQQC

SEQ ID NO: 15201 - protein, 39 aa, Artificial Sequence
  Synthetic polypeptide
RPRMLPNMLQCAGQPHPSQQRIIQPKMSIVPKWTVHHHS

SEQ ID NO: 15202 - protein, 451 aa, Artificial Sequence
  Synthetic polypeptide
CQSGLFITIHDKGHLATMLNSWPEDNIKAVVVTDGERILGLGDLGCYGMGIPVGKLALYTACGGVNPQQCLPVLLDVGTNNEELLRDPLYIGLKHQRVHGKAYDDLLDEFMQAVTDKFGINCLIQFEDFANANAFRLLNKYRNKYCMFNDDIQGTASVAVAGILAALRITKNKLSNHVFVFQGAGEAAMGIAHLLVMALEKEGVPKAEATRKIWMVDSKGLIVKGRSHLNHEKEMFAQDHPEVNSLEEVVRLVKPTAIIGVAAIAGAFTEQILRDMASFHERPIIFALSNPTSKAECTAEKCYRVTEGRGIFASGSPFKSVTLEDGKTFIPGQGNNAYVFPGVALGVIAGGIRHIPDEIFLLTAEQIAQEVSEQHLSQGRLYPPLSTIRDVSLRIAIKVLDYAYKHNLASYYPEPKDKEAFVRSLVYTPDYDSFTLDSYTWPKEAMNVQTV

SEQ ID NO: 15203 - protein, 427 aa, Artificial Sequence
  Synthetic polypeptide
CQSGLFITIHDKGHLATMLNSWPEDNIKAVVVTDGERILGLGDLGCYGMGIPVGKLALYTACGGVNPQQCLPVLLDVGTNNEELLRDPLYIGLKHQRVHGKAYDDLLDEFMQAVTDKFGINCLIQFEDFANANAFRLLNKYRNKYCMFNDDIQGTASVAVAGILAALRITKNKLSNHVFVFQGAGEAAMGIAHLLVMALEKEGVPKAEATRKIWMVDSKGLIVKGRSHLNHEKEMFAQDHPEVNSLEEVVRLVKPTAIIGVAAIAGAFTEQILRDMASFHERPIIFALSNPTSKAECTAEKCYRVTEGRGIFASGSPFKSVTLEDGKTFIPGQGNNAYVFPGVALGVIAGGIRHIPDEIFLLTAEQIAQEVSEQHLSQGRLYPPLSTIRDVSLRIAIKVLDYAYKHNLASYYPEPKDKEAFVRSLVY

SEQ ID NO: 15204 - protein, 189 aa, Artificial Sequence
  Synthetic polypeptide
CQSGLFITIHDKGHLATMLNSWPEDNIKAVVVTDGERILGLGDLGCYGMGIPVGKLALYTACGGVNPQQCLPVLLDVGTNNEELLRDPLYIGLKHQRVHGKAYDDLLDEFMQAVTDKFGINCLIQFEDFANANAFRLLNKYRNKYCMFNDDIQGTTCHTFSCPWHLWAQVMFQHIPGPMGFSEWLPRNS

SEQ ID NO: 15205 - protein, 168 aa, Artificial Sequence
  Synthetic polypeptide
CQSGLFITIHDKGHLATMLNSWPEDNIKAVVVTDGERILGLGDLGCYGMGIPVGKLALYTACGGVNPQQCLPVLLDVGTNNEELLRDPLYIGLKHQRVHGKAYDDLLDEFMQAVTDKFGINCLIQFEDFANANAFRLLNKYRNKYCMFNDDIQDDFSRGPKRSQLFFK

SEQ ID NO: 15206 - protein, 24 aa, Artificial Sequence
  Synthetic polypeptide
GLPSHVELGWPLPLKKGCSLESTA

SEQ ID NO: 15207 - protein, 51 aa, Artificial Sequence
  Synthetic polypeptide
VSRDLMILKKGSFPTETLFACCHPHKMRLAPPCLLPCEASPAMWNWDGLYP

SEQ ID NO: 15208 - protein, 580 aa, Artificial Sequence
  Synthetic polypeptide
KRGVSPQKLCLPVAIHIKCDLLLLAFCLVRPPQPCGTGMAFTLEERLQLGIHGLIPPCFLSQDVQLLRIMRYYERQQSDLDKYIILMTLQDRNEKLFYRVLTSDVEKFMPIVYTPTVGLACQHYGLTFRRPRGLFITIHDKGHLATMLNSWPEDNIKAVVVTDGERILGLGDLGCYGMGIPVGKLALYTACGGVNPQQCLPVLLDVGTNNEELLRDPLYIGLKHQRVHGKAYDDLLDEFMQAVTDKFGINCLIQFEDFANANAFRLLNKYRNKYCMFNDDIQGTASVAVAGILAALRITKNKLSNHVFVFQGAGEAAMGIAHLLVMALEKEGVPKAEATRKIWMVDSKGLIVKGRSHLNHEKEMFAQDHPEVNSLEEVVRLVKPTAIIGVAAIAGAFTEQILRDMASFHERPIIFALSNPTSKAECTAEKCYRVTEGRGIFASGSPFKSVTLEDGKTFIPGQGNNAYVFPGVALGVIAGGIRHIPDEIFLLTAEQIAQEVSEQHLSQGRLYPPLSTIRDVSLRIAIKVLDYAYKHNLASYYPEPKDKEAFVRSLVYTPDYDSFTLDSYTWPKEAMNVQTV

SEQ ID NO: 15209 - protein, 556 aa, Artificial Sequence
  Synthetic polypeptide
KRGVSPQKLCLPVAIHIKCDLLLLAFCLVRPPQPCGTGMAFTLEERLQLGIHGLIPPCFLSQDVQLLRIMRYYERQQSDLDKYIILMTLQDRNEKLFYRVLTSDVEKFMPIVYTPTVGLACQHYGLTFRRPRGLFITIHDKGHLATMLNSWPEDNIKAVVVTDGERILGLGDLGCYGMGIPVGKLALYTACGGVNPQQCLPVLLDVGTNNEELLRDPLYIGLKHQRVHGKAYDDLLDEFMQAVTDKFGINCLIQFEDFANANAFRLLNKYRNKYCMFNDDIQGTASVAVAGILAALRITKNKLSNHVFVFQGAGEAAMGIAHLLVMALEKEGVPKAEATRKIWMVDSKGLIVKGRSHLNHEKEMFAQDHPEVNSLEEVVRLVKPTAIIGVAAIAGAFTEQILRDMASFHERPIIFALSNPTSKAECTAEKCYRVTEGRGIFASGSPFKSVTLEDGKTFIPGQGNNAYVFPGVALGVIAGGIRHIPDEIFLLTAEQIAQEVSEQHLSQGRLYPPLSTIRDVSLRIAIKVLDYAYKHNLASYYPEPKDKEAFVRSLVY

SEQ ID NO: 15210 - protein, 318 aa, Artificial Sequence
  Synthetic polypeptide
KRGVSPQKLCLPVAIHIKCDLLLLAFCLVRPPQPCGTGMAFTLEERLQLGIHGLIPPCFLSQDVQLLRIMRYYERQQSDLDKYIILMTLQDRNEKLFYRVLTSDVEKFMPIVYTPTVGLACQHYGLTFRRPRGLFITIHDKGHLATMLNSWPEDNIKAVVVTDGERILGLGDLGCYGMGIPVGKLALYTACGGVNPQQCLPVLLDVGTNNEELLRDPLYIGLKHQRVHGKAYDDLLDEFMQAVTDKFGINCLIQFEDFANANAFRLLNKYRNKYCMFNDDIQGTTCHTFSCPWHLWAQVMFQHIPGPMGFSEWLPRNS

SEQ ID NO: 15211 - protein, 127 aa, Artificial Sequence
  Synthetic polypeptide
KRGVSPQKLCLPVAIHIKCDLLLLAFCLVRPPQPCGTGMAFTLEERLQLGIHGLIPPCFLSQDVQLLRIMRYYERQQSDLDKYIILMTLQDRNEKLFYRVLTSDVEKFMPIVYTPTVGLACQHYGLT

SEQ ID NO: 15212 - protein, 24 aa, Artificial Sequence
  Synthetic polypeptide
DLSSHVELGWPLPLKKGCSLESTA

SEQ ID NO: 15213 - protein, 40 aa, Artificial Sequence
  Synthetic polypeptide
HISPASAHSLSCHPLRRCLRHDCKFLETFPAMWNWDGLYP

SEQ ID NO: 15214 - protein, 562 aa, Artificial Sequence
  Synthetic polypeptide
GGAFAMIVSFLRPFQPCGTGMAFTLEERLQLGIHGLIPPCFLSQDVQLLRIMRYYERQQSDLDKYIILMTLQDRNEKLFYRVLTSDVEKFMPIVYTPTVGLACQHYGLTFRRPRGLFITIHDKGHLATMLNSWPEDNIKAVVVTDGERILGLGDLGCYGMGIPVGKLALYTACGGVNPQQCLPVLLDVGTNNEELLRDPLYIGLKHQRVHGKAYDDLLDEFMQAVTDKFGINCLIQFEDFANANAFRLLNKYRNKYCMFNDDIQGTASVAVAGILAALRITKNKLSNHVFVFQGAGEAAMGIAHLLVMALEKEGVPKAEATRKIWMVDSKGLIVKGRSHLNHEKEMFAQDHPEVNSLEEVVRLVKPTAIIGVAAIAGAFTEQILRDMASFHERPIIFALSNPTSKAECTAEKCYRVTEGRGIFASGSPFKSVTLEDGKTFIPGQGNNAYVFPGVALGVIAGGIRHIPDEIFLLTAEQIAQEVSEQHLSQGRLYPPLSTIRDVSLRIAIKVLDYAYKHNLASYYPEPKDKEAFVRSLVYTPDYDSFTLDSYTWPKEAMNVQTV

SEQ ID NO: 15215 - protein, 538 aa, Artificial Sequence
  Synthetic polypeptide
GGAFAMIVSFLRPFQPCGTGMAFTLEERLQLGIHGLIPPCFLSQDVQLLRIMRYYERQQSDLDKYIILMTLQDRNEKLFYRVLTSDVEKFMPIVYTPTVGLACQHYGLTFRRPRGLFITIHDKGHLATMLNSWPEDNIKAVVVTDGERILGLGDLGCYGMGIPVGKLALYTACGGVNPQQCLPVLLDVGTNNEELLRDPLYIGLKHQRVHGKAYDDLLDEFMQAVTDKFGINCLIQFEDFANANAFRLLNKYRNKYCMFNDDIQGTASVAVAGILAALRITKNKLSNHVFVFQGAGEAAMGIAHLLVMALEKEGVPKAEATRKIWMVDSKGLIVKGRSHLNHEKEMFAQDHPEVNSLEEVVRLVKPTAIIGVAAIAGAFTEQILRDMASFHERPIIFALSNPTSKAECTAEKCYRVTEGRGIFASGSPFKSVTLEDGKTFIPGQGNNAYVFPGVALGVIAGGIRHIPDEIFLLTAEQIAQEVSEQHLSQGRLYPPLSTIRDVSLRIAIKVLDYAYKHNLASYYPEPKDKEAFVRSLVY

SEQ ID NO: 15216 - protein, 300 aa, Artificial Sequence
  Synthetic polypeptide
GGAFAMIVSFLRPFQPCGTGMAFTLEERLQLGIHGLIPPCFLSQDVQLLRIMRYYERQQSDLDKYIILMTLQDRNEKLFYRVLTSDVEKFMPIVYTPTVGLACQHYGLTFRRPRGLFITIHDKGHLATMLNSWPEDNIKAVVVTDGERILGLGDLGCYGMGIPVGKLALYTACGGVNPQQCLPVLLDVGTNNEELLRDPLYIGLKHQRVHGKAYDDLLDEFMQAVTDKFGINCLIQFEDFANANAFRLLNKYRNKYCMFNDDIQGTTCHTFSCPWHLWAQVMFQHIPGPMGFSEWLPRNS

SEQ ID NO: 15217 - protein, 109 aa, Artificial Sequence
  Synthetic polypeptide
GGAFAMIVSFLRPFQPCGTGMAFTLEERLQLGIHGLIPPCFLSQDVQLLRIMRYYERQQSDLDKYIILMTLQDRNEKLFYRVLTSDVEKFMPIVYTPTVGLACQHYGLT

SEQ ID NO: 15218 - protein, 421 aa, Artificial Sequence
  Synthetic polypeptide
GRSQDGRIGTAPVYSSQRERRRRRVISAFPSEIAAILRKRKLDYYLHKLLPEILQSASFLTANGALYMAFFCILRKILGKFYSWTPGFGAALPASYVAILIERKSRRGLLTIYMANLVLLFCITAAMYMFFFRCKDGLKGFTFSALRFIVGKEEIPTHSFSPEAAYAKVEQKREQHEEKPGRMNMIGLVRKFVDSICKHGPRHRCCKHYEDNCISYCIKGFIRMFSVGYLIQCCLRIPSAFRHLFTQPSRLLSLFYNKENFQLGAFLGSFVSIYKGTSCFLRWIRNLDDELHAIIAGFLAGISMMFYKSTTISMYLASKLVETMYFKGIEAGKVPYFPHADTIIYSISTAICFQAAVMEVQTLRPSYWKFLLRLTKGKFAVMNRKVLDVFGTGASKHFQDFIPRLDPRYTTVTPELPTEFS

SEQ ID NO: 15219 - protein, 16 aa, Artificial Sequence
  Synthetic polypeptide
FLHFHLRLQQFSGNGN

SEQ ID NO: 15220 - protein, 108 aa, Artificial Sequence
  Synthetic polypeptide
GRSQDGRIGTAPVYSSQRERRRRRVISAFPSEIAAILRKRKLDYYLHKLLPEILQSASFLTANGALYMAFFCILRRGLLTIYMANLATETLFRMGVARGTITTLRNGE

SEQ ID NO: 15221 - protein, 145 aa, Artificial Sequence
  Synthetic polypeptide
GRSQDGRIGTAPVYSSQRERRRRRVISAFPSEIAAILRKRKLDYYLHKLLPEILQSASFLTANGALYMAFFCILRKILGKFYSWTPGFGAALPASYVAILIERKSRRGLLTIYMANLMESHCLPQAGVISAPCSLCLPGSRDSPA

SEQ ID NO: 15222 - protein, 215 aa, Artificial Sequence
  Synthetic polypeptide
GRSQDGRIGTAPVYSSQRERRRRRVISAFPSEIAAILRKRKLDYYLHKLLPEILQSASFLTANGALYMAFFCILRKILGKFYSWTPGFGAALPASYVAILIERKSRRGLLTIYMANLTESRFVAQAGVQWCDLSSLQPAPPGFKRFLFLSHLSSWDYRFVPPCLANFCIFVEMRFHHVSQAGLEFLALSDPPALASQSAEITGVSHCAWPKNKIF

SEQ ID NO: 15223 - protein, 443 aa, Artificial Sequence
  Synthetic polypeptide
GRSQDGRIGTAPVYSSQRERRRRRVISAFPSEIAAILRKRKLDYYLHKLLPEILQSASFLTANGALYMAFFCILRKILGKFYSWTPGFGAALPASYVAILIERKSRRGLLTIYMANLATETLFRMGVARGTITTLRNGEVLLFCITAAMYMFFFRCKDGLKGFTFSALRFIVGKEEIPTHSFSPEAAYAKVEQKREQHEEKPGRMNMIGLVRKFVDSICKHGPRHRCCKHYEDNCISYCIKGFIRMFSVGYLIQCCLRIPSAFRHLFTQPSRLLSLFYNKENFQLGAFLGSFVSIYKGTSCFLRWIRNLDDELHAIIAGFLAGISMMFYKSTTISMYLASKLVETMYFKGIEAGKVPYFPHADTIIYSISTAICFQAAVMEVQTLRPSYWKFLLRLTKGKFAVMNRKVLDVFGTGASKHFQDFIPRLDPRYTTVTPELPTEFS

SEQ ID NO: 15224 - protein, 24 aa, Artificial Sequence
  Synthetic polypeptide
LQEKRLRASTDSTLWPQKHYSEWV

SEQ ID NO: 15225 - protein, 42 aa, Artificial Sequence
  Synthetic polypeptide
MGPSSYRKKGSGLPLILHCGHRNTIQNGCSKRNHHNIKKWRS

SEQ ID NO: 15226 - protein, 26 aa, Artificial Sequence
  Synthetic polypeptide
FYIVATETLFRMGVARGTITTLRNGE

SEQ ID NO: 15227 - protein, 70 aa, Artificial Sequence
  Synthetic polypeptide
MGPSSYRKKGSGLPLILHCGHRNTIQNGCSKRNHHNIKKWRSPFVLHHSCHVHVLFQVQGWLERIYIFCT

SEQ ID NO: 15228 - protein, 330 aa, Artificial Sequence
  Synthetic polypeptide
FYIVATETLFRMGVARGTITTLRNGEVLLFCITAAMYMFFFRCKDGLKGFTFSALRFIVGKEEIPTHSFSPEAAYAKVEQKREQHEEKPGRMNMIGLVRKFVDSICKHGPRHRCCKHYEDNCISYCIKGFIRMFSVGYLIQCCLRIPSAFRHLFTQPSRLLSLFYNKENFQLGAFLGSFVSIYKGTSCFLRWIRNLDDELHAIIAGFLAGISMMFYKSTTISMYLASKLVETMYFKGIEAGKVPYFPHADTIIYSISTAICFQAAVMEVQTLRPSYWKFLLRLTKGKFAVMNRKVLDVFGTGASKHFQDFIPRLDPRYTTVTPELPTEFS

SEQ ID NO: 15229 - protein, 63 aa, Artificial Sequence
  Synthetic polypeptide
MLLSWEWVSWHRSGFLTKKLLPPLSSLMCMLCCLSAFCHEMLQQEDPHQVPASRHWIFQPPEL

SEQ ID NO: 15230 - protein, 78 aa, Artificial Sequence
  Synthetic polypeptide
LGECCYHGSGLVGTGVGSLQKNYFRLFPLSCACFVAFLPSAMRCCSKKTLTRCQRLDIGFSSLQNSRIVSKQSLSICS

SEQ ID NO: 15231 - protein, 536 aa, Artificial Sequence
  Synthetic polypeptide
TLDFPASRTLGLCLSRASASVLNLNCSLILLPMCRTLLAYLRGSQKVPSRRTRRLLDKSRTFHITCGVTICIFSGVHVAAHLVNALNFSVNYSEDFVELNAARYRDEDPRKLLFTTVPGLTGVCMVVVLFLMITASTYAIRVSNYDIFWYTHNLFFVFYMLLTLHVSGGLLKYQTNLDTHPPGCISLNRTSSQNISLPEYFSEHFHEPFPEGFSKPAEFTQHKFVKICMEEPRFQANFPQTWLWISGPLCLYCAERLYRYIRSNKPVTIISVMSHPSDVMEIRMVKENFKARPGQYITLHCPSVSALENHPFTLTMCPTETKATFGVHLKIVGDWTERFRDLLLPPSSQDSEILPFIQSRNYPKLYIDGPFGSPFEESLNYEVSLCVAGGIGVTPFASILNTLLDDWKPYKLRRLYFIWVCRDIQSFRWFADLLCMLHNKFWQENRPDYVNIQLYLSQTDGIQKIIGEKYHALNSRLFIGRPRWKLLFDEIAKYNRGKTVGVFCCGPNSLSKTLHKLSNQNNSYGTRFEYNKESFS

SEQ ID NO: 15232 - protein, 496 aa, Artificial Sequence
  Synthetic polypeptide
TLDFPASRTLGLCLSRASASVLNLNCSLILLPMCRTLLAYLRGSQKVPSRRTRRLLDKSRTFHITCGVTICIFSGVHVAAHLVNALNFSVNYSEDFVELNAARYRDEDPRKLLFTTVPGLTGVCMVVVLFLMITASTYAIRVSNYDIFWYTHNLFFVFYMLLTLHVSGGLLKYQTNLDTHPPGCISLNRTSSQNISLPEYFSEHFHEPFPEGFSKPAEFTQHKFVKICMEEPRFQANFPQTWLWISGPLCLYCAERLYRYIRSNKPVTIISVMSHPSDVMEIRMVKENFKARPGQYITLHCPSVSALENHPFTLTMCPTETKATFGVHLKIVGDWTERFRDLLLPPSSQDSEILPFIQSRNYPKDDWKPYKLRRLYFIWVCRDIQSFRWFADLLCMLHNKFWQENRPDYVNIQLYLSQTDGIQKIIGEKYHALNSRLFIGRPRWKLLFDEIAKYNRGKTVGVFCCGPNSLSKTLHKLSNQNNSYGTRFEYNKESFS

SEQ ID NO: 15233 - protein, 300 aa, Artificial Sequence
  Synthetic polypeptide
TLDFPASRTLGLCLSRASASVLNLNCSLILLPMCRTLLAYLRGSQKVPSRRTRRLLDKSRTFHITCGVTICIFSGVHVAAHLVNALNFSVNYSEDFVELNAARYRDEDPRKLLFTTVPGLTGVCMVVVLFLMITASTYAIRVSNYDIFWYTHNLFFVFYMLLTLHVSGDDWKPYKLRRLYFIWVCRDIQSFRWFADLLCMLHNKFWQENRPDYVNIQLYLSQTDGIQKIIGEKYHALNSRLFIGRPRWKLLFDEIAKYNRGKTVGVFCCGPNSLSKTLHKLSNQNNSYGTRFEYNKESFS

SEQ ID NO: 15234 - protein, 182 aa, Artificial Sequence
  Synthetic polypeptide
TLDFPASRTLGLCLSRASASVLNLNCSLILLPMCRTLLAYLRGSQKVPSRRTRRLLDKSRTFHITCGVTICIFSGVHVAAHLVNALNFSVNYSEDFVELNAARYRDEDPRKLLFTTVPGLTGVCMVVVLFLMITASTYAIRVSNYDIFWYTHNLFFVFYMLLTLHVSGVQLKPKQHLGFILK

SEQ ID NO: 15235 - protein, 59 aa, Artificial Sequence
  Synthetic polypeptide
ASETTNPPEGRNSEHIRTSVGINSGHAAFKNGECQNTPGEKHCLYQLGFIYRRQLYSQS

SEQ ID NO: 15236 - protein, 323 aa, Artificial Sequence
  Synthetic polypeptide
TPDTPPLRTENVKILQERSIAYINSDSSIEGNYTLRVDCTPLLYQLVYKLTKEIPSPDDGFESKSLYESWLEKDPSPENKNLPRINKLGSGSDFEAYFQRLGIASGRARYTKNKKTDKYSSYPVYHTIYETFELVEKFYDPTFKKQLSVAQLRGALVYELVDSKIIPFNIQDYAEALKNYAASIYNLSKKHDQQLTDHGVSFDSLFSAVKNFSEAASDFHKRLIQVDLNNPIAVRMMNDQLMLLERAFIDPLGLPGKLFYRHIIFAPSSHNKYAGESFPGIYDAIFDIENKANSRLAWKEVKKHISIAAFTIQAAAGTLKEVL

SEQ ID NO: 15237 - protein, 21 aa, Artificial Sequence
  Synthetic polypeptide
ERRMSKYSRREALLISTRIHL

SEQ ID NO: 15238 - protein, 64 aa, Artificial Sequence
  Synthetic polypeptide
AGRGGSFWEAGRSREARSLRPTWPTWRNPISTKNTKTSRMWWHAPIIPATREAEPSGPRGWTLL

SEQ ID NO: 15239 - protein, 415 aa, Artificial Sequence
  Synthetic polypeptide
SQLLGRLSPLDPEVGPYCDTPTMRTLFNLLWLALACSPVHTTLSKSDAKKAASKTLLEKSQFSDKPVQDRGLVVTDLKAESVVLEHRSYCSAKARDRHFAGDVLGYVTPWNSHGYDVTKVFGSKFTQISPVWLQLKRRGREMFEVTGLHDVDQGWMRAVRKHAKGLHIVPRLLFEDWTYDDFRNVLDSEDEIEELSKTVVQVAKNQHFDGFVVEVWNQLLSQKRVGLIHMLTHLAEALHQARLLALLVIPPAITPGTDQLGMFTHKEFEQLAPVLDGFSLMTYDYSTAHQPGPNAPLSWVRACVQVLDPKSKWRSKILLGLNFYGMDYATSKDAREPVVGARYIQTLKDHRPRMVWDSQASEHFFEYKKSRSGRHVVFYPTLKSLQVRLELARELGVGVSIWELGQGLDYFYDLL

SEQ ID NO: 15240 - protein, 11 aa, Artificial Sequence
  Synthetic polypeptide
TYSRLYHLGLS

SEQ ID NO: 15241 - protein, 85 aa, Artificial Sequence
  Synthetic polypeptide
ALPSRVIMKIKSLMSVPAHAECYVRDHLLHHWIALLADCPITAHMYEDVALIKDHTLVNSLIRVLQTLQEFNITLETSLVKGIDI

SEQ ID NO: 15242 - protein, 22 aa, Artificial Sequence
  Synthetic polypeptide
TKCGYDQGQSTQISVRGVCFCL

SEQ ID NO: 15243 - protein, 193 aa, Artificial Sequence
  Synthetic polypeptide
MDKQNVAMTRARALRSQSEESASAFSADDLMSIDLAEQMANDSDDSISAATNKGRGRGRGRRGGRGQNSASRGGSQRGRADTGLETSTRSRNSKTAVSASRNMSIIDAFKSTRQQPSRNVTTKNYSEVIEVDESDVEEDIFPTTSKTDQRWSSTSSSKIMSQSQVSKGVDFESSEDDDDDPFMNTSSLRRNRR

SEQ ID NO: 15244 - protein, 24 aa, Artificial Sequence
  Synthetic polypeptide
FTIAEKWKQPSWSSTDRWINKMWL

SEQ ID NO: 15245 - protein, 165 aa, Artificial Sequence
  Synthetic polypeptide
MDKQNVAMTRARALRSQSEESASAFSADDLMSIDLAEQMANDSDDSISAATNKGRGRGRGRRGGRGQNSASRGGSQRGRAFKSTRQQPSRNVTTKNYSEVIEVDESDVEEDIFPTTSKTDQRWSSTSSSKIMSQSQVSKGVDFESSEDDDDDPFMNTSSLRRNRR

SEQ ID NO: 15246 - protein, 192 aa, Artificial Sequence
  Synthetic polypeptide
MDKQNVAMTRARALRSQSEESASAFSADDLMSIDLAEQMANDSDDSISAATNKGRGRGRGRRGGRGQNSASRGGSQRGRDTGLETSTRSRNSKTAVSASRNMSIIDAFKSTRQQPSRNVTTKNYSEVIEVDESDVEEDIFPTTSKTDQRWSSTSSSKIMSQSQVSKGVDFESSEDDDDDPFMNTSSLRRNRR

SEQ ID NO: 15247 - protein, 106 aa, Artificial Sequence
  Synthetic polypeptide
MVCVSHNKPPMPTSVPINHAAAQPHVLPDLFRQRATALCLPAASTPDGPGCSTAPACRLPQPAAWSRCLCDCGASPANGGDINRGEPGASPGTSGLLRQCRQAPQV

SEQ ID NO: 15248 - protein, 586 aa, Artificial Sequence
  Synthetic polypeptide
VIISRPCQLPFPSTMQQHSPMSSQTSSASGPLHSVSLPLPLPMALGAPQPPPAASPSQQLGPDAFAIVERAQQMVEILTEENRVLHQELQGYYDNADKLHKFEKELQRISEAYESLVKSTTKRESLDKAMRNKLEGEIRRLHDFNRDLRDRLETANRQLSSREYEGHEDKAAEGHYASQNKEFLKEKEKLEMELAAVRTASEDHRRHIEILDQALSNAQARVIKLEEELREKQAYVEKVEKLQQALTQLQSACEKREQMERRLRTWLERELDALRTQQKHGNGQPANMPEYNAPALLELVREKEERILALEADMTKWEQKYLEESTIRHFAMNAAATAAAERDTTIINHSRNGSYGESSLEAHIWQEEEEVVQANRRCQDMEYTIKNLHAKIIEKDAMIKVLQQRSRKDAGKTDSSSLRPARSVPSIAAATGTHSRQTSLTSSQLAEEKKEEKTWKGSIGLLLGKEHHEHASAPLLPPPPTSALSSIASTTAASSAHAKTGSKDSSTQTDKSAELFWPSMASLPSRGRLSTTPAHSPVLKHPAAKGTAEKLENSPGHGKSPDHRGRVSSLLHKPEFPDGEMMEVLI

SEQ ID NO: 15249 - protein, 37 aa, Artificial Sequence
  Synthetic polypeptide
MVCVSHNKPPMPTSVPINHAAAQPHELQDLSYQQPAG

SEQ ID NO: 15250 - protein, 173 aa, Artificial Sequence
  Synthetic polypeptide
VIISRPCQLPFPSTMQQHSPMNFRTSLTSSQLAEEKKEEKTWKGSIGLLLGKEHHEHASAPLLPPPPTSALSSIASTTAASSAHAKTGSKDSSTQTDKSAELFWPSMASLPSRGRLSTTPAHSPVLKHPAAKGTAEKLENSPGHGKSPDHRGRVSSLLHKPEFPDGEMMEVLI

SEQ ID NO: 15251 - protein, 105 aa, Artificial Sequence
  Synthetic polypeptide
KMPTKINCVCETQGQKLKLSNSSRPRDYCGRAAHANFRSHQPCSSTAPCPPRPLPPAGHCTLSPCRFHSRWPWVLHSPRLPPPPASSLVQMPLRLWSEPSKWWRY

SEQ ID NO: 15252 - protein, 112 aa, Artificial Sequence
  Synthetic polypeptide
NYPTPQDPETIVEEPPMPTSVPINHAAAQPHVLPDLFRQRATALCLPAASTPDGPGCSTAPACRLPQPAAWSRCLCDCGASPANGGDINRGEPGASPGTSGLLRQCRQAPQV

SEQ ID NO: 15253 - protein, 603 aa, Artificial Sequence
  Synthetic polypeptide
DTGPEIKTIQLLKTQRLLWKSRPCQLPFPSTMQQHSPMSSQTSSASGPLHSVSLPLPLPMALGAPQPPPAASPSQQLGPDAFAIVERAQQMVEILTEENRVLHQELQGYYDNADKLHKFEKELQRISEAYESLVKSTTKRESLDKAMRNKLEGEIRRLHDFNRDLRDRLETANRQLSSREYEGHEDKAAEGHYASQNKEFLKEKEKLEMELAAVRTASEDHRRHIEILDQALSNAQARVIKLEEELREKQAYVEKVEKLQQALTQLQSACEKREQMERRLRTWLERELDALRTQQKHGNGQPANMPEYNAPALLELVREKEERILALEADMTKWEQKYLEESTIRHFAMNAAATAAAERDTTIINHSRNGSYGESSLEAHIWQEEEEVVQANRRCQDMEYTIKNLHAKIIEKDAMIKVLQQRSRKDAGKTDSSSLRPARSVPSIAAATGTHSRQTSLTSSQLAEEKKEEKTWKGSIGLLLGKEHHEHASAPLLPPPPTSALSSIASTTAASSAHAKTGSKDSSTQTDKSAELFWPSMASLPSRGRLSTTPAHSPVLKHPAAKGTAEKLENSPGHGKSPDHRGRVSSLLHKPEFPDGEMMEVLI

SEQ ID NO: 15254 - protein, 48 aa, Artificial Sequence
  Synthetic polypeptide
KMPTKINCVCETQGQKLKLSNSSRPRDYCGRAAHANFRSHQPCSSTAP

SEQ ID NO: 15255 - protein, 43 aa, Artificial Sequence
  Synthetic polypeptide
NYPTPQDPETIVEEPPMPTSVPINHAAAQPHELQDLSYQQPAG

SEQ ID NO: 15256 - protein, 190 aa, Artificial Sequence
  Synthetic polypeptide
DTGPEIKTIQLLKTQRLLWKSRPCQLPFPSTMQQHSPMNFRTSLTSSQLAEEKKEEKTWKGSIGLLLGKEHHEHASAPLLPPPPTSALSSIASTTAASSAHAKTGSKDSSTQTDKSAELFWPSMASLPSRGRLSTTPAHSPVLKHPAAKGTAEKLENSPGHGKSPDHRGRVSSLLHKPEFPDGEMMEVLI

SEQ ID NO: 15257 - protein, 110 aa, Artificial Sequence
  Synthetic polypeptide
GRVRWLMPVIPALWEAEAGGSPEVRSSRPTQGNMVAIVAQDLAAFHTASSEMGHQQHSHHLVTTETRPLTLVATSNGTQIAVQLGEQPSLEEAIRIASRIQQGETPGLDD

SEQ ID NO: 15258 - protein, 28 aa, Artificial Sequence
  Synthetic polypeptide
SQHFGRLRQVDHLRSGVQDQPRATWLQL

SEQ ID NO: 15259 - protein, 34 aa, Artificial Sequence
  Synthetic polypeptide
GQEFKTNPGQHGCNCSSRLGSIPYCLIRNGAPAA

SEQ ID NO: 15260 - protein, 114 aa, Artificial Sequence
  Synthetic polypeptide
GRVRWLMPVIPALWEAEAGGSPEVRSSRPTQGNMVAIVAQDLAAFHTASSEMGHQQHSHHLVTTETRPLTLVATSNGTQIAVQVSTKAYCPQSTAVLLIAFNFVHCASCITFTG

SEQ ID NO: 15261 - protein, 31 aa, Artificial Sequence
  Synthetic polypeptide
QKRITVAQEFETVVSDDGTTVLQHRQQIHKP

SEQ ID NO: 15262 - protein, 218 aa, Artificial Sequence
  Synthetic polypeptide
AMMAPLYSSIGNRSTSPSHAVVANVQLVLHLMKQHSKALCNDRVINSIPLAKQVSSRGGKSKKLSVTPPSSNGINEELSEVLQTLQDEFGQMSFDHQQLAKLIQESPTVELKDKLECELEALVGRMEAKANQITKVRKYQAQLEKQKLEKQKKELKATKKTLDEERNSSSRSGITGTTNKKDFMKLRPGEKRRKNLQLLKDMQSIQNSLQSSSLCWDY

SEQ ID NO: 15263 - protein, 11 aa, Artificial Sequence
  Synthetic polypeptide
ATDPQALAMPW

SEQ ID NO: 15264 - protein, 93 aa, Artificial Sequence
  Synthetic polypeptide
AMMAPLYSSIGNRSTSPSHAVVANVQLVLHLMKQHSKALCNDRVINSIPLAKQVSSRGGKSKKLSVTPPSSNGINEELSEVLQTLQDEFGQMS

SEQ ID NO: 15265 - protein, 182 aa, Artificial Sequence
  Synthetic polypeptide
AMMAPLYSSIGNRSTSPSHAVVANVQLVLHLMKQHSKALCNDRVINSIPLAKQVSSRGGKSKKLSVTPPSSNGINEELSEVLQTLQDEFGQMSFDHQQLAKLIQESPTVELKDKLECELEALVGRMEAKANQITKVRKYQAQLEKQKLEKQKKELKATKKTLDEERNSSSRSGITGTTNKKD

SEQ ID NO: 15266 - protein, 76 aa, Artificial Sequence
  Synthetic polypeptide
RNEKAEKSRQIIVYFCKVTQNVLASPASPSTSSASATPETARPTLPFCLLNSEDNGDEGLYGDPVNEYPQALAMPW

SEQ ID NO: 15267 - protein, 48 aa, Artificial Sequence
  Synthetic polypeptide
PLLPPPPLLLPLPLLRQQDQPYPSAYSTVKIMGMKACMVIQLMNIHKP

SEQ ID NO: 15268 - protein, 206 aa, Artificial Sequence
  Synthetic polypeptide
ISTSPSHAVVANVQLVLHLMKQHSKALCNDRVINSIPLAKQVSSRGGKSKKLSVTPPSSNGINEELSEVLQTLQDEFGQMSFDHQQLAKLIQESPTVELKDKLECELEALVGRMEAKANQITKVRKYQAQLEKQKLEKQKKELKATKKTLDEERNSSSRSGITGTTNKKDFMKLRPGEKRRKNLQLLKDMQSIQNSLQSSSLCWDY

SEQ ID NO: 15269 - protein, 81 aa, Artificial Sequence
  Synthetic polypeptide
ISTSPSHAVVANVQLVLHLMKQHSKALCNDRVINSIPLAKQVSSRGGKSKKLSVTPPSSNGINEELSEVLQTLQDEFGQMS

SEQ ID NO: 15270 - protein, 170 aa, Artificial Sequence
  Synthetic polypeptide
ISTSPSHAVVANVQLVLHLMKQHSKALCNDRVINSIPLAKQVSSRGGKSKKLSVTPPSSNGINEELSEVLQTLQDEFGQMSFDHQQLAKLIQESPTVELKDKLECELEALVGRMEAKANQITKVRKYQAQLEKQKLEKQKKELKATKKTLDEERNSSSRSGITGTTNKKD

SEQ ID NO: 15271 - protein, 25 aa, Artificial Sequence
  Synthetic polypeptide
GALSAPPWHSLHVTILSHPESSRVP

SEQ ID NO: 15272 - protein, 33 aa, Artificial Sequence
  Synthetic polypeptide
VKVPFLLLHGTLCTLLSCHILNPPGFLEKKTGS

SEQ ID NO: 15273 - protein, 986 aa, Artificial Sequence
  Synthetic polypeptide
ILQGSLKRKQVVNLSPANSKRPNGFVDNSFLDIKRIRVGENLSAGQGGLQINNGQSQIMSGTLPMSQAPLRKTNTLPSHTHSPGNGLFNMGLKEVKKEPGETLSCSKHMDGQMTQENIFPNRYGDDPGEQLMDPELQELFNELTNISVPPMSDLELENMINATIKQDDPFNIDLGQQSQRSTPRPSLPMEKIVIKSEYSPGLTQGPSGSPQLRPPSAGPAFSMANSALSTSSPIPSVPQSQAQPQTGSGASRALPSWQEVSHAQQLKQIAANRQQHARMQQHQQQHQPTNWSALPSSAGPSPGPFGQEKIPSPSFGQQTFSPQSSPMPGVAGGSGQSKVMANYMYKAGPSAQGGHLDVLMQQKPQDLSRSFINNPHPAMEPRQGNTKPLFHFNSDQANQQMPSVLPSQNKPSLLHYTQQQQQQQQQQQQQQQQQQQQQQQQQQQQQQQQQQSSISAQQQQQQQSSISAQQQQQQQQQQQQQQQQQQQQQQQQQQQPSSQPAQSLPSQPLLRSPLPLQQKLLLQQMQNQPIAGMGYQVSQQQRQDQHSVVGQNTGPSPSPNPCSNPNTGSGYMNSQQSLLNQQLMGKKQTLQRQIMEQKQQLLLQQQMLADAEKIAPQDQINRHLSRPPPDYKDQRRNVGNMQPTAQYSGGSSTISLNSNQALANPVSTHTILTPNSSLLSTSHGTRMPSLSTAVQNMGMYGNLPCNQPNTYSVTSGMNQLTQQRNPKQLLANQNNPMMPRPPTLGPSNNNNVATFGAGSVGNSQQLRPNLTHSMASMPPQRTSNVMITSNTTAPNWASQEGTSKQQEALTSAGVRFPTGTPAAYTPNQSLQQAVGSQQFSQRAVAPPNQLTPAVQMRPMNQMSQTLNGQTMGPLRGLNLRPNQLSTQILPNLNQSGTGLNQSRTGINQPPSLTPSNFPSPNQSSRAFQGTDHSSDLAFDFLSQQNDNMGPALNSDADFIDSLLKTEPGNDDWMKDINLDEILGNNS

SEQ ID NO: 15274 - protein, 60 aa, Artificial Sequence
  Synthetic polypeptide
ALDGESRDPVSNPCSVTNKLRDLRTLKRNLAQAVMKLMRRKKRIIMNLMKMEMIILSMTL

SEQ ID NO: 15275 - protein, 25 aa, Artificial Sequence
  Synthetic polypeptide
HWTGNQETRFLIPALSLTSCVIFGL

SEQ ID NO: 15276 - protein, 284 aa, Artificial Sequence
  Synthetic polypeptide
SSDSEKESCPSSDEVDEEEEEDNYESDEDGDDYIIDDFVVQDEEGDEENKNQQGEKLTTSQLKLVKQNSLYSFSDHYTHFERVVKALLINALDESFLGTLYDGTRQKSYAKDMLTSLHYLDNRFVQPRLESLVSRSRWKEQYKERVENYSNVSIHLKNPENCSCQACGLHRYCKYSVHLSGELYNTRTMQIDNFMSHDKQVFTVGRICASRTRIYHKLKHFKFKLYQECCTIAMTEEVEDEQVKETVERIFRRSKENGWIKEKYGQLEEYLNFADYFQEEKFEL

SEQ ID NO: 15277 - protein, 310 aa, Artificial Sequence
  Synthetic polypeptide
EQLRSTAPVYSSQRERRRRRVISAFPSEDSEKESCPSSDEVDEEEEEDNYESDEDGDDYIIDDFVVQDEEGDEENKNQQGEKLTTSQLKLVKQNSLYSFSDHYTHFERVVKALLINALDESFLGTLYDGTRQKSYAKDMLTSLHYLDNRFVQPRLESLVSRSRWKEQYKERVENYSNVSIHLKNPENCSCQACGLHRYCKYSVHLSGELYNTRTMQIDNFMSHDKQVFTVGRICASRTRIYHKLKHFKFKLYQECCTIAMTEEVEDEQVKETVERIFRRSKENGWIKEKYGQLEEYLNFADYFQEEKFEL

SEQ ID NO: 15278 - protein, 43 aa, Artificial Sequence
  Synthetic polypeptide
FLHFHLRTLKRNLAQAVMKLMRRKKRIIMNLMKMEMIILSMTL

SEQ ID NO: 15279 - protein, 507 aa, Artificial Sequence
  Synthetic polypeptide
AYTYSSFGLSYFKVLSHNLCTVLKVPHDPVALEEHFRDDDEGPVSNQGYMPYLNRFILEKIEYLLKKLTEAMGGGWQQEQFEHYKINFDDSKNGLSAWELIELIGNGQFSKGMDRQTVSMAINEVFNELILDVLKQGYMMKKGHRRKNWTERWFVLKPNIISYYVSEDLKDKKGDILLDENCCVESLPDKDGKKCLFLVKCFDKTFEISASDKKKKQEWIQAIHSTIHLLKLGSPPPHKEARQRRKELRKKQLAEQEELERQMKELQAANESKQQELEAVRKKLEEAASRAAEEEKKRLQTQVELQARFSTELEREKLIRQQMEEQVAQKSSELEQYLQRVRELEDMYLKLQEALEDERQARQDEETVRKLQARLLEEESSKRAELEKWHLEQQQAIQTTEAEKQELENQRVLKEQALQEAMEQLEQLELERKQALEQYEEVKKKLEMATNKTKSWKDKVAHHEGLIRLIEPGSKNPHLITNWGPAAFTEAELEEREKNWKEKKTTE

SEQ ID NO: 15280 - protein, 13 aa, Artificial Sequence
  Synthetic polypeptide
AILRSFPITCARC

SEQ ID NO: 15281 - protein, 565 aa, Artificial Sequence
  Synthetic polypeptide
AYTYSSFGLSYFKVLSHNLCTVLKVPHDPVALEEHFRDDDEGPVSNQGYMPYLNRFILEKVQDNFDKIEFNRMCWTLCVKKNLTKNPLLITEEDAFKIWVIFNFLSEDKYPLIIVSEEIEYLLKKLTEAMGGGWQQEQFEHYKINFDDSKNGLSAWELIELIGNGQFSKGMDRQTVSMAINEVFNELILDVLKQGYMMKKGHRRKNWTERWFVLKPNIISYYVSEDLKDKKGDILLDENCCVESLPDKDGKKCLFLVKCFDKTFEISASDKKKKQEWIQAIHSTIHLLKLGSPPPHKEARQRRKELRKKQLAEQEELERQMKELQAANESKQQELEAVRKKLEEAASRAAEEEKKRLQTQVELQARFSTELEREKLIRQQMEEQVAQKSSELEQYLQRVRELEDMYLKLQEALEDERQARQDEETVRKLQARLLEEESSKRAELEKWHLEQQQAIQTTEAEKQELENQRVLKEQALQEAMEQLEQLELERKQALEQYEEVKKKLEMATNKTKSWKDKVAHHEGLIRLIEPGSKNPHLITNWGPAAFTEAELEEREKNWKEKKTTE

SEQ ID NO: 15282 - protein, 129 aa, Artificial Sequence
  Synthetic polypeptide
AYTYSSFGLSYFKVLSHNLCTVLKVPHDPVALEEHFRDDDEGPVSNQGYMPYLNRFILEKITKTLPASEPSDMLLPVLSKTTLTRLNSIGCVGPSVSKKTSQRIPCSLQKKMHLKYGLFSTFYLRTSIH

SEQ ID NO: 15283 - protein, 515 aa, Artificial Sequence
  Synthetic polypeptide
IVYFKRVNFMVQDNFDKIEFNRMCWTLCVKKNLTKNPLLITEEDAFKIWVIFNFLSEDKYPLIIVSEEIEYLLKKLTEAMGGGWQQEQFEHYKINFDDSKNGLSAWELIELIGNGQFSKGMDRQTVSMAINEVFNELILDVLKQGYMMKKGHRRKNWTERWFVLKPNIISYYVSEDLKDKKGDILLDENCCVESLPDKDGKKCLFLVKCFDKTFEISASDKKKKQEWIQAIHSTIHLLKLGSPPPHKEARQRRKELRKKQLAEQEELERQMKELQAANESKQQELEAVRKKLEEAASRAAEEEKKRLQTQVELQARFSTELEREKLIRQQMEEQVAQKSSELEQYLQRVRELEDMYLKLQEALEDERQARQDEETVRKLQARLLEEESSKRAELEKWHLEQQQAIQTTEAEKQELENQRVLKEQALQEAMEQLEQLELERKQALEQYEEVKKKLEMATNKTKSWKDKVAHHEGLIRLIEPGSKNPHLITNWGPAAFTEAELEEREKNWKEKKTTE

SEQ ID NO: 15284 - protein, 54 aa, Artificial Sequence
  Synthetic polypeptide
ILWSKTTLTRLNSIGCVGPSVSKKTSQRIPCSLQKKMHLKYGLFSTFYLRTSIH

SEQ ID NO: 15285 - protein, 10 aa, Artificial Sequence
  Synthetic polypeptide
KGEFYGPRQL

SEQ ID NO: 15286 - protein, 62 aa, Artificial Sequence
  Synthetic polypeptide
IVYFKRVNFMVQDNFDKIEFNRMCWTLCVKKNLTKNPLLITEEDAFKIWVIFNFLSEDKYPL

SEQ ID NO: 15287 - protein, 26 aa, Artificial Sequence
  Synthetic polypeptide
LSRVCIPSNSYLAHSCWRKSLPRGLN

SEQ ID NO: 15288 - protein, 24 aa, Artificial Sequence
  Synthetic polypeptide
LVVSVFPATRTWHTVVGGRVFQEG

SEQ ID NO: 15289 - protein, 146 aa, Artificial Sequence
  Synthetic polypeptide
SCLYSQQLVPGTQLLEEESSKRAELEKWHLEQQQAIQTTEAEKQELENQRVLKEQALQEAMEQLEQLELERKQALEQYEEVKKKLEMATNKTKSWKDKVAHHEGLIRLIEPGSKNPHLITNWGPAAFTEAELEEREKNWKEKKTTE

SEQ ID NO: 15290 - protein, 38 aa, Artificial Sequence
  Synthetic polypeptide
ATPASLTHEGCEKVWTMGQFLCKNQMILFFQLILMKRR

SEQ ID NO: 15291 - protein, 19 aa, Artificial Sequence
  Synthetic polypeptide
PTKAVRKCGLWASFCARTR

SEQ ID NO: 15292 - protein, 66 aa, Artificial Sequence
  Synthetic polypeptide
HSVSKNVWKEQTLLCLLQLIHLPFLDNILEPPVKTQNLQLNKEEDLVITNTCLDRELIPSLCLPEK

SEQ ID NO: 15293 - protein, 53 aa, Artificial Sequence
  Synthetic polypeptide
SQLLWRLRQENHFSGEMEVAVSRDCTIALQPGQSDTLSQKMFGKNKHYYVFFN

SEQ ID NO: 15294 - protein, 46 aa, Artificial Sequence
  Synthetic polypeptide
AEIAPLHSSLGRVTLCLKKCLERTNIIMSSSIDSPSILGQYFGASS

SEQ ID NO: 15295 - protein, 159 aa, Artificial Sequence
  Synthetic polypeptide
HSVSKNVWKEQTLLCLLQLIHLPFLDNILEPPVKTQNLQLNKEEDLVITNTCLDRELIPSLCLPEIDNWLNAAIECLEYFPDQLIVTVSQQLMQNRNEETRLNSQKKILFDVIAKYYAQERDCLLTDEYFDIHSGIIELLENEKRAEALEATQLYLRLL

SEQ ID NO: 15296 - protein, 65 aa, Artificial Sequence
  Synthetic polypeptide
HSVSKNVWKEQTLLCLLQLIHLPFLDNILEPPVKTQNLQLNKEEDLVITNTCLDRELIPSLCLPE

SEQ ID NO: 15297 - protein, 21 aa, Artificial Sequence
  Synthetic polypeptide
PFLTFNLRIAWHFVQNQFLPV

SEQ ID NO: 15298 - protein, 585 aa, Artificial Sequence
  Synthetic polypeptide
MSRQQDNVTISHLQPKDCLAFCTEPVFASLANVLGNWENLPSPISPDIKDYKLYDVETKYGLLQVSEGLSFLHSSVKMVHGNITPENIILNKSGAWKIMGFDFCVSSTNPSEQEPKFPCKEWDPNLPSLCLPNPEYLAPEYILSVSCETASDMYSLGTVMYAVFNKGKPIFEVNKQDIYKSFSRQLDQLSRLGSSSLTNIPEEVREHVKLLLNVTPTVRPDADQMTKIPFFDDVGAVTLQYFDTLFQRDNLQKSQFFKGLPKVLPKLPKRVIVQRILPCLTSEFVNPDMVPFVLPNVLLIAEECTKEEYVKLILPELGPVFKQQEPIQILLIFLQKMDLLLTKTPPDEIKNSVLPMVYRALEAPSIQIQELCLNIIPTFANLIDYPSMKNALIPRIKNACLQTSSLAVRVNSLVCLGKILEYLDKWFVLDDILPFLQQIPSKEPAVLMGILGIYKCTFTHKKLGITKEQLAGKVLPHLIPLSIENNLNLNQFNSFISVIKEMLNRLESEHKTKLEQLHIMQEQQKSLDIGNQMNVSEEMKVTNIGNQQIDKVFNNIGADLLTGSESENKEDGLQNKHKRASLTLE

SEQ ID NO: 15299 - protein, 833 aa, Artificial Sequence
  Synthetic polypeptide
MSRQQDNVTISHLQPKDCLAFCTEPVFASLANVLGNWENLPSPISPDIKDYKLYDVETKYGLLQVSEGLSFLHSSVKMVHGNITPENIILNKSGAWKIMGFDFCVSSTNPSEQEPKFPCKEWDPNLPSLCLPNPEYLAPEYILSVSCETASDMYSLGTVMYAVFNKGKPIFEVNKQDIYKSFSRQLDQLSRLGSSSLTNIPEEVREHVKLLLNVTPTVRPDADQMTKIPFFDDVGAVTLQYFDTLFQRDNLQKSQFFKGLPKVLPKLPKRVIVQRILPCLTSEFVNPDMVPFVLPNVLLIAEECTKEEYVKLILPELGPVFKQQEPIQILLIFLQKMDLLLTKTPPDEIKNSVLPMVYRALEAPSIQIQELCLNIIPTFANLIDYPSMKNALIPRIKNACLQTSSLAVRVNSLVCLGKILEYLDKWFVLDDILPFLQQIPSKEPAVLMGILGIYKCTFTHKKLGITKEQLAGKVLPHLIPLSIENNLNLNQFNSFISVIKEMLNRLESEHKTKLEQLHIMQEQQKSLDIGNQMNVSEEMKVTNIGNQQIDKVFNNIGADLLTGSESENKEDGLQNKHKRASLTLEEKQKLAKEQEQAQKLKSQQPLKPQVHTPVATVKQTKDLTDTLMDNMSSLTSLSVSTPKSSASSTFTSVPSMGIGMMFSTPTDNTKRNLTNGLNANMGFQTSGFNMPVNTNQNFYSSPSTVGVTKMTLGTPPTLPNFNALSVPPAGAKQTQQRPTDMSALNNLFGPQKPKVSMNQLSQQKPNQWLNQFVPPQGSPTMGSSVMGTQMNVIGQSAFGMQGNPFFNPQNFAQPPTTMTNSSSASNDLKDLFG

SEQ ID NO: 15300 - protein, 35 aa, Artificial Sequence
  Synthetic polypeptide
LDVVAWWEHHLRPRGRGCSSCKFISVLRKDFGILG

SEQ ID NO: 15301 - protein, 185 aa, Artificial Sequence
  Synthetic polypeptide
DQEVEAAVRVNSLVCLGKILEYLDKWFVLDDILPFLQQIPSKEPAVLMGILGIYKCTFTHKKLGITKEQLAGKVLPHLIPLSIENNLNLNQFNSFISVIKEMLNRLESEHKTKLEQLHIMQEQQKSLDIGNQMNVSEEMKVTNIGNQQIDKVFNNIGADLLTGSESENKEDGLQNKHKRASLTLE

SEQ ID NO: 15302 - protein, 24 aa, Artificial Sequence
  Synthetic polypeptide
KNLAGCGGMVGASLETKRSRLQFV

SEQ ID NO: 15303 - protein, 433 aa, Artificial Sequence
  Synthetic polypeptide
DQEVEAAVRVNSLVCLGKILEYLDKWFVLDDILPFLQQIPSKEPAVLMGILGIYKCTFTHKKLGITKEQLAGKVLPHLIPLSIENNLNLNQFNSFISVIKEMLNRLESEHKTKLEQLHIMQEQQKSLDIGNQMNVSEEMKVTNIGNQQIDKVFNNIGADLLTGSESENKEDGLQNKHKRASLTLEEKQKLAKEQEQAQKLKSQQPLKPQVHTPVATVKQTKDLTDTLMDNMSSLTSLSVSTPKSSASSTFTSVPSMGIGMMFSTPTDNTKRNLTNGLNANMGFQTSGFNMPVNTNQNFYSSPSTVGVTKMTLGTPPTLPNFNALSVPPAGAKQTQQRPTDMSALNNLFGPQKPKVSMNQLSQQKPNQWLNQFVPPQGSPTMGSSVMGTQMNVIGQSAFGMQGNPFFNPQNFAQPPTTMTNSSSASNDLKDLFG

SEQ ID NO: 15304 - protein, 53 aa, Artificial Sequence
  Synthetic polypeptide
DQEVEAAVRVNSLVCLGKILEYLDKWFVLDDILPFLQQIPSKEPAVLMGILGN

SEQ ID NO: 15305 - protein, 10 aa, Artificial Sequence
  Synthetic polypeptide
LCCSFQSRFV

SEQ ID NO: 15306 - protein, 35 aa, Artificial Sequence
  Synthetic polypeptide
DQEVEAAVSCDCAAPSSLGSCKFISVLRKDFGILG

SEQ ID NO: 15307 - protein, 46 aa, Artificial Sequence
  Synthetic polypeptide
GWMQWLTPVFPALWEAKVFTNVLLLIRSWESPKSSWPEKCCLILFP

SEQ ID NO: 15308 - protein, 19 aa, Artificial Sequence
  Synthetic polypeptide
HLYSQHFGRPRYLQMYFYS

SEQ ID NO: 15309 - protein, 150 aa, Artificial Sequence
  Synthetic polypeptide
MDAVADTCIPSTLGGQGIYKCTFTHKKLGITKEQLAGKVLPHLIPLSIENNLNLNQFNSFISVIKEMLNRLESEHKTKLEQLHIMQEQQKSLDIGNQMNVSEEMKVTNIGNQQIDKVFNNIGADLLTGSESENKEDGLQNKHKRASLTLE

SEQ ID NO: 15310 - protein, 398 aa, Artificial Sequence
  Synthetic polypeptide
MDAVADTCIPSTLGGQGIYKCTFTHKKLGITKEQLAGKVLPHLIPLSIENNLNLNQFNSFISVIKEMLNRLESEHKTKLEQLHIMQEQQKSLDIGNQMNVSEEMKVTNIGNQQIDKVFNNIGADLLTGSESENKEDGLQNKHKRASLTLEEKQKLAKEQEQAQKLKSQQPLKPQVHTPVATVKQTKDLTDTLMDNMSSLTSLSVSTPKSSASSTFTSVPSMGIGMMFSTPTDNTKRNLTNGLNANMGFQTSGFNMPVNTNQNFYSSPSTVGVTKMTLGTPPTLPNFNALSVPPAGAKQTQQRPTDMSALNNLFGPQKPKVSMNQLSQQKPNQWLNQFVPPQGSPTMGSSVMGTQMNVIGQSAFGMQGNPFFNPQNFAQPPTTMTNSSSASNDLKDLFG

SEQ ID NO: 15311 - protein, 28 aa, Artificial Sequence
  Synthetic polypeptide
TSEGTDSRCATLRAVTPRGSAASFLKYL

SEQ ID NO: 15312 - protein, 60 aa, Artificial Sequence
  Synthetic polypeptide
HSPQRSAASLLSQRDHEPTRRKKLRTHLNIRRDRLQMCHLKSCNTARVRGFILEVSLMNI

SEQ ID NO: 15313 - protein, 286 aa, Artificial Sequence
  Synthetic polypeptide
EVRSPSARQPPRLRNFFTYSSMSEEVTYADLQFQNSSEMEKIPEIGKFGEKAPPAPSHVWRPAALFLTLLCLLLLIGLGVLASMFHVTLKIEMKKMNKLQNISEELQRNISLQLMSNMNISNKIRNLSTTLQTIATKLCRELYSKEQEHKCKPCPRRWIWHKDSCYFLSDDVQTWQESKMACAAQNASLLKINNKNALEFIKSQSRSYDYWLGLSPEEDSTRGMRVDNIINSSAWVIRNAPDLNNMYCGYINRLYVQYYHCTYKKRMICEKMANPVQLGSTYFREA

SEQ ID NO: 15314 - protein, 53 aa, Artificial Sequence
  Synthetic polypeptide
EISLHIHQCLKKLLMQIFNSRTPVRWKKSQKLANLGKKHLQLPLMYGVQQPCF

SEQ ID NO: 15315 - protein, 36 aa, Artificial Sequence
  Synthetic polypeptide
EVRRPSAWQPPRLRSEEPLRPAAAPSEKFLYIFINV

SEQ ID NO: 15316 - protein, 2 aa, Artificial Sequence
  Synthetic polypeptide
KY

SEQ ID NO: 15317 - protein, 8 aa, Artificial Sequence
  Synthetic polypeptide
NIRRYEFK

SEQ ID NO: 15318 - protein, 1303 aa, Artificial Sequence
  Synthetic polypeptide
ILGDMSLSDNASMCLMSIIKKLAALNVTEKDYREIIHRSLLEKLRKGLKSQTESIQQDYTTILSCLIQTFPNQLEFKDLVQLTHYHDPEMDFFENMKHIQIHRRARALKKLAKQLMEGKVVLSSKSLQNYIMPYAMTPIFDEKMLKHENITTAATEIIGAICKHLSWSAYMYYLKHFIHVLQTGQINQKLGVSLLVIVLEAFHFDHKTLEEQMGKIENEENAIEAIELPEPEAMELERVDEEEKEYTCKSLSDNGQPGTPDPADSGGTSAKESECITKPVSFLPQNKEEIERTIKNIQGTITGDILPRLHKCLASTTKREEEHKLVKSKVVNDEEVVRVPLAFAMVKLMQSLPQEVMEANLPSILLKVCALLKNRAQEIRDIARSTLAKIIEDLGVHFLLYVLKELQTTLVRGYQVHVLTFTVHMLLQGLTNKLQVGDLDSCLDIMIEIFNHELFGAVAEEKEVKQILSKVMEARRSKSYDSYEILGKFVGKDQVTKLILPLKEILQNTTSLKLARKVHETLRRITVGLIVNQEMTAESILLLSYGLISENLPLLTEKEKNPVAPAPDPRLPPQSCLLLPPTPVRGGQKAVVSRKTNMHIFIESGLRLLHLSLKTSKIKSSGECVLEMLDPFVSLLIDCLGSMDVKVITGALQCLIWVLRFPLPSIETKAEQLTKHLFLLLKDYAKLGAARGQNFHLVVNCFKCVTILVKKVKSYQITEKQLQVLLAYAEEDIYDTSRQATAFGLLKAILSRKLLVPEIDEVMRKVSKLAVSAQSEPARVQCRQVFLKYILDYPLGDKLRPNLEFMLAQLNYEHETGRESTLEMIAYLFDTFPQGLLHENCGMFFIPLCLMTINDDSATCKKMASMTIKSLLGKISLEKKDWLFDMVTTWFGAKKRLNRQLAALICGLFVESEGVDFEKRLGTVLPVIEKEIDPENFKDIMEETEEKAADRLLFSFLTLITKLIKECNIIQFTKPAETLSKIWSHVHSHLRHPHNWVWLTAAQIFGLLFASCQPEELIQKWNTKKTKKHLPEPVAIKFLASDLDQKMKSISLASCHQLHSKFLDQSLGEQVVKNLLFAAKVLYLLELYCEDKQSKIKEDLEEQEALEDGVACADEKAESDGEEKEEVKEELGRPATLLWLIQKLSRIAKLEAAYSPRNPLKRTCIFKFLGAVAMDLGIDKVKPYLPMIIAPLFRELNSTYSEQDPLLKNLSQEIIELLKKLVGLESFSLAFASVQKQANEKRALRKKRKALEFVTNPDIAAKKKMKKHKNKSEAKKRKIEFLRPGYKAKRQKSHSLKDLAMVE

SEQ ID NO: 15319 - protein, 33 aa, Artificial Sequence
  Synthetic polypeptide
CSPVVPATQEAEAGESLEPGRRRLSCSCIQRPV

SEQ ID NO: 15320 - protein, 1006 aa, Artificial Sequence
  Synthetic polypeptide
TREAEVELQLYSEASVALLKLNNPKDFQELNKQTKKNMTIDGKELTISPAYLLWDLSAISQSKQDEDISASRFEDNEELRYSLRSIERHAPWVRNIFIVTNGQIPSWLNLDNPRVTIVTHQDVFRNLSHLPTFSSPAIESHIHRIEGLSQKFIYLNDDVMFGKDVWPDDFYSHSKGQKVYLTWPVPNCAEGCPGSWIKDGYCDKACNNSACDWDGGDCSGNSGGSRYIAGGGGTGSIGVGQPWQFGGGINSVSYCNQGCANSWLADKFCDQACNVLSCGFDAGDCGQDHFHELYKVILLPNQTHYIIPKGECLPYFSFAEVAKRGVEGAYSDNPIIRHASIANKWKTIHLIMHSGMNATTIHFNLTFQNTNDEEFKMQITVEVDTREGPKLNSTAQKGYENLVSPITLLPEAEILFEDIPKEKRFPKFKRHDVNSTRRAQEEVKIPLVNISLLPKDAQLSLNTLDLQLEHGDITLKGYNLSKSALLRSFLMNSQHAKIKNQAIITDETNDSLVAPQEKQVHKSILPNSLGVSERLQRLTFPAVSVKVNGHDQGQNPPLDLETTARFRVETHTQKTIGGNVTKEKPPSLIVPLESQMTKEKKITGKEKENSRMEENAENHIGVTEVLLGRKLQHYTDSYLGFLPWEKKKYFQDLLDEEESLKTQLAYFTDSKNTGRQLKDTFADSLRYVNKILNSKFGFTSRKVPAHMPHMIDRIVMQELQDMFPEEFDKTSFHKVRHSEDMQFAFSYFYYLMSAVQPLNISQVFDEVDTDQSGVLSDREIRTLATRIHELPLSLQDLTGLEHMLINCSKMLPADITQLNNIPPTQESYYDPNLPPVTKSLVTNCKPVTDKIHKAYKDKNKYRFEIMGEEEIAFKMIRTNVSHVVGQLDDIRKNPRKFVCLNDNIDHNHKDAQTVKAVLRDFYESMFPIPSQFELPREYRNRFLHMHELQEWRAYRDKLKFWTHCVLATLIMFTIFSFFAEQLIALKRKIFPRRRIHKEASPNRIRV

SEQ ID NO: 15321 - protein, 240 aa, Artificial Sequence
  Synthetic polypeptide
TREAEVELQLYSEASVALLKLNNPKDFQELNKQTKKNMTIDGKELTISPAYLLWDLSAISQSKQDEDISASRFEDNEELRYSLRSIERHAPWVRNIFIVTNGQIPSWLNLDNPRVTIVTHQDVFRNLSHLPTFSSPAIESHIHRIEGLSQKFIYLNDDVMFGKDVWPDDFYSHSKGQKVYLTWPVPNCAEGCPGSWIKDGYCDKACNNSACDWDGGDCSGKDVLNCNSFIFMEYFLLNHY

SEQ ID NO: 15322 - protein, 1247 aa, Artificial Sequence
  Synthetic polypeptide
EDVPISPSPSAMIVSFLRSPRNASCTSCRTVVLEWSRDQYHVLFDSYRDNIAGKSFQNRLCLPMPIDVVYTWVNGTDLELLKELQQVREQMEEEQKAMREILGKNTTEPTKKSEKQLECLLTHCIKVPMLVLDPALPANITLKDLPSLYPSFHSASDIFNVAKPKNPSTNVSVVVFDSTKDVEDAHSGLLKGNSRQTVWRGYLTTDKEVPGLVLMQDLAFLSGFPPTFKETNQLKTKLPENLSSKVKLLQLYSEASVALLKLNNPKDFQELNKQTKKNMTIDGKELTISPAYLLWDLSAISQSKQDEDISASRFEDNEELRYSLRSIERHAPWVRNIFIVTNGQIPSWLNLDNPRVTIVTHQDVFRNLSHLPTFSSPAIESHIHRIEGLSQKFIYLNDDVMFGKDVWPDDFYSHSKGQKVYLTWPVPNCAEGCPGSWIKDGYCDKACNNSACDWDGGDCSGNSGGSRYIAGGGGTGSIGVGQPWQFGGGINSVSYCNQGCANSWLADKFCDQACNVLSCGFDAGDCGQDHFHELYKVILLPNQTHYIIPKGECLPYFSFAEVAKRGVEGAYSDNPIIRHASIANKWKTIHLIMHSGMNATTIHFNLTFQNTNDEEFKMQITVEVDTREGPKLNSTAQKGYENLVSPITLLPEAEILFEDIPKEKRFPKFKRHDVNSTRRAQEEVKIPLVNISLLPKDAQLSLNTLDLQLEHGDITLKGYNLSKSALLRSFLMNSQHAKIKNQAIITDETNDSLVAPQEKQVHKSILPNSLGVSERLQRLTFPAVSVKVNGHDQGQNPPLDLETTARFRVETHTQKTIGGNVTKEKPPSLIVPLESQMTKEKKITGKEKENSRMEENAENHIGVTEVLLGRKLQHYTDSYLGFLPWEKKKYFQDLLDEEESLKTQLAYFTDSKNTGRQLKDTFADSLRYVNKILNSKFGFTSRKVPAHMPHMIDRIVMQELQDMFPEEFDKTSFHKVRHSEDMQFAFSYFYYLMSAVQPLNISQVFDEVDTDQSGVLSDREIRTLATRIHELPLSLQDLTGLEHMLINCSKMLPADITQLNNIPPTQESYYDPNLPPVTKSLVTNCKPVTDKIHKAYKDKNKYRFEIMGEEEIAFKMIRTNVSHVVGQLDDIRKNPRKFVCLNDNIDHNHKDAQTVKAVLRDFYESMFPIPSQFELPREYRNRFLHMHELQEWRAYRDKLKFWTHCVLATLIMFTIFSFFAEQLIALKRKIFPRRRIHKEASPNRIRV

SEQ ID NO: 15323 - protein, 55 aa, Artificial Sequence
  Synthetic polypeptide
GLPETLPVHPAELWFWNGAEINTMFCLIPIETILLESPFRIGFVCPCRLTLFTPG

SEQ ID NO: 15324 - protein, 58 aa, Artificial Sequence
  Synthetic polypeptide
HPPPLLSSSFSGHVRGCANFTFAFCHDCKFSEVSQKRFLYILQNCGSGMEPRSIPCFV

SEQ ID NO: 15325 - protein, 481 aa, Artificial Sequence
  Synthetic polypeptide
EDVPISPSPSAMIVSFLRSPRNASCTSCRTVVLEWSRDQYHVLFDSYRDNIAGKSFQNRLCLPMPIDVVYTWVNGTDLELLKELQQVREQMEEEQKAMREILGKNTTEPTKKSEKQLECLLTHCIKVPMLVLDPALPANITLKDLPSLYPSFHSASDIFNVAKPKNPSTNVSVVVFDSTKDVEDAHSGLLKGNSRQTVWRGYLTTDKEVPGLVLMQDLAFLSGFPPTFKETNQLKTKLPENLSSKVKLLQLYSEASVALLKLNNPKDFQELNKQTKKNMTIDGKELTISPAYLLWDLSAISQSKQDEDISASRFEDNEELRYSLRSIERHAPWVRNIFIVTNGQIPSWLNLDNPRVTIVTHQDVFRNLSHLPTFSSPAIESHIHRIEGLSQKFIYLNDDVMFGKDVWPDDFYSHSKGQKVYLTWPVPNCAEGCPGSWIKDGYCDKACNNSACDWDGGDCSGKDVLNCNSFIFMEYFLLNHY

SEQ ID NO: 15326 - protein, 62 aa, Artificial Sequence
  Synthetic polypeptide
EDVPISPSPSAMIVSFLRSPRNASCTSCRTVVLEWSRDQYHVLFDSYRDNIAGKSFQNRSVR

SEQ ID NO: 15327 - protein, 43 aa, Artificial Sequence
  Synthetic polypeptide
GLPETLPVHPAELWFWNGAEINTMFCLIPIETILLESPFRIGL

SEQ ID NO: 15328 - protein, 59 aa, Artificial Sequence
  Synthetic polypeptide
EDVPISPSPSAMIVSFLRSPRNASCTSCRTVVLEWSRDQYHVLFDSYRDNIAGKSFQNR

SEQ ID NO: 15329 - protein, 42 aa, Artificial Sequence
  Synthetic polypeptide
GLPETLPVHPAELWFWNGAEINTMFCLIPIETILLESPFRIG

SEQ ID NO: 15330 - protein, 291 aa, Artificial Sequence
  Synthetic polypeptide
WADHLSPEVQDQPGQHGETSSLQKNTKISWVWWSVPVVSATWETEHSGEFTVSLSDVLLTWKYLLHEKLNLPVENMDVTDHYEDVRKIYDDFLKNSNMLDLIDVYQKCRALTSNCENYNTVSPSQLLDFLSGKQYAVGDETDLSIPTSPTSKYNRDNEKVQLLARKIIFSYLNLLVNSKNDLAVAYILNIPDRGLGREAFTDLKHAAREKQMSIFLVATSFIRTIELGGKGYAPPPSDPLRTHVKGLSNFINFIDKLDEILGEIPNPRGCKSICWKINNWNEFWKCSSGQK

SEQ ID NO: 15331 - protein, 21 aa, Artificial Sequence
  Synthetic polypeptide
SQLLGRLSTVENLQSLSVMFY

SEQ ID NO: 15332 - protein, 650 aa, Artificial Sequence
  Synthetic polypeptide
WADHLSPEVQDQPGQHGETSSLQKNTKISWVWWSVPVVSATWETEHSGEFTVSLSDVLLTWKYLLHEKLNLPVENMDVTDHYEDVRKIYDDFLKNSNMLDLIDVYQKCRALTSNCENYNTVSPGSTIQPPSERGSLLLSRPDLLAPGEDPPVSASLTLERQKGESLLAWSWSLNFRLPGIPITVQKKRRDLKKLAAVMRQSQLLDFLSGKQYAVGDETDLSIPTSPTSKYNRDNEKVQLLARKIIFSYLNLLVNSKNDLAVAYILNIPDRGLGREAFTDLKHAAREKQMSIFLVATSFIRTIELGGKGYAPPPSDPLRTHVKGLSNFINFIDKLDEILGEIPNPSIAGGQILSVIKMQLIKGQNSRDPFCKAIEEVAQDLDLRIKNIINSQEGVVALSTTDISPARPKSHAINHGTAYCGRDTVKALLVLLDEEAANAPTKNKAELLYDEENTIHHHGTSILTLFRSPTQVNNSIKPLRERICVSMQEKKIKMKQTLIRSQFACTYKDDYMISKDNWNNVNLASKPLCVLYMENDLSEGVNPSVGRSTIGTSFGNVHLDRSKNEKVSRKSTSQTGNKSSKRKQVDLDGENILCDNRNEPPQHKNAKIPKKSNDSQNRLYGKLAKVAKSNKCTAKDKLISGQAKLTQFFRL

SEQ ID NO: 15333 - protein, 138 aa, Artificial Sequence
  Synthetic polypeptide
WADHLSPEVQDQPGQHGETSSLQKNTKISWVWWSVPVVSATWETEHSGEFTVSLSDVLLTWKYLLHEKLNLPVENMDVTDHYEDVRKIYDDFLKNSNMLDLIDVYQKCRALTSNCENYNTVSPGNFQCGEKVDRKIYP

SEQ ID NO: 15334 - protein, 127 aa, Artificial Sequence
  Synthetic polypeptide
WADHLSPEVQDQPGQHGETSSLQKNTKISWVWWSVPVVSATWETEHSGEFTVSLSDVLLTWKYLLHEKLNLPVENMDVTDHYEDVRKIYDDFLKNSNMLDLIDVYQKCRALTSNCENYNTVSPVSIF

SEQ ID NO: 15335 - protein, 573 aa, Artificial Sequence
  Synthetic polypeptide
WADHLSPEVQDQPGQHGETSSLQKNTKISWVWWSVPVVSATWETEHSGEFTVSLSDVLLTWKYLLHEKLNLPVENMDVTDHYEDVRKIYDDFLKNSNMLDLIDVYQKCRALTSNCENYNTVSPSQLLDFLSGKQYAVGDETDLSIPTSPTSKYNRDNEKVQLLARKIIFSYLNLLVNSKNDLAVAYILNIPDRGLGREAFTDLKHAAREKQMSIFLVATSFIRTIELGGKGYAPPPSDPLRTHVKGLSNFINFIDKLDEILGEIPNPSIAGGQILSVIKMQLIKGQNSRDPFCKAIEEVAQDLDLRIKNIINSQEGVVALSTTDISPARPKSHAINHGTAYCGRDTVKALLVLLDEEAANAPTKNKAELLYDEENTIHHHGTSILTLFRSPTQVNNSIKPLRERICVSMQEKKIKMKQTLIRSQFACTYKDDYMISKDNWNNVNLASKPLCVLYMENDLSEGVNPSVGRSTIGTSFGNVHLDRSKNEKVSRKSTSQTGNKSSKRKQVDLDGENILCDNRNEPPQHKNAKIPKKSNDSQNRLYGKLAKVAKSNKCTAKDKLISGQAKLTQFFRL

SEQ ID NO: 15336 - protein, 296 aa, Artificial Sequence
  Synthetic polypeptide
WADHLSPEVQDQPGQHGETSSLQKNTKISWVWWSVPVVSATWETEHSGEFTVSLSDVLLTWKYLLHEKLNLPVENMDVTDHYEDVRKIYDDFLKNSNMLDLIDVYQKCRALTSNCENYNTVSPSQLLDFLSGKQYAVGDETDLSIPTSPTSKYNRDNEKVQLLARKIIFSYLNLLVNSKNDLAVAYILNIPDRGLGREAFTDLKHAAREKQMSIFLVATSFIRTIELGGKGYAPPPSDPLRTHVKGLSNFINFIDKLDEILGEIPNPRSPTQVNNSIKPLRERICVSMQEKKIKRV

SEQ ID NO: 15337 - protein, 23 aa, Artificial Sequence
  Synthetic polypeptide
EPWSSQSHILNQRLLSTDSRCSC

SEQ ID NO: 15338 - protein, 30 aa, Artificial Sequence
  Synthetic polypeptide
TRDSFLLIPGAAASKENYLFIFKSASEFKE

SEQ ID NO: 15339 - protein, 416 aa, Artificial Sequence
  Synthetic polypeptide
FQVQLLARKIIFSYLNLLVNSKNDLAVAYILNIPDRGLGREAFTDLKHAAREKQMSIFLVATSFIRTIELGGKGYAPPPSDPLRTHVKGLSNFINFIDKLDEILGEIPNPSIAGGQILSVIKMQLIKGQNSRDPFCKAIEEVAQDLDLRIKNIINSQEGVVALSTTDISPARPKSHAINHGTAYCGRDTVKALLVLLDEEAANAPTKNKAELLYDEENTIHHHGTSILTLFRSPTQVNNSIKPLRERICVSMQEKKIKMKQTLIRSQFACTYKDDYMISKDNWNNVNLASKPLCVLYMENDLSEGVNPSVGRSTIGTSFGNVHLDRSKNEKVSRKSTSQTGNKSSKRKQVDLDGENILCDNRNEPPQHKNAKIPKKSNDSQNRLYGKLAKVAKSNKCTAKDKLISGQAKLTQFFRL

SEQ ID NO: 15340 - protein, 134 aa, Artificial Sequence
  Synthetic polypeptide
FQVQLLARKIIFSYLNLLVNSKNDLAVAYILNIPDRGLGREAFTDLKHAAREKQMSIFLVATSFIRTIELGGKGYAPPPSDPLRTHVKGLSNFINFIDKLDEILGEIPNPRGCKSICWKINNWNEFWKCSSGQK

SEQ ID NO: 15341 - protein, 139 aa, Artificial Sequence
  Synthetic polypeptide
FQVQLLARKIIFSYLNLLVNSKNDLAVAYILNIPDRGLGREAFTDLKHAAREKQMSIFLVATSFIRTIELGGKGYAPPPSDPLRTHVKGLSNFINFIDKLDEILGEIPNPRSPTQVNNSIKPLRERICVSMQEKKIKRV

SEQ ID NO: 15342 - protein, 346 aa, Artificial Sequence
  Synthetic polypeptide
PVSRFDNIRISQYILHIAIIGSLKSKQDHFTSLLTEARDFSSVTDWLITSWHDIQSFPGSSHTTSSLLPYSSAMPCYLVPESTMLSSSSGCLLLCGIIFDARPKSHAINHGTAYCGRDTVKALLVLLDEEAANAPTKNKAELLYDEENTIHHHGTSILTLFRSPTQVNNSIKPLRERICVSMQEKKIKMKQTLIRSQFACTYKDDYMISKDNWNNVNLASKPLCVLYMENDLSEGVNPSVGRSTIGTSFGNVHLDRSKNEKVSRKSTSQTGNKSSKRKQVDLDGENILCDNRNEPPQHKNAKIPKKSNDSQNRLYGKLAKVAKSNKCTAKDKLISGQAKLTQFFRL

SEQ ID NO: 15343 - protein, 59 aa, Artificial Sequence
  Synthetic polypeptide
LLGMIYKVSQAHLIPLPPFYLILQPCHATWSLKAPCSLLPLGASSSVESSLMPGQNLMP

SEQ ID NO: 15344 - protein, 32 aa, Artificial Sequence
  Synthetic polypeptide
CQAKISCHKPWYCILWQRYCESLISSFGRRSS

SEQ ID NO: 15345 - protein, 28 aa, Artificial Sequence
  Synthetic polypeptide
KMEIMVSPWMNAEIPLLYSHCEQCHPVG

SEQ ID NO: 15346 - protein, 83 aa, Artificial Sequence
  Synthetic polypeptide
MLKSPCYIPIVSSATLWDRSTPSAKHIPCYERTSVPCSRFINHMKNFSESPKFRSLHFLNFPGSHHGQATQKLQGAMVLHLEE

SEQ ID NO: 15347 - protein, 336 aa, Artificial Sequence
  Synthetic polypeptide
MLKSPCYIPIVSSATLWDRSTPSAKHIPCYERTSVPCSRFINHMKNFSESPKFRSLHFLNFPVFPERTQNSMACKRLLHTCQYIVPRCSVSTVSFDEESYEEFRSSPAPSSETDEAPLIFTARGETEERARGAPKQAWNSSFLEQLVKKPNWAHSVNPVHLEAQGIHISRHTRPKGQPLSSPKKNSGSAARPSTAIGLCRRSQTPGALQSTGPSNTELEPEERMAVPAGAQAHPDDIQSRLLGASGNPVGKGAVAMAPEMLPKHPHTPRDRRPQADTSLHGNLAGAPLPLLAGASTHFPSKRLIKVCSSAPPRPTRRFHTVCSQALSRPVVNAHLH

SEQ ID NO: 15348 - protein, 66 aa, Artificial Sequence
  Synthetic polypeptide
MLKSPCYIPIVSSATLWDRSTPSAKHIPCYERTSVPCSRFINHMKNFSESPKFRSLHFLNFPGPFH

SEQ ID NO: 15349 - protein, 183 aa, Artificial Sequence
  Synthetic polypeptide
MLKSPCYIPIVSSATLWDRSTPSAKHIPCYERTSVPCSRFINHMKNFSESPKFRSLHFLNFPVFPERTQNSMACKRLLHTCQYIVPRCSVSTVSFDEESYEEFRSSPAPSSETDEAPLIFTARGETEERARGAPKQAWNSSFLEQLVKKPNWAHSVNPVHLEAQGIHISRHTRPKGQPLSSPK

SEQ ID NO: 15350 - protein, 40 aa, Artificial Sequence
  Synthetic polypeptide
GWAWWLTPVVLALWEAETMVNDSRPSVSAGVVTHGNYFQN

SEQ ID NO: 15351 - protein, 20 aa, Artificial Sequence
  Synthetic polypeptide
HFGRPRPWLMIPDLVFLQGL

SEQ ID NO: 15352 - protein, 19 aa, Artificial Sequence
  Synthetic polypeptide
MGMVAHTCSPSTLGGRDHG

SEQ ID NO: 15353 - protein, 21 aa, Artificial Sequence
  Synthetic polypeptide
LERQYLKFHQSVENSKRSFWD

SEQ ID NO: 15354 - protein, 20 aa, Artificial Sequence
  Synthetic polypeptide
FLSHTVHMSRSHWINLKDNT

SEQ ID NO: 15355 - protein, 36 aa, Artificial Sequence
  Synthetic polypeptide
KTIPEIPPKRGELKTELLGLKERKHKPQVSQQEELK

SEQ ID NO: 15356 - protein, 534 aa, Artificial Sequence
  Synthetic polypeptide
ILPLLLSSSLSLDKFLSFSVPVSLSAYQEGRLQKLLKMNGPEDLPKSYDYDLIIIGGGSGGLAAAKEAAQYGKKVMVLDFVTPTPLGTRWGLGGTCVNVGCIPKKLMHQAALLGQALQDSRNYGWKVEETVKHDWDRMIEAVQNHIGSLNWGYRVALREKKVVYENAYGQFIGPHRIKATNNKGKEKIYSAERFLIATGERPRYLGIPGDKEYCISSDDLFSLPYCPGKTLVVGASYVALECAGFLAGIGLDVTVMVRSILLRGFDQDMANKIGEHMEEHGIKFIRQFVPIKVEQIEAGTPGRLRVVAQSTNSEEIIEGEYNTVMLAIGRDACTRKIGLETVGVKINEKTGKIPVTDEEQTNVPYIYAIGDILEDKVELTPVAIQAGRLLAQRLYAGSTVKCDYENVPTTVFTPLEYGACGLSEEKAVEKFGEENIEVYHSYFWPLEWTIPSRDNNKCYAKIICNTKDNERVVGFHVLGPNAGEVTQGFAAALKCGLTKKQLDSTIGIHPVCAEVFTTLSVTKRSGASILQAGC

SEQ ID NO: 15357 - protein, 25 aa, Artificial Sequence
  Synthetic polypeptide
AWTSFLAFLYLFPCLLIRRADFKSY

SEQ ID NO: 15358 - protein, 24 aa, Artificial Sequence
  Synthetic polypeptide
LFCTCFPVCLSGGQTSKATKNERP

SEQ ID NO: 15359 - protein, 132 aa, Artificial Sequence
  Synthetic polypeptide
ILPLLLSSSLSLDKFLSFSVPVSLSAYQEGRLQKLLKMNGPEDLPKSYDYDLIIIGGGSGGLAAAKEAAQYGKKVMVLDFVTPTPLGTRWGLGGTCVNVGCIPKKLMHQAALLGQALQDSRNYGWKVEETGM

SEQ ID NO: 15360 - protein, 64 aa, Artificial Sequence
  Synthetic polypeptide
ILPLLLSSSLSLDKFLSFSVPVSLSAYQEGRLQKLLKMNGPEDLPKSYDYDLIIIGGGSGGLAA

SEQ ID NO: 15361 - protein, 519 aa, Artificial Sequence
  Synthetic polypeptide
ILPLLLSSSLSLDKFLSFSVPVSLSAYQEGRLQKLLKMNGPEDLPKSYDYDLIIIGGGSGGLAAAKEAAQYGKKVMVLDFVTPTPLGTRWGLGGTCVNVGCIPKKLMHQAALLGQALQDSRNYGWKVEETVKHDWDRMIEAVQNHIGSLNWGYRVALREKKVVYENAYGQFIGPHRIKATNNKGKEKIYSAERFLIATGERPRYLGIPGDKEYCISSDDLFSLPYCPGKTLVVGASYVALECAGFLAGIGLDVTVMVRSILLRGFDQDMANKIGEHMEEHGIKFIRQFVPIKVEQIEAGTPGRLRVVAQSTNSEEIIEGEYNTVMLAIGRDACTRKIGLETVGVKINEKTGKIPVTDEEQTNVPYIYAIGDILEDKVELTPVAIQAGRLLAQRLYAGSTVKCDYENVPTTVFTPLEYGACGLSEEKAVEKFGEENIEVYHSYFWPLEWTIPSRDNNKCYAKIICNTKDNERVVGFHVLGPNAGEVTQGFAAALKCGLTKKQLDSTIGIHPVCAEFFSFI

SEQ ID NO: 15362 - protein, 41 aa, Artificial Sequence
  Synthetic polypeptide
MNSVMRRNPFGVDICCRKGSRSPLQELYNPIQVSFKHSVSM

SEQ ID NO: 15363 - protein, 31 aa, Artificial Sequence
  Synthetic polypeptide
IVSCGGIPLVWTSAAGRGPEAPCRNSTTQSR

SEQ ID NO: 15364 - protein, 316 aa, Artificial Sequence
  Synthetic polypeptide
MNSVMRRNPFGVDICCRKGSRSPLQELYNPIQLELSNTAVLHQMRRDQVTDTCRANSATSRKRRVLTPNDLKHLVVDEDHELIYCYVPKVACTNWKRLMMVLTGRGKYSDPMEIPANEAHVSANLKTLNQYSIPEINHRLKSYMKFLFVREPFERLVSAYRNKFTQKYNISFHKRYGTKIIKRQRKNATQEALRKGDDVKFEEFVAYLIDPHTQREEPFNEHWQTVYSLCHPCHIHYDLVGKYETLEEDSNYVLQLAGVGSYLKFPTYAKSTRTTDEMTTEFFQNISSEHQTQLYEVYKLDFLMFNYSVPSYLKLE

SEQ ID NO: 15365 - protein, 47 aa, Artificial Sequence
  Synthetic polypeptide
IVSCGGIPLVWTSAAGRGPEAPCRNSTTQSSWSSQTLLSCTRCGGTR

SEQ ID NO: 15366 - protein, 35 aa, Artificial Sequence
  Synthetic polypeptide
NDGSVLAGALKHCCPAPDAAGPGDRHVPSQQRHKP

SEQ ID NO: 15367 - protein, 21 aa, Artificial Sequence
  Synthetic polypeptide
WKCFSWSSQTLLSCTRCGGTR

SEQ ID NO: 15368 - protein, 79 aa, Artificial Sequence
  Synthetic polypeptide
GRLVESLALGALFWTQLYQTQTWLGLLFTRQLLMVLVVIWWPFRLAGFLPTSIYIAFQENCLMNPKVVTTHLELSLVQE

SEQ ID NO: 15369 - protein, 184 aa, Artificial Sequence
  Synthetic polypeptide
KFSIGGLILDTTVSDPNLVGIVVYTPVINGIGGNLVAIQASRISTYLHLHSIPGELPDEPKGCYYPFRTFFGPGVNNKSAQVLLLLVIPGHLIFLYTIHLMKSGHTSLTIIFIVVYLFGAVLQVFTLLWIADWMVHHFWRKGKDPDSFSIPYLTALGDLLGTALLALSFHFLWLIGDRDGDVGD

SEQ ID NO: 15370 - protein, 33 aa, Artificial Sequence
  Synthetic polypeptide
GQAQWLMPVIPALWKAKAGGSLEGHRWSVAASK

SEQ ID NO: 15371 - protein, 98 aa, Artificial Sequence
  Synthetic polypeptide
SQHFGRPRQADHLRDIDGVLQRANSTEYGLASGVFTRDINKAMYVSEKLEAGTVFINTYNKTDVAAPFGGVKQSGFGKDLGEEALNEYLKTKTVTLEY

SEQ ID NO: 15372 - protein, 52 aa, Artificial Sequence
  Synthetic polypeptide
KGQKDRIDPKISDKGHALDCFEVCRTVCESRLSKGGHQHHSRLRWHSRTTSV

SEQ ID NO: 15373 - protein, 338 aa, Artificial Sequence
  Synthetic polypeptide
VNVLWIMGAMSLFLGEENDKCKKGRRIESTLRYRIKVTPLTALKFAELSVKAGFPKGVINIIPGSGGIAGQRLSEHPDIRKLGFTGSTPIGKQIMKSCAVSNLKKVSLELGGKSPLIIFNDCELDKAVRMGMGAVFFNKGENCIAAGRLFVEESIHDEFVTRVVEEIKKMKIGDPLDRSTDHGPQNHKAHLEKLLQYCETGVKEGATLVYGGRQVQRPGFFMEPTVFTDVEDYMYLAKEESFGPIMVISKFQNGDIDGVLQRANSTEYGLASGVFTRDINKAMYVSEKLEAGTVFINTYNKTDVAAPFGGVKQSGFGKDLGEEALNEYLKTKTVTLEY

SEQ ID NO: 15374 - protein, 12 aa, Artificial Sequence
  Synthetic polypeptide
ANKGFMDSNYGR

SEQ ID NO: 15375 - protein, 792 aa, Artificial Sequence
  Synthetic polypeptide
LLLGIEQTKVLWTLIMGDKKAGFSVFWADDGLDTGPILLQRSCDVEPNDTVDALYNRFLFPEGIKAMVEAVQLIADGKAPRIPQPEEGATYEGIQKKENAEISWDQSAEVLHNWIRGHDKVPGAWTEINGQMVTFYGSTLLNSSVPPGEPLEIKGAKKPGLVTKNGLVLFGNDGKALTVRNLQFEDGKMIPASQYFSTGETSVVELTAEEVKVAETIKVIWAGILSNVPIIEDSTDFFKSGASSMDVARLVEEIRQKCGGLQLQNEDVYMATKFEGFIQKVVRKLRGEDQEVELVVDYISKEVNEIMVKMPYQCFINGQFTDADDGKTYDTINPTDGSTICKVSYASLADVDKAVAAAKDAFENGEWGRMNARERGRLMYRLADLLEENQEELATIEALDSGAVYTLALKTHIGMSVQTFRYFAGWCDKIQGSTIPINQARPNRNLTFTKKEPLGVCAIIIPWNYPLMMLAWKSAACLAAGNTLVLKPAQVTPLTALKFAELSVKAGFPKGVINIIPGSGGIAGQRLSEHPDIRKLGFTGSTPIGKQIMKSCAVSNLKKVSLELGGKSPLIIFNDCELDKAVRMGMGAVFFNKGENCIAAGRLFVEESIHDEFVTRVVEEIKKMKIGDPLDRSTDHGPQNHKAHLEKLLQYCETGVKEGATLVYGGRQVQRPGFFMEPTVFTDVEDYMYLAKEESFGPIMVISKFQNGDIDGVLQRANSTEYGLASGVFTRDINKAMYVSEKLEAGTVFINTYNKTDVAAPFGGVKQSGFGKDLGEEALNEYLKTKTVTLEY

SEQ ID NO: 15376 - protein, 10 aa, Artificial Sequence
  Synthetic polypeptide
VLSKQRFYGL

SEQ ID NO: 15377 - protein, 72 aa, Artificial Sequence
  Synthetic polypeptide
LLLGIEQTKVLWTLIMGDKKAGFSVFWADDGLDTGPILLQRSCDVEPNDTVDALYNRFLFPEGIKAMKLSNS

SEQ ID NO: 15378 - protein, 385 aa, Artificial Sequence
  Synthetic polypeptide
LLLGIEQTKVLWTLIMGDKKAGFSVFWADDGLDTGPILLQRSCDVEPNDTVDALYNRFLFPEGIKAMVEAVQLIADGKAPRIPQPEEGATYEGIQKKENAEISWDQSAEVLHNWIRGHDKVPGAWTEINGQMVTFYGSTLLNSSVPPGEPLEIKGAKKPGLVTKNGLVLFGNDGKALTVRNLQFEDGKMIPASQYFSTGETSVVELTAEEVKVAETIKVIWAGILSNVPIIEDSTDFFKSGASSMDVARLVEEIRQKCGGLQLQNEDVYMATKFEGFIQKVVRKLRGEDQEVELVVDYISKEVNEIMVKMPYQCFINGQFTDADDGKTYDTINPTDGSTICKVSYASLADVDKAVAAAKDAFENGEWGRMNARERGRLMYSMRMN

SEQ ID NO: 15379 - protein, 798 aa, Artificial Sequence
  Synthetic polypeptide
QHLPRIAYGVLAPLTVTRTLIMGDKKAGFSVFWADDGLDTGPILLQRSCDVEPNDTVDALYNRFLFPEGIKAMVEAVQLIADGKAPRIPQPEEGATYEGIQKKENAEISWDQSAEVLHNWIRGHDKVPGAWTEINGQMVTFYGSTLLNSSVPPGEPLEIKGAKKPGLVTKNGLVLFGNDGKALTVRNLQFEDGKMIPASQYFSTGETSVVELTAEEVKVAETIKVIWAGILSNVPIIEDSTDFFKSGASSMDVARLVEEIRQKCGGLQLQNEDVYMATKFEGFIQKVVRKLRGEDQEVELVVDYISKEVNEIMVKMPYQCFINGQFTDADDGKTYDTINPTDGSTICKVSYASLADVDKAVAAAKDAFENGEWGRMNARERGRLMYRLADLLEENQEELATIEALDSGAVYTLALKTHIGMSVQTFRYFAGWCDKIQGSTIPINQARPNRNLTFTKKEPLGVCAIIIPWNYPLMMLAWKSAACLAAGNTLVLKPAQVTPLTALKFAELSVKAGFPKGVINIIPGSGGIAGQRLSEHPDIRKLGFTGSTPIGKQIMKSCAVSNLKKVSLELGGKSPLIIFNDCELDKAVRMGMGAVFFNKGENCIAAGRLFVEESIHDEFVTRVVEEIKKMKIGDPLDRSTDHGPQNHKAHLEKLLQYCETGVKEGATLVYGGRQVQRPGFFMEPTVFTDVEDYMYLAKEESFGPIMVISKFQNGDIDGVLQRANSTEYGLASGVFTRDINKAMYVSEKLEAGTVFINTYNKTDVAAPFGGVKQSGFGKDLGEEALNEYLKTKTVTLEY

SEQ ID NO: 15380 - protein, 5 aa, Artificial Sequence
  Synthetic polypeptide
LLLGL

SEQ ID NO: 15381 - protein, 78 aa, Artificial Sequence
  Synthetic polypeptide
QHLPRIAYGVLAPLTVTRTLIMGDKKAGFSVFWADDGLDTGPILLQRSCDVEPNDTVDALYNRFLFPEGIKAMKLSNS

SEQ ID NO: 15382 - protein, 391 aa, Artificial Sequence
  Synthetic polypeptide
QHLPRIAYGVLAPLTVTRTLIMGDKKAGFSVFWADDGLDTGPILLQRSCDVEPNDTVDALYNRFLFPEGIKAMVEAVQLIADGKAPRIPQPEEGATYEGIQKKENAEISWDQSAEVLHNWIRGHDKVPGAWTEINGQMVTFYGSTLLNSSVPPGEPLEIKGAKKPGLVTKNGLVLFGNDGKALTVRNLQFEDGKMIPASQYFSTGETSVVELTAEEVKVAETIKVIWAGILSNVPIIEDSTDFFKSGASSMDVARLVEEIRQKCGGLQLQNEDVYMATKFEGFIQKVVRKLRGEDQEVELVVDYISKEVNEIMVKMPYQCFINGQFTDADDGKTYDTINPTDGSTICKVSYASLADVDKAVAAAKDAFENGEWGRMNARERGRLMYSMRMN

SEQ ID NO: 15383 - protein, 28 aa, Artificial Sequence
  Synthetic polypeptide
QICKMSKSRDLMYNMKITGTVLLCYEVL

SEQ ID NO: 15384 - protein, 26 aa, Artificial Sequence
  Synthetic polypeptide
RLQELSCFVTRCYEVVMNVVHQLAAL

SEQ ID NO: 15385 - protein, 22 aa, Artificial Sequence
  Synthetic polypeptide
RSDVQHEDYRNCLALLRGAMKW

SEQ ID NO: 15386 - protein, 1031 aa, Artificial Sequence
  Synthetic polypeptide
RLQELSCFVTRCYEVVMNVVHQLAALYISNKIAPKIIETTGVHFQTMYEHLGELLTVLLTLDEIIDNHITLKDHWTMYKRLLKSVHHNPSKFGIQEEKLKPFEKFLLKLEGQLLDGMIFQACIEQQFDSLNGGVSVSKNSTFAEEFAHSIRSIFANVEAKLGEPSEIDQRDKYVGICGLFVLHFQIFRTIDKKFYKSLLDICKKVPAITLTANIIWFPDNFLIQKIPAAAKLLDRKSLQAIKIHRDTFLQQKAQSLTKDVQSYYVFVSSWMMKMESILSKEQRMDKFAEDLTNRCNVFIQGFLYAYSISTIIKTTMNLYMSMQKPMTKTSVKALCRLVELLKAIEHMFYRRSMVVADSVSHITQHLQHQALHSISVAKKRVISDKKYSEQRLDVLSALVLAENTLNGPSTKQRRLIVSLALSVGTQMKTFKDEELFPLQVVMKKLDLISELRERVQTQCDCCFLYWHRAVFPIYLDDVYENAVDAARLHYMFSALRDCVPAMMHARHLESYEILLDCYDKEIMEILNEHLLDKLCKEIEKDLRLSVHTHLKLDDRNPFKVGMKDLALFFSLNPIRFFNRFIDIRAYVTHYLDKTFYNLTTVALHDWATYSEMRNLATQRYGLVMTEAHLPSQTLEQGLDVLEIMRNIHIFVSRYLYNLNNQIFIERTSNNKHLNTINIRHIANSIRTHGTGIMNTTVNFTYQFLKKKFYIFSQFMYDEHIKSRLIKDIRFFREIKDQNDHKYPFDRAEKFNRGIRKLGVTPEGQSYLDQFRQLISQIGNAMGYVRMIRSGGLHCSSNAIRFVPDLEDIVNFEELVKEEGLAEETLKAARHLDSVLSDHTRNSAEGTEYFKMLVDVFAPEFRRPKNIHLRNFYIIVPPLTLNFVEHSISCKEKLNKKNKIGAAFTDDGFAMGVAYILKLLDQYREFDSLHWFQSVREKYLKEIRAVAKQQNVQSASQDEKLLQTMNLTQKRLDVYLQEFELLYFSLSSARIFFRADKTAAEENQEKKEKEEETKTSNGDLSDSTVSADPVVK

SEQ ID NO: 15387 - protein, 47 aa, Artificial Sequence
  Synthetic polypeptide
RLQELSCFVTRCYEVVMNVVHQLAALYISNKIAPKIIETTGVHFQVF

SEQ ID NO: 15388 - protein, 940 aa, Artificial Sequence
  Synthetic polypeptide
RFVAILHQASLSSSFFQQHVFTLSLCHILACIEQQFDSLNGGVSVSKNSTFAEEFAHSIRSIFANVEAKLGEPSEIDQRDKYVGICGLFVLHFQIFRTIDKKFYKSLLDICKKVPAITLTANIIWFPDNFLIQKIPAAAKLLDRKSLQAIKIHRDTFLQQKAQSLTKDVQSYYVFVSSWMMKMESILSKEQRMDKFAEDLTNRCNVFIQGFLYAYSISTIIKTTMNLYMSMQKPMTKTSVKALCRLVELLKAIEHMFYRRSMVVADSVSHITQHLQHQALHSISVAKKRVISDKKYSEQRLDVLSALVLAENTLNGPSTKQRRLIVSLALSVGTQMKTFKDEELFPLQVVMKKLDLISELRERVQTQCDCCFLYWHRAVFPIYLDDVYENAVDAARLHYMFSALRDCVPAMMHARHLESYEILLDCYDKEIMEILNEHLLDKLCKEIEKDLRLSVHTHLKLDDRNPFKVGMKDLALFFSLNPIRFFNRFIDIRAYVTHYLDKTFYNLTTVALHDWATYSEMRNLATQRYGLVMTEAHLPSQTLEQGLDVLEIMRNIHIFVSRYLYNLNNQIFIERTSNNKHLNTINIRHIANSIRTHGTGIMNTTVNFTYQFLKKKFYIFSQFMYDEHIKSRLIKDIRFFREIKDQNDHKYPFDRAEKFNRGIRKLGVTPEGQSYLDQFRQLISQIGNAMGYVRMIRSGGLHCSSNAIRFVPDLEDIVNFEELVKEEGLAEETLKAARHLDSVLSDHTRNSAEGTEYFKMLVDVFAPEFRRPKNIHLRNFYIIVPPLTLNFVEHSISCKEKLNKKNKIGAAFTDDGFAMGVAYILKLLDQYREFDSLHWFQSVREKYLKEIRAVAKQQNVQSASQDEKLLQTMNLTQKRLDVYLQEFELLYFSLSSARIFFRADKTAAEENQEKKEKEEETKTSNGDLSDSTVSADPVVK

SEQ ID NO: 15389 - protein, 38 aa, Artificial Sequence
  Synthetic polypeptide
LHFLQIKGLWQSCIKQVFHRHFSNSMCSLCLCVTFWPV

SEQ ID NO: 15390 - protein, 58 aa, Artificial Sequence
  Synthetic polypeptide
AYLVLLHFALLHFPGNCIFYKLKVCGNPASSKSFIVIFPTACVHFVSVSHFGLYRTTI

SEQ ID NO: 15391 - protein, 12 aa, Artificial Sequence
  Synthetic polypeptide
SNPRDSLFTERV

SEQ ID NO: 15392 - protein, 682 aa, Artificial Sequence
  Synthetic polypeptide
WRPSWGLESKSKDCWSDGWNGKLAGGHPSTLKAIPVTRSLLSVFEEDAGTLTDYTNQLLQAMQRVYGAQNEMCLATQQLSKQLLAYEKQNFALGKGDEEVISTLHYFSKVVDELNLLHTELAKQLADTMVLPIIQFREKDLTEVSTLKDLFGLASNEHDLSMAKYSRLPKKKENEKVKTEVGKEVAAARRKQHLSSLQYYCALNALQYRKQMAMMEPMIGFAHGQINFFKKGAEMFSKRMDSFLSSVADMVQSIQVELEAEAEKMRVSQQELLSVDESVYTPDSDVAAPQINRNLIQKAGYLNLRNKTGLVTTTWERLYFFTQGGNLMCQPRGAVAGGLIQDLDNCSVMAVDCEDRRYCFQITTPNGKSGIILQAESRKENEEWICAINNISRQIYLTDNPEAVAIKLNQTALQAVTPITSFGKKQESSCPSQNLKNSEMENENDKIVPKATASLPEAEELIAPGTPIQFDIVLPATEFLDQNRGSRRTNPFGETEDESFPEAEDSLLQQMFIVRFLGSMAVKTDSTTEVIYEAMRQVLAARAIHNIFRMTESHLMVTSQSLRLIDPQTQVSRANFELTSVTQFAAHQENKRLVGFVIRVPESTGEESLSTYIFESNSEGEKICYAINLGKEIIEVQKDPEALAQLMLSIPLTNDGKYVLLNDQPDDDDGNPNEHRGAESEA

SEQ ID NO: 15393 - protein, 253 aa, Artificial Sequence
  Synthetic polypeptide
WRPSWGLESKSKDCWSDGWNGKLAGGHPSTLKAIPVTRSLLSVFEEDAGTLTDYTNQLLQAMQRVYGAQNEMCLATQQLSKQLLAYEKQNFALGKGDEEVISTLHYFSKVVDELNLLHTELAKQLADTMVLPIIQFREKDLTEVSTLKDLFGLASNEHDLSMAKYSRLPKKKENEKVKTEVGKEVAAARRKQHLSSLQYYCALNALQYRKQMAMMEPMIGFAHGQINFFKKGAEMFSKRMDSFLSSVADMVQR

SEQ ID NO: 15394 - protein, 688 aa, Artificial Sequence
  Synthetic polypeptide
WRPSWGLESKSKDCWSDGWNGKLAGGHPSTLKAIPVTRSLLSVFEEDAGTLTDYTNQLLQAMQRVYGAQNEMCLATQQLSKQLLAYEKQNFALGKGDEEVISTLHYFSKVVDELNLLHTELAKQLADTMVLPIIQFREKDLTEVSTLKDLFGLASNDVCLFLEHDLSMAKYSRLPKKKENEKVKTEVGKEVAAARRKQHLSSLQYYCALNALQYRKQMAMMEPMIGFAHGQINFFKKGAEMFSKRMDSFLSSVADMVQSIQVELEAEAEKMRVSQQELLSVDESVYTPDSDVAAPQINRNLIQKAGYLNLRNKTGLVTTTWERLYFFTQGGNLMCQPRGAVAGGLIQDLDNCSVMAVDCEDRRYCFQITTPNGKSGIILQAESRKENEEWICAINNISRQIYLTDNPEAVAIKLNQTALQAVTPITSFGKKQESSCPSQNLKNSEMENENDKIVPKATASLPEAEELIAPGTPIQFDIVLPATEFLDQNRGSRRTNPFGETEDESFPEAEDSLLQQMFIVRFLGSMAVKTDSTTEVIYEAMRQVLAARAIHNIFRMTESHLMVTSQSLRLIDPQTQVSRANFELTSVTQFAAHQENKRLVGFVIRVPESTGEESLSTYIFESNSEGEKICYAINLGKEIIEVQKDPEALAQLMLSIPLTNDGKYVLLNDQPDDDDGNPNEHRGAESEA

SEQ ID NO: 15395 - protein, 58 aa, Artificial Sequence
  Synthetic polypeptide
TDPQLIHLQICPAGAAKDVTEESVTEDDKRRNYGGVYVGLPSEAVNMVSSQTKTVRKN

SEQ ID NO: 15396 - protein, 13 aa, Artificial Sequence
  Synthetic polypeptide
STCRSALQEQPKM

SEQ ID NO: 15397 - protein, 25 aa, Artificial Sequence
  Synthetic polypeptide
PTVDPPADLPCRSSQRCNRRIRNRR

SEQ ID NO: 15398 - protein, 43 aa, Artificial Sequence
  Synthetic polypeptide
TDPQLIHLQICPAGAAKDVPFSSTTWVRLCHCLMDQLYSNSRR

SEQ ID NO: 15399 - protein, 21 aa, Artificial Sequence
  Synthetic polypeptide
STCRSALQEQPKMCHSQAQPG

SEQ ID NO: 15400 - protein, 36 aa, Artificial Sequence
  Synthetic polypeptide
PTVDPPADLPCRSSQRCAILKHNLGEALSLLNGSAV

SEQ ID NO: 15401 - protein, 84 aa, Artificial Sequence
  Synthetic polypeptide
TDPQLIHLQICPAGAAKDVTEESVTEDDKRRNYGGVYVGLPSEAVNMVSSQTKTVRKKENNIMTQESRACSSVWKEFGSVGRCN

SEQ ID NO: 15402 - protein, 19 aa, Artificial Sequence
  Synthetic polypeptide
GRAQWLTPVIPALWEAEVQ

SEQ ID NO: 15403 - protein, 101 aa, Artificial Sequence
  Synthetic polypeptide
SQHFGRPRFNERSPTAAARHVVPCDWGYLQCYKGSCWCHHWWCGLDWWKESGSDQNSCYNCAFHGNRAGERGCLCCGWRCYSCWVCCCKQSALNRKEERQI

SEQ ID NO: 15404 - protein, 111 aa, Artificial Sequence
  Synthetic polypeptide
PGAVAHACNPSTLGGRGSMKDHPQQQPGMLSRVTGGIFSVTKGAVGATIGGVAWIGGKSLEVTKTAVTTVPSMGIGLVKGGVSAVAGGVTAVGSAVVNKVPLTGKKKDKSD

SEQ ID NO: 15405 - protein, 10 aa, Artificial Sequence
  Synthetic polypeptide
TKHQIFASVS

SEQ ID NO: 15406 - protein, 542 aa, Artificial Sequence
  Synthetic polypeptide
FGCPRPNTRFLLQCLEDLDANLRKLNSRLFVIRGQPADVFPRLFKEWNITKLSIEYDSEPFGKERDAAIKKLATEAGVEVIVRISHTLYDLDKIIELNGGQPPLTYKRFQTLISKMEPLEIPVETITSEVIEKCTTPLSDDHDEKYGVPSLEELGFDTDGLSSAVWPGGETEALTRLERHLERKAWVANFERPRMNANSLLASPTGLSPYLRFGCLSCRLFYFKLTDLYKKVKKNSSPPLSLYGQLLWREFFYTAATNNPRFDKMEGNPICVQIPWDKNPEALAKWAEGRTGFPWIDAIMTQLRQEGWIHHLARHAVACFLTRGDLWISWEEGMKVFEELLLDADWSINAGSWMWLSCSSFFQQFFHCYCPVGFGRRTDPNGDYIRRYLPVLRGFPAKYIYDPWNAPEGIQKVAKCLIGVNYPKPMVNHAEASRLNIERMKQIYQQLSRYRGLGLLASVPSNPNGNGGFMGYSAENIPGCSSSGSCSQGSGILHYAHGDSQQTHLLKQGRSSMGTGLSGGKRPSQEEDTQSIGPKVQRQSTN

SEQ ID NO: 15407 - protein, 31 aa, Artificial Sequence
  Synthetic polypeptide
LLLEVADLVVLDQTPDFCFSVLRILMPIYEN

SEQ ID NO: 15408 - protein, 23 aa, Artificial Sequence
  Synthetic polypeptide
LASLNPFRCSHVQIHSPASFSTR

SEQ ID NO: 15409 - protein, 38 aa, Artificial Sequence
  Synthetic polypeptide
ILSDAPTCRSILQLHSAHDEASGTTEQVSACIWASGEK

SEQ ID NO: 15410 - protein, 518 aa, Artificial Sequence
  Synthetic polypeptide
IISVSTGTVTCGLDNKCRDFLTSFPESFQMLPRADPFSSFIQHTMRRVVRQSKFRHVFGQAVKNDQCYDDIRVSRVTWDSSFCAVNPRFVAIIIEASGGGAFLVLPLHKTGRIDKSYPTVCGHTGPVLDIDWCPHNDQVIASGSEDCTVMVWQIPENGLTLSLTEPVVILEGHSKRVGIVAWHPTARNVLLSAGCDNAIIIWNVGTGEALINLDDMHSDMIYNVSWNRNGSLICTASKDKKVRVIDPRKQEIVAEKEKAHEGARPMRAIFLADGNVFTTGFSRMSERQLALWNPKNMQEPIALHEMDTSNGVLLPFYDPDTSIIYLCGKGDSSIRYFEITDESPYVHYLNTFSSKEPQRGMGYMPKRGLDVNKCEIARFFKLHERKCEPIIMTVPRKSDLFQDDLYPDTAGPEAALEAEEWFEGKNADPILISLKHGYIPGKNRDLKVVKKNILDSKPTANKKCDLISIPKKTTDTASVQNEAKLDEILKEIKSIKDTICNQDERISKLEQQMAKIAA

SEQ ID NO: 15411 - protein, 3 aa, Artificial Sequence
  Synthetic polypeptide
ETR

SEQ ID NO: 15412 - protein, 27 aa, Artificial Sequence
  Synthetic polypeptide
PTGDKRHDEASGTTEQVSACIWASGEK

SEQ ID NO: 15413 - protein, 510 aa, Artificial Sequence
  Synthetic polypeptide
DLSQAFIRLQTHERPPTRATQPGCSQIPNPQEIRDTMRRVVRQSKFRHVFGQAVKNDQCYDDIRVSRVTWDSSFCAVNPRFVAIIIEASGGGAFLVLPLHKTGRIDKSYPTVCGHTGPVLDIDWCPHNDQVIASGSEDCTVMVWQIPENGLTLSLTEPVVILEGHSKRVGIVAWHPTARNVLLSAGCDNAIIIWNVGTGEALINLDDMHSDMIYNVSWNRNGSLICTASKDKKVRVIDPRKQEIVAEKEKAHEGARPMRAIFLADGNVFTTGFSRMSERQLALWNPKNMQEPIALHEMDTSNGVLLPFYDPDTSIIYLCGKGDSSIRYFEITDESPYVHYLNTFSSKEPQRGMGYMPKRGLDVNKCEIARFFKLHERKCEPIIMTVPRKSDLFQDDLYPDTAGPEAALEAEEWFEGKNADPILISLKHGYIPGKNRDLKVVKKNILDSKPTANKKCDLISIPKKTTDTASVQNEAKLDEILKEIKSIKDTICNQDERISKLEQQMAKIAA

SEQ ID NO: 15414 - protein, 1017 aa, Artificial Sequence
  Synthetic polypeptide
EPQFPLSESFFMVKGAALFLQQGSSPQGQRSLQHPHKHAGDLPQHLQVMINLLRCEDRIKLAVRLESAWADRVRYMVVVYSSGRQDTEENILLGVDFSSKESKSCTIGMVLRLWSDTKIHLDGDGGFSVSTAGRMHIFKPVSVQAMWSALQVLHKACEVARRHNYFPGGVALIWATYYESCISSEQSCINEWNAMQDLESTRPDSPALFVDKPTEGERTERLIKAKLRSIMMSQDLENVTSKEIRNELEKQMNCNLKELKEFIDNEMLLILGQMDKPSLIFDHLYLGSEWNASNLEELQGSGVDYILNVTREIDNFFPGLFAYHNIRVYDEETTDLLAHWNEAYHFINKAKRNHSKCLVHCKMGVSRSASTVIAYAMKEFGWPLEKAYNYVKQKRSITRPNAGFMRQLSEYEGILDASKQRHNKLWRQQTDSSLQQPVDDPAGPGDFLPETPDGTPESQLPFLDDAAQPGLGPPLPCCFRRLSDPLLPSPEDETGSLVHLEDPEREALLEEAAPPAEVHRPARQPQQGSGLCEKDVKKKLEFGSPKGRSGSLLQVEETEREEGLGAGRWGQLPTQLDQNLLNSENLNNNSKRSCPNGMEDDAIFGILNKVKPSYKSCADCMYPTASGAPEASRERCEDPNAPAICTQPAFLPHITSSPVAHLASRSRVPEKPASGPTEPPPFLPPAGSRRADTSGPGAGAALEPPASLLEPSRETPKVLPKSLLLKNSHCDKNPPSTEVVIKEESSPKKDMKPAKDLRLLFSNESEKPTTNSYLMQHQESIIQLQKAGLVRKHTKELERLKSVPADPAPPSRDGPASRLEASIPEESQDPAALHELGPLVMPSQAGSDEKSEAAPASLEGGSLKSPPPFFYRLDHTSSFSKDFLKTICYTPTSSSMSSNLTRSSSSDSIHSVRGKPGLVKQRTQEIETRLRLAGLTVSSPLKRSHSLAKLGSLTFSTEDLSSEADPSTVADSQDTTLSESSFLHEPQGTPRDPAATSKPSGKPAPENLKSPSWMSKS

SEQ ID NO: 15415 - protein, 5 aa, Artificial Sequence
  Synthetic polypeptide
SLSSP

SEQ ID NO: 15416 - protein, 6 aa, Artificial Sequence
  Synthetic polypeptide
ASVPLK

SEQ ID NO: 15417 - protein, 660 aa, Artificial Sequence
  Synthetic polypeptide
EPQFPLSESFFMVKGAALFLQQGSSPQGQRSLQHPHKHAGDLPQHLQVMINLLRCEDRIKLAVRLESAWADRVRYMVVVYSSGRQDTEENILLGVDFSSKESKSCTIGMVLRLWSDTKIHLDGDGGFSVSTAGRMHIFKPVSVQAMWSALQVLHKACEVARRHNYFPGGVALIWATYYESCISSEQSCINEWNAMQDLESTRPDSPALFVDKPTEGERTERLIKAKLRSIMMSQDLENVTSKEIRNELEKQMNCNLKELKEFIDNEMLLILGQMDKPSLIFDHLYLGSEWNASNLEELQGSGVDYILNVTREIDNFFPGLFAYHNIRVYDEETTDLLAHWNEAYHFINKAKRNHSKCLVHCKMGVSRSASTVIAYAMKEFGWPLEKAYNYVKQKRSITRPNAGFMRQLSEYEGILDASKQRHNKLWRQQTDSSLQQPVDDPAGPGDFLPETPDGTPESQLPFLDDAAQPGLGPPLPCCFRRLSDPLLPSPEDETGSLVHLEDPEREALLEEAAPPAEVHRPARQPQQGSGLCEKDVKKKLEFGSPKGRSGSLLQVEETEREEGLGAGRWGQLPTQLDQNLLNSENLNNNSKRSCPNGMEVGRARPAGWHTPSLPSHSNWPTSASVVGTTGTRHHTQLIFFYCLLWAPSSHLQGPEGSFTG

SEQ ID NO: 15418 - protein, 138 aa, Artificial Sequence
  Synthetic polypeptide
EPQFPLSESFFMVKGAALFLQQGSSPQGQRSLQHPHKHAGDLPQHLQVMINLLRCEDRIKLAVRLESAWADRVRYMVVVYSSGRQDTEENILLGVDFSSKESKSCTIGMVLRLWSDTKIHLDGDGGFSVSTAGRMHIF

SEQ ID NO: 15419 - protein, 52 aa, Artificial Sequence
  Synthetic polypeptide
PRGRSNPSVHRLINRMLTNYSMSLPRHWKMSETASLGSHICLMCIPWSSSQK

SEQ ID NO: 15420 - protein, 16 aa, Artificial Sequence
  Synthetic polypeptide
IGCSRIIPCHYLVIGR

SEQ ID NO: 15421 - protein, 71 aa, Artificial Sequence
  Synthetic polypeptide
PGRDVRRKCGELSGASGCYPHHFLQGHEPQLQIREAECGWSPLLYHHADADQAGHHAEGHVQRAHGSAHRQ

SEQ ID NO: 15422 - protein, 318 aa, Artificial Sequence
  Synthetic polypeptide
QYKISQEEMSGESVVSSAVPAAATRTTSFKGTSPSSKYVKLNVGGALYYTTMQTLTKQDTMLKAMFSGRMEVLTDSEGWILIDRCGKHFGTILNYLRDGAVPLPESRREIEELLAEAKYYLVQGLVEECQAALQNKDTYEPFCKVPVITSSKEEQKLIATSNKPAVKLLYNRSNNKYSYTSNSDDNMLKNIELFDKLSLRFNGRVLFIKDVIGDEICCWSFYGQGRKIAEVCCTSIVYATEKKQTKVEFPEARIYEETLNILLYEAQDGRGPDNALLEATGGAAGRSHHLDEDEERERIERVRRIHIKRPDDRAHLHQ

SEQ ID NO: 15423 - protein, 20 aa, Artificial Sequence
  Synthetic polypeptide
NPISTNNIKLARKRCQEKVW

SEQ ID NO: 15424 - protein, 82 aa, Artificial Sequence
  Synthetic polypeptide
QYKISQEEMSGESVVSSAVPAAATRTTSFKGTSPSSKYVKLNVGGALYYTTMQTLTKQDTMLKAMFSGRMEVLTDSEEQRYL

SEQ ID NO: 15425 - protein, 175 aa, Artificial Sequence
  Synthetic polypeptide
QYKISQEEMSGESVVSSAVPAAATRTTSFKGTSPSSKYVKLNVGGALYYTTMQTLTKQDTMLKAMFSGRMEVLTDSEGWILIDRCGKHFGTILNYLRDGAVPLPESRREIEELLAEAKYYLVQGLVEECQAALQPAVKLLYNRSNNKYSYTSNSDDNMLKNIELFDKLSLRFNGR

SEQ ID NO: 15426 - protein, 180 aa, Artificial Sequence
  Synthetic polypeptide
QYKISQEEMSGESVVSSAVPAAATRTTSFKGTSPSSKYVKLNVGGALYYTTMQTLTKQDTMLKAMFSGRMEVLTDSEGWILIDRCGKHFGTILNYLRDGAVPLPESRREIEELLAEAKYYLVQGLVEECQAALQVPVITSSKEEQKLIATSNKPAVKLLYNRSNNKYSYTSNSDDNMLKN

SEQ ID NO: 15427 - protein, 22 aa, Artificial Sequence
  Synthetic polypeptide
SEHFGMPRQKDHLRKRCQEKVW

SEQ ID NO: 15428 - protein, 334 aa, Artificial Sequence
  Synthetic polypeptide
QSRWLTPVIRALWDAEAEGSPEEEMSGESVVSSAVPAAATRTTSFKGTSPSSKYVKLNVGGALYYTTMQTLTKQDTMLKAMFSGRMEVLTDSEGWILIDRCGKHFGTILNYLRDGAVPLPESRREIEELLAEAKYYLVQGLVEECQAALQNKDTYEPFCKVPVITSSKEEQKLIATSNKPAVKLLYNRSNNKYSYTSNSDDNMLKNIELFDKLSLRFNGRVLFIKDVIGDEICCWSFYGQGRKIAEVCCTSIVYATEKKQTKVEFPEARIYEETLNILLYEAQDGRGPDNALLEATGGAAGRSHHLDEDEERERIERVRRIHIKRPDDRAHLHQ

SEQ ID NO: 15429 - protein, 98 aa, Artificial Sequence
  Synthetic polypeptide
QSRWLTPVIRALWDAEAEGSPEEEMSGESVVSSAVPAAATRTTSFKGTSPSSKYVKLNVGGALYYTTMQTLTKQDTMLKAMFSGRMEVLTDSEEQRYL

SEQ ID NO: 15430 - protein, 191 aa, Artificial Sequence
  Synthetic polypeptide
QSRWLTPVIRALWDAEAEGSPEEEMSGESVVSSAVPAAATRTTSFKGTSPSSKYVKLNVGGALYYTTMQTLTKQDTMLKAMFSGRMEVLTDSEGWILIDRCGKHFGTILNYLRDGAVPLPESRREIEELLAEAKYYLVQGLVEECQAALQPAVKLLYNRSNNKYSYTSNSDDNMLKNIELFDKLSLRFNGR

SEQ ID NO: 15431 - protein, 196 aa, Artificial Sequence
  Synthetic polypeptide
QSRWLTPVIRALWDAEAEGSPEEEMSGESVVSSAVPAAATRTTSFKGTSPSSKYVKLNVGGALYYTTMQTLTKQDTMLKAMFSGRMEVLTDSEGWILIDRCGKHFGTILNYLRDGAVPLPESRREIEELLAEAKYYLVQGLVEECQAALQVPVITSSKEEQKLIATSNKPAVKLLYNRSNNKYSYTSNSDDNMLKN

SEQ ID NO: 15432 - protein, 22 aa, Artificial Sequence
  Synthetic polypeptide
QWFSNSGPTSSNTWKRCQEKVW

SEQ ID NO: 15433 - protein, 83 aa, Artificial Sequence
  Synthetic polypeptide
SGSQTLVPPAATPGRDVRRKCGELSGASGCYPHHFLQGHEPQLQIREAECGWSPLLYHHADADQAGHHAEGHVQRAHGSAHRQ

SEQ ID NO: 15434 - protein, 325 aa, Artificial Sequence
  Synthetic polypeptide
VVLKLWSHQQQHLEEMSGESVVSSAVPAAATRTTSFKGTSPSSKYVKLNVGGALYYTTMQTLTKQDTMLKAMFSGRMEVLTDSEGWILIDRCGKHFGTILNYLRDGAVPLPESRREIEELLAEAKYYLVQGLVEECQAALQNKDTYEPFCKVPVITSSKEEQKLIATSNKPAVKLLYNRSNNKYSYTSNSDDNMLKNIELFDKLSLRFNGRVLFIKDVIGDEICCWSFYGQGRKIAEVCCTSIVYATEKKQTKVEFPEARIYEETLNILLYEAQDGRGPDNALLEATGGAAGRSHHLDEDEERERIERVRRIHIKRPDDRAHLHQ

SEQ ID NO: 15435 - protein, 89 aa, Artificial Sequence
  Synthetic polypeptide
VVLKLWSHQQQHLEEMSGESVVSSAVPAAATRTTSFKGTSPSSKYVKLNVGGALYYTTMQTLTKQDTMLKAMFSGRMEVLTDSEEQRYL

SEQ ID NO: 15436 - protein, 182 aa, Artificial Sequence
  Synthetic polypeptide
VVLKLWSHQQQHLEEMSGESVVSSAVPAAATRTTSFKGTSPSSKYVKLNVGGALYYTTMQTLTKQDTMLKAMFSGRMEVLTDSEGWILIDRCGKHFGTILNYLRDGAVPLPESRREIEELLAEAKYYLVQGLVEECQAALQPAVKLLYNRSNNKYSYTSNSDDNMLKNIELFDKLSLRFNGR

SEQ ID NO: 15437 - protein, 187 aa, Artificial Sequence
  Synthetic polypeptide
VVLKLWSHQQQHLEEMSGESVVSSAVPAAATRTTSFKGTSPSSKYVKLNVGGALYYTTMQTLTKQDTMLKAMFSGRMEVLTDSEGWILIDRCGKHFGTILNYLRDGAVPLPESRREIEELLAEAKYYLVQGLVEECQAALQVPVITSSKEEQKLIATSNKPAVKLLYNRSNNKYSYTSNSDDNMLKN

SEQ ID NO: 15438 - protein, 3 aa, Artificial Sequence
  Synthetic polypeptide
RNP

SEQ ID NO: 15439 - protein, 536 aa, Artificial Sequence
  Synthetic polypeptide
REYYQFNRGILDDIEVYEEQISFKLEELVTISSFLNSFVFKMIWDGIVENAKGETLELFQSVHGWLMVLYERDCRRRFTPEDHWLRKDLKPSVLFQELDRDRKRAQLILQYIPHVIPHKNRVLLFRTMVTKEKEKLGLVETSSASPHVTHITIRRSRMLEDGYEQLRQLSQHAMKGVIRVKFVNDLGVDEAGIDQDGVFKEFLEEIIKRVFDPALNLFKTTSGDERLYPSPTSYIHENYLQLFEFVGKMLGKAVYEGIVVDVPFASFFLSQLLGHHHSVFYSSVDELPSLDSEFYKNLTSIKRYDGDITDLGLTLSYDEDVMGQLVCHELIPGGKTIPVTNENKISYIHLMAHFRMHTQIKNQTAALISGFRSIIKPEWIRMFSTPELQRLISGDNAEIDLEDLKKHTVYYGGFHGSHRVIIWLWDILASDFTPDERAMFLKFVTSCSRPPLLGFAYLKPPFSIRCVEVSDDQDTGDTLGSVLRGFFTIRKREPGGRLPTSSTCFNLLKLPNYSKKSVLREKLRYAISMNTGFELS

SEQ ID NO: 15440 - protein, 36 aa, Artificial Sequence
  Synthetic polypeptide
NEENITSSIEESLMTLKFMKNRFHSNWKSWSLSPLS

SEQ ID NO: 15441 - protein, 176 aa, Artificial Sequence
  Synthetic polypeptide
REYYQFNRGILDDIEVYEEQISFKLEELVTISSFLNSFVFKMIWDGIVENAKGETLELFQSVHGWLMVLYERDCRRRFTPEDHWLRKDLKPSVLFQELDRDRKRAQLILQYIPHVIPHKNRVLLFRTMVTKEKEKLGLVETSSASPHVTHITIRRSRMLESLFECPWPLVINAESC

SEQ ID NO: 15442 - protein, 339 aa, Artificial Sequence
  Synthetic polypeptide
REYYQFNRGILDDIEVYEEQISFKLEELVTISSFLNSFVFKMIWDGIVENAKGETLELFQSVHGWLMVLYERDCRRRFTPEDHWLRKDLKPSVLFQELDRDRKRAQLILQYIPHVIPHKNRVLLFRTMVTKEKEKLGLVETSSASPHVTHITIRRSRMLEDGYEQLRQLSQHAMKGVIRVKFVNDLGVDEAGIDQDGVFKEFLEEIIKRVFDPALNLFKTTSGDERLYPSPTSYIHENYLQLFEFVGKMLGKAVYEGIVVDVPFASFFLSQLLGHHHSVFYSSVDELPSLDSEFYKNLTSIKRYDGDITDLGLTLSYDEDVMGQLVCHELIPGGKTIPV

SEQ ID NO: 15443 - protein, 128 aa, Artificial Sequence
  Synthetic polypeptide
GQVWWLTPAISATWETEAGRSLEARSLDPVHIAGRRLGPGDTMLLGPGGSLKVYHVQGGAHPGAGAVDRQVHQPAPTTHGLHPAFGRQDQLGAAFLPGRVPPGRETCGASCPDGRDRCERGQVLKQTQ

SEQ ID NO: 15444 - protein, 28 aa, Artificial Sequence
  Synthetic polypeptide
GQEPRSSAHCRTSARPWRHHAPRPGRLT

SEQ ID NO: 15445 - protein, 85 aa, Artificial Sequence
  Synthetic polypeptide
GQVWWLTPAISATWETEAGRSLEARSLDPVHIAGRRLGPGDTMLLGPGGSLKVYHVQGGAHPGAGAVDRQVHQPAPTTHGLHPAL

SEQ ID NO: 15446 - protein, 136 aa, Artificial Sequence
  Synthetic polypeptide
GQIQCTLQDVGSALATPCSSAREAHLKYTTFKAGPILELEQWIDKYTSQLPPLTAFILPSGGKISSALHFCRAVCRRAERRVVPLVQMGETDANVAKFLNRLSDYLFTLARYAAMKEGNQEKIYMKNDPSAESEGL

SEQ ID NO: 15447 - protein, 25 aa, Artificial Sequence
  Synthetic polypeptide
ARSSAHCRTSARPWRHHAPRPGRLT

SEQ ID NO: 15448 - protein, 102 aa, Artificial Sequence
  Synthetic polypeptide
PDPVHIAGRRLGPGDTMLLGPGGSLKVYHVQGGAHPGAGAVDRQVHQPAPTTHGLHPAFGRQDQLGAAFLPGRVPPGRETCGASCPDGRDRCERGQVLKQTQ

SEQ ID NO: 15449 - protein, 59 aa, Artificial Sequence
  Synthetic polypeptide
GQIQCTLQDVGSALATPCSSAREAHLKYTTFKAGPILELEQWIDKYTSQLPPLTAFILP

SEQ ID NO: 15450 - protein, 59 aa, Artificial Sequence
  Synthetic polypeptide
PDPVHIAGRRLGPGDTMLLGPGGSLKVYHVQGGAHPGAGAVDRQVHQPAPTTHGLHPAL

SEQ ID NO: 15451 - protein, 58 aa, Artificial Sequence
  Synthetic polypeptide
AWEPDRPSCKFSAPLLIVSGTSDGVSRLLPRLECNGVISAHCNLCLPGSSESPHYYYS

SEQ ID NO: 15452 - protein, 20 aa, Artificial Sequence
  Synthetic polypeptide
LSLGRQTEFRACCPDWSAMV

SEQ ID NO: 15453 - protein, 73 aa, Artificial Sequence
  Synthetic polypeptide
MGARQTQLQIFSTAADCLWDVRRSFALVAQTGVQWCDLGSLQPLPPGFKRVSSLLLFLTLTCSWLPFLHGGPD

SEQ ID NO: 15454 - protein, 68 aa, Artificial Sequence
  Synthetic polypeptide
RLRRGGAAAGEAAAAAGSTGCILELENIPPASTPQQWESGPQLTQHWYQAGLGCGQASVTGHKLSGAR

SEQ ID NO: 15455 - protein, 160 aa, Artificial Sequence
  Synthetic polypeptide
GFGAEGRRPGRRRRRQVALAVSLNLRTFLRLQPHSNGKVDLSLPNIGIKRAWDVARLQSLDTSFLEQGDVTTPTSEQVEKLKEVAGLPDDCAVTERLAVLAFLYLYLSICRKQRALPSLDIVVWSELPPGAGLGSSAAYSVCLAAALLTVCEEIPNPLKD

SEQ ID NO: 15456 - protein, 16 aa, Artificial Sequence
  Synthetic polypeptide
ASARRGGGRGGGGGGR

SEQ ID NO: 15457 - protein, 190 aa, Artificial Sequence
  Synthetic polypeptide
GFGAEGRRPGRRRRRQVALAVSLNLRTFLRLQPHSNGKVDLSLPNIGIKRAWDVARLQSLDTSFLEQGDVTTPTSEQVEKLKEVAGLPDDCAVTERLAVLAFLYLYLSICRKQRALPSLDIVVWSELPPGAGLGSSAAYSVCLAAALLTVCEEIPNPLKDGDCVNRWTKEDLELINKWAFQGERMIHGNP

SEQ ID NO: 15458 - protein, 74 aa, Artificial Sequence
  Synthetic polypeptide
RLRRGGAAAGEAAAAAGSTGCILELENIPPASTPQQWESGPQLTQHWYQAGLGCGQASVTGHKLSGWTKEDLEL

SEQ ID NO: 15459 - protein, 73 aa, Artificial Sequence
  Synthetic polypeptide
GFGAEGRRPGRRRRRQVALAVSLNLRTFLRLQPHSNGKVDLSLPNIGIKRAWDVARLQSLDTSFLGGPRRIWS

SEQ ID NO: 15460 - protein, 386 aa, Artificial Sequence
  Synthetic polypeptide
GFGAEGRRPGRRRRRQVALAVSLNLRTFLRLQPHSNGKVDLSLPNIGIKRAWDVARLQSLDTSFLEQGDVTTPTSEQVEKLKEVAGLPDDCAVTERLAVLAFLYLYLSICRKQRALPSLDIVVWSELPPGAGLGSSAAYSVCLAAALLTVCEEIPNPLKDGDCVNRWTKEDLELINKWAFQGERMIHGNPSGVDNAVSTWGGALRYHQGKISSLKRSPALQILLTNTKVPRNTRALVAGVRNRLLKFPEIVAPLLTSIDAISLECERVLGEMGEAPAPEQYLVLEELIDMNQHHLNALGVGHASLDQLCQVTRARGLHSKLTGAGGGGCGITLLKPGLEQPEVEATKQALTSCGFDCLETSIGAPGVSIHSATSLDSRVQQALDGL

SEQ ID NO: 15461 - protein, 100 aa, Artificial Sequence
  Synthetic polypeptide
RLRRGGAAAGEAAAAAGSTGCILELENIPPASTPQQWESGPQLTQHWYQAGLGCGQASVTGHKLSGVSLCYAAWSTVVRPQLTVSSTSWAQAILLPQPSE

SEQ ID NO: 15462 - protein, 107 aa, Artificial Sequence
  Synthetic polypeptide
GFGAEGRRPGRRRRRQVALAVSLNLRTFLRLQPHSNGKVDLSLPNIGIKRAWDVARLQSLDTSFLGSHSVMQPGVQWCDHSSLFLQPPGLKRSSCLSLLSSWDHRAR

SEQ ID NO: 15463 - protein, 334 aa, Artificial Sequence
  Synthetic polypeptide
GFGAEGRRPGRRRRRQVALAVSLNLRTFLRLQPHSNGKVDLSLPNIGIKRAWDVARLQSLDTSFLEQGDVTTPTSEQVEKLKEVAGLPDDCAVTERLAVLAFLYLYLSICRKQRWTKEDLELINKWAFQGERMIHGNPSGVDNAVSTWGGALRYHQGKISSLKRSPALQILLTNTKVPRNTRALVAGVRNRLLKFPEIVAPLLTSIDAISLECERVLGEMGEAPAPEQYLVLEELIDMNQHHLNALGVGHASLDQLCQVTRARGLHSKLTGAGGGGCGITLLKPGLEQPEVEATKQALTSCGFDCLETSIGAPGVSIHSATSLDSRVQQALDGL

SEQ ID NO: 15464 - protein, 891 aa, Artificial Sequence
  Synthetic polypeptide
GGGGGGSGGGGGAWAAAAAVAAALRTHMQMTIQALQDELRIQRDLNQLFQQDSSSRTGEPCVAELTEENFQRLHAEHERQAKELFLLRKTLEEMELRIETQKQTLNARDESIKKLLEMLQSKGLSAKATEEDHERTRRLAEAEMHVHHLESLLEQKEKENSMLREEMHRRFENAPDSAKTKALQTVIEMKDSKISSMERGLRDLEEEIQMLKSNGALSTEEREEEMKQMEVYRSHSKFMKNKIGQVKQELSRKDTELLALQTKLETLTNQFSDSKQHIEVLKESLTAKEQRAAILQTEVDALRLRLEEKETMLNKKTKQIQDMAEEKGTQAGEIHDLKDMLDVKERKVNVLQKKIENLQEQLRDKEKQMSSLKERVKSLQADTTNTDTALTTLEEALAEKERTIERLKEQRDRDEREKQEEIDNYKKDLKDLKEKVSLLQGDLSEKEASLLDLKEHASSLASSGLKKDSRLKTLEIALEQKKEECLKMESQLKKAHEAALEARASPEMSDRIQHLEREITRYKDESSKAQAEVDRLLEILKEVENEKNDKDKKIAELERQVKDQNKKVANLKHKEQVEKKKSAQMLEEARRREDNLNDSSQQLQDSLRKKDDRIEELEEALRESVQITAEREMVLAQEESARTNAEKQVEELLMAMEKVKQELESMKAKLSSTQQSLAEKETHLTNLRAERRKHLEEVLEMKQEALLAAISEKDANIALLELSSSKKKTQEEVAALKREKDRLVQQLKQQTQNRMKLMADNYEDDHFKSSHSNQTNHKPSPDQIIQPLLELDQNRSKLKLYIGHLTTLCHDRDPLILRGLTPPASYNLDDDQAAWENELQKMTRGQLQDELEKGERDNAELQEFANAILQQIADHCPDILEQVVNALEESS

SEQ ID NO: 15465 - protein, 5 aa, Artificial Sequence
  Synthetic polypeptide
GRTCR

SEQ ID NO: 15466 - protein, 30 aa, Artificial Sequence
  Synthetic polypeptide
WRRRRCLGGSSSSSGSPEDAHADDNPGSPG

SEQ ID NO: 15467 - protein, 779 aa, Artificial Sequence
  Synthetic polypeptide
GGGGGGSGGGGGAWAAAAAVAAALRTHMQMTIQALQDELRIQRDLNQLFQQDSSSRTGEPCVAELTEENFQRLHAEHERQAKELFLLRKTLEEMELRIETQKQTLNARDESIKKLLEMLQSKGLSAKATEEDHERTRRLAEAEMHVHHLESLLEQKEKENSMLREEMHRRFENAPDSAKTKALQTVIEMKDSKISSMERGLRDLEEEIQMLKSNGALSTEEREEEMKQMEVYRSHSKFMKNKVEQLKEELSSKEAQWEELKKKAAGLQAEIGQVKQELSRKDTELLALQTKLETLTNQFSDSKQHIEVLKESLTAKEQRAAILQTEVDALRLRLEEKETMLNKKTKQIQDMAEEKGTQAGEIHDLKDMLDVKERKVNVLQKKIENLQEQLRDKEKQMSSLKERVKSLQADTTNTDTALTTLEEALAEKERTIERLKEQRDRDEREKQEEIDNYKKDLKDLKEKVSLLQGDLSEKEASLLDLKEHASSLASSGLKKDSRLKTLEIALEQKKEECLKMESQLKKAHEAALEARASPEMSDRIQHLEREITRYKDESSKAQAEVDRLLEILKEVENEKNDKDKKIAELESLTSRQVKDQNKKVANLKHKEQVEKKKSAQMLEEARRREDNLNDSSQQLQVEELLMAMEKVKQELESMKAKLSSTQQSLAEKETHLTNLRAERRKHLEEVLEMKQEALLAAISEKDANIALLELSSSKKKTQEEVAALKREKDRLVQQLKQQTQNRMKLMADNYEDDHFKSSHSNQTNHKPSPDQDEEEGIWA

SEQ ID NO: 15468 - protein, 923 aa, Artificial Sequence
  Synthetic polypeptide
GGGGGGSGGGGGAWAAAAAVAAALRTHMQMTIQALQDELRIQRDLNQLFQQDSSSRTGEPCVAELTEENFQRLHAEHERQAKELFLLRKTLEEMELRIETQKQTLNARDESIKKLLEMLQSKGLSAKATEEDHERTRRLAEAEMHVHHLESLLEQKEKENSMLREEMHRRFENAPDSAKTKALQTVIEMKDSKISSMERGLRDLEEEIQMLKSNGALSTEEREEEMKQMEVYRSHSKFMKNKVEQLKEELSSKEAQWEELKKKAAGLQAEIGQVKQELSRKDTELLALQTKLETLTNQFSDSKQHIEVLKESLTAKEQRAAILQTEVDALRLRLEEKETMLNKKTKQIQDMAEEKGTQAGEIHDLKDMLDVKERKVNVLQKKIENLQEQLRDKEKQMSSLKERVKSLQADTTNTDTALTTLEEALAEKERTIERLKEQRDRDEREKQEEIDNYKKDLKDLKEKVSLLQGDLSEKEASLLDLKEHASSLASSGLKKDSRLKTLEIALEQKKEECLKMESQLKKAHEAALEARASPEMSDRIQHLEREITRYKDESSKAQAEVDRLLEILKEVENEKNDKDKKIAELESLTSRQVKDQNKKVANLKHKEQVEKKKSAQMLEEARRREDNLNDSSQQLQDSLRKKDDRIEELEEALRESVQITAEREMVLAQEESARTNAEKQVEELLMAMEKVKQELESMKAKLSSTQQSLAEKETHLTNLRAERRKHLEEVLEMKQEALLAAISEKDANIALLELSSSKKKTQEEVAALKREKDRLVQQLKQQTQNRMKLMADNYEDDHFKSSHSNQTNHKPSPDQIIQPLLELDQNRSKLKLYIGHLTTLCHDRDPLILRGLTPPASYNLDDDQAAWENELQKMTRGQLQDELEKGERDNAELQEFANAILQQIADHCPDILEQVVNALEESS

SEQ ID NO: 15469 - protein, 751 aa, Artificial Sequence
  Synthetic polypeptide
GGGGGGSGGGGGAWAAAAAVAAALRTHMQMTIQALQDELRIQRDLNQLFQQDSSSRTGEPCVAELTEENFQRLHAEHERQAKELFLLRKTLEEMELRIETQKQTLNARDESIKKLLEMLQSKGLSAKATEEDHERTRRLAEAEMHVHHLESLLEQKEKENSMLREEMHRRFENAPDSAKTKALQTVIEMKDSKISSMERGLRDLEEEIQMLKSNGALSTEEREEEMKQMEVYRSHSKFMKNKIGQVKQELSRKDTELLALQTKLETLTNQFSDSKQHIEVLKESLTAKEQRAAILQTEVDALRLRLEEKETMLNKKTKQIQDMAEEKGTQAGEIHDLKDMLDVKERKVNVLQKKIENLQEQLRDKEKQMSSLKERVKSLQADTTNTDTALTTLEEALAEKERTIERLKEQRDRDEREKQEEIDNYKKDLKDLKEKVSLLQGDLSEKEASLLDLKEHASSLASSGLKKDSRLKTLEIALEQKKEECLKMESQLKKAHEAALEARASPEMSDRIQHLEREITRYKDESSKAQAEVDRLLEILKEVENEKNDKDKKIAELESLTSRQVKDQNKKVANLKHKEQVEKKKSAQMLEEARRREDNLNDSSQQLQVEELLMAMEKVKQELESMKAKLSSTQQSLAEKETHLTNLRAERRKHLEEVLEMKQEALLAAISEKDANIALLELSSSKKKTQEEVAALKREKDRLVQQLKQQTQNRMKLMADNYEDDHFKSSHSNQTNHKPSPDQDEEEGIWA

SEQ ID NO: 15470 - protein, 919 aa, Artificial Sequence
  Synthetic polypeptide
GGGGGGSGGGGGAWAAAAAVAAALRTHMQMTIQALQDELRIQRDLNQLFQQDSSSRTGEPCVAELTEENFQRLHAEHERQAKELFLLRKTLEEMELRIETQKQTLNARDESIKKLLEMLQSKGLSAKATEEDHERTRRLAEAEMHVHHLESLLEQKEKENSMLREEMHRRFENAPDSAKTKALQTVIEMKDSKISSMERGLRDLEEEIQMLKSNGALSTEEREEEMKQMEVYRSHSKFMKNKVEQLKEELSSKEAQWEELKKKAAGLQAEIGQVKQELSRKDTELLALQTKLETLTNQFSDSKQHIEVLKESLTAKEQRAAILQTEVDALRLRLEEKETMLNKKTKQIQDMAEEKGTQAGEIHDLKDMLDVKERKVNVLQKKIENLQEQLRDKEKQMSSLKERVKSLQADTTNTDTALTTLEEALAEKERTIERLKEQRDRDEREKQEEIDNYKKDLKDLKEKVSLLQGDLSEKEASLLDLKEHASSLASSGLKKDSRLKTLEIALEQKKEECLKMESQLKKAHEAALEARASPEMSDRIQHLEREITRYKDESSKAQAEVDRLLEILKEVENEKNDKDKKIAELERQVKDQNKKVANLKHKEQVEKKKSAQMLEEARRREDNLNDSSQQLQDSLRKKDDRIEELEEALRESVQITAEREMVLAQEESARTNAEKQVEELLMAMEKVKQELESMKAKLSSTQQSLAEKETHLTNLRAERRKHLEEVLEMKQEALLAAISEKDANIALLELSSSKKKTQEEVAALKREKDRLVQQLKQQTQNRMKLMADNYEDDHFKSSHSNQTNHKPSPDQIIQPLLELDQNRSKLKLYIGHLTTLCHDRDPLILRGLTPPASYNLDDDQAAWENELQKMTRGQLQDELEKGERDNAELQEFANAILQQIADHCPDILEQVVNALEESS

SEQ ID NO: 15471 - protein, 298 aa, Artificial Sequence
  Synthetic polypeptide
GGGGGGSGGGGGAWAAAAAVAAALRTHMQMTIQALQDELRIQRDLNQLFQQDSSSRTGEPCVAELTEENFQRLHAEHERQAKELFLLRKTLEEMELRIETQKQTLNARDESIKKLLEMLQSKGLSAKATEEDHERTRRLAEAEMHVHHLESLLEQKEKENSMLREEMHRRFENAPDSAKTKALQTVIEMKDSKISSMERGLRDLEEEIQMLKSNGALSTEEREEEMKQMEVYRSHSKFMKNKIGQVKQELSRKDTELLALQTKLETLTNQFSDSKQHIEVLKESLTAKEQRAAILQTE

SEQ ID NO: 15472 - protein, 795 aa, Artificial Sequence
  Synthetic polypeptide
GGGGGGSGGGGGAWAAAAAVAAALRTHMQMTIQALQDELRIQRDLNQLFQQDSSSRTGEPCVAELTEENFQRLHAEHERQAKELFLLRKTLEEMELRIETQKQTLNARDESIKKLLEMLQSKGLSAKATEEDHERTRRLAEAEMHVHHLESLLEQKEKENSMLREEMHRRFENAPDSAKTKALQTVIEMKDSKISSMERGLRDLEEEIQMLKSNGALSTEEREEEMKQMEVYRSHSKFMKNKIGQVKQELSRKDTELLALQTKLETLTNQFSDSKQHIEVLKESLTAKEQRAAILQTEVDALRLRLEEKETMLNKKTKQIQDMAEEKGTQAGEIHDLKDMLDVKERKVNVLQKKIENLQEQLRDKEKQMSSLKERVKSLQADTTNTDTALTTLEEALAEKERTIERLKEQRDRDEREKQEEIDNYKKDLKDLKEKVSLLQGDLSEKEASLLDLKEHASSLASSGLKKDSRLKTLEIALEQKKEECLKMESQLKKAHEAALEARASPEMSDRIQHLEREITRYKDESSKAQAEVDRLLEILKEVENEKNDKDKKIAELESLTSRQVKDQNKKVANLKHKEQVEKKKSAQMLEEARRREDNLNDSSQQLQDSLRKKDDRIEELEEALRESVQITAEREMVLAQEESARTNAEKQVEELLMAMEKVKQELESMKAKLSSTQQSLAEKETHLTNLRAERRKHLEEVLEMKQEALLAAISEKDANIALLELSSSKKKTQEEVAALKREKDRLVQQLKQQTQNRMKLMADNYEDDHFKSSHSNQTNHKPSPDQDEEEGIWA

SEQ ID NO: 15473 - protein, 889 aa, Artificial Sequence
  Synthetic polypeptide
GGGGGGSGGGGGAWAAAAAVAAALRTHMQMTIQALQDELRIQRDLNQLFQQDSSSRTGEPCVAELTEENFQRLHAEHERQAKELFLLRKTLEEMELRIETQKQTLNARDESIKKLLEMLQSKGLSAKATEEDHERTRRLAEAEMHVHHLESLLEQKEKENSMLREEMHRRFENAPDSAKTKALQTVIEMKDSKISSMERGLRDLEEEIQMLKSNGALSTEEREEEMKQMEVYRSHSKFMKNKVEQLKEELSSKEAQWEELKKKAAGLQAEIGQVKQELSRKDTELLALQTKLETLTNQFSDSKQHIEVLKESLTAKEQRAAILQTEVDALRLRLEEKETMLNKKTKQIQDMAEEKGTQAGEIHDLKDMLDVKERKVNVLQKKIENLQEQLRDKEKQMSSLKERVKSLQADTTNTDTALTTLEEALAEKERTIERLKEQRDRDEREKQEEIDNYKKDLKDLKEKVSLLQGDLSEKEASLLDLKEHASSLASSGLKKDSRLKTLEIALEQKKEECLKMESQLKKAHEAALEARASPEMSDRIQHLEREITRYKDESSKAQAEVDRLLEILKEVENEKNDKDKKIAELERQVKDQNKKVANLKHKEQVEKKKSAQMLEEARRREDNLNDSSQQLQDSLRKKDDRIEELEEALRESVQITAEREMVLAQEESARTNAEKQVEELLMAMEKVKQELESMKAKLSSTQQSLAEKETHLTNLRAERRKHLEEVLEMKQEALLAAISEKDANIALLELSSSKKKTQEEVAALKREKDRLVQQLKQQTQNRMKLMADNYEDDHFKSSHSNQTNHKPSPDQIIQPLLELDQNRSKLKLYIGHLTTLCHDRDPLILRGLTPPASYNLDDDQAAWENELQKMTRGQNPLHPKAMEKLPFFM

SEQ ID NO: 15474 - protein, 16 aa, Artificial Sequence
  Synthetic polypeptide
EGAWEKQSFSTSSGGR

SEQ ID NO: 15475 - protein, 37 aa, Artificial Sequence
  Synthetic polypeptide
ECPLVWCCDKCGDPHKALRKEPGRSNLSAHHPAGGDG

SEQ ID NO: 15476 - protein, 550 aa, Artificial Sequence
  Synthetic polypeptide
RQEHLSKPWRYHFPVCDLRHLISLFCASVSLSVKWGYKSVLWCGVVTNAVIHIRLLGRSLGEAIFQHIIRREVTDEDTRHLSRKFKDWAYGPVYSSLYDLSSLDTCGEEASVLEILVYNSKIENRHEMLAVEPINELLRDKWRKFGAVSFYINVVSYLCAMVIFTLTAYYQPLEGTPPYPYRTTVDYLRLAGEVITLFTGVLFFFTNIKDLFMKKCPGVNSLFIDGSFQLLYFIYSVLVIVSAALYLAGIEAYLAVMVFALVLGWMNALYFTRGLKLTGTYSIMIQKILFKDLFRFLLVYLLFMIGYASALVSLLNPCANMKVCNEDQTNCTVPTYPSCRDSETFSTFLLDLFKLTIGMGDLEMLSSTKYPVVFIILLVTYIILTFVLLLNMLIALMGETVGQVSKESKHIWKLQWATTILDIERSFPVFLRKAFRSGEMVTVGKSSDGTPDRRWCFRVDEVNWSHWNQNLGIINEDPGKNETYQYYGFSHTVGRLRRDRWSSVVPRVVELNKNSNPDEVVVPLDSMGNPRCDGHQQGYPRKWRTDDAPL

SEQ ID NO: 15477 - protein, 231 aa, Artificial Sequence
  Synthetic polypeptide
RQEHLSKPWRYHFPVCDLRHLISLFCASVSLSVKWGYKSVLWCGVVTNAVIHIRLLGRSLGEAIFQHIIRREVTDEDTRHLSRKFKDWAYGPVYSSLYDLSSLDTCGEEASVLEILVYNSKIENRHEMLAVEPINELLRDKWRKFGAVSFYINVVSYLCAMVIFTLTAYYQPLEGTPPYPYRTTVDYLRLAGEVITLFTGVLFFFTNIKDLFMKKCPGVNSLFIDGSFQLL

SEQ ID NO: 15478 - protein, 89 aa, Artificial Sequence
  Synthetic polypeptide
EDSFWVRGIGAWSETALCFQGSSCIPTLLRQFLSLGLSFFICKMKDGAPDAAVLLVQPAAPESAASTTARAGGPASAAVGAEQPLLQDV

SEQ ID NO: 15479 - protein, 499 aa, Artificial Sequence
  Synthetic polypeptide
KMALPTLPSYWCSQQRLNQQLARQREQEARLRQQWEQNSRYFRMSDICSSKQAEWSSKTSYQRSMHAYQREKMKEEKRRSLEARREKLRQLMQEEQDLLARELEELRLSMNLQERRIREQHGKLKSAKEEQRKLIAEQLLYEHWKKNNPKLREMELDLHQKHVVNSWEMQKEEKKQQEATAEQENKRYENEYERARREALERMKAEEERRQLEDKLQAEALLQQMEELKLKEVEATKLKKEQENLLKQRWELERLEEERKQMEAFRQKAELGRFLRHQYNAQLSRRTQQIQEELEADRRILQALLEKEDESQRLHLARREQVMADVAWMKQAIEEQLQLERAREAELQMLLREEAKEMWEKREAEWARERSARDRLMSEVLTGRQQQIQEKIEQNRRAQEESLKHREQLIRNLEEVRELARREKEESEKLKSARKQELEAQVAERRLQAWEADQQEEEEEEEARRVEQLSDALLQQEAETMAEQGYRPKPYGHPKIAWN

SEQ ID NO: 15480 - protein, 47 aa, Artificial Sequence
  Synthetic polypeptide
DCSLLSRLQLYPYIAQAIPLSRSQLLHLQDERWRSRRCRPTGAASSA

SEQ ID NO: 15481 - protein, 175 aa, Artificial Sequence
  Synthetic polypeptide
KMALPTLPSYWCSQQRLNQQLARQREQEARLRQQWEQNSRYFRMSDICSSKQAEWSSKTSYQRSMHAYQREKMKEEKRRSLEARREKLRQLMQEEQDLLARELEELRLSMNLQERRIREQHGKLKSAKEEQRKLIAEQLLYEHWKKNNPKLREMELDLHQKHVVNSWEMQKEEKK

SEQ ID NO: 15482 - protein, 49 aa, Artificial Sequence
  Synthetic polypeptide
TLPLQHGAPDAAVLLVQPAAPESAASTTARAGGPASAAVGAEQPLLQDV

SEQ ID NO: 15483 - protein, 503 aa, Artificial Sequence
  Synthetic polypeptide
LYLFNMALPTLPSYWCSQQRLNQQLARQREQEARLRQQWEQNSRYFRMSDICSSKQAEWSSKTSYQRSMHAYQREKMKEEKRRSLEARREKLRQLMQEEQDLLARELEELRLSMNLQERRIREQHGKLKSAKEEQRKLIAEQLLYEHWKKNNPKLREMELDLHQKHVVNSWEMQKEEKKQQEATAEQENKRYENEYERARREALERMKAEEERRQLEDKLQAEALLQQMEELKLKEVEATKLKKEQENLLKQRWELERLEEERKQMEAFRQKAELGRFLRHQYNAQLSRRTQQIQEELEADRRILQALLEKEDESQRLHLARREQVMADVAWMKQAIEEQLQLERAREAELQMLLREEAKEMWEKREAEWARERSARDRLMSEVLTGRQQQIQEKIEQNRRAQEESLKHREQLIRNLEEVRELARREKEESEKLKSARKQELEAQVAERRLQAWEADQQEEEEEEEARRVEQLSDALLQQEAETMAEQGYRPKPYGHPKIAWN

SEQ ID NO: 15484 - protein, 20 aa, Artificial Sequence
  Synthetic polypeptide
FTSSTWRSRRCRPTGAASSA

SEQ ID NO: 15485 - protein, 179 aa, Artificial Sequence
  Synthetic polypeptide
LYLFNMALPTLPSYWCSQQRLNQQLARQREQEARLRQQWEQNSRYFRMSDICSSKQAEWSSKTSYQRSMHAYQREKMKEEKRRSLEARREKLRQLMQEEQDLLARELEELRLSMNLQERRIREQHGKLKSAKEEQRKLIAEQLLYEHWKKNNPKLREMELDLHQKHVVNSWEMQKEEKK

SEQ ID NO: 15486 - protein, 9 aa, Artificial Sequence
  Synthetic polypeptide
EVEILPGHQ

SEQ ID NO: 15487 - protein, 15 aa, Artificial Sequence
  Synthetic polypeptide
SQHFRRSRSFLGISK

SEQ ID NO: 15488 - protein, 758 aa, Artificial Sequence
  Synthetic polypeptide
MGTVAQACNPSTLGGRDPSWASVNRGTFLCDECCSVHRSLGRHISQVRHLKHTPWPPTLLQMVETLYNNGANSIWEHSLLDPASIMSGRRKANPQDKVHPNKAEFIRAKYQMLAFVHRLPCRDDDSVTAKDLSKQLHSSVRTGNLETCLRLLSLGAQANFFHPEKGNTPLHVASKAGQILQAELLAVYGADPGTQDSSGKTPVDYARQGGHHELAERLVEIQYELTDRLAFYLCGRKPDHKNGQHFIIPQMADSSLDLSELAKAAKKKLQSLSNHLFEELAMDVYDEVDRRETDAVWLATQNHSALVTETTVVPFLPVNPEYSSTRNQGRQKLARFNAHEFATLVIDILSDAKRRQQGSSLSGSKDNVELILKTINNQHSVESQDNDQPDYDSVASDEDTDLETTASKTNRQKSLDSDLSDGPVTVQEFMEVKNALVASEAKIQQLMKVNNNLSDELRIMQKKLQTLQSENSNLRKQATTNVYQVQTGSEYTDTSNHSSLKRRPSARGSRPMSMYETGSGQKPYLPMGEASRPEESRMRLQPFPAHIGRSALVTSSSSLPSFPSTLSWSRDESARRASRLEKQNSTPESDYDNTPNDMEPDGMGSSRKGRQRSMVWPGDGLVPDTAEPHVAPSPTLPSTEDVIRKTEQITKNIQELLRAAQENKHDSYIPCSERIHVAVTEMAALFPKKPKSDMVRTSLRLLTSSAYRLQSECKKTLPGDPGSPTDVQLVTQQVIQCAYDIAKAAKQLVTITTKENNN

SEQ ID NO: 15489 - protein, 660 aa, Artificial Sequence
  Synthetic polypeptide
MGTVAQACNPSTLGGRDPSWASVNRGTFLCDECCSVHRSLGRHISQVRHLKHTPWPPTLLQMVETLYNNGANSIWEHSLLDPASIMSGRRKANPQDKVHPNKAEFIRAKYQMLAFVHRLPCRDDDSVTAKDLSKQLHSSVRTGNLETCLRLLSLGAQANFFHPEKGNTPLHVASKAGQILQAELLAVYGADPGTQDSSGKTPVDYARQGGHHELAERLVEIQYELTDRLAFYLCGRKPDHKNGQHFIIPQMADSSLDLSELAKAAKKKLQSLSNHLFEELAMDVYDEVDRRETDAVWLATQNHSALVTETTVVPFLPVNPEYSSTRNQGRQKLARFNAHEFATLVIDILSDAKRRQQGSSLSGSKDNVELILKTINNQHSVESQDNDQPDYDSVASDEDTDLETTASKTNRQKSLDSDLSDGPVTVQEFMEVKNALVASEAKIQQLMKIGRSALVTSSSSLPSFPSTLSWSRDESARRASRLEKQNSTPESDYDNTPNDMEPDGMGSSRKGRQRSMVWPGDGLVPDTAEPHVAPSPTLPSTEDVIRKTEQITKNIQELLRAAQENKHDSYIPCSERIHVAVTEMAALFPKKPKSDMVRTSLRLLTSSAYRLQSECKKTLPGDPGSPTDVQLVTQQVIQCAYDIAKAAKQLVTITTKENNN

SEQ ID NO: 15490 - protein, 648 aa, Artificial Sequence
  Synthetic polypeptide
MGTVAQACNPSTLGGRDPSWASVNRGTFLCDECCSVHRSLGRHISQVRHLKHTPWPPTLLQMVETLYNNGANSIWEHSLLDPASIMSGRRKANPQDKVHPNKAEFIRAKYQMLAFVHRLPCRDDDSVTAKDLSKQLHSSVRTGNLETCLRLLSLGAQANFFHPEKGNTPLHVASKAGQILQAELLAVYGADPGTQDSSGKTPVDYARQGGHHELAERLVEIQYELTDRLAFYLCGRKPDHKNGQHFIIPQMADSSLDLSELAKAAKKKLQSLSNHLFEELAMDVYDEVDRRETDAVWLATQNHSALVTETTVVPFLPVNPEYSSTRNQGQPKKSLDSDLSDGPVTVQEFMEVKNALVASEAKIQQLMKVNNNLSDELRIMQKKLQTLQSENSNLRKQATTNVYQVQTGSEYTDTSNHSSLKRRPSARGSRPMSMYETGSGQKPYLPMGEASRPEESRMRLQPFPAHASRLEKQNSTPESDYDNTPNDMEPDGMGSSRKGRQRSMVWPGDGLVPDTAEPHVAPSPTLPSTEDVIRKTEQITKNIQELLRAAQENKHDSYIPCSERIHVAVTEMAALFPKKPKSDMVRTSLRLLTSSAYRLQSECKKTLPGDPGSPTDVQLVTQQVIQCAYDIAKAAKQLVTITTKENNN

SEQ ID NO: 15491 - protein, 680 aa, Artificial Sequence
  Synthetic polypeptide
MGTVAQACNPSTLGGRDPSWASVNRGTFLCDECCSVHRSLGRHISQVRHLKHTPWPPTLLQMVETLYNNGANSIWEHSLLDPASIMSGRRKANPQDKVHPNKAEFIRAKYQMLAFVHRLPCRDDDSVTAKDLSKQLHSSVRTGNLETCLRLLSLGAQANFFHPEKGNTPLHVASKAGQILQAELLAVYGADPGTQDSSGKTPVDYARQGGHHELAERLVEIQYELTDRLAFYLCGRKPDHKNGQHFIIPQMADRRSSLDLSELAKAAKKKLQSLSNHLFEELAMDVYDEVDRRETDAVWLATQNHSALVTETTVVPFLPVNPEYSSTRNQGRQKLARFNAHEFATLVIDILSDAKRRQQGSSLSGSKDNVELILKTINNQHSVESQDNDQPDYDSVASDEDTDLETTASKTNRQKLQTLQSENSNLRKQATTNVYQVQTGSEYTDTSNHSSLKRRPSARGSRPMSMYETGSGQKPYLPMGEASRPEESRMRLQPFPAHASRLEKQNSTPESDYDNTPNDMEPDGMGSSRKGRQRSMVWPGDGLVPDTAEPHVAPSPTLPSTEDVIRKTEQITKNIQELLRAAQENKHDSYIPCSERIHVAVTEMAALFPKKPKSDMVRTSLRLLTSSAYRLQSECKKTLPGDPGSPTDVQLVTQQVIQCAYDIAKAAKQLVTITTKENNN

SEQ ID NO: 15492 - protein, 645 aa, Artificial Sequence
  Synthetic polypeptide
MGTVAQACNPSTLGGRDPSWASVNRGTFLCDECCSVHRSLGRHISQVRHLKHTPWPPTLLQMVETLYNNGANSIWEHSLLDPASIMSGRRKANPQDKVHPNKAEFIRAKYQMLAFVHRLPCRDDDSVTAKDLSKQLHSSVRTGNLETCLRLLSLGAQANFFHPEKGNTPLHVASKAGQILQAELLAVYGADPGTQDSSGKTPVDYARQGGHHELAERLVEIQYELTDRLAFYLCGRKPDHKNGQHFIIPQMADSSLDLSELAKAAKKKLQSLSNHLFEELAMDVYDEVDRRETDAVWLATQNHSALVTETTVVPFLPVNPEYSSTRNQGRQKLARFNAHEFATLVIDILSDAKRRQQGSSLSGSKDNVELILKTINNQHSVESQDNDQPDYDSVASDEDTDLETTASKTNRQKSLDSDLSDGPVTVQEFMEVKNALVASEAKIQQLMKVNNNLSDELRIMQKKASRLEKQNSTPESDYDNTPNDMEPDGMGSSRKGRQRSMVWPGDGLVPDTAEPHVAPSPTLPSTEDVIRKTEQITKNIQELLRAAQENKHDSYIPCSERIHVAVTEMAALFPKKPKSDMVRTSLRLLTSSAYRLQSECKKTLPGDPGSPTDVQLVTQQVIQCAYDIAKAAKQLVTITTKENNN

SEQ ID NO: 15493 - protein, 708 aa, Artificial Sequence
  Synthetic polypeptide
MGTVAQACNPSTLGGRDPSWASVNRGTFLCDECCSVHRSLGRHISQVRHLKHTPWPPTLLQMVETLYNNGANSIWEHSLLDPASIMSGRRKANPQDKVHPNKAEFIRAKYQMLAFVHRLPCRDDDSVTAKDLSKQLHSSVRTGNLETCLRLLSLGAQANFFHPEKGNTPLHVASKAGQILQAELLAVYGADPGTQDSSGKTPVDYARQGGHHELAERLVEIQYELTDRLAFYLCGRKPDHKNGQHFIIPQMADSSLDLSELAKAAKKKLQSLSNHLFEELAMDVYDEVDRRETDAVWLATQNHSALVTETTVVPFLPVNPEYSSTRNQGRQKLARFNAHEFATLVIDILSDAKRRQQGSSLSGSKDNVELILKTINNQHSVESQDNDQPDYDSVASDEDTDLETTASKTNRQKLQTLQSENSNLRKQATTNVYQVQTGSEYTDTSNHSSLKRRPSARGSRPMSMYETGSGQKPYLPMGEASRPEESRMRLQPFPAHIGRSALVTSSSSLPSFPSTLSWSRDESARRASRLEKQNSTPESDYDNTPNDMEPDGMGSSRKGRQRSMVWPGDGLVPDTAEPHVAPSPTLPSTEDVIRKTEQITKNIQELLRAAQENKHDSYIPCSERIHVAVTEMAALFPKKPKSDMVRTSLRLLTSSAYRLQSECKKTLPGDPGSPTDVQLVTQQVIQCAYDIAKAAKQLVTITTKENNN

SEQ ID NO: 15494 - protein, 680 aa, Artificial Sequence
  Synthetic polypeptide
MGTVAQACNPSTLGGRDPSWASVNRGTFLCDECCSVHRSLGRHISQVRHLKHTPWPPTLLQMVETLYNNGANSIWEHSLLDPASIMSGRRKANPQDKVHPNKAEFIRAKYQMLAFVHRLPCRDDDSVTAKDLSKQLHSSVRTGNLETCLRLLSLGAQANFFHPEKGNTPLHVASKAGQILQAELLAVYGADPGTQDSSGKTPVDYARQGGHHELAERLVEIQYELTDRLAFYLCGRKPDHKNGQHFIIPQMADRRLSLDLSELAKAAKKKLQSLSNHLFEELAMDVYDEVDRRETDAVWLATQNHSALVTETTVVPFLPVNPEYSSTRNQGRQKLARFNAHEFATLVIDILSDAKRRQQGSSLSGSKDNVELILKTINNQHSVESQDNDQPDYDSVASDEDTDLETTASKTNRQKLQTLQSENSNLRKQATTNVYQVQTGSEYTDTSNHSSLKRRPSARGSRPMSMYETGSGQKPYLPMGEASRPEESRMRLQPFPAHASRLEKQNSTPESDYDNTPNDMEPDGMGSSRKGRQRSMVWPGDGLVPDTAEPHVAPSPTLPSTEDVIRKTEQITKNIQELLRAAQENKHDSYIPCSERIHVAVTEMAALFPKKPKSDMVRTSLRLLTSSAYRLQSECKKTLPGDPGSPTDVQLVTQQVIQCAYDIAKAAKQLVTITTKENNN

SEQ ID NO: 15495 - protein, 728 aa, Artificial Sequence
  Synthetic polypeptide
MGTVAQACNPSTLGGRDPSWASVNRGTFLCDECCSVHRSLGRHISQVRHLKHTPWPPTLLQMVETLYNNGANSIWEHSLLDPASIMSGRRKANPQDKVHPNKAEFIRAKYQMLAFVHRLPCRDDDSVTAKDLSKQLHSSVRTGNLETCLRLLSLGAQANFFHPEKGNTPLHVASKAGQILQAELLAVYGADPGTQDSSGKTPVDYARQGGHHELAERLVEIQYELTDRLAFYLCGRKPDHKNGQHFIIPQMADSSLDLSELAKAAKKKLQSLSNHLFEELAMDVYDEVDRRETDAVWLATQNHSALVTETTVVPFLPVNPEYSSTRNQGRQKLARFNAHEFATLVIDILSDAKRRQQGSSLSGSKDNVELILKTINNQHSVESQDNDQPDYDSVASDEDTDLETTASKTNRQKSLDSDLSDGPVTVQEFMEVKNALVASEAKIQQLMKVNNNLSDELRIMQKKLQTLQSENSNLRKQATTNVYQVQTGSEYTDTSNHSSLKRRPSARGSRPMSMYETGSGQKPYLPMGEASRPEESRMRLQPFPAHASRLEKQNSTPESDYDNTPNDMEPDGMGSSRKGRQRSMVWPGDGLVPDTAEPHVAPSPTLPSTEDVIRKTEQITKNIQELLRAAQENKHDSYIPCSERIHVAVTEMAALFPKKPKSDMVRTSLRLLTSSAYRLQSECKKTLPGDPGSPTDVQLVTQQVIQCAYDIAKAAKQLVTITTKENNN

SEQ ID NO: 15496 - protein, 630 aa, Artificial Sequence
  Synthetic polypeptide
MGTVAQACNPSTLGGRDPSWASVNRGTFLCDECCSVHRSLGRHISQVRHLKHTPWPPTLLQMVETLYNNGANSIWEHSLLDPASIMSGRRKANPQDKVHPNKAEFIRAKYQMLAFVHRLPCRDDDSVTAKDLSKQLHSSVRTGNLETCLRLLSLGAQANFFHPEKGNTPLHVASKAGQILQAELLAVYGADPGTQDSSGKTPVDYARQGGHHELAERLVEIQYELTDRLAFYLCGRKPDHKNGQHFIIPQMADSSLDLSELAKAAKKKLQSLSNHLFEELAMDVYDEVDRRETDAVWLATQNHSALVTETTVVPFLPVNPEYSSTRNQGRQKLARFNAHEFATLVIDILSDAKRRQQGSSLSGSKDNVELILKTINNQHSVESQDNDQPDYDSVASDEDTDLETTASKTNRQKSLDSDLSDGPVTVQEFMEVKNALVASEAKIQQLMKASRLEKQNSTPESDYDNTPNDMEPDGMGSSRKGRQRSMVWPGDGLVPDTAEPHVAPSPTLPSTEDVIRKTEQITKNIQELLRAAQENKHDSYIPCSERIHVAVTEMAALFPKKPKSDMVRTSLRLLTSSAYRLQSECKKTLPGDPGSPTDVQLVTQQVIQCAYDIAKAAKQLVTITTKENNN

SEQ ID NO: 15497 - protein, 707 aa, Artificial Sequence
  Synthetic polypeptide
MGTVAQACNPSTLGGRDPSWASVNRGTFLCDECCSVHRSLGRHISQVRHLKHTPWPPTLLQMVETLYNNGANSIWEHSLLDPASIMSGRRKANPQDKVHPNKAEFIRAKYQMLAFVHRLPCRDDDSVTAKDLSKQLHSSVRTGNLETCLRLLSLGAQANFFHPEKGNTPLHVASKAGQILQAELLAVYGADPGTQDSSGKTPVDYARQGGHHELAERLVEIQYELTDRLAFYLCGRKPDHKNGQHFIIPQMADSLDLSELAKAAKKKLQSLSNHLFEELAMDVYDEVDRRETDAVWLATQNHSALVTETTVVPFLPVNPEYSSTRNQGRQKLARFNAHEFATLVIDILSDAKRRQQGSSLSGSKDNVELILKTINNQHSVESQDNDQPDYDSVASDEDTDLETTASKTNRQKLQTLQSENSNLRKQATTNVYQVQTGSEYTDTSNHSSLKRRPSARGSRPMSMYETGSGQKPYLPMGEASRPEESRMRLQPFPAHIGRSALVTSSSSLPSFPSTLSWSRDESARRASRLEKQNSTPESDYDNTPNDMEPDGMGSSRKGRQRSMVWPGDGLVPDTAEPHVAPSPTLPSTEDVIRKTEQITKNIQELLRAAQENKHDSYIPCSERIHVAVTEMAALFPKKPKSDMVRTSLRLLTSSAYRLQSECKKTLPGDPGSPTDVQLVTQQVIQCAYDIAKAAKQLVTITTKENNN

SEQ ID NO: 15498 - protein, 470 aa, Artificial Sequence
  Synthetic polypeptide
MGTVAQACNPSTLGGRDPSWASVNRGTFLCDECCSVHRSLGRHISQVRHLKHTPWPPTLLQMVETLYNNGANSIWEHSLLDPASIMSGRRKANPQDKVHPNKAEFIRAKYQMLAFVHRLPCRDDDSVTAKDLSKQLHSSVRTGNLETCLRLLSLGAQANFFHPEKGNTPLHVASKAGQILQAELLAVYGADPGTQDSSGKTPVDYARQGGHHELAERLVEIQYELTDRLAFYLCGRKPDHKNGQHFIIPQMADSSLDLSELAKAAKKKLQSLSNHLFEELAMDVYDEVDRRETDAVWLATQNHSALVTETTVVPFLPVNPEYSSTRNQGRQKLARFNAHEFATLVIDILSDAKRRQQGSSLSGSKDNVELILKTINNQHSVESQDNDQPDYDSVASDEDTDLETTASKTNRQKSLDSDLSDGPVTVQEFMEVKNALVASEAKIQQLMKVNNNLSDELRIMQKKLLGKDAN

SEQ ID NO: 15499 - protein, 420 aa, Artificial Sequence
  Synthetic polypeptide
MGTVAQACNPSTLGGRDPSWASVNRGTFLCDECCSVHRSLGRHISQVRHLKHTPWPPTLLQMVETLYNNGANSIWEHSLLDPASIMSGRRKANPQDKVHPNKAEFIRAKYQMLAFVHRLPCRDDDSVTAKDLSKQLHSSVRTGNLETCLRLLSLGAQANFFHPEKGNTPLHVASKAGQILQAELLAVYGADPGTQDSSGKTPVDYARQGGHHELAERLVEIQYELTDRLAFYLCGRKPDHKNGQHFIIPQMADSSLDLSELAKAAKKKLQSLSNHLFEELAMDVYDEVDRRETDAVWLATQNHSALVTETTVVPFLPVNPEYSSTRNQGRQKLARFNAHEFATLVIDILSDAKRRQQGSSLSGSKDNVELILKTINNQHSVESQDNDQPDYDSVASDEDTDLETTASKTNRQKLLGKDAN

SEQ ID NO: 15500 - protein, 806 aa, Artificial Sequence
  Synthetic polypeptide
DGAFRSQPARVKIPTWHLSAGRPRTRHVASEDLFPSLSSGKVTVPTHQRYWKGEERRYLKSPSHDPSWASVNRGTFLCDECCSVHRSLGRHISQVRHLKHTPWPPTLLQMVETLYNNGANSIWEHSLLDPASIMSGRRKANPQDKVHPNKAEFIRAKYQMLAFVHRLPCRDDDSVTAKDLSKQLHSSVRTGNLETCLRLLSLGAQANFFHPEKGNTPLHVASKAGQILQAELLAVYGADPGTQDSSGKTPVDYARQGGHHELAERLVEIQYELTDRLAFYLCGRKPDHKNGQHFIIPQMADSSLDLSELAKAAKKKLQSLSNHLFEELAMDVYDEVDRRETDAVWLATQNHSALVTETTVVPFLPVNPEYSSTRNQGRQKLARFNAHEFATLVIDILSDAKRRQQGSSLSGSKDNVELILKTINNQHSVESQDNDQPDYDSVASDEDTDLETTASKTNRQKSLDSDLSDGPVTVQEFMEVKNALVASEAKIQQLMKVNNNLSDELRIMQKKLQTLQSENSNLRKQATTNVYQVQTGSEYTDTSNHSSLKRRPSARGSRPMSMYETGSGQKPYLPMGEASRPEESRMRLQPFPAHIGRSALVTSSSSLPSFPSTLSWSRDESARRASRLEKQNSTPESDYDNTPNDMEPDGMGSSRKGRQRSMVWPGDGLVPDTAEPHVAPSPTLPSTEDVIRKTEQITKNIQELLRAAQENKHDSYIPCSERIHVAVTEMAALFPKKPKSDMVRTSLRLLTSSAYRLQSECKKTLPGDPGSPTDVQLVTQQVIQCAYDIAKAAKQLVTITTKENNN

SEQ ID NO: 15501 - protein, 11 aa, Artificial Sequence
  Synthetic polypeptide
KARRTILPGHQ

SEQ ID NO: 15502 - protein, 18 aa, Artificial Sequence
  Synthetic polypeptide
REKIFKKPVARSFLGISK

SEQ ID NO: 15503 - protein, 708 aa, Artificial Sequence
  Synthetic polypeptide
DGAFRSQPARVKIPTWHLSAGRPRTRHVASEDLFPSLSSGKVTVPTHQRYWKGEERRYLKSPSHDPSWASVNRGTFLCDECCSVHRSLGRHISQVRHLKHTPWPPTLLQMVETLYNNGANSIWEHSLLDPASIMSGRRKANPQDKVHPNKAEFIRAKYQMLAFVHRLPCRDDDSVTAKDLSKQLHSSVRTGNLETCLRLLSLGAQANFFHPEKGNTPLHVASKAGQILQAELLAVYGADPGTQDSSGKTPVDYARQGGHHELAERLVEIQYELTDRLAFYLCGRKPDHKNGQHFIIPQMADSSLDLSELAKAAKKKLQSLSNHLFEELAMDVYDEVDRRETDAVWLATQNHSALVTETTVVPFLPVNPEYSSTRNQGRQKLARFNAHEFATLVIDILSDAKRRQQGSSLSGSKDNVELILKTINNQHSVESQDNDQPDYDSVASDEDTDLETTASKTNRQKSLDSDLSDGPVTVQEFMEVKNALVASEAKIQQLMKIGRSALVTSSSSLPSFPSTLSWSRDESARRASRLEKQNSTPESDYDNTPNDMEPDGMGSSRKGRQRSMVWPGDGLVPDTAEPHVAPSPTLPSTEDVIRKTEQITKNIQELLRAAQENKHDSYIPCSERIHVAVTEMAALFPKKPKSDMVRTSLRLLTSSAYRLQSECKKTLPGDPGSPTDVQLVTQQVIQCAYDIAKAAKQLVTITTKENNN

SEQ ID NO: 15504 - protein, 696 aa, Artificial Sequence
  Synthetic polypeptide
DGAFRSQPARVKIPTWHLSAGRPRTRHVASEDLFPSLSSGKVTVPTHQRYWKGEERRYLKSPSHDPSWASVNRGTFLCDECCSVHRSLGRHISQVRHLKHTPWPPTLLQMVETLYNNGANSIWEHSLLDPASIMSGRRKANPQDKVHPNKAEFIRAKYQMLAFVHRLPCRDDDSVTAKDLSKQLHSSVRTGNLETCLRLLSLGAQANFFHPEKGNTPLHVASKAGQILQAELLAVYGADPGTQDSSGKTPVDYARQGGHHELAERLVEIQYELTDRLAFYLCGRKPDHKNGQHFIIPQMADSSLDLSELAKAAKKKLQSLSNHLFEELAMDVYDEVDRRETDAVWLATQNHSALVTETTVVPFLPVNPEYSSTRNQGQPKKSLDSDLSDGPVTVQEFMEVKNALVASEAKIQQLMKVNNNLSDELRIMQKKLQTLQSENSNLRKQATTNVYQVQTGSEYTDTSNHSSLKRRPSARGSRPMSMYETGSGQKPYLPMGEASRPEESRMRLQPFPAHASRLEKQNSTPESDYDNTPNDMEPDGMGSSRKGRQRSMVWPGDGLVPDTAEPHVAPSPTLPSTEDVIRKTEQITKNIQELLRAAQENKHDSYIPCSERIHVAVTEMAALFPKKPKSDMVRTSLRLLTSSAYRLQSECKKTLPGDPGSPTDVQLVTQQVIQCAYDIAKAAKQLVTITTKENNN

SEQ ID NO: 15505 - protein, 728 aa, Artificial Sequence
  Synthetic polypeptide
DGAFRSQPARVKIPTWHLSAGRPRTRHVASEDLFPSLSSGKVTVPTHQRYWKGEERRYLKSPSHDPSWASVNRGTFLCDECCSVHRSLGRHISQVRHLKHTPWPPTLLQMVETLYNNGANSIWEHSLLDPASIMSGRRKANPQDKVHPNKAEFIRAKYQMLAFVHRLPCRDDDSVTAKDLSKQLHSSVRTGNLETCLRLLSLGAQANFFHPEKGNTPLHVASKAGQILQAELLAVYGADPGTQDSSGKTPVDYARQGGHHELAERLVEIQYELTDRLAFYLCGRKPDHKNGQHFIIPQMADRRSSLDLSELAKAAKKKLQSLSNHLFEELAMDVYDEVDRRETDAVWLATQNHSALVTETTVVPFLPVNPEYSSTRNQGRQKLARFNAHEFATLVIDILSDAKRRQQGSSLSGSKDNVELILKTINNQHSVESQDNDQPDYDSVASDEDTDLETTASKTNRQKLQTLQSENSNLRKQATTNVYQVQTGSEYTDTSNHSSLKRRPSARGSRPMSMYETGSGQKPYLPMGEASRPEESRMRLQPFPAHASRLEKQNSTPESDYDNTPNDMEPDGMGSSRKGRQRSMVWPGDGLVPDTAEPHVAPSPTLPSTEDVIRKTEQITKNIQELLRAAQENKHDSYIPCSERIHVAVTEMAALFPKKPKSDMVRTSLRLLTSSAYRLQSECKKTLPGDPGSPTDVQLVTQQVIQCAYDIAKAAKQLVTITTKENNN

SEQ ID NO: 15506 - protein, 693 aa, Artificial Sequence
  Synthetic polypeptide
DGAFRSQPARVKIPTWHLSAGRPRTRHVASEDLFPSLSSGKVTVPTHQRYWKGEERRYLKSPSHDPSWASVNRGTFLCDECCSVHRSLGRHISQVRHLKHTPWPPTLLQMVETLYNNGANSIWEHSLLDPASIMSGRRKANPQDKVHPNKAEFIRAKYQMLAFVHRLPCRDDDSVTAKDLSKQLHSSVRTGNLETCLRLLSLGAQANFFHPEKGNTPLHVASKAGQILQAELLAVYGADPGTQDSSGKTPVDYARQGGHHELAERLVEIQYELTDRLAFYLCGRKPDHKNGQHFIIPQMADSSLDLSELAKAAKKKLQSLSNHLFEELAMDVYDEVDRRETDAVWLATQNHSALVTETTVVPFLPVNPEYSSTRNQGRQKLARFNAHEFATLVIDILSDAKRRQQGSSLSGSKDNVELILKTINNQHSVESQDNDQPDYDSVASDEDTDLETTASKTNRQKSLDSDLSDGPVTVQEFMEVKNALVASEAKIQQLMKVNNNLSDELRIMQKKASRLEKQNSTPESDYDNTPNDMEPDGMGSSRKGRQRSMVWPGDGLVPDTAEPHVAPSPTLPSTEDVIRKTEQITKNIQELLRAAQENKHDSYIPCSERIHVAVTEMAALFPKKPKSDMVRTSLRLLTSSAYRLQSECKKTLPGDPGSPTDVQLVTQQVIQCAYDIAKAAKQLVTITTKENNN

SEQ ID NO: 15507 - protein, 756 aa, Artificial Sequence
  Synthetic polypeptide
DGAFRSQPARVKIPTWHLSAGRPRTRHVASEDLFPSLSSGKVTVPTHQRYWKGEERRYLKSPSHDPSWASVNRGTFLCDECCSVHRSLGRHISQVRHLKHTPWPPTLLQMVETLYNNGANSIWEHSLLDPASIMSGRRKANPQDKVHPNKAEFIRAKYQMLAFVHRLPCRDDDSVTAKDLSKQLHSSVRTGNLETCLRLLSLGAQANFFHPEKGNTPLHVASKAGQILQAELLAVYGADPGTQDSSGKTPVDYARQGGHHELAERLVEIQYELTDRLAFYLCGRKPDHKNGQHFIIPQMADSSLDLSELAKAAKKKLQSLSNHLFEELAMDVYDEVDRRETDAVWLATQNHSALVTETTVVPFLPVNPEYSSTRNQGRQKLARFNAHEFATLVIDILSDAKRRQQGSSLSGSKDNVELILKTINNQHSVESQDNDQPDYDSVASDEDTDLETTASKTNRQKLQTLQSENSNLRKQATTNVYQVQTGSEYTDTSNHSSLKRRPSARGSRPMSMYETGSGQKPYLPMGEASRPEESRMRLQPFPAHIGRSALVTSSSSLPSFPSTLSWSRDESARRASRLEKQNSTPESDYDNTPNDMEPDGMGSSRKGRQRSMVWPGDGLVPDTAEPHVAPSPTLPSTEDVIRKTEQITKNIQELLRAAQENKHDSYIPCSERIHVAVTEMAALFPKKPKSDMVRTSLRLLTSSAYRLQSECKKTLPGDPGSPTDVQLVTQQVIQCAYDIAKAAKQLVTITTKENNN

SEQ ID NO: 15508 - protein, 728 aa, Artificial Sequence
  Synthetic polypeptide
DGAFRSQPARVKIPTWHLSAGRPRTRHVASEDLFPSLSSGKVTVPTHQRYWKGEERRYLKSPSHDPSWASVNRGTFLCDECCSVHRSLGRHISQVRHLKHTPWPPTLLQMVETLYNNGANSIWEHSLLDPASIMSGRRKANPQDKVHPNKAEFIRAKYQMLAFVHRLPCRDDDSVTAKDLSKQLHSSVRTGNLETCLRLLSLGAQANFFHPEKGNTPLHVASKAGQILQAELLAVYGADPGTQDSSGKTPVDYARQGGHHELAERLVEIQYELTDRLAFYLCGRKPDHKNGQHFIIPQMADRRLSLDLSELAKAAKKKLQSLSNHLFEELAMDVYDEVDRRETDAVWLATQNHSALVTETTVVPFLPVNPEYSSTRNQGRQKLARFNAHEFATLVIDILSDAKRRQQGSSLSGSKDNVELILKTINNQHSVESQDNDQPDYDSVASDEDTDLETTASKTNRQKLQTLQSENSNLRKQATTNVYQVQTGSEYTDTSNHSSLKRRPSARGSRPMSMYETGSGQKPYLPMGEASRPEESRMRLQPFPAHASRLEKQNSTPESDYDNTPNDMEPDGMGSSRKGRQRSMVWPGDGLVPDTAEPHVAPSPTLPSTEDVIRKTEQITKNIQELLRAAQENKHDSYIPCSERIHVAVTEMAALFPKKPKSDMVRTSLRLLTSSAYRLQSECKKTLPGDPGSPTDVQLVTQQVIQCAYDIAKAAKQLVTITTKENNN

SEQ ID NO: 15509 - protein, 776 aa, Artificial Sequence
  Synthetic polypeptide
DGAFRSQPARVKIPTWHLSAGRPRTRHVASEDLFPSLSSGKVTVPTHQRYWKGEERRYLKSPSHDPSWASVNRGTFLCDECCSVHRSLGRHISQVRHLKHTPWPPTLLQMVETLYNNGANSIWEHSLLDPASIMSGRRKANPQDKVHPNKAEFIRAKYQMLAFVHRLPCRDDDSVTAKDLSKQLHSSVRTGNLETCLRLLSLGAQANFFHPEKGNTPLHVASKAGQILQAELLAVYGADPGTQDSSGKTPVDYARQGGHHELAERLVEIQYELTDRLAFYLCGRKPDHKNGQHFIIPQMADSSLDLSELAKAAKKKLQSLSNHLFEELAMDVYDEVDRRETDAVWLATQNHSALVTETTVVPFLPVNPEYSSTRNQGRQKLARFNAHEFATLVIDILSDAKRRQQGSSLSGSKDNVELILKTINNQHSVESQDNDQPDYDSVASDEDTDLETTASKTNRQKSLDSDLSDGPVTVQEFMEVKNALVASEAKIQQLMKVNNNLSDELRIMQKKLQTLQSENSNLRKQATTNVYQVQTGSEYTDTSNHSSLKRRPSARGSRPMSMYETGSGQKPYLPMGEASRPEESRMRLQPFPAHASRLEKQNSTPESDYDNTPNDMEPDGMGSSRKGRQRSMVWPGDGLVPDTAEPHVAPSPTLPSTEDVIRKTEQITKNIQELLRAAQENKHDSYIPCSERIHVAVTEMAALFPKKPKSDMVRTSLRLLTSSAYRLQSECKKTLPGDPGSPTDVQLVTQQVIQCAYDIAKAAKQLVTITTKENNN

SEQ ID NO: 15510 - protein, 678 aa, Artificial Sequence
  Synthetic polypeptide
DGAFRSQPARVKIPTWHLSAGRPRTRHVASEDLFPSLSSGKVTVPTHQRYWKGEERRYLKSPSHDPSWASVNRGTFLCDECCSVHRSLGRHISQVRHLKHTPWPPTLLQMVETLYNNGANSIWEHSLLDPASIMSGRRKANPQDKVHPNKAEFIRAKYQMLAFVHRLPCRDDDSVTAKDLSKQLHSSVRTGNLETCLRLLSLGAQANFFHPEKGNTPLHVASKAGQILQAELLAVYGADPGTQDSSGKTPVDYARQGGHHELAERLVEIQYELTDRLAFYLCGRKPDHKNGQHFIIPQMADSSLDLSELAKAAKKKLQSLSNHLFEELAMDVYDEVDRRETDAVWLATQNHSALVTETTVVPFLPVNPEYSSTRNQGRQKLARFNAHEFATLVIDILSDAKRRQQGSSLSGSKDNVELILKTINNQHSVESQDNDQPDYDSVASDEDTDLETTASKTNRQKSLDSDLSDGPVTVQEFMEVKNALVASEAKIQQLMKASRLEKQNSTPESDYDNTPNDMEPDGMGSSRKGRQRSMVWPGDGLVPDTAEPHVAPSPTLPSTEDVIRKTEQITKNIQELLRAAQENKHDSYIPCSERIHVAVTEMAALFPKKPKSDMVRTSLRLLTSSAYRLQSECKKTLPGDPGSPTDVQLVTQQVIQCAYDIAKAAKQLVTITTKENNN

SEQ ID NO: 15511 - protein, 755 aa, Artificial Sequence
  Synthetic polypeptide
DGAFRSQPARVKIPTWHLSAGRPRTRHVASEDLFPSLSSGKVTVPTHQRYWKGEERRYLKSPSHDPSWASVNRGTFLCDECCSVHRSLGRHISQVRHLKHTPWPPTLLQMVETLYNNGANSIWEHSLLDPASIMSGRRKANPQDKVHPNKAEFIRAKYQMLAFVHRLPCRDDDSVTAKDLSKQLHSSVRTGNLETCLRLLSLGAQANFFHPEKGNTPLHVASKAGQILQAELLAVYGADPGTQDSSGKTPVDYARQGGHHELAERLVEIQYELTDRLAFYLCGRKPDHKNGQHFIIPQMADSLDLSELAKAAKKKLQSLSNHLFEELAMDVYDEVDRRETDAVWLATQNHSALVTETTVVPFLPVNPEYSSTRNQGRQKLARFNAHEFATLVIDILSDAKRRQQGSSLSGSKDNVELILKTINNQHSVESQDNDQPDYDSVASDEDTDLETTASKTNRQKLQTLQSENSNLRKQATTNVYQVQTGSEYTDTSNHSSLKRRPSARGSRPMSMYETGSGQKPYLPMGEASRPEESRMRLQPFPAHIGRSALVTSSSSLPSFPSTLSWSRDESARRASRLEKQNSTPESDYDNTPNDMEPDGMGSSRKGRQRSMVWPGDGLVPDTAEPHVAPSPTLPSTEDVIRKTEQITKNIQELLRAAQENKHDSYIPCSERIHVAVTEMAALFPKKPKSDMVRTSLRLLTSSAYRLQSECKKTLPGDPGSPTDVQLVTQQVIQCAYDIAKAAKQLVTITTKENNN

SEQ ID NO: 15512 - protein, 518 aa, Artificial Sequence
  Synthetic polypeptide
DGAFRSQPARVKIPTWHLSAGRPRTRHVASEDLFPSLSSGKVTVPTHQRYWKGEERRYLKSPSHDPSWASVNRGTFLCDECCSVHRSLGRHISQVRHLKHTPWPPTLLQMVETLYNNGANSIWEHSLLDPASIMSGRRKANPQDKVHPNKAEFIRAKYQMLAFVHRLPCRDDDSVTAKDLSKQLHSSVRTGNLETCLRLLSLGAQANFFHPEKGNTPLHVASKAGQILQAELLAVYGADPGTQDSSGKTPVDYARQGGHHELAERLVEIQYELTDRLAFYLCGRKPDHKNGQHFIIPQMADSSLDLSELAKAAKKKLQSLSNHLFEELAMDVYDEVDRRETDAVWLATQNHSALVTETTVVPFLPVNPEYSSTRNQGRQKLARFNAHEFATLVIDILSDAKRRQQGSSLSGSKDNVELILKTINNQHSVESQDNDQPDYDSVASDEDTDLETTASKTNRQKSLDSDLSDGPVTVQEFMEVKNALVASEAKIQQLMKVNNNLSDELRIMQKKLLGKDAN

SEQ ID NO: 15513 - protein, 468 aa, Artificial Sequence
  Synthetic polypeptide
DGAFRSQPARVKIPTWHLSAGRPRTRHVASEDLFPSLSSGKVTVPTHQRYWKGEERRYLKSPSHDPSWASVNRGTFLCDECCSVHRSLGRHISQVRHLKHTPWPPTLLQMVETLYNNGANSIWEHSLLDPASIMSGRRKANPQDKVHPNKAEFIRAKYQMLAFVHRLPCRDDDSVTAKDLSKQLHSSVRTGNLETCLRLLSLGAQANFFHPEKGNTPLHVASKAGQILQAELLAVYGADPGTQDSSGKTPVDYARQGGHHELAERLVEIQYELTDRLAFYLCGRKPDHKNGQHFIIPQMADSSLDLSELAKAAKKKLQSLSNHLFEELAMDVYDEVDRRETDAVWLATQNHSALVTETTVVPFLPVNPEYSSTRNQGRQKLARFNAHEFATLVIDILSDAKRRQQGSSLSGSKDNVELILKTINNQHSVESQDNDQPDYDSVASDEDTDLETTASKTNRQKLLGKDAN

SEQ ID NO: 15514 - protein, 37 aa, Artificial Sequence
  Synthetic polypeptide
PGMMCPWFLEYAQMMSVASGKVVPNCASISHCWDLKT

SEQ ID NO: 15515 - protein, 142 aa, Artificial Sequence
  Synthetic polypeptide
NPVSTKIQKLAGHDVPLVSRICPNDVCRIWKSGAKLRVDITLLGFENMSWIRGRRSFIFKGEDNWAELMEVNHDDKVVTTERFDLSQEMERLTLDLMKPKSREVERRLTSPVINTSLDTKNIAFERVFRVLKLTLLQLTVCS

SEQ ID NO: 15516 - protein, 471 aa, Artificial Sequence
  Synthetic polypeptide
NPVSTKIQKLAGHDVPLVSRICPNDVCRIWKSGAKLRVDITLLGFENMSWIRGRRSFIFKGEDNWAELMEVNHDDKVVTTERFDLSQEMERLTLDLMKPKSREVERRLTSPVINTSLDTKNIAFERTKSGFWGWRTDKAEVVNGYEAKVYTVNNVNVITKIRTEHLTEEEKKRYKADRNPLESLLGTVEHQFGAQGDLTTECATANNPTAITPDEYFNEEFDLKDRDIGRPKELTIRTQKFKAMLWMCEEFPLSLVEQVIPIIDLMARTSAHFARLRDFIKLEFPPGFPVKIEIPLFHVLNARITFGNVNGCSTAEESVSQNVEGTQADSASHITNFEVDQSVFEIPESYYVQDNGRNVHLQDEDYEIMQFAIQQSLLESSRSQELSGPASNGGISQTNTYDAQYERAIQESLLTSTEGLCPSALSETSRFDNDLQLAMELSAKELEEWELRLQEEEAELQQVLQLSLTDK

SEQ ID NO: 15517 - protein, 44 aa, Artificial Sequence
  Synthetic polypeptide
NGACSMCRQEPAGIFAGNCGTPIWCTRGPHHGMCYCKQPHSHHA

SEQ ID NO: 15518 - protein, 311 aa, Artificial Sequence
  Synthetic polypeptide
MSYDVEAFRMAPAVCADRNPLESLLGTVEHQFGAQGDLTTECATANNPTAITPDEYFNEEFDLKDRDIGRPKELTIRTQKFKAMLWMCEEFPLSLVEQVIPIIDLMARTSAHFARLRDFIKLEFPPGFPVKIEIPLFHVLNARITFGNVNGCSTAEESVSQNVEGTQADSASHITNFEVDQSVFEIPESYYVQDNGRNVHLQDEDYEIMQFAIQQSLLESSRSQELSGPASNGGISQTNTYDAQYERAIQESLLTSTEGLCPSALSETSRFDNDLQLAMELSAKELEEWELRLQEEEAELQQVLQLSLTDK

SEQ ID NO: 15519 - protein, 61 aa, Artificial Sequence
  Synthetic polypeptide
VTTWKPLEWRLQYVQTGTRWNLCWELWNTNLVHKGTSPRNVLLQTTPQPSRLMSTSMKSLI

SEQ ID NO: 15520 - protein, 79 aa, Artificial Sequence
  Synthetic polypeptide
GASPPGSRPVREGGGGQPPPGQPPCPGGRWGGQPPTRPAAPSRRGLKNFLSNVMKIFNNNCKLWRRKRVYLDIVTPKKS

SEQ ID NO: 15521 - protein, 73 aa, Artificial Sequence
  Synthetic polypeptide
EVRSVSAWPPIVWDVRSPSAWLPSLESEERLRPAAAPSGREVGVSPRQASRPVQEGGGGVSPPPGQPPRPGED

SEQ ID NO: 15522 - protein, 303 aa, Artificial Sequence
  Synthetic polypeptide
GAPLPGCPVWKVRSVSARQPPRPGGRWGSAPARPAALSRREVGGSAPHPASRPVQERTEELLKQRHENIQQQLQTMEEKKGISGYSYTQEELERVSALKSEVDEMKGRTLDDMSEMVKKLYSLVSEKKSALASVIKELRQLRQKYQELTQECDEKKSQYDSCAAGLESNRSKLEQEVRRLREECLQEESRYHYTNCMIKNLEVQLRRATDEMKAYISSDQQEKRKAIREQYTKNTAEQENLGKKLREKQKVIRESHGPNMKQAKMWRDLEQLMECKKQCFLKQQSQTSIGQVIQEGGEDRLIL

SEQ ID NO: 15523 - protein, 281 aa, Artificial Sequence
  Synthetic polypeptide
GAPLPGCPVWKVRSVSARQPPRPGGRWGSAPARPAALSRREVGGSAPHPASRPVQERTEELLKQRHENIQQQLQTMEEKKGISGYSYTQEELERVSALKSEVDEMKGRTLDDMSEMVKKLYSLVSEKKSALASVIKELRQLRQKYQELTQECDEKKSQYDSCAAGLESNRSKLEQEVRRLREECLQEESRYHYTNCMIKNLEVQLRRATDEMKAYISSDQQEKRKAIREQYTKNTAEQENLGKRRNLTLLPRLECSGTILAHSAFQYRWDFTMLARLVSNS

SEQ ID NO: 15524 - protein, 79 aa, Artificial Sequence
  Synthetic polypeptide
GAPLPSCPYWEVRSPSARPAAPSGREVGGSAPRPASRPVQEGGGGVSPPPSQPPRPGGRWGFSPPPGQPPRPGVQTICQ

SEQ ID NO: 15525 - protein, 341 aa, Artificial Sequence
  Synthetic polypeptide
GAPLPDQPPHPGGRWGGQPPARPAAPSRREVGGSAPRPASRPVREGGGGSAPHPASRPVREFKRYVNKLRSKSTVFKKKHQIIAELKAEFGLLQRTEELLKQRHENIQQQLQTMEEKKGISGYSYTQEELERVSALKSEVDEMKGRTLDDMSEMVKKLYSLVSEKKSALASVIKELRQLRQKYQELTQECDEKKSQYDSCAAGLESNRSKLEQEVRRLREECLQEESRYHYTNCMIKNLEVQLRRATDEMKAYISSDQQEKRKAIREQYTKNTAEQENLGKKLREKQKVIRESHGPNMKQAKMWRDLEQLMECKKQCFLKQQSQTSIGQVIQEGGEDRLIL

SEQ ID NO: 15526 - protein, 151 aa, Artificial Sequence
  Synthetic polypeptide
GAPLPGCPVWKVRSVSARQPPRPGGRWGSAPARPAALSRREVGGSAPHPASRPVQEVRGASAQLPLLGSEEPLCPTSRPIREGGGGVSPPPGQPPRPGGRWGGQPPAQPAAPSGREVGVQPPTRPAAPSGSSNDMSINFEARVQFSKRSIR

SEQ ID NO: 15527 - protein, 319 aa, Artificial Sequence
  Synthetic polypeptide
GAPLPDQPPHPGGRWGGQPPARPAAPSRREVGGSAPRPASRPVREGGGGSAPHPASRPVREFKRYVNKLRSKSTVFKKKHQIIAELKAEFGLLQRTEELLKQRHENIQQQLQTMEEKKGISGYSYTQEELERVSALKSEVDEMKGRTLDDMSEMVKKLYSLVSEKKSALASVIKELRQLRQKYQELTQECDEKKSQYDSCAAGLESNRSKLEQEVRRLREECLQEESRYHYTNCMIKNLEVQLRRATDEMKAYISSDQQEKRKAIREQYTKNTAEQENLGKRRNLTLLPRLECSGTILAHSAFQYRWDFTMLARLVSNS

SEQ ID NO: 15528 - protein, 26 aa, Artificial Sequence
  Synthetic polypeptide
FMTLDALFTYLAVTASIANATPGPSI

SEQ ID NO: 15529 - protein, 271 aa, Artificial Sequence
  Synthetic polypeptide
PWIQIIVYDSGCIIYLSSCHSFYSKRYSRALYLGAKAIQLNSNSVQALLLKGAALRNMGRVQEAIIHFREAIRLAPCRLDCYEGLIECYLASNSIREAMVMANNVYKTLGANAQTLTLLATVCLEDPVTQEKAKTLLDKALTQRPDYIKAVVKKAELLSREQKYEDGIALLRNALANQSDCVLHRILGDFLVAVNEYQEAMDQYSIALSLDPNDQKSLEGMQKMEKEESPTDATQEEDVDDMEGSGEEGDLEGSDSEAAQWADQEQWFGMQ

SEQ ID NO: 15530 - protein, 209 aa, Artificial Sequence
  Synthetic polypeptide
PWIQIIVYDSGCIIYLSSCHSFYSKRYSRALYLGAKAIQLNSNSVQALLLKGAALRNMGRVQEAIIHFREAIRLAPCRLDCYEGLIECYLASNSIREAMVMANNVYKTLGANAQTLTLLATVCLEDPVTQEKAKTLLDKALTQRPDYIKAVVKKAELLSREQKYEDGIALLRNALANQSDCVLHRILGDFLVAVNEYQEAMDQYSIALR

SEQ ID NO: 15531 - protein, 8 aa, Artificial Sequence
  Synthetic polypeptide
SQHFGRPR

SEQ ID NO: 15532 - protein, 446 aa, Artificial Sequence
  Synthetic polypeptide
GWAWWLMPVIPALWEAEINMMLANLYKKAGQERPSVTSYKEVLRQCPLALDAILGLLSLSVKGAEVASMTMNVIQTVPNLDWLSVWIKAYAFVHTGDNSRAISTICSLEKKSLLRDNVDLLGSLADLYFRAGDNKNSVLKFEQAQMLDPYLIKGMDVYGYLLAREGRLEDVENLGCRLFNISDQHAEPWVVSGCHSFYSKRYSRALYLGAKAIQLNSNSVQALLLKGAALRNMGRVQEAIIHFREAIRLAPCRLDCYEGLIECYLASNSIREAMVMANNVYKTLGANAQTLTLLATVCLEDPVTQEKAKTLLDKALTQRPDYIKAVVKKAELLSREQKYEDGIALLRNALANQSDCVLHRILGDFLVAVNEYQEAMDQYSIALSLDPNDQKSLEGMQKMEKEESPTDATQEEDVDDMEGSGEEGDLEGSDSEAAQWADQEQWFGMQ

SEQ ID NO: 15533 - protein, 38 aa, Artificial Sequence
  Synthetic polypeptide
MGMVAHACNPSTLGGRDKHDAGKPVQEGWSGAPFSHQL

SEQ ID NO: 15534 - protein, 384 aa, Artificial Sequence
  Synthetic polypeptide
GWAWWLMPVIPALWEAEINMMLANLYKKAGQERPSVTSYKEVLRQCPLALDAILGLLSLSVKGAEVASMTMNVIQTVPNLDWLSVWIKAYAFVHTGDNSRAISTICSLEKKSLLRDNVDLLGSLADLYFRAGDNKNSVLKFEQAQMLDPYLIKGMDVYGYLLAREGRLEDVENLGCRLFNISDQHAEPWVVSGCHSFYSKRYSRALYLGAKAIQLNSNSVQALLLKGAALRNMGRVQEAIIHFREAIRLAPCRLDCYEGLIECYLASNSIREAMVMANNVYKTLGANAQTLTLLATVCLEDPVTQEKAKTLLDKALTQRPDYIKAVVKKAELLSREQKYEDGIALLRNALANQSDCVLHRILGDFLVAVNEYQEAMDQYSIALR

SEQ ID NO: 15535 - protein, 518 aa, Artificial Sequence
  Synthetic polypeptide
RAFSDSQDSREYRNAVSKYTMALQQKKALSKTSKVRPSTGNSASTPQSQCLPSEIEVKYKMAECYTMLKQDKDAIAILDGIPSRQRTPKINMMLANLYKKAGQERPSVTSYKEVLRQCPLALDAILGLLSLSVKGAEVASMTMNVIQTVPNLDWLSVWIKAYAFVHTGDNSRAISTICSLEKKSLLRDNVDLLGSLADLYFRAGDNKNSVLKFEQAQMLDPYLIKGMDVYGYLLAREGRLEDVENLGCRLFNISDQHAEPWVVSGCHSFYSKRYSRALYLGAKAIQLNSNSVQALLLKGAALRNMGRVQEAIIHFREAIRLAPCRLDCYEGLIECYLASNSIREAMVMANNVYKTLGANAQTLTLLATVCLEDPVTQEKAKTLLDKALTQRPDYIKAVVKKAELLSREQKYEDGIALLRNALANQSDCVLHRILGDFLVAVNEYQEAMDQYSIALSLDPNDQKSLEGMQKMEKEESPTDATQEEDVDDMEGSGEEGDLEGSDSEAAQWADQEQWFGMQ

SEQ ID NO: 15536 - protein, 53 aa, Artificial Sequence
  Synthetic polypeptide
MHQACSLLWALVLAVPPATVLISALPPPSGFSLDISPKEPSLTPRTLGNIGML

SEQ ID NO: 15537 - protein, 12 aa, Artificial Sequence
  Synthetic polypeptide
LPGLSGISECCE

SEQ ID NO: 15538 - protein, 456 aa, Artificial Sequence
  Synthetic polypeptide
RAFSDSQDSREYRNAVSKYTMALQQKKALSKTSKVRPSTGNSASTPQSQCLPSEIEVKYKMAECYTMLKQDKDAIAILDGIPSRQRTPKINMMLANLYKKAGQERPSVTSYKEVLRQCPLALDAILGLLSLSVKGAEVASMTMNVIQTVPNLDWLSVWIKAYAFVHTGDNSRAISTICSLEKKSLLRDNVDLLGSLADLYFRAGDNKNSVLKFEQAQMLDPYLIKGMDVYGYLLAREGRLEDVENLGCRLFNISDQHAEPWVVSGCHSFYSKRYSRALYLGAKAIQLNSNSVQALLLKGAALRNMGRVQEAIIHFREAIRLAPCRLDCYEGLIECYLASNSIREAMVMANNVYKTLGANAQTLTLLATVCLEDPVTQEKAKTLLDKALTQRPDYIKAVVKKAELLSREQKYEDGIALLRNALANQSDCVLHRILGDFLVAVNEYQEAMDQYSIALR

SEQ ID NO: 15539 - protein, 579 aa, Artificial Sequence
  Synthetic polypeptide
MHQACSLLWALVLAVPPATVLISALPPPSGFSLDISPKEPSLTPRTLGELFSPPQKYQLLVYHADSLFHDKEYRNAVSKYTMALQQKKALSKTSKVRPSTGNSASTPQSQCLPSEIEVKYKMAECYTMLKQDKDAIAILDGIPSRQRTPKINMMLANLYKKAGQERPSVTSYKEVLRQCPLALDAILGLLSLSVKGAEVASMTMNVIQTVPNLDWLSVWIKAYAFVHTGDNSRAISTICSLEKKSLLRDNVDLLGSLADLYFRAGDNKNSVLKFEQAQMLDPYLIKGMDVYGYLLAREGRLEDVENLGCRLFNISDQHAEPWVVSGCHSFYSKRYSRALYLGAKAIQLNSNSVQALLLKGAALRNMGRVQEAIIHFREAIRLAPCRLDCYEGLIECYLASNSIREAMVMANNVYKTLGANAQTLTLLATVCLEDPVTQEKAKTLLDKALTQRPDYIKAVVKKAELLSREQKYEDGIALLRNALANQSDCVLHRILGDFLVAVNEYQEAMDQYSIALSLDPNDQKSLEGMQKMEKEESPTDATQEEDVDDMEGSGEEGDLEGSDSEAAQWADQEQWFGMQ

SEQ ID NO: 15540 - protein, 34 aa, Artificial Sequence
  Synthetic polypeptide
LPGLSVSYSPHLRSTSFWCIMQILSFMIRNIGML

SEQ ID NO: 15541 - protein, 517 aa, Artificial Sequence
  Synthetic polypeptide
MHQACSLLWALVLAVPPATVLISALPPPSGFSLDISPKEPSLTPRTLGELFSPPQKYQLLVYHADSLFHDKEYRNAVSKYTMALQQKKALSKTSKVRPSTGNSASTPQSQCLPSEIEVKYKMAECYTMLKQDKDAIAILDGIPSRQRTPKINMMLANLYKKAGQERPSVTSYKEVLRQCPLALDAILGLLSLSVKGAEVASMTMNVIQTVPNLDWLSVWIKAYAFVHTGDNSRAISTICSLEKKSLLRDNVDLLGSLADLYFRAGDNKNSVLKFEQAQMLDPYLIKGMDVYGYLLAREGRLEDVENLGCRLFNISDQHAEPWVVSGCHSFYSKRYSRALYLGAKAIQLNSNSVQALLLKGAALRNMGRVQEAIIHFREAIRLAPCRLDCYEGLIECYLASNSIREAMVMANNVYKTLGANAQTLTLLATVCLEDPVTQEKAKTLLDKALTQRPDYIKAVVKKAELLSREQKYEDGIALLRNALANQSDCVLHRILGDFLVAVNEYQEAMDQYSIALR

SEQ ID NO: 15542 - protein, 56 aa, Artificial Sequence
  Synthetic polypeptide
WLKTDTARSPRKPTGPSQTLWVTLTVEVSYSPHLRSTSFWCIMQILSFMIRNIGML

SEQ ID NO: 15543 - protein, 554 aa, Artificial Sequence
  Synthetic polypeptide
HCPITSEAYRTITDALGNSYSGSELFSPPQKYQLLVYHADSLFHDKEYRNAVSKYTMALQQKKALSKTSKVRPSTGNSASTPQSQCLPSEIEVKYKMAECYTMLKQDKDAIAILDGIPSRQRTPKINMMLANLYKKAGQERPSVTSYKEVLRQCPLALDAILGLLSLSVKGAEVASMTMNVIQTVPNLDWLSVWIKAYAFVHTGDNSRAISTICSLEKKSLLRDNVDLLGSLADLYFRAGDNKNSVLKFEQAQMLDPYLIKGMDVYGYLLAREGRLEDVENLGCRLFNISDQHAEPWVVSGCHSFYSKRYSRALYLGAKAIQLNSNSVQALLLKGAALRNMGRVQEAIIHFREAIRLAPCRLDCYEGLIECYLASNSIREAMVMANNVYKTLGANAQTLTLLATVCLEDPVTQEKAKTLLDKALTQRPDYIKAVVKKAELLSREQKYEDGIALLRNALANQSDCVLHRILGDFLVAVNEYQEAMDQYSIALSLDPNDQKSLEGMQKMEKEESPTDATQEEDVDDMEGSGEEGDLEGSDSEAAQWADQEQWFGMQ

SEQ ID NO: 15544 - protein, 492 aa, Artificial Sequence
  Synthetic polypeptide
HCPITSEAYRTITDALGNSYSGSELFSPPQKYQLLVYHADSLFHDKEYRNAVSKYTMALQQKKALSKTSKVRPSTGNSASTPQSQCLPSEIEVKYKMAECYTMLKQDKDAIAILDGIPSRQRTPKINMMLANLYKKAGQERPSVTSYKEVLRQCPLALDAILGLLSLSVKGAEVASMTMNVIQTVPNLDWLSVWIKAYAFVHTGDNSRAISTICSLEKKSLLRDNVDLLGSLADLYFRAGDNKNSVLKFEQAQMLDPYLIKGMDVYGYLLAREGRLEDVENLGCRLFNISDQHAEPWVVSGCHSFYSKRYSRALYLGAKAIQLNSNSVQALLLKGAALRNMGRVQEAIIHFREAIRLAPCRLDCYEGLIECYLASNSIREAMVMANNVYKTLGANAQTLTLLATVCLEDPVTQEKAKTLLDKALTQRPDYIKAVVKKAELLSREQKYEDGIALLRNALANQSDCVLHRILGDFLVAVNEYQEAMDQYSIALR

SEQ ID NO: 15545 - protein, 542 aa, Artificial Sequence
  Synthetic polypeptide
RLCFSSCVAASELFSPPQKYQLLVYHADSLFHDKEYRNAVSKYTMALQQKKALSKTSKVRPSTGNSASTPQSQCLPSEIEVKYKMAECYTMLKQDKDAIAILDGIPSRQRTPKINMMLANLYKKAGQERPSVTSYKEVLRQCPLALDAILGLLSLSVKGAEVASMTMNVIQTVPNLDWLSVWIKAYAFVHTGDNSRAISTICSLEKKSLLRDNVDLLGSLADLYFRAGDNKNSVLKFEQAQMLDPYLIKGMDVYGYLLAREGRLEDVENLGCRLFNISDQHAEPWVVSGCHSFYSKRYSRALYLGAKAIQLNSNSVQALLLKGAALRNMGRVQEAIIHFREAIRLAPCRLDCYEGLIECYLASNSIREAMVMANNVYKTLGANAQTLTLLATVCLEDPVTQEKAKTLLDKALTQRPDYIKAVVKKAELLSREQKYEDGIALLRNALANQSDCVLHRILGDFLVAVNEYQEAMDQYSIALSLDPNDQKSLEGMQKMEKEESPTDATQEEDVDDMEGSGEEGDLEGSDSEAAQWADQEQWFGMQ

SEQ ID NO: 15546 - protein, 96 aa, Artificial Sequence
  Synthetic polypeptide
EQELKEIKECVSKNSVVCKKTQFPLRKRKRWSPLKINCLFFCLWLVSLISPFPRHCEDSVSLAVWLQVSYSPHLRSTSFWCIMQILSFMIRNIGML

SEQ ID NO: 15547 - protein, 480 aa, Artificial Sequence
  Synthetic polypeptide
RLCFSSCVAASELFSPPQKYQLLVYHADSLFHDKEYRNAVSKYTMALQQKKALSKTSKVRPSTGNSASTPQSQCLPSEIEVKYKMAECYTMLKQDKDAIAILDGIPSRQRTPKINMMLANLYKKAGQERPSVTSYKEVLRQCPLALDAILGLLSLSVKGAEVASMTMNVIQTVPNLDWLSVWIKAYAFVHTGDNSRAISTICSLEKKSLLRDNVDLLGSLADLYFRAGDNKNSVLKFEQAQMLDPYLIKGMDVYGYLLAREGRLEDVENLGCRLFNISDQHAEPWVVSGCHSFYSKRYSRALYLGAKAIQLNSNSVQALLLKGAALRNMGRVQEAIIHFREAIRLAPCRLDCYEGLIECYLASNSIREAMVMANNVYKTLGANAQTLTLLATVCLEDPVTQEKAKTLLDKALTQRPDYIKAVVKKAELLSREQKYEDGIALLRNALANQSDCVLHRILGDFLVAVNEYQEAMDQYSIALR

SEQ ID NO: 15548 - protein, 150 aa, Artificial Sequence
  Synthetic polypeptide
GRVRWLTPVIPALWEAEAGGSRGQEIETILANTNLNYPEQKVVTVGQFKIGLIHGHQVIPWGDMASLALLQRQFDVDILISGHTHKFEAFEHENKFYINPGSATGAYNALETNIIPSFVLMDIQASTVVTYVYQLIGDDVKVERIEYKKP

SEQ ID NO: 15549 - protein, 25 aa, Artificial Sequence
  Synthetic polypeptide
SQHFGRPRQVDHEVRRSRPSWLTRI

SEQ ID NO: 15550 - protein, 42 aa, Artificial Sequence
  Synthetic polypeptide
HESELSRTESCDCWTVQNWSDPWTSSYSMGRYGQLSPVAEAI

SEQ ID NO: 15551 - protein, 33 aa, Artificial Sequence
  Synthetic polypeptide
LMPVILALWEAEAGGSPEVRSSRPAWPTCWCWY

SEQ ID NO: 15552 - protein, 41 aa, Artificial Sequence
  Synthetic polypeptide
HFGRRRQVDHLRSGVPDQPGQHVGVGIRRSAHPTPVQQFAS

SEQ ID NO: 15553 - protein, 192 aa, Artificial Sequence
  Synthetic polypeptide
GQEFQTSLANMLVLVLGDLHIPHRCNSLPAKFKKLLVPGKIQHILCTGNLCTKESYDYLKTLAGDVHIVRGDFDENLNYPEQKVVTVGQFKIGLIHGHQVIPWGDMASLALLQRQFDVDILISGHTHKFEAFEHENKFYINPGSATGAYNALETNIIPSFVLMDIQASTVVTYVYQLIGDDVKVERIEYKKP

SEQ ID NO: 15554 - protein, 191 aa, Artificial Sequence
  Synthetic polypeptide
AQEFETSLGNMDKLRKTTEEADMYESKYGEVSKTLDLLKNSVEKLFKKINCDATKILVQLGETGKVTDINLPQYFAIIEKKTNDLLLLETYRRILEVEGAEAEIPPPFINPFWGGSALLKPPEPIKVIPPVLGADPFSDRLDDVEQPLDHSSLRQLVLDNYILKENRSKEVRGDSLPEKVDDFRSRKKVTM

SEQ ID NO: 15555 - protein, 36 aa, Artificial Sequence
  Synthetic polypeptide
AGCNGSHLLIPELWEAEAGGSFEPRSLRPAWATWIN

SEQ ID NO: 15556 - protein, 7 aa, Artificial Sequence
  Synthetic polypeptide
DQLGQHG

SEQ ID NO: 15557 - protein, 264 aa, Artificial Sequence
  Synthetic polypeptide
ETQAPGSPPGPAIATMKLNERSLAFYATCDAPVDNAGFLYKKGGRHAAYHRRWFVLRGNMLFYFEDAASREPVGVIILEGCTVELVEAAEEFAFAVRFAGTRARTYVLAAESQDAMEGWVKALSRASFDYLRLVVRELEQQLAAVRGGGGMALPQPQPQSLPLPPSLPSALAPVPSLPSAPAPVPALPLPRRPSALPPKENGCAVWSTEATFRPGPEPPPPPPRRRASAPHGPLDMAPFARLHECYGQEIRALRGQWLSSRVQP

SEQ ID NO: 15558 - protein, 15 aa, Artificial Sequence
  Synthetic polypeptide
RPRPQAPLQAPRLPP

SEQ ID NO: 15559 - protein, 28 aa, Artificial Sequence
  Synthetic polypeptide
DPGPRLPSRPRDCHHEAERAQPGLLRHL

SEQ ID NO: 15560 - protein, 134 aa, Artificial Sequence
  Synthetic polypeptide
GQLLWLMPVIPALWEAEFQDYPLKLIDPGLPDRTVLEIPPVGQFLLLPKLVLFQLKLLPCLFQLHLLRLLVLHRTELLPLLVRLKIPGFKIRGRTLLQGIKKILNPMKHHLASQKLKTKVYHQLFLNIENRLMI

SEQ ID NO: 15561 - protein, 13 aa, Artificial Sequence
  Synthetic polypeptide
SQHFGRLSSKIIP

SEQ ID NO: 15562 - protein, 23 aa, Artificial Sequence
  Synthetic polypeptide
MTLSPLFGVLLWQNCWLMTQRLQ

SEQ ID NO: 15563 - protein, 15 aa, Artificial Sequence
  Synthetic polypeptide
PCLLCLVYCCGKTAG

SEQ ID NO: 15564 - protein, 527 aa, Artificial Sequence
  Synthetic polypeptide
VASQLGQIQNVKSRSSQWKLDTAVGWMRQLINDPVSFVWCTVVAKLLVNDPETAVKELEALLGFTLRVGVPNTRPVKKTMEIPKDSLQKYLKDLLGIQTTGPLELLQFDHGQSNPTYYIRLANRDLVLRKKPPGTLLPSAHAIEREFRIMKALANAGVPVPNVLDLCEDSSVIGTPFYVMEYCPGLIYKDPSLPGLEPSHRRAIYTAMNTVLCKIHSVDLQAVGLEDYGKQGDYIPRQVRTWVKQYRASETSTIPAMERLIEWLPLHLPRQQRTTVVHGDFRLDNLVFHPEEPEVLAVLDWELSTLGDPLADVAYSCLAHYLPSSFPVLRGINDCDLTQLGIPAAEEYFRMYCLQMGLPPTENWNFYMAFSFFRVAAILQGVYKRSLTGQASSTYAEQTGKLTEFVSNLAWDFAVKEGFRVFKEMPFTNPLTRSYHTWARPQSQWCPTGSRSYSSVPEASPAHTSRGGLVISPESLSPPVRELYHRLKHFMEQRVYPAEPELQSHQASAARWSPSPLIEDLKVKQPW

SEQ ID NO: 15565 - protein, 876 aa, Artificial Sequence
  Synthetic polypeptide
VASQLGQIQNVKSRSSQWKLDTAVGWMRQLINDPVSFVWCTVVAKLLVNDPETAVKELEALLGFTLRVGVPNTRPVKKTMEIPKDSLQKYLKDLLGIQTTGPLELLQFDHGQSNPTYYIRLANRDLVLRKKPPGTLLPSAHAIEREFRIMKALANAGVPVPNVLDLCEDSSVIGTPFYVMEYCPGLIYKDPSLPGLEPSHRRAIYTAMNTVLCKIHSVDLQAVGLEDYGKQGDYIPRQVRTWVKQYRASETSTIPAMERLIEWLPLHLPRQQRTTVVHGDFRLDNLVFHPEEPEVLAVLDWELSTLGDPLADVAYSCLAHYLPSSFPVLRGINDCDLTQLGIPAAEEYFRMYCLQMGLPPTENWNFYMAFSFFRVAAILQGVYKRSLTGQASSTYAEQTGKLTEFVSNLAWDFAVKEGFRVFKEMPFTNPLTRSYHTWARPQSQWCPTGSRSYSSVPEASPAHTSRGGLVISPESLSPPVRELYHRLKHFMEQRVYPAEPELQSHQASAARWSPSPLIEDLKEKAKAEGLWNLFLPLEADPEKKYGAGLTNVEYAHLCELMGTSLYAPEVCNCSAPDTGNMELLVRYGTEAQKARWLIPLLEGKARSCFAMTEPQVASSDATNIEASIREEDSFYVINGHKWWITGILDPRCQLCVFMGKTDPHAPRHRQQSVLLVPMDTPGIKIIRPLTVYGLEDAPGGHGEVRFEHVRVPKENMVLGPGRGFEIAQGRLGPGRIHHCMRLIGFSERALALMKARVKSRLAFGKPLVEQGTVLADIAQSRVEIEQARLLVLRAAHLMDLAGNKAAALDIAMIKMVAPSMASRVIDRAIQAFGAAGLSSDYPLAQFFTWARALRFADGPDEVHRATVAKLELKHRI

SEQ ID NO: 15566 - protein, 273 aa, Artificial Sequence
  Synthetic polypeptide
VASQLGQIQNVKSRSSQWKLDTAVGWMRQLINDPVSFVWCTVVAKLLVNDPETAVKELEALLGFTLRVGVPNTRPVKKTMEIPKDSLQKYLKDLLGIQTTGPLELLQFDHGQSNPTYYIRLANRDLVLRKKPPGTLLPSAHAIEREFRIMKALANAGVPVPNVLDLCEDSSVIGTPFYVMEYCPGLIYKDPSLPGLEPSHRRAIYTAMNTVLCKIHSVDLQAVGLEDYGKQGSTTWCFIQKSQRCLLSLTGNFLPWATPLLMWPTAAWLITCH

SEQ ID NO: 15567 - protein, 20 aa, Artificial Sequence
  Synthetic polypeptide
LEPAMQSGSPSSHVVPDEFS

SEQ ID NO: 15568 - protein, 51 aa, Artificial Sequence
  Synthetic polypeptide
ILGSLSASTWVSRNTVSGEASCHVGSRTSLSQPCSQEAQAAMWCQTNFHKQ

SEQ ID NO: 15569 - protein, 242 aa, Artificial Sequence
  Synthetic polypeptide
ASHAVRKPKQPCGARRIFINNEWHDAVSRKTFPTVNPSTGEVICQVAEGDKEDVDKAVKAARAAFQLGSPWRRMDASHRGRLLNRLADLIERDRTYLAALETLDNGKPYVISYLVDLDMVLKCLRYYAGWADKYHGKTIPIDGDFFSYTRHEPVGVCGQIIPWNFPLLMQAWKLGPALATGNVVVMKVAEQTPLTALYVANLIKEAGFPPGVVNIVPGFGPTAGAAIASHEDVDKVAFTGST

SEQ ID NO: 15570 - protein, 448 aa, Artificial Sequence
  Synthetic polypeptide
ASHAVRKPKQPCGARRIFINNEWHDAVSRKTFPTVNPSTGEVICQVAEGDKALETLDNGKPYVISYLVDLDMVLKCLRYYAGWADKYHGKTIPIDGDFFSYTRHEPVGVCGQIIPWNFPLLMQAWKLGPALATGNVVVMKVAEQTPLTALYVANLIKEAGFPPGVVNIVPGFGPTAGAAIASHEDVDKVAFTGSTEIGRVIQVAAGSSNLKRVTLELGGKSPNIIMSDADMDWAVEQAHFALFFNQGQCCCAGSRTFVQEDIYDEFVERSVARAKSRVVGNPFDSKTEQGPQVDETQFKKILGYINTGKQEGAKLLCGGGIAADRGYFIQPTVFGDVQDGMTIAKEEIFGPVMQILKFKTIEEVVGRANNSTYGLAAAVFTKDLDKANYLSQALQAGTVWVNCYDVFGAQSPFGGYKMSGSGRELGEYGLQAYTEVKTVTVKVPQKNS

SEQ ID NO: 15571 - protein, 495 aa, Artificial Sequence
  Synthetic polypeptide
ASHAVRKPKQPCGARRIFINNEWHDAVSRKTFPTVNPSTGEVICQVAEGDKEDVDKAVKAARAAFQLGSPWRRMDASHRGRLLNRLADLIERDRTYLAALETLDNGKPYVISYLVDLDMVLKCLRYYAGWADKYHGKTIPIDGDFFSYTRHEPVGVCGQIIPWNFPLLMQAWKLGPALATGNVVVMKVAEQTPLTALYVANLIKEAGFPPGVVNIVPGFGPTAGAAIASHEDVDKVAFTGSTEIGRVIQVAAGSSNLKRVTLELGGKSPNIIMSDADMDWAVEQAHFALFFNQGQCCCAGSRTFVQEDIYDEFVERSVARAKSRVVGNPFDSKTEQGPQVDETQFKKILGYINTGKQEGAKLLCGGGIAADRGYFIQPTVFGDVQDGMTIAKEEIFGPVMQILKFKTIEEVVGRANNSTYGLAAAVFTKDLDKANYLSQALQAGTVWVNCYDVFGAQSPFGGYKMSGSGRELGEYGLQAYTEVKTVTVKVPQKNS

SEQ ID NO: 15572 - protein, 49 aa, Artificial Sequence
  Synthetic polypeptide
ILGSLSASTWVSRNTVSGEASCHVGSRTSLSQPCSQEAQAAMWCQTNFH

SEQ ID NO: 15573 - protein, 19 aa, Artificial Sequence
  Synthetic polypeptide
ASHAVRKPKQPCGARRIFI

SEQ ID NO: 15574 - protein, 39 aa, Artificial Sequence
  Synthetic polypeptide
ARRGGSCLLSQNFGRLRQADHESLCKEIYSRTVCAENSS

SEQ ID NO: 15575 - protein, 440 aa, Artificial Sequence
  Synthetic polypeptide
GRRIMRVCVKKSTQERFALKILLDRPKARNEVRLHMMCATHPNIVQIIEVFANSVQFPHESSPRARLLIVMEMMEGGELFHRISQHRHFTEKQASQVTKQIALALRHCHLLNIAHRDLKPENLLFKDNSLDAPVKLCDFGFAKIDQGDLMTPQFTPYYVAPQVLEAQRRHQKEKSGIIPTSPTPYTYNKSCDLWSLGVIIYVMLCGYPPFYSKHHSRTIPKDMRRKIMTGSFEFPEEEWSQISEMAKDVVRKLLKVKPEERLTIEGVLDHPWLNSTEALDNVLPSAQLMMDKAVVAGIQQAHAEQLANMRIQDLKVSLKPLHSVNNPILRKRKLLGTKPKDSVYIHDHENGAEDSNVALEKLRDVIAQCILPQAGENEDEKLNEVMQEAWKYNRECKLLRDTLQSFSWNGRGFTDKVDRLKLAEIVKQVIEEQTTSHESQ

SEQ ID NO: 15576 - protein, 442 aa, Artificial Sequence
  Synthetic polypeptide
GRRIMRVCVKKSTQERFALKILLDRPKARNEVRLHMMCATHPNIVQIIEVFANSVQFPHESSPRARLLIVMEMMEGGELFHRISQHRHFTEKQASQVTKQIALALRHCHLLNIAHRDLKPENLLFKDNSLDAPVKLCDFGFAKIDQGDLMTPQFTPYYVAPQVLEAQRRHQKEKSGIIPTSPTPYTYNKSCDLWSLGVIIYVMLCGYPPFYSKHHSRTIPKDMRRKIMTGSFEFPEEEWSQISEMAKDVVRKLLKVKPEERLTIEGVLDHPWLNSTEALDNVLPSAQLMMDKAVVAGIQQAHAEQLANMRIQDLKVSLKPLHSVNNPILRKRKLLGTKPKDSVYIHDHENGAEDSNVALEKLRDVIAQCILPQAGKGENEDEKLNEVMQEAWKYNRECKLLRDTLQSFSWNGRGFTDKVDRLKLAEIVKQVIEEQTTSHESQ

SEQ ID NO: 15577 - protein, 5 aa, Artificial Sequence
  Synthetic polypeptide
PTRLW

SEQ ID NO: 15578 - protein, 173 aa, Artificial Sequence
  Synthetic polypeptide
DQPDQQDYGDKLNMELSEKYKLDKESYPVFYLFRDGDFENPVPYTGAVKVGAIQRWLKGQGVYLGMPGCLPVYDALAGEFIRASGVEARQALLKQGQDNLSSVKETQKKWAEQYLKIMGKILDQGEDFPASEMTRIARLIEKNKMSDGKKEELQKSLNILTAFQKKGAEKEEL

SEQ ID NO: 15579 - protein, 16 aa, Artificial Sequence
  Synthetic polypeptide
GQEFETSLTNKIMVTS

SEQ ID NO: 15580 - protein, 12 aa, Artificial Sequence
  Synthetic polypeptide
DQPDQQDYGDKL

SEQ ID NO: 15581 - protein, 24 aa, Artificial Sequence
  Synthetic polypeptide
GRAQWLTPVIPALREVEAGGSQAL

SEQ ID NO: 15582 - protein, 47 aa, Artificial Sequence
  Synthetic polypeptide
AGHSGSRLLSQHFGRWRRADHKLFRRRSTLFCRKSCEVYRRSDNGRI

SEQ ID NO: 15583 - protein, 705 aa, Artificial Sequence
  Synthetic polypeptide
PGTVAHACYPSTSGGGGGRITSSLEGEVHYSAEKAVKFIEDRITEESKSSRHLRGPHLAKLELIRRLRSQGCNDEYKLGDPEELMFQYFKKFGDKPCCFTDLKVFVDLLPATQCTKFINQLLGVVPLSTPTEDKLALPADIRALQQHLCVVQLTRLLGLYHTMDKNQKLSVVRELMLRYQHGLEFGKTCLKTELQFSDYYCLLAVHALIDVWRETGDETTVWQALTLLEEGLTHSPSNAQFKLLLVRIYCMLGAFEPVVDLYSSLDAKHIQHDTIGYLLTRYAESLGQYAAASQSCNFALRFFHSNQKDTSEYIIQAYKYGAFEKIPEFIAFRNRLNNSLHFAQVRTERMLLDLLLEANISTSLAESIKSMNLRPEEDDIPWEDLRDNRDLNVFFSWDPKDRDVSEEHKKLSLEEETLWLRIRSLTLRLISGLPSLNHPVEPKNSEKTAENGVSSRIDILRLLLQQLEATLETGKRFIEKDIQYPFLGPVPTRMGGFFNSGCSQCQISSFYLVNDIYELDTSGLEDTMEIQERIENSFKSLLDQLKDVFSKCKGDLLEVKDGNLKTHPTLLENLVFFVETISVILWVSSYCESVLRPYKLNLQKKKKKKKETSIIMPPVFTSFQDYVTGLQTLISNVVDHIKGLETHLIALKLEELILEDTSLSPEERKFSKTVQGKVQSSYLHSLLEMGELLKKRLETTKKLKI

SEQ ID NO: 15584 - protein, 981 aa, Artificial Sequence
  Synthetic polypeptide
ETTLFLCCTSINLHPRKCLQNRNSGAATDYLDNGNNKMAIQQADKLLKKHKDLHCAKVLKAIGLQRTGKQEEAFTLAQEVAALEPTDDNSLQALTILYREMHRPELVTKLYEAAVKKVPNSEEYHSHLFMAYARVGEYKKMQQAGMALYKIVPKNPYYFWSVMSLIMQSISAQDENLSKTMFLPLAERMVEKMVKEDKIEAEAEVELYYMILERLGKYQEALDVIRGKLGEKLTSEIQSRENKCMAMYKKLSRWPECNALSRRLLLKNSDDWQFYLTYFDSVFRLIEEAWSPPAEGEHSLEGEVHYSAEKAVKFIEDRITEESKSSRHLRGPHLAKLELIRRLRSQGCNDEYKLGDPEELMFQYFKKFGDKPCCFTDLKVFVDLLPATQCTKFINQLLGVVPLSTPTEDKLALPADIRALQQHLCVVQLTRLLGLYHTMDKNQKLSVVRELMLRYQHGLEFGKTCLKTELQFSDYYCLLAVHALIDVWRETGDETTVWQALTLLEEGLTHSPSNAQFKLLLVRIYCMLGAFEPVVDLYSSLDAKHIQHDTIGYLLTRYAESLGQYAAASQSCNFALRFFHSNQKDTSEYIIQAYKYGAFEKIPEFIAFRNRLNNSLHFAQVRTERMLLDLLLEANISTSLAESIKSMNLRPEEDDIPWEDLRDNRDLNVFFSWDPKDRDVSEEHKKLSLEEETLWLRIRSLTLRLISGLPSLNHPVEPKNSEKTAENGVSSRIDILRLLLQQLEATLETGKRFIEKDIQYPFLGPVPTRMGGFFNSGCSQCQISSFYLVNDIYELDTSGLEDTMEIQERIENSFKSLLDQLKDVFSKCKGDLLEVKDGNLKTHPTLLENLVFFVETISVILWVSSYCESVLRPYKLNLQKKKKKKKETSIIMPPVFTSFQDYVTGLQTLISNVVDHIKGLETHLIALKLEELILEDTSLSPEERKFSKTVQGKVQSSYLHSLLEMGELLKKRLETTKKLKI

SEQ ID NO: 15585 - protein, 46 aa, Artificial Sequence
  Synthetic polypeptide
RQLFFFAAHQSTCIPESAFKIEILELPLIILTMVIIKWQFSKQINC

SEQ ID NO: 15586 - protein, 109 aa, Artificial Sequence
  Synthetic polypeptide
ETTLFLCCTSINLHPRKCLQNRNSGAATDYLDNGNNKMAIQQADKLLKKHKDLHCAKVLKAIGLQRTGKQEEAFTLAQEVAALEPTDDNSLQALTILYREMHRRWHGSI

SEQ ID NO: 15587 - protein, 3 aa, Artificial Sequence
  Synthetic polypeptide
HGE

SEQ ID NO: 15588 - protein, 1677 aa, Artificial Sequence
  Synthetic polypeptide
DQPGQHGETPPPLKIQKLAGHSGGCLVPATWEAETGESLEPGRQRLQCAEMTPLHSSLDDTVNELVQVETYLRSEGVLVRYWYPIDMLERPPAGYRRTATNGLVTLDNTNLQIHRELLRCEAALARLYCRMALLNIFAPKLPHLFTRLFHIPAIRDITLEHLQLLSNQLLAPPLPDGTISSSSILLAQSLQHCIHSQNCSATDLFYQGNSQTVREWLNVAITRTLHQGEESLLELTKQICSFLQTAPEQFPSEEFPISESKVNMDVNFPGAAFVVVSCKESQSGFRKDSSLYKAPWARVLVYGLGHKVKRNGQLNLIEAACYPRDASPANTGLAPPPTADQYPSVVLSTDRVHIKLGVSPPPGAVLVLHSLPLEFPLAMAFAEQLLSWKSEDSEGKSEDEPDTIPTSVLLQVVELLGNFLWTTDMAACVKELVFHLLAELLRTVHTLEQRRHPAGLSSSIALQLNPCLAMLMALQSELHKLYDEETQNWVSGGACGGSGGAAAGDQGRFSTYFHALMEGCLAVAEVTLPTNMSVTASGVTSATAPNLSDSSSSSSSSPGQTPQSPSLLSKRKKVKMKREKASSSGKRQSSRTVDSDPTVLSIGGSKPEDMLWFHRALTLLIILRHLTRKDPQGLGVTSDAIADACQALVGPTAHSRLLVISGIPTHLDEGVVRGAIRKACNAHGGVFKDEIYIPLQEEDTKKPKDKAEGGDGKVEPEKTLAFPGTDSMEVSTSSSLTPAMSISASASTSQASICSSQGISQTVSDLSVDPLPAGLELPIPPGLLEPHAVSSQESLDISLCSTGSLGSLGSLGEPLDNAETASVSDMGSMYTVTSLDNQPLAARPIKGFAVVEIRSRAKIEKIRASLFNNNDLIGLSSLDGEDELMEMSTEEILTVSVVNQSLFDTQGSPGLEDYFNDKSIKGEKLVPGAREVLTEIFKSCAHSEQTLSLTPAKPIRVSDIYLSKEQINSQTPGNLLHLFFTNVRPPKKVLEDQLTQILRKYGVPKPKFDKSKYSKAGKEQHPVKVVSTKRPITKPPAKDKAVLNSVSRTALSEKKPTVKPKSPEKSKPDEKDPEKSPTKKQEVPEEKYLTLEGFHKFVIDRARQDIRSVWRAILSCGYDLHFERCACIDVRHAQKASRKWTLEMDVALVQYINQLCRHLAITPARLHPHEVYLDPADAADPRVACLLNVPIESLRLRFALLQSLNTTLETFFLPLVELRQTPMYTHSIAALLKEAKGLIFYDTKVTVMNRVLNATVQRTADHAAPEITLDPLEIVGGEIRASENSYFCQAARQLASVPSSQLCVKLASGGDPTYAFNIRFTGEEVHGTSGSFRHFLWQVCKELQSSSLSLLLLCPSSAVNKNKGKYILTPSPITYGEEQLLHFLGQLLGIAIRADVPLPLDLLPSFWKTLVGEPLDPEQDLQEADILTYNYVKKFESINDETELEALCAEIASQHLATESPDSPNKPCCRFTYLTMTGEEVELCSRGRHILVAWENKDIYAAAIRSLRLRELQNVECVTAVRAGLGSIIPLQLLTMLSPLEMELRTCGLPYINLEFLKAHTMYQVGLMETDQHIEFFWGALEMFTQEELCKFIKFACNQERIPFTCPCKDGGPDTAHVPPYPMKIAPPDGTAGSPDSRYIRVETCMFMIKLPQYSSLEIMLEKLRCAIHYREDPLSG

SEQ ID NO: 15589 - protein, 10 aa, Artificial Sequence
  Synthetic polypeptide
HHCTPAWMTR

SEQ ID NO: 15590 - protein, 541 aa, Artificial Sequence
  Synthetic polypeptide
VGWSRAGGTMRPVRRNFYDPSSAPGKGIVWEWENDGGAWTAYDMDICITIQNAYEKQHPWLDLSSLGFCYLIYFNSMSQMNRQTRRRRRLRRRLDLAYPLTVGSIPKSQSWPVGASSGQPCSCQQCLLVNSTRAASNAILASQRRKAPPAPPLPPPPPPGGPPGALAVRPSATFTGAALWAAPAAGPAEPAPPPGAPPRSPGAPGGARTPGQNNLNRPGPQRTTSVSARASIPPGVPALPVKNLNGTGPVHPALAGMTGILLCAAGLPVCLTRAPKPILHPPPVSKSDVKPVPGVPGVCRKTKKKHLKKSKNPEDVVRRYMQKVKNPPDEDCTICMERLVTASGYEGVLRHKGVRPELVGRLGRCGHMYHLLCLVAMYSNGNKDGSLQCPTCKAIYGEKTGTQPPGKMEFHLIPHSLPGFPDTQTIRIVYDIPTGIQGPEHPNPGKKFTARGFPRHCYLPNNEKGRKVLRLLITAWERRLIFTIGTSNTTGESDTVVWNEIHHKTEFGSNLTGHGYPDASYLDNVLAELTAQGVSEAAAKA

SEQ ID NO: 15591 - protein, 65 aa, Artificial Sequence
  Synthetic polypeptide
WGGVVLVAPCGPCGATSTTRRRRRARASCGSGRTTAAHGRPTIWTSASPSRTPTRSSTRGSTSHR

SEQ ID NO: 15592 - protein, 105 aa, Artificial Sequence
  Synthetic polypeptide
GVESCWWHHAARAAQLLRPVVGAGQGHRVGVGERRRRMDGLRYGHLHHHPERLREAAPVARPLIARLLLPHLLQQHVADEPPDAPAPPPAPPPGPRLPAHRGLHP

SEQ ID NO: 15593 - protein, 559 aa, Artificial Sequence
  Synthetic polypeptide
GEEGGDGSCDGKRGGWSRGGDAEVTGTMRPVRRNFYDPSSAPGKGIVWEWENDGGAWTAYDMDICITIQNAYEKQHPWLDLSSLGFCYLIYFNSMSQMNRQTRRRRRLRRRLDLAYPLTVGSIPKSQSWPVGASSGQPCSCQQCLLVNSTRAASNAILASQRRKAPPAPPLPPPPPPGGPPGALAVRPSATFTGAALWAAPAAGPAEPAPPPGAPPRSPGAPGGARTPGQNNLNRPGPQRTTSVSARASIPPGVPALPVKNLNGTGPVHPALAGMTGILLCAAGLPVCLTRAPKPILHPPPVSKSDVKPVPGVPGVCRKTKKKHLKKSKNPEDVVRRYMQKVKNPPDEDCTICMERLVTASGYEGVLRHKGVRPELVGRLGRCGHMYHLLCLVAMYSNGNKDGSLQCPTCKAIYGEKTGTQPPGKMEFHLIPHSLPGFPDTQTIRIVYDIPTGIQGPEHPNPGKKFTARGFPRHCYLPNNEKGRKVLRLLITAWERRLIFTIGTSNTTGESDTVVWNEIHHKTEFGSNLTGHGYPDASYLDNVLAELTAQGVSEAAAKA

SEQ ID NO: 15594 - protein, 59 aa, Artificial Sequence
  Synthetic polypeptide
QAPCGPCGATSTTRRRRRARASCGSGRTTAAHGRPTIWTSASPSRTPTRSSTRGSTSHR

SEQ ID NO: 15595 - protein, 103 aa, Artificial Sequence
  Synthetic polypeptide
CGSDRHHAARAAQLLRPVVGAGQGHRVGVGERRRRMDGLRYGHLHHHPERLREAAPVARPLIARLLLPHLLQQHVADEPPDAPAPPPAPPPGPRLPAHRGLHP

SEQ ID NO: 15596 - protein, 539 aa, Artificial Sequence
  Synthetic polypeptide
AVLPLGTMRPVRRNFYDPSSAPGKGIVWEWENDGGAWTAYDMDICITIQNAYEKQHPWLDLSSLGFCYLIYFNSMSQMNRQTRRRRRLRRRLDLAYPLTVGSIPKSQSWPVGASSGQPCSCQQCLLVNSTRAASNAILASQRRKAPPAPPLPPPPPPGGPPGALAVRPSATFTGAALWAAPAAGPAEPAPPPGAPPRSPGAPGGARTPGQNNLNRPGPQRTTSVSARASIPPGVPALPVKNLNGTGPVHPALAGMTGILLCAAGLPVCLTRAPKPILHPPPVSKSDVKPVPGVPGVCRKTKKKHLKKSKNPEDVVRRYMQKVKNPPDEDCTICMERLVTASGYEGVLRHKGVRPELVGRLGRCGHMYHLLCLVAMYSNGNKDGSLQCPTCKAIYGEKTGTQPPGKMEFHLIPHSLPGFPDTQTIRIVYDIPTGIQGPEHPNPGKKFTARGFPRHCYLPNNEKGRKVLRLLITAWERRLIFTIGTSNTTGESDTVVWNEIHHKTEFGSNLTGHGYPDASYLDNVLAELTAQGVSEAAAKA

SEQ ID NO: 15597 - protein, 72 aa, Artificial Sequence
  Synthetic polypeptide
ALHRWKYPRLCYHLAPCGPCGATSTTRRRRRARASCGSGRTTAAHGRPTIWTSASPSRTPTRSSTRGSTSHR

SEQ ID NO: 15598 - protein, 115 aa, Artificial Sequence
  Synthetic polypeptide
SSELSIAGSILGCATTWHHAARAAQLLRPVVGAGQGHRVGVGERRRRMDGLRYGHLHHHPERLREAAPVARPLIARLLLPHLLQQHVADEPPDAPAPPPAPPPGPRLPAHRGLHP

SEQ ID NO: 15599 - protein, 106 aa, Artificial Sequence
  Synthetic polypeptide
MTNRVHLMCHLCSRAVTSWSTVLRRILKLHLGLAGPRTPGEELEWYWAGPSGPGRDDRDTAVRGRAARVPDAGPQAHPAPAAREQERREARAWRARGVPQDQEEAP

SEQ ID NO: 15600 - protein, 36 aa, Artificial Sequence
  Synthetic polypeptide
SSSHVPSLLQGSDFLEHCVEEDSEVASWLSGSPHSR

SEQ ID NO: 15601 - protein, 39 aa, Artificial Sequence
  Synthetic polypeptide
AQEFKMTVSYDRATALQPSSKRFRSWWRASTAWPRRRRR

SEQ ID NO: 15602 - protein, 155 aa, Artificial Sequence
  Synthetic polypeptide
AMIAPLHSSPVPRGSGAGGALRRPGRDAGGAEAQGARAARGAGGGASAAAAAAGRLAGRGARTGPAAGTAAGAPGGCQGAYAAVGIQVDSDSEHSSGEDSAPGTQQDGCAQPVPASVPASGAASHPGHRGHGGTARAREAVHAGPLCHAGRPGSG

SEQ ID NO: 15603 - protein, 160 aa, Artificial Sequence
  Synthetic polypeptide
SRHCTPAQFQEVPELVARFDGLAETQAALRLREREQLAELEAARARLQQLRDAWPDEVLAQGQRRAQLQERLEAARERTLQWESKWIQIQNTAAEKTLLLGRSRMAVLNLFQLVCQHQGQPPTLDIEDTEGQLEHVKLFMQDLSAMLAGLGQAEPAAPAS

SEQ ID NO: 15604 - protein, 46 aa, Artificial Sequence
  Synthetic polypeptide
ASWDLEDPCPPSPPRNAPRMWSRTPGRWCVPRTRRRRSLEASSPWA

SEQ ID NO: 15605 - protein, 175 aa, Artificial Sequence
  Synthetic polypeptide
CQEFETSLGNMHGETASTKNTKISQAWWCVPVVPATWEAEVGGSPELAGTWKTPAHLPHLGMHLGCGAGHPGDGACPEQEEEEVWRLPVHGPELPGVQRHHEEGVQGANTHPEEDHPGDLGWQGRGGHGPDGQWQDSLLPPPNVRAAQDPQCPDRGPRPHPLADPRAGPADPEVH

SEQ ID NO: 15606 - protein, 29 aa, Artificial Sequence
  Synthetic polypeptide
ASWDLEDPCPPSPPRNAPRMWSRTPGRWP

SEQ ID NO: 15607 - protein, 75 aa, Artificial Sequence
  Synthetic polypeptide
CQEFETSLGNMHGETASTKNTKISQAWWCVPVVPATWEAEVGGSPELAGTWKTPAHLPHLGMHLGCGAGHPGDGL

SEQ ID NO: 15608 - protein, 18 aa, Artificial Sequence
  Synthetic polypeptide
GGEDGQEGMQTPGVLLRG

SEQ ID NO: 15609 - protein, 274 aa, Artificial Sequence
  Synthetic polypeptide
EVRMAKKGCRHLVCSSGGNAGIAAAYAARKLGIPATIVLPESTSLQVVQRLQGEGAEVQLTGKVWDEANLRAQELAKRDGWENVPPFDHPLIWKGHASLVQELKAVLRTPPGALVLAVGGGGLLAGVVAGLLEVGWQHVPIIAMETHGAHCFNAAITAGKLVTLPDITSVAKSLGAKTVAARALECMQVCKIHSEVVEDTEAVSAVQQLLDDERMLVEPACGAALAAIYSGLLRRLQAEGCLPPSLTSVVVIVCGGNNINSRELQALKTHLGQV

SEQ ID NO: 15610 - protein, 175 aa, Artificial Sequence
  Synthetic polypeptide
EVRMAKKGCRHLVCSSGGNAGIAAAYAARKLGIPATIVLPESTSLQVVQRLQGEGAEVQLTGKVWDEANLRAQELAKRDGWENVPPFDHPLIWKGHASLVQELKAVLRTPPGALVLAVGGGGLLAGVVAGLLEVGWQHVPIIAMETHGAHCFNAAITAGKLVTLPDITSVAKSLG

SEQ ID NO: 15611 - protein, 23 aa, Artificial Sequence
  Synthetic polypeptide
GGEDGQEGMQTPGVLLRSGTRPI

SEQ ID NO: 15612 - protein, 40 aa, Artificial Sequence
  Synthetic polypeptide
EVRMAKKGCRHLVCSSGLGRGQSEGARVGQEGRLGECPPV

SEQ ID NO: 15613 - protein, 46 aa, Artificial Sequence
  Synthetic polypeptide
DCVQWLTPVIPALWESEAEGSLELRDSRAAWATCCGRRTLGKWPFL

SEQ ID NO: 15614 - protein, 2131 aa, Artificial Sequence
  Synthetic polypeptide
SQHFGSLRQKDHLSSGIQEQPGQHVVEEGLWENGLSYECRTLLFKAIHNLLERCLMDKNFVRIGKWFVRPYEKDEKPVNKSEHLSCAFTFFLHGESNVCTSVEIAQHQPIYLINEEHIHMAQSSPAPFQVLVSPYGLNGTLTGQAYKMSDPATRKLIEEWQYFYPMVLKKKEESKEEDELGYDDDFPVAVEVIVGGVRMVYPSAFVLISQNDIPVPQSVASAGGHIAVGQQGLGSVKDPSNCGMPLTPPTSPEQAILGESGGMQSAASHLVSQDGGMITMHSPKRSGKIPPKLHNHMVHRVWKECILNRTQSKRSQMSTPTLEEEPASNPATWDFVDPTQRVSCSCSRHKLLKRCAVGPNRPPTVSQPGFSAGPSSSSSLPPPASSKHKTAERQEKGDKLQKRPLIPFHHRPSVAEELCMEQDTPGQKLGLAGIDSSLEVSSSRKYDKQMAVPSRNTSKQMNLNPMDSPHSPISPLPPTLSPQPRGQETESLDPPSVPVNPALYGNGLELQQLSTLDDRTVLVGQRLPLMAEVSETALYCGIRPSNPESSEKWWHSYRLPPSDDAEFRPPELQGERCDAKMEVNSESTALQRLLAQPNKRFKIWQDKQPQLQPLHFLDPLPLSQQPGDSLGEVNDPYTFEDGDIKYIFTANKKCKQGTEKDSLKKNKSEDGFGTKDVTTPGHSTPVPDGKNAMSIFSSATKTDVRQDNAAGRAGSSSLTQVTDLAPSLHDLDNIFDNSDDDELGAVSPALRSSKMPAVGTEDRPLGKDGRAAVPYPPTVADLQRMFPTPPSLEQHPAFSPVMNYKDGISSETVTALGMMESPMVSMVSTQLTEFKMEVEDGLGSPKPEEIKDFSYVHKVPSFQPFVGSSMFAPLKMLPSHCLLPLKIPDACLFRPSWAIPPKIEQLPMPPAATFIRDGYNNVPSVGSLADPDYLNTPQMNTPVTLNSAAPASNSGAGVLPSPATPRFSVPTPRTPRTPRTPRGGGTASGQGSVKYDSTDQGSPASTPSTTRPLNSVEPATMQPIPEAHSLYVTLILSDSVMNIFKDRNFDSCCICACNMNIKGADVGLYIPDSSNEDQYRCTCGFSAIMNRKLGYNSGLFLEDELDIFGKNSDIGQAAERRLMMCQSTFLPQVEGTKKPQEPPISLLLLLQNQHTQPFASLNFLDYISSNNRQTLPCVSWSYDRVQADNNDYWTECFNALEQGRQYVDNPTGGKVDEALVRSATVHSWPHSNVLDISMLSSQDVVRMLLSLQPFLQDAIQKKRTGRTWENIQHVQGPLTWQQFHKMAGRGTYGSEESPEPLPIPTLLVGYDKDFLTISPFSLPFWERLLLDPYGGHRDVAYIVVCPENEALLEGAKTFFRDLSAVYEMCRLGQHKPICKVLRDGIMRVGKTVAQKLTDELVSEWFNQPWSGEENDNHSRLKLYAQVCRHHLAPYLATLQLDSSLLIPPKYQTPPAAAQGQATPGNAGPLAPNGSAAPPAGSAFNPTSNSSSTNPAASSSASGSSVPPVSSSASAPGISQISTTSSSGFSGSVGGQNPSTGGISADRTQGNIGCGGDTDPGQSSSQPSQDGQESVTERERIGIPTEPDSADSHAHPPAVVIYMVDPFTYAAEEDSTSGNFWLLSLMRCYTEMLDNLPEHMRNSFILQIVPCQYMLQTMKDEQVFYIQYLKSMAFSVYCQCRRPLPTQIHIKSLTGFGPAASIEMTLKNPERPSPIQLYSPPFILAPIKDKQTELGETFGEASQKYNVLFVGYCLSHDQRWLLASCTDLHGELLETCVVNIALPNRSRRSKVSARKIGLQKLWEWCIGIVQMTSLPWRVVIGRLGRLGHGELKDWSILLGECSLQTISKKLKDVCRMCGISAADSPSILSACLVAMEPQGSFVVMPDAVTMGSVFGRSTALNMQSSQLNTPQDASCTHILVFPTSSTIQVAPANYPNEDGFSPNNDDMFVDLPFPDDMDNDIGILMTGNLHSSPNSSPVPSPGSPSGIGVGSHFQHSRSQGERLLSREAPEELKQQPLALGYFVSTAKAENLPQWFWSSCPQAQNQCPLFLKASLHHHISVAQTDELLPARNSQRVPHPLDSKTTSDVLRFVLEQYNALSWLTCNPATQDRTSCLPVHFVVLTQLYNAIMNIL

SEQ ID NO: 15615 - protein, 37 aa, Artificial Sequence
  Synthetic polypeptide
AQGFKSSLGNMLWKKDSGKMAFPMNVGRCSSKRSTIC

SEQ ID NO: 15616 - protein, 23 aa, Artificial Sequence
  Synthetic polypeptide
DTASHFMGIQILIEQTRGEGSER

SEQ ID NO: 15617 - protein, 172 aa, Artificial Sequence
  Synthetic polypeptide
LNKQEERAVRDRNLLQVHDHNQPIPWKVQFNLGNSSRPSNQCRNSIQGKHLITDELGYVCERKDLLVNGCCNVNVPSTKQYCCDGCWPNGCCSAYEYCVSCCLQPNKQLLLERFLNRAAVAFQNLFMAVEDHFELCLAKCRTSSQSVQHENTYRDPIAKYCYGESPPELFPA

SEQ ID NO: 15618 - protein, 7 aa, Artificial Sequence
  Synthetic polypeptide
TNKRRGQ

SEQ ID NO: 15619 - protein, 527 aa, Artificial Sequence
  Synthetic polypeptide
PWKWILPPKARLSGLEAVVIGEVHENVTLHCGNISGLRGQVTWYRNNSEPVFLLSSNSSLRPAEPRFSLVDATSLHIESLSLGDEGIYTCQEILNVTQWFQVWLQVASGPYQIEVHIVATGTLPNGTLYAARGSQVDFSCNSSSRPPPVVEWWFQALNSSSESFGHNLTVNFFSLLLISPNLQGNYTCLALNQLSKRHRKVTTELLVYYPPPSAPQCWAQMASGSFMLQLTCRWDGGYPDPDFLWIEEPGGVIVGKSKLGVEMLSESQLSDGKKFKCVTSHIVGPESGASCMVQIRGPSLLSEPMKTCFTGGNVTLTCQVSGAYPPAKILWLRNLTQPEVIIQPSSRHLITQDGQNSTLTIHNCSQDLDEGYYICRADSPVGVREMEIWLSVKEPLNIGGIVGTIVSLLLLGLAIISGLLLHYSPVFCWKVGNTSRGQNMDDVMVLVDSEEEEEEEEEEEEDAAVGEQEGAREREELPKEIPKQDHIHRVTALVNGNIEQMGNGFQDLQDDSSEEQSDIVQEEDRPV

SEQ ID NO: 15620 - protein, 52 aa, Artificial Sequence
  Synthetic polypeptide
PNTPPGTEFCQQPVSDLGSGSFPRKPGFQDWRLLSLEKFMRMLLCTVATSRD

SEQ ID NO: 15621 - protein, 25 aa, Artificial Sequence
  Synthetic polypeptide
VTLEVDPSPESPAFRIGGCCHWRSS

SEQ ID NO: 15622 - protein, 176 aa, Artificial Sequence
  Synthetic polypeptide
PWKWILPPKARLSGLEAVVIGEVHENVTLHCGNISGLRGQVTWYRNNSEPVFLLSSNSSLRPAEPRFSLVDATSLHIESLSLGDEGIYTCQEILNVTQWFQVWLQVANPPPSAPQCWAQMASGSFMLQLTCRWDGGYPDPDFLWIEEPGGVIVGKSKLGVEMLSESQLSDGKKFKC

SEQ ID NO: 15623 - protein, 30 aa, Artificial Sequence
  Synthetic polypeptide
SQHFGKPRLEDRLSPGAQDKPGQYEMARYS

SEQ ID NO: 15624 - protein, 845 aa, Artificial Sequence
  Synthetic polypeptide
AQELKTSLGNMKWQDILKEVKFLRQLKHPNTIEYKGCYLKEHTAWLVMEYCLGSASDLLEVHKKPLQEVEIAAITHGALHGLAYLHSHALIHRDIKAGNILLTEPGQVKLADFGSASMASPANSFVGTPYWMAPEVILAMDEGQYDGKVDIWSLGITCIELAERKPPLFNMNAMSALYHIAQNDSPTLQSNEWTDSFRRFVDYCLQKIPQERPTSAELLRHDFVRRDRPLRVLIDLIQRTKDAVRELDNLQYRKMKKILFQETRNGPLNESQEDEEDSEHGTSLNREMDSLGSNHSIPSMSVSTGSQSSSVNSMQEVMDESSSELVMMHDDESTINSSSSVVHKKDHVFIRDEAGHGDPRPEPRPTQSVQSQALHYRNRERFATIKSASLVTRQIHEHEQENELREQMSGYKRMRRQHQKQLIALENKLKAEMDEHRLKLQKEVETHANNSSIELEKLAKKQVAIIEKEAKVAAADEKKFQQQILAQQKKDLTTFLESQKKQYKICKEKIKEEMNEDHSTPKKEKQERISKHKENLQHTQAEEEAHLLTQQRLYYDKNCRFFKRKIMIKRHEVEQQNIREELNKKRTQKEMEHAMLIRHDESTRELEYRQLHTLQKLRMDLIRLQHQTELENQLEYNKRRERELHRKHVMELRQQPKNLKAMEMQIKKQFQDTCKVQTKQYKALKNHQLEVTPKNEHKTILKTLKDEQTRKLAILAEQYEQSINEMMASQALRLDEAQEAECQALRLQLQQEMELLNAYQSKIKMQTEAQHERELQKLEQRVSLRRAHLEQKIEEELAALQKERSERIKNLLERQEREIETFDMESLRMGFGNLVTLDFPKEDYR

SEQ ID NO: 15625 - protein, 83 aa, Artificial Sequence
  Synthetic polypeptide
AQELKTSLGNMKWQDILKEVKFLRQLKHPNTIEYKGCYLKEHTAWLVMEYCLGSASDLLEVHKKPLQEVEIAAITHGALHGLA

SEQ ID NO: 15626 - protein, 40 aa, Artificial Sequence
  Synthetic polypeptide
AQELKTSLGNMKWQDILKEVKFLRQLKHPNTIEYKGCYLK

SEQ ID NO: 15627 - protein, 11 aa, Artificial Sequence
  Synthetic polypeptide
GFLSHVELTCR

SEQ ID NO: 15628 - protein, 29 aa, Artificial Sequence
  Synthetic polypeptide
EVPFASYRDSEASSAMWNSHADDNPGSPG

SEQ ID NO: 15629 - protein, 904 aa, Artificial Sequence
  Synthetic polypeptide
WVYQGVPLLLLPDFLLLPPCKKCLLPHTVILRLPQPCGTHMQMTIQALQDELRIQRDLNQLFQQDSSSRTGEPCVAELTEENFQRLHAEHERQAKELFLLRKTLEEMELRIETQKQTLNARDESIKKLLEMLQSKGLSAKATEEDHERTRRLAEAEMHVHHLESLLEQKEKENSMLREEMHRRFENAPDSAKTKALQTVIEMKDSKISSMERGLRDLEEEIQMLKSNGALSTEEREEEMKQMEVYRSHSKFMKNKIGQVKQELSRKDTELLALQTKLETLTNQFSDSKQHIEVLKESLTAKEQRAAILQTEVDALRLRLEEKETMLNKKTKQIQDMAEEKGTQAGEIHDLKDMLDVKERKVNVLQKKIENLQEQLRDKEKQMSSLKERVKSLQADTTNTDTALTTLEEALAEKERTIERLKEQRDRDEREKQEEIDNYKKDLKDLKEKVSLLQGDLSEKEASLLDLKEHASSLASSGLKKDSRLKTLEIALEQKKEECLKMESQLKKAHEAALEARASPEMSDRIQHLEREITRYKDESSKAQAEVDRLLEILKEVENEKNDKDKKIAELERQVKDQNKKVANLKHKEQVEKKKSAQMLEEARRREDNLNDSSQQLQDSLRKKDDRIEELEEALRESVQITAEREMVLAQEESARTNAEKQVEELLMAMEKVKQELESMKAKLSSTQQSLAEKETHLTNLRAERRKHLEEVLEMKQEALLAAISEKDANIALLELSSSKKKTQEEVAALKREKDRLVQQLKQQTQNRMKLMADNYEDDHFKSSHSNQTNHKPSPDQIIQPLLELDQNRSKLKLYIGHLTTLCHDRDPLILRGLTPPASYNLDDDQAAWENELQKMTRGQLQDELEKGERDNAELQEFANAILQQIADHCPDILEQVVNALEESS

SEQ ID NO: 15630 - protein, 792 aa, Artificial Sequence
  Synthetic polypeptide
WVYQGVPLLLLPDFLLLPPCKKCLLPHTVILRLPQPCGTHMQMTIQALQDELRIQRDLNQLFQQDSSSRTGEPCVAELTEENFQRLHAEHERQAKELFLLRKTLEEMELRIETQKQTLNARDESIKKLLEMLQSKGLSAKATEEDHERTRRLAEAEMHVHHLESLLEQKEKENSMLREEMHRRFENAPDSAKTKALQTVIEMKDSKISSMERGLRDLEEEIQMLKSNGALSTEEREEEMKQMEVYRSHSKFMKNKVEQLKEELSSKEAQWEELKKKAAGLQAEIGQVKQELSRKDTELLALQTKLETLTNQFSDSKQHIEVLKESLTAKEQRAAILQTEVDALRLRLEEKETMLNKKTKQIQDMAEEKGTQAGEIHDLKDMLDVKERKVNVLQKKIENLQEQLRDKEKQMSSLKERVKSLQADTTNTDTALTTLEEALAEKERTIERLKEQRDRDEREKQEEIDNYKKDLKDLKEKVSLLQGDLSEKEASLLDLKEHASSLASSGLKKDSRLKTLEIALEQKKEECLKMESQLKKAHEAALEARASPEMSDRIQHLEREITRYKDESSKAQAEVDRLLEILKEVENEKNDKDKKIAELESLTSRQVKDQNKKVANLKHKEQVEKKKSAQMLEEARRREDNLNDSSQQLQVEELLMAMEKVKQELESMKAKLSSTQQSLAEKETHLTNLRAERRKHLEEVLEMKQEALLAAISEKDANIALLELSSSKKKTQEEVAALKREKDRLVQQLKQQTQNRMKLMADNYEDDHFKSSHSNQTNHKPSPDQDEEEGIWA

SEQ ID NO: 15631 - protein, 936 aa, Artificial Sequence
  Synthetic polypeptide
WVYQGVPLLLLPDFLLLPPCKKCLLPHTVILRLPQPCGTHMQMTIQALQDELRIQRDLNQLFQQDSSSRTGEPCVAELTEENFQRLHAEHERQAKELFLLRKTLEEMELRIETQKQTLNARDESIKKLLEMLQSKGLSAKATEEDHERTRRLAEAEMHVHHLESLLEQKEKENSMLREEMHRRFENAPDSAKTKALQTVIEMKDSKISSMERGLRDLEEEIQMLKSNGALSTEEREEEMKQMEVYRSHSKFMKNKVEQLKEELSSKEAQWEELKKKAAGLQAEIGQVKQELSRKDTELLALQTKLETLTNQFSDSKQHIEVLKESLTAKEQRAAILQTEVDALRLRLEEKETMLNKKTKQIQDMAEEKGTQAGEIHDLKDMLDVKERKVNVLQKKIENLQEQLRDKEKQMSSLKERVKSLQADTTNTDTALTTLEEALAEKERTIERLKEQRDRDEREKQEEIDNYKKDLKDLKEKVSLLQGDLSEKEASLLDLKEHASSLASSGLKKDSRLKTLEIALEQKKEECLKMESQLKKAHEAALEARASPEMSDRIQHLEREITRYKDESSKAQAEVDRLLEILKEVENEKNDKDKKIAELESLTSRQVKDQNKKVANLKHKEQVEKKKSAQMLEEARRREDNLNDSSQQLQDSLRKKDDRIEELEEALRESVQITAEREMVLAQEESARTNAEKQVEELLMAMEKVKQELESMKAKLSSTQQSLAEKETHLTNLRAERRKHLEEVLEMKQEALLAAISEKDANIALLELSSSKKKTQEEVAALKREKDRLVQQLKQQTQNRMKLMADNYEDDHFKSSHSNQTNHKPSPDQIIQPLLELDQNRSKLKLYIGHLTTLCHDRDPLILRGLTPPASYNLDDDQAAWENELQKMTRGQLQDELEKGERDNAELQEFANAILQQIADHCPDILEQVVNALEESS

SEQ ID NO: 15632 - protein, 764 aa, Artificial Sequence
  Synthetic polypeptide
WVYQGVPLLLLPDFLLLPPCKKCLLPHTVILRLPQPCGTHMQMTIQALQDELRIQRDLNQLFQQDSSSRTGEPCVAELTEENFQRLHAEHERQAKELFLLRKTLEEMELRIETQKQTLNARDESIKKLLEMLQSKGLSAKATEEDHERTRRLAEAEMHVHHLESLLEQKEKENSMLREEMHRRFENAPDSAKTKALQTVIEMKDSKISSMERGLRDLEEEIQMLKSNGALSTEEREEEMKQMEVYRSHSKFMKNKIGQVKQELSRKDTELLALQTKLETLTNQFSDSKQHIEVLKESLTAKEQRAAILQTEVDALRLRLEEKETMLNKKTKQIQDMAEEKGTQAGEIHDLKDMLDVKERKVNVLQKKIENLQEQLRDKEKQMSSLKERVKSLQADTTNTDTALTTLEEALAEKERTIERLKEQRDRDEREKQEEIDNYKKDLKDLKEKVSLLQGDLSEKEASLLDLKEHASSLASSGLKKDSRLKTLEIALEQKKEECLKMESQLKKAHEAALEARASPEMSDRIQHLEREITRYKDESSKAQAEVDRLLEILKEVENEKNDKDKKIAELESLTSRQVKDQNKKVANLKHKEQVEKKKSAQMLEEARRREDNLNDSSQQLQVEELLMAMEKVKQELESMKAKLSSTQQSLAEKETHLTNLRAERRKHLEEVLEMKQEALLAAISEKDANIALLELSSSKKKTQEEVAALKREKDRLVQQLKQQTQNRMKLMADNYEDDHFKSSHSNQTNHKPSPDQDEEEGIWA

SEQ ID NO: 15633 - protein, 932 aa, Artificial Sequence
  Synthetic polypeptide
WVYQGVPLLLLPDFLLLPPCKKCLLPHTVILRLPQPCGTHMQMTIQALQDELRIQRDLNQLFQQDSSSRTGEPCVAELTEENFQRLHAEHERQAKELFLLRKTLEEMELRIETQKQTLNARDESIKKLLEMLQSKGLSAKATEEDHERTRRLAEAEMHVHHLESLLEQKEKENSMLREEMHRRFENAPDSAKTKALQTVIEMKDSKISSMERGLRDLEEEIQMLKSNGALSTEEREEEMKQMEVYRSHSKFMKNKVEQLKEELSSKEAQWEELKKKAAGLQAEIGQVKQELSRKDTELLALQTKLETLTNQFSDSKQHIEVLKESLTAKEQRAAILQTEVDALRLRLEEKETMLNKKTKQIQDMAEEKGTQAGEIHDLKDMLDVKERKVNVLQKKIENLQEQLRDKEKQMSSLKERVKSLQADTTNTDTALTTLEEALAEKERTIERLKEQRDRDEREKQEEIDNYKKDLKDLKEKVSLLQGDLSEKEASLLDLKEHASSLASSGLKKDSRLKTLEIALEQKKEECLKMESQLKKAHEAALEARASPEMSDRIQHLEREITRYKDESSKAQAEVDRLLEILKEVENEKNDKDKKIAELERQVKDQNKKVANLKHKEQVEKKKSAQMLEEARRREDNLNDSSQQLQDSLRKKDDRIEELEEALRESVQITAEREMVLAQEESARTNAEKQVEELLMAMEKVKQELESMKAKLSSTQQSLAEKETHLTNLRAERRKHLEEVLEMKQEALLAAISEKDANIALLELSSSKKKTQEEVAALKREKDRLVQQLKQQTQNRMKLMADNYEDDHFKSSHSNQTNHKPSPDQIIQPLLELDQNRSKLKLYIGHLTTLCHDRDPLILRGLTPPASYNLDDDQAAWENELQKMTRGQLQDELEKGERDNAELQEFANAILQQIADHCPDILEQVVNALEESS

SEQ ID NO: 15634 - protein, 311 aa, Artificial Sequence
  Synthetic polypeptide
WVYQGVPLLLLPDFLLLPPCKKCLLPHTVILRLPQPCGTHMQMTIQALQDELRIQRDLNQLFQQDSSSRTGEPCVAELTEENFQRLHAEHERQAKELFLLRKTLEEMELRIETQKQTLNARDESIKKLLEMLQSKGLSAKATEEDHERTRRLAEAEMHVHHLESLLEQKEKENSMLREEMHRRFENAPDSAKTKALQTVIEMKDSKISSMERGLRDLEEEIQMLKSNGALSTEEREEEMKQMEVYRSHSKFMKNKIGQVKQELSRKDTELLALQTKLETLTNQFSDSKQHIEVLKESLTAKEQRAAILQTE

SEQ ID NO: 15635 - protein, 808 aa, Artificial Sequence
  Synthetic polypeptide
WVYQGVPLLLLPDFLLLPPCKKCLLPHTVILRLPQPCGTHMQMTIQALQDELRIQRDLNQLFQQDSSSRTGEPCVAELTEENFQRLHAEHERQAKELFLLRKTLEEMELRIETQKQTLNARDESIKKLLEMLQSKGLSAKATEEDHERTRRLAEAEMHVHHLESLLEQKEKENSMLREEMHRRFENAPDSAKTKALQTVIEMKDSKISSMERGLRDLEEEIQMLKSNGALSTEEREEEMKQMEVYRSHSKFMKNKIGQVKQELSRKDTELLALQTKLETLTNQFSDSKQHIEVLKESLTAKEQRAAILQTEVDALRLRLEEKETMLNKKTKQIQDMAEEKGTQAGEIHDLKDMLDVKERKVNVLQKKIENLQEQLRDKEKQMSSLKERVKSLQADTTNTDTALTTLEEALAEKERTIERLKEQRDRDEREKQEEIDNYKKDLKDLKEKVSLLQGDLSEKEASLLDLKEHASSLASSGLKKDSRLKTLEIALEQKKEECLKMESQLKKAHEAALEARASPEMSDRIQHLEREITRYKDESSKAQAEVDRLLEILKEVENEKNDKDKKIAELESLTSRQVKDQNKKVANLKHKEQVEKKKSAQMLEEARRREDNLNDSSQQLQDSLRKKDDRIEELEEALRESVQITAEREMVLAQEESARTNAEKQVEELLMAMEKVKQELESMKAKLSSTQQSLAEKETHLTNLRAERRKHLEEVLEMKQEALLAAISEKDANIALLELSSSKKKTQEEVAALKREKDRLVQQLKQQTQNRMKLMADNYEDDHFKSSHSNQTNHKPSPDQDEEEGIWA

SEQ ID NO: 15636 - protein, 902 aa, Artificial Sequence
  Synthetic polypeptide
WVYQGVPLLLLPDFLLLPPCKKCLLPHTVILRLPQPCGTHMQMTIQALQDELRIQRDLNQLFQQDSSSRTGEPCVAELTEENFQRLHAEHERQAKELFLLRKTLEEMELRIETQKQTLNARDESIKKLLEMLQSKGLSAKATEEDHERTRRLAEAEMHVHHLESLLEQKEKENSMLREEMHRRFENAPDSAKTKALQTVIEMKDSKISSMERGLRDLEEEIQMLKSNGALSTEEREEEMKQMEVYRSHSKFMKNKVEQLKEELSSKEAQWEELKKKAAGLQAEIGQVKQELSRKDTELLALQTKLETLTNQFSDSKQHIEVLKESLTAKEQRAAILQTEVDALRLRLEEKETMLNKKTKQIQDMAEEKGTQAGEIHDLKDMLDVKERKVNVLQKKIENLQEQLRDKEKQMSSLKERVKSLQADTTNTDTALTTLEEALAEKERTIERLKEQRDRDEREKQEEIDNYKKDLKDLKEKVSLLQGDLSEKEASLLDLKEHASSLASSGLKKDSRLKTLEIALEQKKEECLKMESQLKKAHEAALEARASPEMSDRIQHLEREITRYKDESSKAQAEVDRLLEILKEVENEKNDKDKKIAELERQVKDQNKKVANLKHKEQVEKKKSAQMLEEARRREDNLNDSSQQLQDSLRKKDDRIEELEEALRESVQITAEREMVLAQEESARTNAEKQVEELLMAMEKVKQELESMKAKLSSTQQSLAEKETHLTNLRAERRKHLEEVLEMKQEALLAAISEKDANIALLELSSSKKKTQEEVAALKREKDRLVQQLKQQTQNRMKLMADNYEDDHFKSSHSNQTNHKPSPDQIIQPLLELDQNRSKLKLYIGHLTTLCHDRDPLILRGLTPPASYNLDDDQAAWENELQKMTRGQNPLHPKAMEKLPFFM

SEQ ID NO: 15637 - protein, 869 aa, Artificial Sequence
  Synthetic polypeptide
PRGSHMQMTIQALQDELRIQRDLNQLFQQDSSSRTGEPCVAELTEENFQRLHAEHERQAKELFLLRKTLEEMELRIETQKQTLNARDESIKKLLEMLQSKGLSAKATEEDHERTRRLAEAEMHVHHLESLLEQKEKENSMLREEMHRRFENAPDSAKTKALQTVIEMKDSKISSMERGLRDLEEEIQMLKSNGALSTEEREEEMKQMEVYRSHSKFMKNKIGQVKQELSRKDTELLALQTKLETLTNQFSDSKQHIEVLKESLTAKEQRAAILQTEVDALRLRLEEKETMLNKKTKQIQDMAEEKGTQAGEIHDLKDMLDVKERKVNVLQKKIENLQEQLRDKEKQMSSLKERVKSLQADTTNTDTALTTLEEALAEKERTIERLKEQRDRDEREKQEEIDNYKKDLKDLKEKVSLLQGDLSEKEASLLDLKEHASSLASSGLKKDSRLKTLEIALEQKKEECLKMESQLKKAHEAALEARASPEMSDRIQHLEREITRYKDESSKAQAEVDRLLEILKEVENEKNDKDKKIAELERQVKDQNKKVANLKHKEQVEKKKSAQMLEEARRREDNLNDSSQQLQDSLRKKDDRIEELEEALRESVQITAEREMVLAQEESARTNAEKQVEELLMAMEKVKQELESMKAKLSSTQQSLAEKETHLTNLRAERRKHLEEVLEMKQEALLAAISEKDANIALLELSSSKKKTQEEVAALKREKDRLVQQLKQQTQNRMKLMADNYEDDHFKSSHSNQTNHKPSPDQIIQPLLELDQNRSKLKLYIGHLTTLCHDRDPLILRGLTPPASYNLDDDQAAWENELQKMTRGQLQDELEKGERDNAELQEFANAILQQIADHCPDILEQVVNALEESS

SEQ ID NO: 15638 - protein, 11 aa, Artificial Sequence
  Synthetic polypeptide
GFLSHVDLTCR

SEQ ID NO: 15639 - protein, 73 aa, Artificial Sequence
  Synthetic polypeptide
WVYQGVPLLLLPDFLLLPPCKKCLLPHTVILRLPQPCGTVSPIKQVPFASYRDSEASLATWISHADDNPGSPG

SEQ ID NO: 15640 - protein, 757 aa, Artificial Sequence
  Synthetic polypeptide
PRGSHMQMTIQALQDELRIQRDLNQLFQQDSSSRTGEPCVAELTEENFQRLHAEHERQAKELFLLRKTLEEMELRIETQKQTLNARDESIKKLLEMLQSKGLSAKATEEDHERTRRLAEAEMHVHHLESLLEQKEKENSMLREEMHRRFENAPDSAKTKALQTVIEMKDSKISSMERGLRDLEEEIQMLKSNGALSTEEREEEMKQMEVYRSHSKFMKNKVEQLKEELSSKEAQWEELKKKAAGLQAEIGQVKQELSRKDTELLALQTKLETLTNQFSDSKQHIEVLKESLTAKEQRAAILQTEVDALRLRLEEKETMLNKKTKQIQDMAEEKGTQAGEIHDLKDMLDVKERKVNVLQKKIENLQEQLRDKEKQMSSLKERVKSLQADTTNTDTALTTLEEALAEKERTIERLKEQRDRDEREKQEEIDNYKKDLKDLKEKVSLLQGDLSEKEASLLDLKEHASSLASSGLKKDSRLKTLEIALEQKKEECLKMESQLKKAHEAALEARASPEMSDRIQHLEREITRYKDESSKAQAEVDRLLEILKEVENEKNDKDKKIAELESLTSRQVKDQNKKVANLKHKEQVEKKKSAQMLEEARRREDNLNDSSQQLQVEELLMAMEKVKQELESMKAKLSSTQQSLAEKETHLTNLRAERRKHLEEVLEMKQEALLAAISEKDANIALLELSSSKKKTQEEVAALKREKDRLVQQLKQQTQNRMKLMADNYEDDHFKSSHSNQTNHKPSPDQDEEEGIWA

SEQ ID NO: 15641 - protein, 901 aa, Artificial Sequence
  Synthetic polypeptide
PRGSHMQMTIQALQDELRIQRDLNQLFQQDSSSRTGEPCVAELTEENFQRLHAEHERQAKELFLLRKTLEEMELRIETQKQTLNARDESIKKLLEMLQSKGLSAKATEEDHERTRRLAEAEMHVHHLESLLEQKEKENSMLREEMHRRFENAPDSAKTKALQTVIEMKDSKISSMERGLRDLEEEIQMLKSNGALSTEEREEEMKQMEVYRSHSKFMKNKVEQLKEELSSKEAQWEELKKKAAGLQAEIGQVKQELSRKDTELLALQTKLETLTNQFSDSKQHIEVLKESLTAKEQRAAILQTEVDALRLRLEEKETMLNKKTKQIQDMAEEKGTQAGEIHDLKDMLDVKERKVNVLQKKIENLQEQLRDKEKQMSSLKERVKSLQADTTNTDTALTTLEEALAEKERTIERLKEQRDRDEREKQEEIDNYKKDLKDLKEKVSLLQGDLSEKEASLLDLKEHASSLASSGLKKDSRLKTLEIALEQKKEECLKMESQLKKAHEAALEARASPEMSDRIQHLEREITRYKDESSKAQAEVDRLLEILKEVENEKNDKDKKIAELESLTSRQVKDQNKKVANLKHKEQVEKKKSAQMLEEARRREDNLNDSSQQLQDSLRKKDDRIEELEEALRESVQITAEREMVLAQEESARTNAEKQVEELLMAMEKVKQELESMKAKLSSTQQSLAEKETHLTNLRAERRKHLEEVLEMKQEALLAAISEKDANIALLELSSSKKKTQEEVAALKREKDRLVQQLKQQTQNRMKLMADNYEDDHFKSSHSNQTNHKPSPDQIIQPLLELDQNRSKLKLYIGHLTTLCHDRDPLILRGLTPPASYNLDDDQAAWENELQKMTRGQLQDELEKGERDNAELQEFANAILQQIADHCPDILEQVVNALEESS

SEQ ID NO: 15642 - protein, 729 aa, Artificial Sequence
  Synthetic polypeptide
PRGSHMQMTIQALQDELRIQRDLNQLFQQDSSSRTGEPCVAELTEENFQRLHAEHERQAKELFLLRKTLEEMELRIETQKQTLNARDESIKKLLEMLQSKGLSAKATEEDHERTRRLAEAEMHVHHLESLLEQKEKENSMLREEMHRRFENAPDSAKTKALQTVIEMKDSKISSMERGLRDLEEEIQMLKSNGALSTEEREEEMKQMEVYRSHSKFMKNKIGQVKQELSRKDTELLALQTKLETLTNQFSDSKQHIEVLKESLTAKEQRAAILQTEVDALRLRLEEKETMLNKKTKQIQDMAEEKGTQAGEIHDLKDMLDVKERKVNVLQKKIENLQEQLRDKEKQMSSLKERVKSLQADTTNTDTALTTLEEALAEKERTIERLKEQRDRDEREKQEEIDNYKKDLKDLKEKVSLLQGDLSEKEASLLDLKEHASSLASSGLKKDSRLKTLEIALEQKKEECLKMESQLKKAHEAALEARASPEMSDRIQHLEREITRYKDESSKAQAEVDRLLEILKEVENEKNDKDKKIAELESLTSRQVKDQNKKVANLKHKEQVEKKKSAQMLEEARRREDNLNDSSQQLQVEELLMAMEKVKQELESMKAKLSSTQQSLAEKETHLTNLRAERRKHLEEVLEMKQEALLAAISEKDANIALLELSSSKKKTQEEVAALKREKDRLVQQLKQQTQNRMKLMADNYEDDHFKSSHSNQTNHKPSPDQDEEEGIWA

SEQ ID NO: 15643 - protein, 897 aa, Artificial Sequence
  Synthetic polypeptide
PRGSHMQMTIQALQDELRIQRDLNQLFQQDSSSRTGEPCVAELTEENFQRLHAEHERQAKELFLLRKTLEEMELRIETQKQTLNARDESIKKLLEMLQSKGLSAKATEEDHERTRRLAEAEMHVHHLESLLEQKEKENSMLREEMHRRFENAPDSAKTKALQTVIEMKDSKISSMERGLRDLEEEIQMLKSNGALSTEEREEEMKQMEVYRSHSKFMKNKVEQLKEELSSKEAQWEELKKKAAGLQAEIGQVKQELSRKDTELLALQTKLETLTNQFSDSKQHIEVLKESLTAKEQRAAILQTEVDALRLRLEEKETMLNKKTKQIQDMAEEKGTQAGEIHDLKDMLDVKERKVNVLQKKIENLQEQLRDKEKQMSSLKERVKSLQADTTNTDTALTTLEEALAEKERTIERLKEQRDRDEREKQEEIDNYKKDLKDLKEKVSLLQGDLSEKEASLLDLKEHASSLASSGLKKDSRLKTLEIALEQKKEECLKMESQLKKAHEAALEARASPEMSDRIQHLEREITRYKDESSKAQAEVDRLLEILKEVENEKNDKDKKIAELERQVKDQNKKVANLKHKEQVEKKKSAQMLEEARRREDNLNDSSQQLQDSLRKKDDRIEELEEALRESVQITAEREMVLAQEESARTNAEKQVEELLMAMEKVKQELESMKAKLSSTQQSLAEKETHLTNLRAERRKHLEEVLEMKQEALLAAISEKDANIALLELSSSKKKTQEEVAALKREKDRLVQQLKQQTQNRMKLMADNYEDDHFKSSHSNQTNHKPSPDQIIQPLLELDQNRSKLKLYIGHLTTLCHDRDPLILRGLTPPASYNLDDDQAAWENELQKMTRGQLQDELEKGERDNAELQEFANAILQQIADHCPDILEQVVNALEESS

SEQ ID NO: 15644 - protein, 276 aa, Artificial Sequence
  Synthetic polypeptide
PRGSHMQMTIQALQDELRIQRDLNQLFQQDSSSRTGEPCVAELTEENFQRLHAEHERQAKELFLLRKTLEEMELRIETQKQTLNARDESIKKLLEMLQSKGLSAKATEEDHERTRRLAEAEMHVHHLESLLEQKEKENSMLREEMHRRFENAPDSAKTKALQTVIEMKDSKISSMERGLRDLEEEIQMLKSNGALSTEEREEEMKQMEVYRSHSKFMKNKIGQVKQELSRKDTELLALQTKLETLTNQFSDSKQHIEVLKESLTAKEQRAAILQTE

SEQ ID NO: 15645 - protein, 773 aa, Artificial Sequence
  Synthetic polypeptide
PRGSHMQMTIQALQDELRIQRDLNQLFQQDSSSRTGEPCVAELTEENFQRLHAEHERQAKELFLLRKTLEEMELRIETQKQTLNARDESIKKLLEMLQSKGLSAKATEEDHERTRRLAEAEMHVHHLESLLEQKEKENSMLREEMHRRFENAPDSAKTKALQTVIEMKDSKISSMERGLRDLEEEIQMLKSNGALSTEEREEEMKQMEVYRSHSKFMKNKIGQVKQELSRKDTELLALQTKLETLTNQFSDSKQHIEVLKESLTAKEQRAAILQTEVDALRLRLEEKETMLNKKTKQIQDMAEEKGTQAGEIHDLKDMLDVKERKVNVLQKKIENLQEQLRDKEKQMSSLKERVKSLQADTTNTDTALTTLEEALAEKERTIERLKEQRDRDEREKQEEIDNYKKDLKDLKEKVSLLQGDLSEKEASLLDLKEHASSLASSGLKKDSRLKTLEIALEQKKEECLKMESQLKKAHEAALEARASPEMSDRIQHLEREITRYKDESSKAQAEVDRLLEILKEVENEKNDKDKKIAELESLTSRQVKDQNKKVANLKHKEQVEKKKSAQMLEEARRREDNLNDSSQQLQDSLRKKDDRIEELEEALRESVQITAEREMVLAQEESARTNAEKQVEELLMAMEKVKQELESMKAKLSSTQQSLAEKETHLTNLRAERRKHLEEVLEMKQEALLAAISEKDANIALLELSSSKKKTQEEVAALKREKDRLVQQLKQQTQNRMKLMADNYEDDHFKSSHSNQTNHKPSPDQDEEEGIWA

SEQ ID NO: 15646 - protein, 867 aa, Artificial Sequence
  Synthetic polypeptide
PRGSHMQMTIQALQDELRIQRDLNQLFQQDSSSRTGEPCVAELTEENFQRLHAEHERQAKELFLLRKTLEEMELRIETQKQTLNARDESIKKLLEMLQSKGLSAKATEEDHERTRRLAEAEMHVHHLESLLEQKEKENSMLREEMHRRFENAPDSAKTKALQTVIEMKDSKISSMERGLRDLEEEIQMLKSNGALSTEEREEEMKQMEVYRSHSKFMKNKVEQLKEELSSKEAQWEELKKKAAGLQAEIGQVKQELSRKDTELLALQTKLETLTNQFSDSKQHIEVLKESLTAKEQRAAILQTEVDALRLRLEEKETMLNKKTKQIQDMAEEKGTQAGEIHDLKDMLDVKERKVNVLQKKIENLQEQLRDKEKQMSSLKERVKSLQADTTNTDTALTTLEEALAEKERTIERLKEQRDRDEREKQEEIDNYKKDLKDLKEKVSLLQGDLSEKEASLLDLKEHASSLASSGLKKDSRLKTLEIALEQKKEECLKMESQLKKAHEAALEARASPEMSDRIQHLEREITRYKDESSKAQAEVDRLLEILKEVENEKNDKDKKIAELERQVKDQNKKVANLKHKEQVEKKKSAQMLEEARRREDNLNDSSQQLQDSLRKKDDRIEELEEALRESVQITAEREMVLAQEESARTNAEKQVEELLMAMEKVKQELESMKAKLSSTQQSLAEKETHLTNLRAERRKHLEEVLEMKQEALLAAISEKDANIALLELSSSKKKTQEEVAALKREKDRLVQQLKQQTQNRMKLMADNYEDDHFKSSHSNQTNHKPSPDQIIQPLLELDQNRSKLKLYIGHLTTLCHDRDPLILRGLTPPASYNLDDDQAAWENELQKMTRGQNPLHPKAMEKLPFFM

SEQ ID NO: 15647 - protein, 41 aa, Artificial Sequence
  Synthetic polypeptide
FAYRPWLLSGYRVRGVPGSSGRNEVDDESVGRGSCLSKKTE

SEQ ID NO: 15648 - protein, 1553 aa, Artificial Sequence
  Synthetic polypeptide
NLYEIQISVSINKVFFFWNTAMLGNLHIGPGCFQATESEEYQAQVEEMRLMMNQLEEDLVSARRRSDLYESELRESRLAAEEFKRKATECQHKLLKAKDQGKPEVGEYAKLEKINAEQQLKIQELQEKLEKAVKASTEATELLQNIRQAKERAERELEKLQNREDSSEGIRKKLVEAEERRHSLENKVKRLETMERRENRLKDDIQTKSQQIQQMADKILELEEKHREAQVSAQHLEVHLKQKEQHYEEKIKVLDNQIKKDLADKETLENMMQRHEEEAHEKGKILSEQKAMINAMDSKIRSLEQRIVELSEANKLAANSSLFTQRNMKAQEEMISELRQQKFYLETQAGKLEAQNRKLEEQLEKISHQDHSDKNRLLELETRLREVSLEHEEQKLELKRQLTELQLSLQERESQLTALQAARAALESQLRQAKTELEETTAEAEEEIQALTAHRDEIQRKFDALRNSCTVITDLEEQLNQLTEDNAELNNQNFYLSKQLDEASGANDEIVQLRSEVDHLRREITEREMQLTSQKQTMEALKTTCTMLEEQVMDLEALNDELLEKERQWEAWRSVLGDEKSQFECRVRELQRMLDTEKQSRARADQRITESRQVVELAVKEHKAEILALQQALKEQKLKAESLSDKLNDLEKKHAMLEMNARSLQQKLETERELKQRLLEEQAKLQQQMDLQKNHIFRLTQGLQEALDRADLLKTERSDLEYQLENIQVLYSHEKVKMEGTISQQTKLIDFLQAKMDQPAKKKKGLFSRRKEDPALPTQVPLQYNELKLALEKEKARCAELEEALQKTRIELRSAREEAAHRKATDHPHPSTPATARQQIAMSAIVRSPEHQPSAMSLLAPPSSRRKESSTPEEFSRRLKERMHHNIPHRFNVGLNMRATKCAVCLDTVHFGRQASKCLECQVMCHPKCSTCLPATCGLPAEYATHFTEAFCRDKMNSPGLQTKEPSSSLHLEGWMKVPRNNKRGQQGWDRKYIVLEGSKVLIYDNEAREAGQRPVEEFELCLPDGDVSIHGAVGASELANTAKADVPYILKMESHPHTTCWPGRTLYLLAPSFPDKQRWVTALESVVAGGRVSREKAEADAKLLGNSLLKLEGDDRLDMNCTLPFSDQVVLVGTEEGLYALNVLKNSLTHVPGIGAVFQIYIIKDLEKLLMIAGEERALCLVDVKKVKQSLAQSHLPAQPDISPNIFEAVKGCHLFGAGKIENGLCICAAMPSKVVILRYNENLSKYCIRKEIETSEPCSCIHFTNYSILIGTNKFYEIDMKQYTLEEFLDKNDHSLAPAVFAASSNSFPVSIVQVNSAGQREEYLLCFHEFGVFVDSYGRRSRTDDLKWSRLPLAFAYREPYLFVTHFNSLEVIEIQARSSAGTPARAYLDIPNPRYLGPAISSGAIYLASSYQDKLRVICCKGNLVKESGTEHHRGPSTSRSSPNKRGPPTYNEHITKRVASSPAPPEGPSHPREPSTPHRYREGRTELRRDKSPGRPLEREKSPGRMLSTRRERSPGRLFEDSSRGRLPAGAVRTPLSQVNKVWDQSSV

SEQ ID NO: 15649 - protein, 36 aa, Artificial Sequence
  Synthetic polypeptide
IKCFFFGTQPCLVICISALAAFRLQSQRSTRLKWKK

SEQ ID NO: 15650 - protein, 1511 aa, Artificial Sequence
  Synthetic polypeptide
NLYEIQISVSINKVFFFWNTAMLGNLHIGPGCFQATESEEYQAQVEEMRLMMNQLEEDLVSARRRSDLYESELRESRLAAEEFKRKATECQHKLLKAKDQGKPEVGEYAKLEKINAEQQLKIQELQEKLEKAVKASTEATELLQNIRQAKERAERELEKLQNREDSSEGIRKKLVEAEELEEKHREAQVSAQHLEVHLKQKEQHYEEKIKVLDNQIKKDLADKETLENMMQRHEEEAHEKGKILSEQKAMINAMDSKIRSLEQRIVELSEANKLAANSSLFTQRNMKAQEEMISELRQQKFYLETQAGKLEAQNRKLEEQLEKISHQDHSDKNRLLELETRLREVSLEHEEQKLELKRQLTELQLSLQERESQLTALQAARAALESQLRQAKTELEETTAEAEEEIQALTAHRDEIQRKFDALRNSCTVITDLEEQLNQLTEDNAELNNQNFYLSKQLDEASGANDEIVQLRSEVDHLRREITEREMQLTSQKQTMEALKTTCTMLEEQVMDLEALNDELLEKERQWEAWRSVLGDEKSQFECRVRELQRMLDTEKQSRARADQRITESRQVVELAVKEHKAEILALQQALKEQKLKAESLSDKLNDLEKKHAMLEMNARSLQQKLETERELKQRLLEEQAKLQQQMDLQKNHIFRLTQGLQEALDRADLLKTERSDLEYQLENIQVLYSHEKVKMEGTISQQTKLIDFLQAKMDQPAKKKKGLFSRRKEDPALPTQVPLQYNELKLALEKEKARCAELEEALQKTRIELRSAREEAAHRKATDHPHPSTPATARQQIAMSAIVRSPEHQPSAMSLLAPPSSRRKESSTPEEFSRRLKERMHHNIPHRFNVGLNMRATKCAVCLDTVHFGRQASKCLECQVMCHPKCSTCLPATCGLPAEYATHFTEAFCRDKMNSPGLQTKEPSSSLHLEGWMKVPRNNKRGQQGWDRKYIVLEGSKVLIYDNEAREAGQRPVEEFELCLPDGDVSIHGAVGASELANTAKADVPYILKMESHPHTTCWPGRTLYLLAPSFPDKQRWVTALESVVAGGRVSREKAEADAKLLGNSLLKLEGDDRLDMNCTLPFSDQVVLVGTEEGLYALNVLKNSLTHVPGIGAVFQIYIIKDLEKLLMIAGEERALCLVDVKKVKQSLAQSHLPAQPDISPNIFEAVKGCHLFGAGKIENGLCICAAMPSKVVILRYNENLSKYCIRKEIETSEPCSCIHFTNYSILIGTNKFYEIDMKQYTLEEFLDKNDHSLAPAVFAASSNSFPVSIVQVNSAGQREEYLLCFHEFGVFVDSYGRRSRTDDLKWSRLPLAFAYREPYLFVTHFNSLEVIEIQARSSAGTPARAYLDIPNPRYLGPAISSGAIYLASSYQDKLRVICCKGNLVKESGTEHHRGPSTSRSSPNKRGPPTYNEHITKRVASSPAPPEGPSHPREPSTPHRYREGRTELRRDKSPGRPLEREKSPGRMLSTRRERSPGRLFEDSSRGRLPAGAVRTPLSQVNKVWDQSSV

SEQ ID NO: 15651 - protein, 1496 aa, Artificial Sequence
  Synthetic polypeptide
NLYEIQISVSINKVFFFWNTAMLGNLHIGPGCFQATESEEYQAQVEEMRLMMNQLEEDLVSARRRSDLYESELRESRLAAEEFKRKATECQHKLLKAKDQGKPEVGEYAKLEKINAEQQLKIQELQEKLEKAVKASTEATELLQNIRQAKERAERELEKLQNREDSSEGIRKKLVEAEELEEKHREAQVSAQHLEVHLKQKEQHYEEKIKVLDNQIKKDLADKETLENMMQRHEEEAHEKGKILSEQKAMINAMDSKIRSLEQRIVELSEANKLAANSSLFTQRNMKAQEEMISELRQQKFYLETQAGKLEAQNRKLEEQLEKISHQDHSDKNRLLELETRLREVSLEHEEQKLELKRQLTELQLSLQERESQLTALQAARAALESQLRQAKTELEETTAEAEEEIQALTAHRDEIQRKFDALRNSCTVITDLEEQLNQLTEDNAELNNQNFYLSKQLDEASGANDEIVQLRSEVDHLRREITEREMQLTSQKQTMEALKTTCTMLEEQVMDLEALNDELLEKERQWEAWRSVLGDEKSQFECRVRELQRMLDTEKQSRARADQRITESRQVVELAVKEHKAEILALQQALKEQKLKAESLSDKLNDLEKKHAMLEMNARSLQQKLETERELKQRLLEEQAKLQQQMDLQKNHIFRLTQGLQEALDRADLLKTERSDLEYQLENIQVLYSHEKVKMEGTISQQTKLIDFLQAKMDQPAKKKKVPLQYNELKLALEKEKARCAELEEALQKTRIELRSAREEAAHRKATDHPHPSTPATARQQIAMSAIVRSPEHQPSAMSLLAPPSSRRKESSTPEEFSRRLKERMHHNIPHRFNVGLNMRATKCAVCLDTVHFGRQASKCLECQVMCHPKCSTCLPATCGLPAEYATHFTEAFCRDKMNSPGLQTKEPSSSLHLEGWMKVPRNNKRGQQGWDRKYIVLEGSKVLIYDNEAREAGQRPVEEFELCLPDGDVSIHGAVGASELANTAKADVPYILKMESHPHTTCWPGRTLYLLAPSFPDKQRWVTALESVVAGGRVSREKAEADAKLLGNSLLKLEGDDRLDMNCTLPFSDQVVLVGTEEGLYALNVLKNSLTHVPGIGAVFQIYIIKDLEKLLMIAGEERALCLVDVKKVKQSLAQSHLPAQPDISPNIFEAVKGCHLFGAGKIENGLCICAAMPSKVVILRYNENLSKYCIRKEIETSEPCSCIHFTNYSILIGTNKFYEIDMKQYTLEEFLDKNDHSLAPAVFAASSNSFPVSIVQVNSAGQREEYLLCFHEFGVFVDSYGRRSRTDDLKWSRLPLAFAYREPYLFVTHFNSLEVIEIQARSSAGTPARAYLDIPNPRYLGPAISSGAIYLASSYQDKLRVICCKGNLVKESGTEHHRGPSTSRSSPNKRGPPTYNEHITKRVASSPAPPEGPSHPREPSTPHRYREGRTELRRDKSPGRPLEREKSPGRMLSTRRERSPGRLFEDSSRGRLPAGAVRTPLSQVNKVWDQSSV

SEQ ID NO: 15652 - protein, 20 aa, Artificial Sequence
  Synthetic polypeptide
YLAHGKALVCCVGSGLPCQD

SEQ ID NO: 15653 - protein, 1650 aa, Artificial Sequence
  Synthetic polypeptide
NTWSSTWHMEKPWSVVSGLDSPAKTSSMEKKLLIKSKELQDSQDKCHKMEQEMTRLHRRVSEVEAVLSQKEVELKASETQRSLLEQDLATYITECSSLKRSLEQARMEVSQEDDKALQLLHDIREQSRKLQEIKEQEYQAQVEEMRLMMNQLEEDLVSARRRSDLYESELRESRLAAEEFKRKATECQHKLLKAKDQGKPEVGEYAKLEKINAEQQLKIQELQEKLEKAVKASTEATELLQNIRQAKERAERELEKLQNREDSSEGIRKKLVEAEERRHSLENKVKRLETMERRENRLKDDIQTKSQQIQQMADKILELEEKHREAQVSAQHLEVHLKQKEQHYEEKIKVLDNQIKKDLADKETLENMMQRHEEEAHEKGKILSEQKAMINAMDSKIRSLEQRIVELSEANKLAANSSLFTQRNMKAQEEMISELRQQKFYLETQAGKLEAQNRKLEEQLEKISHQDHSDKNRLLELETRLREVSLEHEEQKLELKRQLTELQLSLQERESQLTALQAARAALESQLRQAKTELEETTAEAEEEIQALTAHRDEIQRKFDALRNSCTVITDLEEQLNQLTEDNAELNNQNFYLSKQLDEASGANDEIVQLRSEVDHLRREITEREMQLTSQKQTMEALKTTCTMLEEQVMDLEALNDELLEKERQWEAWRSVLGDEKSQFECRVRELQRMLDTEKQSRARADQRITESRQVVELAVKEHKAEILALQQALKEQKLKAESLSDKLNDLEKKHAMLEMNARSLQQKLETERELKQRLLEEQAKLQQQMDLQKNHIFRLTQGLQEALDRADLLKTERSDLEYQLENIQVLYSHEKVKMEGTISQQTKLIDFLQAKMDQPAKKKKGLFSRRKEDPALPTQVPLQYNELKLALEKEKARCAELEEALQKTRIELRSAREEAAHRKATDHPHPSTPATARQQIAMSAIVRSPEHQPSAMSLLAPPSSRRKESSTPEEFSRRLKERMHHNIPHRFNVGLNMRATKCAVCLDTVHFGRQASKCLECQVMCHPKCSTCLPATCGLPAEYATHFTEAFCRDKMNSPGLQTKEPSSSLHLEGWMKVPRNNKRGQQGWDRKYIVLEGSKVLIYDNEAREAGQRPVEEFELCLPDGDVSIHGAVGASELANTAKADVPYILKMESHPHTTCWPGRTLYLLAPSFPDKQRWVTALESVVAGGRVSREKAEADAKLLGNSLLKLEGDDRLDMNCTLPFSDQVVLVGTEEGLYALNVLKNSLTHVPGIGAVFQIYIIKDLEKLLMIAGEERALCLVDVKKVKQSLAQSHLPAQPDISPNIFEAVKGCHLFGAGKIENGLCICAAMPSKVVILRYNENLSKYCIRKEIETSEPCSCIHFTNYSILIGTNKFYEIDMKQYTLEEFLDKNDHSLAPAVFAASSNSFPVSIVQVNSAGQREEYLLCFHEFGVFVDSYGRRSRTDDLKWSRLPLAFAYREPYLFVTHFNSLEVIEIQARSSAGTPARAYLDIPNPRYLGPAISSGAIYLASSYQDKLRVICCKGNLVKESGTEHHRGPSTSRSSPNKRGPPTYNEHITKRVASSPAPPEGPSHPREPSTPHRYREGRTELRRDKSPGRPLEREKSPGRMLSTRRERSPGRLFEDSSRGRLPAGAVRTPLSQVNKVWDQSSV

SEQ ID NO: 15654 - protein, 82 aa, Artificial Sequence
  Synthetic polypeptide
SLHVSFFNCEVEGQRYFSYRTFAGMDEIRKTLGLVPGTWKSLGLLCRVWTPLPRLAPWKRNFSSKAKSYKTLRTSVTRWSRK

SEQ ID NO: 15655 - protein, 1608 aa, Artificial Sequence
  Synthetic polypeptide
NTWSSTWHMEKPWSVVSGLDSPAKTSSMEKKLLIKSKELQDSQDKCHKMEQEMTRLHRRVSEVEAVLSQKEVELKASETQRSLLEQDLATYITECSSLKRSLEQARMEVSQEDDKALQLLHDIREQSRKLQEIKEQEYQAQVEEMRLMMNQLEEDLVSARRRSDLYESELRESRLAAEEFKRKATECQHKLLKAKDQGKPEVGEYAKLEKINAEQQLKIQELQEKLEKAVKASTEATELLQNIRQAKERAERELEKLQNREDSSEGIRKKLVEAEELEEKHREAQVSAQHLEVHLKQKEQHYEEKIKVLDNQIKKDLADKETLENMMQRHEEEAHEKGKILSEQKAMINAMDSKIRSLEQRIVELSEANKLAANSSLFTQRNMKAQEEMISELRQQKFYLETQAGKLEAQNRKLEEQLEKISHQDHSDKNRLLELETRLREVSLEHEEQKLELKRQLTELQLSLQERESQLTALQAARAALESQLRQAKTELEETTAEAEEEIQALTAHRDEIQRKFDALRNSCTVITDLEEQLNQLTEDNAELNNQNFYLSKQLDEASGANDEIVQLRSEVDHLRREITEREMQLTSQKQTMEALKTTCTMLEEQVMDLEALNDELLEKERQWEAWRSVLGDEKSQFECRVRELQRMLDTEKQSRARADQRITESRQVVELAVKEHKAEILALQQALKEQKLKAESLSDKLNDLEKKHAMLEMNARSLQQKLETERELKQRLLEEQAKLQQQMDLQKNHIFRLTQGLQEALDRADLLKTERSDLEYQLENIQVLYSHEKVKMEGTISQQTKLIDFLQAKMDQPAKKKKGLFSRRKEDPALPTQVPLQYNELKLALEKEKARCAELEEALQKTRIELRSAREEAAHRKATDHPHPSTPATARQQIAMSAIVRSPEHQPSAMSLLAPPSSRRKESSTPEEFSRRLKERMHHNIPHRFNVGLNMRATKCAVCLDTVHFGRQASKCLECQVMCHPKCSTCLPATCGLPAEYATHFTEAFCRDKMNSPGLQTKEPSSSLHLEGWMKVPRNNKRGQQGWDRKYIVLEGSKVLIYDNEAREAGQRPVEEFELCLPDGDVSIHGAVGASELANTAKADVPYILKMESHPHTTCWPGRTLYLLAPSFPDKQRWVTALESVVAGGRVSREKAEADAKLLGNSLLKLEGDDRLDMNCTLPFSDQVVLVGTEEGLYALNVLKNSLTHVPGIGAVFQIYIIKDLEKLLMIAGEERALCLVDVKKVKQSLAQSHLPAQPDISPNIFEAVKGCHLFGAGKIENGLCICAAMPSKVVILRYNENLSKYCIRKEIETSEPCSCIHFTNYSILIGTNKFYEIDMKQYTLEEFLDKNDHSLAPAVFAASSNSFPVSIVQVNSAGQREEYLLCFHEFGVFVDSYGRRSRTDDLKWSRLPLAFAYREPYLFVTHFNSLEVIEIQARSSAGTPARAYLDIPNPRYLGPAISSGAIYLASSYQDKLRVICCKGNLVKESGTEHHRGPSTSRSSPNKRGPPTYNEHITKRVASSPAPPEGPSHPREPSTPHRYREGRTELRRDKSPGRPLEREKSPGRMLSTRRERSPGRLFEDSSRGRLPAGAVRTPLSQVNKVWDQSSV

SEQ ID NO: 15656 - protein, 1593 aa, Artificial Sequence
  Synthetic polypeptide
NTWSSTWHMEKPWSVVSGLDSPAKTSSMEKKLLIKSKELQDSQDKCHKMEQEMTRLHRRVSEVEAVLSQKEVELKASETQRSLLEQDLATYITECSSLKRSLEQARMEVSQEDDKALQLLHDIREQSRKLQEIKEQEYQAQVEEMRLMMNQLEEDLVSARRRSDLYESELRESRLAAEEFKRKATECQHKLLKAKDQGKPEVGEYAKLEKINAEQQLKIQELQEKLEKAVKASTEATELLQNIRQAKERAERELEKLQNREDSSEGIRKKLVEAEELEEKHREAQVSAQHLEVHLKQKEQHYEEKIKVLDNQIKKDLADKETLENMMQRHEEEAHEKGKILSEQKAMINAMDSKIRSLEQRIVELSEANKLAANSSLFTQRNMKAQEEMISELRQQKFYLETQAGKLEAQNRKLEEQLEKISHQDHSDKNRLLELETRLREVSLEHEEQKLELKRQLTELQLSLQERESQLTALQAARAALESQLRQAKTELEETTAEAEEEIQALTAHRDEIQRKFDALRNSCTVITDLEEQLNQLTEDNAELNNQNFYLSKQLDEASGANDEIVQLRSEVDHLRREITEREMQLTSQKQTMEALKTTCTMLEEQVMDLEALNDELLEKERQWEAWRSVLGDEKSQFECRVRELQRMLDTEKQSRARADQRITESRQVVELAVKEHKAEILALQQALKEQKLKAESLSDKLNDLEKKHAMLEMNARSLQQKLETERELKQRLLEEQAKLQQQMDLQKNHIFRLTQGLQEALDRADLLKTERSDLEYQLENIQVLYSHEKVKMEGTISQQTKLIDFLQAKMDQPAKKKKVPLQYNELKLALEKEKARCAELEEALQKTRIELRSAREEAAHRKATDHPHPSTPATARQQIAMSAIVRSPEHQPSAMSLLAPPSSRRKESSTPEEFSRRLKERMHHNIPHRFNVGLNMRATKCAVCLDTVHFGRQASKCLECQVMCHPKCSTCLPATCGLPAEYATHFTEAFCRDKMNSPGLQTKEPSSSLHLEGWMKVPRNNKRGQQGWDRKYIVLEGSKVLIYDNEAREAGQRPVEEFELCLPDGDVSIHGAVGASELANTAKADVPYILKMESHPHTTCWPGRTLYLLAPSFPDKQRWVTALESVVAGGRVSREKAEADAKLLGNSLLKLEGDDRLDMNCTLPFSDQVVLVGTEEGLYALNVLKNSLTHVPGIGAVFQIYIIKDLEKLLMIAGEERALCLVDVKKVKQSLAQSHLPAQPDISPNIFEAVKGCHLFGAGKIENGLCICAAMPSKVVILRYNENLSKYCIRKEIETSEPCSCIHFTNYSILIGTNKFYEIDMKQYTLEEFLDKNDHSLAPAVFAASSNSFPVSIVQVNSAGQREEYLLCFHEFGVFVDSYGRRSRTDDLKWSRLPLAFAYREPYLFVTHFNSLEVIEIQARSSAGTPARAYLDIPNPRYLGPAISSGAIYLASSYQDKLRVICCKGNLVKESGTEHHRGPSTSRSSPNKRGPPTYNEHITKRVASSPAPPEGPSHPREPSTPHRYREGRTELRRDKSPGRPLEREKSPGRMLSTRRERSPGRLFEDSSRGRLPAGAVRTPLSQVNKVWDQSSV

SEQ ID NO: 15657 - protein, 41 aa, Artificial Sequence
  Synthetic polypeptide
SQLLEKLKQENHLNPGGGGCREPRWCTALQPGRQSGGNHPL

SEQ ID NO: 15658 - protein, 49 aa, Artificial Sequence
  Synthetic polypeptide
TREAEVVVSRDGALHSSLGDRVGETTLYDSTADVSSFPRRDIRCPLCSL

SEQ ID NO: 15659 - protein, 2051 aa, Artificial Sequence
  Synthetic polypeptide
AEMVHCTPAWATEWGKPPFMTQQQMSPLSREGILDALFVLFEECSQPALMKIKHVSNFVRKYSDTIAELQELQPSAKDFEVRSLVGCGHFAEVQVVREKATGDIYAMKVMKKKALLAQEQVSFFEEERNILSRSTSPWIPQLQYAFQDKNHLYLVMEYQPGGDLLSLLNRYEDQLDENLIQFYLAELILAVHSVHLMGYVHRDIKPENILVDRTGHIKLVDFGSAAKMNSNKMVNAKLPIGTPDYMAPEVLTVMNGDGKGTYGLDCDWWSVGVIAYEMIYGRSPFAEGTSARTFNNIMNFQRFLKFPDDPKVSSDFLDLIQSLLCGQKERLKFEGLCCHPFFSKIDWNNIRNSPPPFVPTLKSDDDTSNFDEPEKNSWVSSSPCQLSPSGFSGEELPFVGFSYSKALGILGRSESVVSGLDSPAKTSSMEKKLLIKSKELQDSQDKCHKMEQEMTRLHRRVSEVEAVLSQKEVELKASETQRSLLEQDLATYITECSSLKRSLEQARMEVSQEDDKALQLLHDIREQSRKLQEIKEQEYQAQVEEMRLMMNQLEEDLVSARRRSDLYESELRESRLAAEEFKRKATECQHKLLKAKDQGKPEVGEYAKLEKINAEQQLKIQELQEKLEKAVKASTEATELLQNIRQAKERAERELEKLQNREDSSEGIRKKLVEAEERRHSLENKVKRLETMERRENRLKDDIQTKSQQIQQMADKILELEEKHREAQVSAQHLEVHLKQKEQHYEEKIKVLDNQIKKDLADKETLENMMQRHEEEAHEKGKILSEQKAMINAMDSKIRSLEQRIVELSEANKLAANSSLFTQRNMKAQEEMISELRQQKFYLETQAGKLEAQNRKLEEQLEKISHQDHSDKNRLLELETRLREVSLEHEEQKLELKRQLTELQLSLQERESQLTALQAARAALESQLRQAKTELEETTAEAEEEIQALTAHRDEIQRKFDALRNSCTVITDLEEQLNQLTEDNAELNNQNFYLSKQLDEASGANDEIVQLRSEVDHLRREITEREMQLTSQKQTMEALKTTCTMLEEQVMDLEALNDELLEKERQWEAWRSVLGDEKSQFECRVRELQRMLDTEKQSRARADQRITESRQVVELAVKEHKAEILALQQALKEQKLKAESLSDKLNDLEKKHAMLEMNARSLQQKLETERELKQRLLEEQAKLQQQMDLQKNHIFRLTQGLQEALDRADLLKTERSDLEYQLENIQVLYSHEKVKMEGTISQQTKLIDFLQAKMDQPAKKKKGLFSRRKEDPALPTQVPLQYNELKLALEKEKARCAELEEALQKTRIELRSAREEAAHRKATDHPHPSTPATARQQIAMSAIVRSPEHQPSAMSLLAPPSSRRKESSTPEEFSRRLKERMHHNIPHRFNVGLNMRATKCAVCLDTVHFGRQASKCLECQVMCHPKCSTCLPATCGLPAEYATHFTEAFCRDKMNSPGLQTKEPSSSLHLEGWMKVPRNNKRGQQGWDRKYIVLEGSKVLIYDNEAREAGQRPVEEFELCLPDGDVSIHGAVGASELANTAKADVPYILKMESHPHTTCWPGRTLYLLAPSFPDKQRWVTALESVVAGGRVSREKAEADAKLLGNSLLKLEGDDRLDMNCTLPFSDQVVLVGTEEGLYALNVLKNSLTHVPGIGAVFQIYIIKDLEKLLMIAGEERALCLVDVKKVKQSLAQSHLPAQPDISPNIFEAVKGCHLFGAGKIENGLCICAAMPSKVVILRYNENLSKYCIRKEIETSEPCSCIHFTNYSILIGTNKFYEIDMKQYTLEEFLDKNDHSLAPAVFAASSNSFPVSIVQVNSAGQREEYLLCFHEFGVFVDSYGRRSRTDDLKWSRLPLAFAYREPYLFVTHFNSLEVIEIQARSSAGTPARAYLDIPNPRYLGPAISSGAIYLASSYQDKLRVICCKGNLVKESGTEHHRGPSTSRSSPNKRGPPTYNEHITKRVASSPAPPEGPSHPREPSTPHRYREGRTELRRDKSPGRPLEREKSPGRMLSTRRERSPGRLFEDSSRGRLPAGAVRTPLSQVNKVWDQSSV

SEQ ID NO: 15660 - protein, 2009 aa, Artificial Sequence
  Synthetic polypeptide
AEMVHCTPAWATEWGKPPFMTQQQMSPLSREGILDALFVLFEECSQPALMKIKHVSNFVRKYSDTIAELQELQPSAKDFEVRSLVGCGHFAEVQVVREKATGDIYAMKVMKKKALLAQEQVSFFEEERNILSRSTSPWIPQLQYAFQDKNHLYLVMEYQPGGDLLSLLNRYEDQLDENLIQFYLAELILAVHSVHLMGYVHRDIKPENILVDRTGHIKLVDFGSAAKMNSNKMVNAKLPIGTPDYMAPEVLTVMNGDGKGTYGLDCDWWSVGVIAYEMIYGRSPFAEGTSARTFNNIMNFQRFLKFPDDPKVSSDFLDLIQSLLCGQKERLKFEGLCCHPFFSKIDWNNIRNSPPPFVPTLKSDDDTSNFDEPEKNSWVSSSPCQLSPSGFSGEELPFVGFSYSKALGILGRSESVVSGLDSPAKTSSMEKKLLIKSKELQDSQDKCHKMEQEMTRLHRRVSEVEAVLSQKEVELKASETQRSLLEQDLATYITECSSLKRSLEQARMEVSQEDDKALQLLHDIREQSRKLQEIKEQEYQAQVEEMRLMMNQLEEDLVSARRRSDLYESELRESRLAAEEFKRKATECQHKLLKAKDQGKPEVGEYAKLEKINAEQQLKIQELQEKLEKAVKASTEATELLQNIRQAKERAERELEKLQNREDSSEGIRKKLVEAEELEEKHREAQVSAQHLEVHLKQKEQHYEEKIKVLDNQIKKDLADKETLENMMQRHEEEAHEKGKILSEQKAMINAMDSKIRSLEQRIVELSEANKLAANSSLFTQRNMKAQEEMISELRQQKFYLETQAGKLEAQNRKLEEQLEKISHQDHSDKNRLLELETRLREVSLEHEEQKLELKRQLTELQLSLQERESQLTALQAARAALESQLRQAKTELEETTAEAEEEIQALTAHRDEIQRKFDALRNSCTVITDLEEQLNQLTEDNAELNNQNFYLSKQLDEASGANDEIVQLRSEVDHLRREITEREMQLTSQKQTMEALKTTCTMLEEQVMDLEALNDELLEKERQWEAWRSVLGDEKSQFECRVRELQRMLDTEKQSRARADQRITESRQVVELAVKEHKAEILALQQALKEQKLKAESLSDKLNDLEKKHAMLEMNARSLQQKLETERELKQRLLEEQAKLQQQMDLQKNHIFRLTQGLQEALDRADLLKTERSDLEYQLENIQVLYSHEKVKMEGTISQQTKLIDFLQAKMDQPAKKKKGLFSRRKEDPALPTQVPLQYNELKLALEKEKARCAELEEALQKTRIELRSAREEAAHRKATDHPHPSTPATARQQIAMSAIVRSPEHQPSAMSLLAPPSSRRKESSTPEEFSRRLKERMHHNIPHRFNVGLNMRATKCAVCLDTVHFGRQASKCLECQVMCHPKCSTCLPATCGLPAEYATHFTEAFCRDKMNSPGLQTKEPSSSLHLEGWMKVPRNNKRGQQGWDRKYIVLEGSKVLIYDNEAREAGQRPVEEFELCLPDGDVSIHGAVGASELANTAKADVPYILKMESHPHTTCWPGRTLYLLAPSFPDKQRWVTALESVVAGGRVSREKAEADAKLLGNSLLKLEGDDRLDMNCTLPFSDQVVLVGTEEGLYALNVLKNSLTHVPGIGAVFQIYIIKDLEKLLMIAGEERALCLVDVKKVKQSLAQSHLPAQPDISPNIFEAVKGCHLFGAGKIENGLCICAAMPSKVVILRYNENLSKYCIRKEIETSEPCSCIHFTNYSILIGTNKFYEIDMKQYTLEEFLDKNDHSLAPAVFAASSNSFPVSIVQVNSAGQREEYLLCFHEFGVFVDSYGRRSRTDDLKWSRLPLAFAYREPYLFVTHFNSLEVIEIQARSSAGTPARAYLDIPNPRYLGPAISSGAIYLASSYQDKLRVICCKGNLVKESGTEHHRGPSTSRSSPNKRGPPTYNEHITKRVASSPAPPEGPSHPREPSTPHRYREGRTELRRDKSPGRPLEREKSPGRMLSTRRERSPGRLFEDSSRGRLPAGAVRTPLSQVNKVWDQSSV

SEQ ID NO: 15661 - protein, 43 aa, Artificial Sequence
  Synthetic polypeptide
GLNEVWARAVYCCVLQTTLSQAATSPRSEWISRSGPWRSTGRR

SEQ ID NO: 15662 - protein, 94 aa, Artificial Sequence
  Synthetic polypeptide
MRCGQEQFTVAFCRQHFLRQLHHHDRSGFQDPDRGDQRGEGEAADLGHSGAGALPHHHLHVLSGDPRGHCGLRRHQCRVLCQRQAVASRNQPEL

SEQ ID NO: 15663 - protein, 78 aa, Artificial Sequence
  Synthetic polypeptide
MRCGQEQFTVAFCRQHFLRQLHHHDRSGFQDPDRGDQRGEGEAADLGHSGAGALPHHHLHCRVLCQRQAVASRNQPEL

SEQ ID NO: 15664 - protein, 65 aa, Artificial Sequence
  Synthetic polypeptide
ASVPSSEKWGCALLGGVRIRWDKVGKVWARAVYCCVLQTTLSQAATSPRSEWISRSGPWRSTGRR

SEQ ID NO: 15665 - protein, 94 aa, Artificial Sequence
  Synthetic polypeptide
EKCGQEQFTVAFCRQHFLRQLHHHDRSGFQDPDRGDQRGEGEAADLGHSGAGALPHHHLHVLSGDPRGHCGLRRHQCRVLCQRQAVASRNQPEL

SEQ ID NO: 15666 - protein, 187 aa, Artificial Sequence
  Synthetic polypeptide
SRKSVGKSSLLLRFADNTFSGSYITTIGVDFKIRTVEINGEKVKLQIWDTAGQERFRTITSTYYRGTHGVIVVYDVTSAESFVNVKRWLHEINQNCDDVCRILVGNKNDDPERKVVETEDAYKFAGQMGIQLFETSAKENVNVEEMFNCITELVLRAKKDNLAKQQQQQQNDVVKLTKNSKRKKRCC

SEQ ID NO: 15667 - protein, 96 aa, Artificial Sequence
  Synthetic polypeptide
SRKSVGKSSLLLRFADNTFSGSYITTIGVDFKIRTVEINGEKVKLQIWDTAGQERFRTITSTYYRGTHGVIVVYDVTSAESFVNVKRWLHEINQNC

SEQ ID NO: 15668 - protein, 138 aa, Artificial Sequence
  Synthetic polypeptide
SRKSVGKSSLLLRFADNTFSGSYITTIGVDFKIRTVEINGEKVKLQIWDTAGQERFRTITSTYYRGTHGVIVVYDVTSAESFVNVKRWLHEINQNCDDVCRILDVQLHHGAGPPSKERQPGKTAAATTERCGEAHEEQ

SEQ ID NO: 15669 - protein, 78 aa, Artificial Sequence
  Synthetic polypeptide
EKCGQEQFTVAFCRQHFLRQLHHHDRSGFQDPDRGDQRGEGEAADLGHSGAGALPHHHLHCRVLCQRQAVASRNQPEL

SEQ ID NO: 15670 - protein, 171 aa, Artificial Sequence
  Synthetic polypeptide
SRKSVGKSSLLLRFADNTFSGSYITTIGVDFKIRTVEINGEKVKLQIWDTAGQERFRTITSTAESFVNVKRWLHEINQNCDDVCRILVGNKNDDPERKVVETEDAYKFAGQMGIQLFETSAKENVNVEEMFNCITELVLRAKKDNLAKQQQQQQNDVVKLTKNSKRKKRCC

SEQ ID NO: 15671 - protein, 1881 aa, Artificial Sequence
  Synthetic polypeptide
GQGLYLVPTIFLPSGTVPGTIQEIKKKKGIKEEVQLTSKQKEMLQAQLDREAQVRRRLQELDGELEAALGLLDIILAKNPSGLTQYIPVLVDSFLPLLKSPLAAPRIKNPFLSLAACVMPSRLKALGTLVSHVTLRLLKPECVLDKSWCQEELSVAVKRAVMLLHTHTITSRVGKGEPGAAPLSAPAFSLVFPFLKMVLTEMPHHSEEEEEWMAQILQILTVQAQLRASPNTPPGRVDENGPELLPRVAMLRLLTWVIGTGSPRLQVLASDTLTTLCASSSGDDGCAFAEQEEVDVLLCALQSPCASVRETVLRGLMELHMVLPAPDTDEKNGLNLLRRLWVVKFDKEEEIRKLAERLWSMMGLDLQPDLCSLLIDDVIYHEAAVRQAGAEALSQAVARYQRQAAEVMGRLMEIYQEKLYRPPPVLDALGRVISESPPDQWEARCGLALALNKLSQYLDSSQVKPLFQFFVPDALNDRHPDVRKCMLDAALATLNTHGKENVNSLLPVFEEFLKNAPNDASYDAVRQSVVVLMGSLAKHLDKSDPKVKPIVAKLIAALSTPSQQVQESVASCLPPLVPAIKEDAGGMIQRLMQQLLESDKYAERKGAAYGLAGLVKGLGILSLKQQEMMAALTDAIQDKKNFRRREGALFAFEMLCTMLGKLFEPYVVHVLPHLLLCFGDGNQYVREAADDCAKAVMSNLSAHGVKLVLPSLLAALEEESWRTKAGSVELLGAMAYCAPKQLSSCLPNIVPKLTEVLTDSHVKVQKAGQQALRQIGSVIRNPEILAIAPVLLDALTDPSRKTQKCLQTLLDTKFVHFIDAPSLALIMPIVQRAFQDRSTDTRKMAAQIIGNMYSLTDQKDLAPYLPSVTPGLKASLLDPVPEVRTVSAKALGAMVKGMGESCFEDLLPWLMETLTYEQSSVDRSGAAQGLAEVMAGLGVEKLEKLMPEIVATASKVDIAPHVRDGYIMMFNYLPITFGDKFTPYVGPIIPCILKALADENEFVRDTALRAGQRVISMYAETAIALLLPQLEQGLFDDLWRIRFSSVQLLGDLLFHISGVTGKMTTETASEDDNFGTAQSNKAIITALGVERRNRVLAGLYMGRSDTQLVVRQASLHVWKIVVSNTPRTLREILPTLFGLLLGFLASTCADKRTIAARTLGDLVRKLGEKILPEIIPILEEGLRSQKSDERQGVCIGLSEIMKSTSRDAVLYFSESLVPTARKALCDPLEEVREAAAKTFEQLHSTIGHQALEDILPFLLKQLDDEEVSEFALDGLKQVMAIKSRVVLPYLVPKLTTPPVNTRVLAFLSSVAGDALTRHLGVILPAVMLALKEKLGTPDEQLEMANCQAVILSVEDDTGHRIIIEYLLEATRSPEVGMRQAAAIILNIYCSRSKADYTSHLRSLVSGLIRLFNDSSPVVLEESWDALNAITKKLDAGNQLALIEELHKEIRLIGNESKGEHVPGFCLPKKGVTSILPVLREGVLTGSPEQKEEAAKALGLVIRLTSADALRPSVVSITGPLIRILGDRFSWNVKAALLETLSLLLAKVGIALKPFLPQLQTTFTKALQDSNRGVRLKAADALGKLISIHIKVDPLFTELLNGIRAMEDPGVRDTMLQALRFVIQGAGAKVDAVIRKNIVSLLLSMLGHDEDNTRISSAGCLGELCAFLTEEELSAVLQQCLLADVSGIDWMVRHGRSLALSVAVNVAPGRLCAGRYSSDVQEMILSSATADRIPIAVSGVRGMGFLMRHHIETGGGQLPAKLSSLFVKCLQNPSSDIRLVAEKMIWWANKDPLPPLDPQAIKPILKALLDNTKDKNTVVRAYSDQAIVNLLKMRQGEEVFQSLSKILDVASLEVLNEVNRRSLKKLASQADSTEQVDDTILT

SEQ ID NO: 15672 - protein, 105 aa, Artificial Sequence
  Synthetic polypeptide
LFSLSLQGRILLVFLISVHMCASQRGGQLVHPIQSRPHPSSLLLNIIFVSLLTFIITQKHLVYVLVDLFIIYLRLLDCELREGRDFILFLRYSCHLEQCLAQSRR

SEQ ID NO: 15673 - protein, 126 aa, Artificial Sequence
  Synthetic polypeptide
IVSSVRAGTLSCSYDIPAIWNSAWHNPGDKEEERHQRGGAADQQAEGDAAGPARQGGAGPEAAAGAGWGAGGGAWTAGHHPGQEPVRPDPVHPCFGRLFSALAEVSPGCSQDQEPLLVLGCLCHAL

SEQ ID NO: 15674 - protein, 107 aa, Artificial Sequence
  Synthetic polypeptide
KYKKLGGSAVPALAGGAGWLPQARRGWCCEETHEAVEREPRAGGTVLVSHSQPRAQPELCWHAGAAGAVLHESQGDGRGQSAQERPTGLLHEEHPDEQSQASEVPVG

SEQ ID NO: 15675 - protein, 37 aa, Artificial Sequence
  Synthetic polypeptide
HGETPSLLKIQKIRWKCSACSCWRCWVAPTSTPWMVL

SEQ ID NO: 15676 - protein, 2540 aa, Artificial Sequence
  Synthetic polypeptide
GQEIETILANMVEVQCLLLLEVLGGSHKHAVDGAVKKLTKLWKENPGLVEQYLSAILSLEPNQNYAGMLGLLVQFCTSHKEMDVVSQHKSALLDFYMKNILMSKVKPPKYLLDSCAPLLRYLSHSEFKDLILPTIQKSLLRSPENVIETISSLLASVTLDLSQYAMDIVKGLAGHLKSNSPRLMDEAVLALRNLARQCSDSSAMESLTKHLFAILGGSEGKLTVVAQKMSVLSGIGSVSHHVVSGPSSQVLNGIVAELFIPFLQQEVHEGTLVHAVSVLALWCNRFTMEVPKKLTEWFKKAFSLKTSTSAVRHAYLQCMLASYRGDTLLQALDLLPLLIQTVEKAASQSTQVPTITEGVAAALLLLKLSVADSQAEAKLSSFWQLIVDEKKQVFTSEKFLVMASEDALCTVLHLTERLFLDHPHRLTGNKVQQYHRALVAVLLSRTWHVRRQAQQTVRKLLSSLGGFKLAHGLLEELKTVLSSHKVLPLEALVTDAGEVTEAGKAYVPPRVLQEALCVISGVPGLKGDVTDTEQLAQEMLIISHHPSLVAVQSGLWPALLARMKIDPEAFITRHLDQIIPRMTTQSPLNQSSMNAMGSLSVLSPDRVLPQLISTITASVQNPALRLVTREEFAIMQTPAGELYDKSIIQSAQQDSIKKANMKRENKAYSFKEQIIELELKEEIKKKKGIKEEVQLTSKQKEMLQAQLDREAQVRRRLQELDGELEAALGLLDIILAKNPSGLTQYIPVLVDSFLPLLKSPLAAPRIKNPFLSLAACVMPSRLKALGTLVSHVTLRLLKPECVLDKSWCQEELSVAVKRAVMLLHTHTITSRVGKGEPGAAPLSAPAFSLVFPFLKMVLTEMPHHSEEEEEWMAQILQILTVQAQLRASPNTPPGRVDENGPELLPRVAMLRLLTWVIGTGSPRLQVLASDTLTTLCASSSGDDGCAFAEQEEVDVLLCALQSPCASVRETVLRGLMELHMVLPAPDTDEKNGLNLLRRLWVVKFDKEEEIRKLAERLWSMMGLDLQPDLCSLLIDDVIYHEAAVRQAGAEALSQAVARYQRQAAEVMGRLMEIYQEKLYRPPPVLDALGRVISESPPDQWEARCGLALALNKLSQYLDSSQVKPLFQFFVPDALNDRHPDVRKCMLDAALATLNTHGKENVNSLLPVFEEFLKNAPNDASYDAVRQSVVVLMGSLAKHLDKSDPKVKPIVAKLIAALSTPSQQVQESVASCLPPLVPAIKEDAGGMIQRLMQQLLESDKYAERKGAAYGLAGLVKGLGILSLKQQEMMAALTDAIQDKKNFRRREGALFAFEMLCTMLGKLFEPYVVHVLPHLLLCFGDGNQYVREAADDCAKAVMSNLSAHGVKLVLPSLLAALEEESWRTKAGSVELLGAMAYCAPKQLSSCLPNIVPKLTEVLTDSHVKVQKAGQQALRQIGSVIRNPEILAIAPVLLDALTDPSRKTQKCLQTLLDTKFVHFIDAPSLALIMPIVQRAFQDRSTDTRKMAAQIIGNMYSLTDQKDLAPYLPSVTPGLKASLLDPVPEVRTVSAKALGAMVKGMGESCFEDLLPWLMETLTYEQSSVDRSGAAQGLAEVMAGLGVEKLEKLMPEIVATASKVDIAPHVRDGYIMMFNYLPITFGDKFTPYVGPIIPCILKALADENEFVRDTALRAGQRVISMYAETAIALLLPQLEQGLFDDLWRIRFSSVQLLGDLLFHISGVTGKMTTETASEDDNFGTAQSNKAIITALGVERRNRVLAGLYMGRSDTQLVVRQASLHVWKIVVSNTPRTLREILPTLFGLLLGFLASTCADKRTIAARTLGDLVRKLGEKILPEIIPILEEGLRSQKSDERQGVCIGLSEIMKSTSRDAVLYFSESLVPTARKALCDPLEEVREAAAKTFEQLHSTIGHQALEDILPFLLKQLDDEEVSEFALDGLKQVMAIKSRVVLPYLVPKLTTPPVNTRVLAFLSSVAGDALTRHLGVILPAVMLALKEKLGTPDEQLEMANCQAVILSVEDDTGHRIIIEYLLEATRSPEVGMRQAAAIILNIYCSRSKADYTSHLRSLVSGLIRLFNDSSPVVLEESWDALNAITKKLDAGNQLALIEELHKEIRLIGNESKGEHVPGFCLPKKGVTSILPVLREGVLTGSPEQKEEAAKALGLVIRLTSADALRPSVVSITGPLIRILGDRFSWNVKAALLETLSLLLAKVGIALKPFLPQLQTTFTKALQDSNRGVRLKAADALGKLISIHIKVDPLFTELLNGIRAMEDPGVRDTMLQALRFVIQGAGAKVDAVIRKNIVSLLLSMLGHDEDNTRISSAGCLGELCAFLTEEELSAVLQQCLLADVSGIDWMVRHGRSLALSVAVNVAPGRLCAGRYSSDVQEMILSSATADRIPIAVSGVRGMGFLMRHHIETGGGQLPAKLSSLFVKCLQNPSSDIRLVAEKMIWWANKDPLPPLDPQAIKPILKALLDNTKDKNTVVRAYSDQAIVNLLKMRQGEEVFQSLSKILDVASLEVLNEVNRRSLKKLASQADSTEQVDDTILT

SEQ ID NO: 15677 - protein, 47 aa, Artificial Sequence
  Synthetic polypeptide
SQHFGRPRRADHEVRRSRPSWLTWWKCSACSCWRCWVAPTSTPWMVL

SEQ ID NO: 15678 - protein, 103 aa, Artificial Sequence
  Synthetic polypeptide
HGGSAVPALAGGAGWLPQARRGWCCEETHEAVEREPRAGGTVLVSHSQPRAQPELCWHAGAAGAVLHESQGDGRGQSAQERPTGLLHEEHPDEQSQASEVPVG

SEQ ID NO: 15679 - protein, 35 aa, Artificial Sequence
  Synthetic polypeptide
NEVKTILILKGFRDTKAFCREGDNSQCKGTERNPQ

SEQ ID NO: 15680 - protein, 2666 aa, Artificial Sequence
  Synthetic polypeptide
KVSETLKRFAGKVTTASVKERREILSELGKCVAGKDLPEGAVKGLCKLFCLTLHRYRDAASRRALQAAIQQLAEAQPEATAKNLLHSLQSSGIGSKAGVPSKSSGSAALLALTWTCLLVRIVFPSRAKRQGDIWNKLVEVQCLLLLEVLGGSHKHAVDGAVKKLTKLWKENPGLVEQYLSAILSLEPNQNYAGMLGLLVQFCTSHKEMDVVSQHKSALLDFYMKNILMSKVKPPKYLLDSCAPLLRYLSHSEFKDLILPTIQKSLLRSPENVIETISSLLASVTLDLSQYAMDIVKGLAGHLKSNSPRLMDEAVLALRNLARQCSDSSAMESLTKHLFAILGGSEGKLTVVAQKMSVLSGIGSVSHHVVSGPSSQVLNGIVAELFIPFLQQEVHEGTLVHAVSVLALWCNRFTMEVPKKLTEWFKKAFSLKTSTSAVRHAYLQCMLASYRGDTLLQALDLLPLLIQTVEKAASQSTQVPTITEGVAAALLLLKLSVADSQAEAKLSSFWQLIVDEKKQVFTSEKFLVMASEDALCTVLHLTERLFLDHPHRLTGNKVQQYHRALVAVLLSRTWHVRRQAQQTVRKLLSSLGGFKLAHGLLEELKTVLSSHKVLPLEALVTDAGEVTEAGKAYVPPRVLQEALCVISGVPGLKGDVTDTEQLAQEMLIISHHPSLVAVQSGLWPALLARMKIDPEAFITRHLDQIIPRMTTQSPLNQSSMNAMGSLSVLSPDRVLPQLISTITASVQNPALRLVTREEFAIMQTPAGELYDKSIIQSAQQDSIKKANMKRENKAYSFKEQIIELELKEEIKKKKGIKEEVQLTSKQKEMLQAQLDREAQVRRRLQELDGELEAALGLLDIILAKNPSGLTQYIPVLVDSFLPLLKSPLAAPRIKNPFLSLAACVMPSRLKALGTLVSHVTLRLLKPECVLDKSWCQEELSVAVKRAVMLLHTHTITSRVGKGEPGAAPLSAPAFSLVFPFLKMVLTEMPHHSEEEEEWMAQILQILTVQAQLRASPNTPPGRVDENGPELLPRVAMLRLLTWVIGTGSPRLQVLASDTLTTLCASSSGDDGCAFAEQEEVDVLLCALQSPCASVRETVLRGLMELHMVLPAPDTDEKNGLNLLRRLWVVKFDKEEEIRKLAERLWSMMGLDLQPDLCSLLIDDVIYHEAAVRQAGAEALSQAVARYQRQAAEVMGRLMEIYQEKLYRPPPVLDALGRVISESPPDQWEARCGLALALNKLSQYLDSSQVKPLFQFFVPDALNDRHPDVRKCMLDAALATLNTHGKENVNSLLPVFEEFLKNAPNDASYDAVRQSVVVLMGSLAKHLDKSDPKVKPIVAKLIAALSTPSQQVQESVASCLPPLVPAIKEDAGGMIQRLMQQLLESDKYAERKGAAYGLAGLVKGLGILSLKQQEMMAALTDAIQDKKNFRRREGALFAFEMLCTMLGKLFEPYVVHVLPHLLLCFGDGNQYVREAADDCAKAVMSNLSAHGVKLVLPSLLAALEEESWRTKAGSVELLGAMAYCAPKQLSSCLPNIVPKLTEVLTDSHVKVQKAGQQALRQIGSVIRNPEILAIAPVLLDALTDPSRKTQKCLQTLLDTKFVHFIDAPSLALIMPIVQRAFQDRSTDTRKMAAQIIGNMYSLTDQKDLAPYLPSVTPGLKASLLDPVPEVRTVSAKALGAMVKGMGESCFEDLLPWLMETLTYEQSSVDRSGAAQGLAEVMAGLGVEKLEKLMPEIVATASKVDIAPHVRDGYIMMFNYLPITFGDKFTPYVGPIIPCILKALADENEFVRDTALRAGQRVISMYAETAIALLLPQLEQGLFDDLWRIRFSSVQLLGDLLFHISGVTGKMTTETASEDDNFGTAQSNKAIITALGVERRNRVLAGLYMGRSDTQLVVRQASLHVWKIVVSNTPRTLREILPTLFGLLLGFLASTCADKRTIAARTLGDLVRKLGEKILPEIIPILEEGLRSQKSDERQGVCIGLSEIMKSTSRDAVLYFSESLVPTARKALCDPLEEVREAAAKTFEQLHSTIGHQALEDILPFLLKQLDDEEVSEFALDGLKQVMAIKSRVVLPYLVPKLTTPPVNTRVLAFLSSVAGDALTRHLGVILPAVMLALKEKLGTPDEQLEMANCQAVILSVEDDTGHRIIIEYLLEATRSPEVGMRQAAAIILNIYCSRSKADYTSHLRSLVSGLIRLFNDSSPVVLEESWDALNAITKKLDAGNQLALIEELHKEIRLIGNESKGEHVPGFCLPKKGVTSILPVLREGVLTGSPEQKEEAAKALGLVIRLTSADALRPSVVSITGPLIRILGDRFSWNVKAALLETLSLLLAKVGIALKPFLPQLQTTFTKALQDSNRGVRLKAADALGKLISIHIKVDPLFTELLNGIRAMEDPGVRDTMLQALRFVIQGAGAKVDAVIRKNIVSLLLSMLGHDEDNTRISSAGCLGELCAFLTEEELSAVLQQCLLADVSGIDWMVRHGRSLALSVAVNVAPGRLCAGRYSSDVQEMILSSATADRIPIAVSGVRGMGFLMRHHIETGGGQLPAKLSSLFVKCLQNPSSDIRLVAEKMIWWANKDPLPPLDPQAIKPILKALLDNTKDKNTVVRAYSDQAIVNLLKMRQGEEVFQSLSKILDVASLEVLNEVNRRSLKKLASQADSTEQVDDTILT

SEQ ID NO: 15681 - protein, 11 aa, Artificial Sequence
  Synthetic polypeptide
NNTYLKRFPRH

SEQ ID NO: 15682 - protein, 108 aa, Artificial Sequence
  Synthetic polypeptide
KGFNELMDGVRNVASVCLQIGYPTVASVPHSIINGYKRVLALSVETDYTFPLAEKVKAFLADPSAFVAAAPVAAATTAAPAAAAAPAKVEAKEESEESDEDMGFGLFD

SEQ ID NO: 15683 - protein, 102 aa, Artificial Sequence
  Synthetic polypeptide
WMVSAMLPVSVCRLATQLLHQYPILSSTGTNESWPCLWRRITPSHLLKRSRPSWLIHLPLWLLPLWLLPPQLLLLLLQPQLRLKPRKSRRSRTRIWDLVSLT

SEQ ID NO: 15684 - protein, 48 aa, Artificial Sequence
  Synthetic polypeptide
INGWCPQCCQCLSADWLPNCCISTPFYHQRVQTSPGLVCGDGLHLPTC

SEQ ID NO: 15685 - protein, 86 aa, Artificial Sequence
  Synthetic polypeptide
KGFNELMDGVRNVASVCLQIGYPTVASVPHSIINGYKRVLALSVETDYTFPLAEKVKAFLADPSAFVAAAPVAAATTAAPAAAAAP

SEQ ID NO: 15686 - protein, 79 aa, Artificial Sequence
  Synthetic polypeptide
WMVSAMLPVSVCRLATQLLHQYPILSSTGTNESWPCLWRRITPSHLLKRSRPSWLIHLPLWLLPLWLLPPQLLLLLLQP

SEQ ID NO: 15687 - protein, 55 aa, Artificial Sequence
  Synthetic polypeptide
KGFNELMDGVRNVASVCLQIGYPTVASVPHSIINGYKRVLALSVETDYTFPLAEK

SEQ ID NO: 15688 - protein, 48 aa, Artificial Sequence
  Synthetic polypeptide
WMVSAMLPVSVCRLATQLLHQYPILSSTGTNESWPCLWRRITPSHLLK

SEQ ID NO: 15689 - protein, 38 aa, Artificial Sequence
  Synthetic polypeptide
KGFNELMDGVRNVASVCLQIGYPTVASVPHSIINGYKR

SEQ ID NO: 15690 - protein, 32 aa, Artificial Sequence
  Synthetic polypeptide
WMVSAMLPVSVCRLATQLLHQYPILSSTGTNE

SEQ ID NO: 15691 - protein, 33 aa, Artificial Sequence
  Synthetic polypeptide
INGWCPQCCQCLSADWLPNCCISTPFYHQRVQT

SEQ ID NO: 15692 - protein, 41 aa, Artificial Sequence
  Synthetic polypeptide
GHEHHDAQGHPRAPGKQPSSGETAASYPGECGLCVHQGGPH

SEQ ID NO: 15693 - protein, 262 aa, Artificial Sequence
  Synthetic polypeptide
GMNTMMRKAIRGHLENNPALEKLLPHIRGNVGFVFTKEDLTEIRDMLLANKVPAAARAGAIAPCEVTVPAQNTGLGPEKTSFFQALGITTKISRGTIEILSDVQLIKTGDKVGASEATLLNMLNISPFSFGLVIQQVFDNGSIYNPEVLDITEETLHSRFLEGVRNVASVCLQIGYPTVASVPHSIINGYKRVLALSVETDYTFPLAEKVKAFLADPSAFVAAAPVAAATTAAPAAAAAPAKVEAKEESEESDEDMGFGLFD

SEQ ID NO: 15694 - protein, 200 aa, Artificial Sequence
  Synthetic polypeptide
GMNTMMRKAIRGHLENNPALEKLLPHIRGNVGFVFTKEDLTEIRDMLLANKVPAAARAGAIAPCEVTVPAQNTGLGPEKTSFFQALGITTKISRGTIEILGVRNVASVCLQIGYPTVASVPHSIINGYKRVLALSVETDYTFPLAEKVKAFLADPSAFVAAAPVAAATTAAPAAAAAPAKVEAKEESEESDEDMGFGLFD

SEQ ID NO: 15695 - protein, 226 aa, Artificial Sequence
  Synthetic polypeptide
GMNTMMRKAIRGHLENNPALEKLLPHIRGNVGFVFTKEDLTEIRDMLLANKVPAAARAGAIAPCEVTVPAQNTGLGPEKTSFFQALGITTKISRGTIEILVFDNGSIYNPEVLDITEETLHSRFLEGVRNVASVCLQIGYPTVASVPHSIINGYKRVLALSVETDYTFPLAEKVKAFLADPSAFVAAAPVAAATTAAPAAAAAPAKVEAKEESEESDEDMGFGLFD

SEQ ID NO: 15696 - protein, 101 aa, Artificial Sequence
  Synthetic polypeptide
GMNTMMRKAIRGHLENNPALEKLLPHIRGNVGFVFTKEDLTEIRDMLLANKVPAAARAGAIAPCEVTVPAQNTGLGPEKTSFFQALGVYCPTIIWFRVMCS

SEQ ID NO: 15697 - protein, 191 aa, Artificial Sequence
  Synthetic polypeptide
GMNTMMRKAIRGHLENNPALEKLLPHIRGNVGFVFTKEDLTEIRDMLLANKSDVQLIKTGDKVGASEATLLNMLNISPFSFGLVIQQVFDNGSIYNPEVLDITEETLHSRFLEGVRNVASVCLQIGYPTVASVPHSIINGYKRVLALSVETDYTFPLAEKVKAFLADPSAFVAAAPVAAATTAAPAAAAAP

SEQ ID NO: 15698 - protein, 87 aa, Artificial Sequence
  Synthetic polypeptide
GMNTMMRKAIRGHLENNPALEKLLPHIRGNVGFVFTKEDLTEIRDMLLANKVPAAARAGAIAPCEVTVPAQNTGLGPEKTSFFQALE

SEQ ID NO: 15699 - protein, 209 aa, Artificial Sequence
  Synthetic polypeptide
GMNTMMRKAIRGHLENNPALEKLLPHIRGNVGFVFTKEDLTEIRDMLLANKVPAAARAGAIAPCEVTVPAQNTGLGPEKTSFFQALGITTKISRGTIEILSDVQLIKTGDKVGASEATLLNMLNISPFSFGLVIQQVFDNGSIYNPEVLDITEETLHSRFLEGVRNVASVCLQIGYPTVASVPHSIINGYKRVLALSVETDYTFPLAEK

SEQ ID NO: 15700 - protein, 111 aa, Artificial Sequence
  Synthetic polypeptide
GMNTMMRKAIRGHLENNPALEKLLPHIRGNVGFVFTKEDLTEIRDMLLANKVPAAARAGAIAPCEVTVPAQNTGLGPEKTSFFQALGITTKISRGTIEILVFTAPLLSGSE

SEQ ID NO: 15701 - protein, 192 aa, Artificial Sequence
  Synthetic polypeptide
GMNTMMRKAIRGHLENNPALEKLLPHIRGNVGFVFTKEDLTEIRDMLLANKVPAAARAGAIAPCEVTVPAQNTGLGPEKTSFFQALGITTKISRGTIEILSDVQLIKTGDKVGASEATLLNMLNISPFSFGLVIQQVFDNGSIYNPEVLDITEETLHSRFLEGVRNVASVCLQIGYPTVASVPHSIINGYKR

SEQ ID NO: 15702 - protein, 112 aa, Artificial Sequence
  Synthetic polypeptide
GMNTMMRKAIRGHLENNPALEKLLPHIRGNVGFVFTKEDLTEIRDMLLANKVPAAARAGAIAPCEVTVPAQNTGLGPEKTSFFQALGITTKISRGTIEILSDVQLIKTGDKV

SEQ ID NO: 15703 - protein, 70 aa, Artificial Sequence
  Synthetic polypeptide
GMNTMMRKAIRGHLENNPALEKLLPHIRGNVGFVFTKEDLTEIRDMLLANKVPAAARAGAIAPCEVTVPA

SEQ ID NO: 15704 - protein, 66 aa, Artificial Sequence
  Synthetic polypeptide
GMNTMMRKAIRGHLENNPALEKLLPHIRGNVGFVFTKEDLTEIRDMLLANKLLPVLVPLPHVKSLC

SEQ ID NO: 15705 - protein, 62 aa, Artificial Sequence
  Synthetic polypeptide
GGIPGDAADPHVPSREGCGADGQEHHDAQGHPRAPGKQPSSGETAASYPGECGLCVHQGGPH

SEQ ID NO: 15706 - protein, 299 aa, Artificial Sequence
  Synthetic polypeptide
WAWWHTPIVPAIHEAEVGSQEMQQIRMSLRGKAVVLMGKNTMMRKAIRGHLENNPALEKLLPHIRGNVGFVFTKEDLTEIRDMLLANKVPAAARAGAIAPCEVTVPAQNTGLGPEKTSFFQALGITTKISRGTIEILSDVQLIKTGDKVGASEATLLNMLNISPFSFGLVIQQVFDNGSIYNPEVLDITEETLHSRFLEGVRNVASVCLQIGYPTVASVPHSIINGYKRVLALSVETDYTFPLAEKVKAFLADPSAFVAAAPVAAATTAAPAAAAAPAKVEAKEESEESDEDMGFGLFD

SEQ ID NO: 15707 - protein, 27 aa, Artificial Sequence
  Synthetic polypeptide
FQLFMRLRWDPRRCSRSACPFAGRLWC

SEQ ID NO: 15708 - protein, 237 aa, Artificial Sequence
  Synthetic polypeptide
WAWWHTPIVPAIHEAEVGSQEMQQIRMSLRGKAVVLMGKNTMMRKAIRGHLENNPALEKLLPHIRGNVGFVFTKEDLTEIRDMLLANKVPAAARAGAIAPCEVTVPAQNTGLGPEKTSFFQALGITTKISRGTIEILGVRNVASVCLQIGYPTVASVPHSIINGYKRVLALSVETDYTFPLAEKVKAFLADPSAFVAAAPVAAATTAAPAAAAAPAKVEAKEESEESDEDMGFGLFD

SEQ ID NO: 15709 - protein, 263 aa, Artificial Sequence
  Synthetic polypeptide
WAWWHTPIVPAIHEAEVGSQEMQQIRMSLRGKAVVLMGKNTMMRKAIRGHLENNPALEKLLPHIRGNVGFVFTKEDLTEIRDMLLANKVPAAARAGAIAPCEVTVPAQNTGLGPEKTSFFQALGITTKISRGTIEILVFDNGSIYNPEVLDITEETLHSRFLEGVRNVASVCLQIGYPTVASVPHSIINGYKRVLALSVETDYTFPLAEKVKAFLADPSAFVAAAPVAAATTAAPAAAAAPAKVEAKEESEESDEDMGFGLFD

SEQ ID NO: 15710 - protein, 20 aa, Artificial Sequence
  Synthetic polypeptide
GGIPGDAADPHVPSREGCGA

SEQ ID NO: 15711 - protein, 36 aa, Artificial Sequence
  Synthetic polypeptide
WAWWHTPIVPAIHEAEVGSQEMQQIRMSLRGKAVVL

SEQ ID NO: 15712 - protein, 138 aa, Artificial Sequence
  Synthetic polypeptide
WAWWHTPIVPAIHEAEVGSQEMQQIRMSLRGKAVVLMGKNTMMRKAIRGHLENNPALEKLLPHIRGNVGFVFTKEDLTEIRDMLLANKVPAAARAGAIAPCEVTVPAQNTGLGPEKTSFFQALGVYCPTIIWFRVMCS

SEQ ID NO: 15713 - protein, 228 aa, Artificial Sequence
  Synthetic polypeptide
WAWWHTPIVPAIHEAEVGSQEMQQIRMSLRGKAVVLMGKNTMMRKAIRGHLENNPALEKLLPHIRGNVGFVFTKEDLTEIRDMLLANKSDVQLIKTGDKVGASEATLLNMLNISPFSFGLVIQQVFDNGSIYNPEVLDITEETLHSRFLEGVRNVASVCLQIGYPTVASVPHSIINGYKRVLALSVETDYTFPLAEKVKAFLADPSAFVAAAPVAAATTAAPAAAAAP

SEQ ID NO: 15714 - protein, 124 aa, Artificial Sequence
  Synthetic polypeptide
WAWWHTPIVPAIHEAEVGSQEMQQIRMSLRGKAVVLMGKNTMMRKAIRGHLENNPALEKLLPHIRGNVGFVFTKEDLTEIRDMLLANKVPAAARAGAIAPCEVTVPAQNTGLGPEKTSFFQALE

SEQ ID NO: 15715 - protein, 246 aa, Artificial Sequence
  Synthetic polypeptide
WAWWHTPIVPAIHEAEVGSQEMQQIRMSLRGKAVVLMGKNTMMRKAIRGHLENNPALEKLLPHIRGNVGFVFTKEDLTEIRDMLLANKVPAAARAGAIAPCEVTVPAQNTGLGPEKTSFFQALGITTKISRGTIEILSDVQLIKTGDKVGASEATLLNMLNISPFSFGLVIQQVFDNGSIYNPEVLDITEETLHSRFLEGVRNVASVCLQIGYPTVASVPHSIINGYKRVLALSVETDYTFPLAEK

SEQ ID NO: 15716 - protein, 148 aa, Artificial Sequence
  Synthetic polypeptide
WAWWHTPIVPAIHEAEVGSQEMQQIRMSLRGKAVVLMGKNTMMRKAIRGHLENNPALEKLLPHIRGNVGFVFTKEDLTEIRDMLLANKVPAAARAGAIAPCEVTVPAQNTGLGPEKTSFFQALGITTKISRGTIEILVFTAPLLSGSE

SEQ ID NO: 15717 - protein, 229 aa, Artificial Sequence
  Synthetic polypeptide
WAWWHTPIVPAIHEAEVGSQEMQQIRMSLRGKAVVLMGKNTMMRKAIRGHLENNPALEKLLPHIRGNVGFVFTKEDLTEIRDMLLANKVPAAARAGAIAPCEVTVPAQNTGLGPEKTSFFQALGITTKISRGTIEILSDVQLIKTGDKVGASEATLLNMLNISPFSFGLVIQQVFDNGSIYNPEVLDITEETLHSRFLEGVRNVASVCLQIGYPTVASVPHSIINGYKR

SEQ ID NO: 15718 - protein, 149 aa, Artificial Sequence
  Synthetic polypeptide
WAWWHTPIVPAIHEAEVGSQEMQQIRMSLRGKAVVLMGKNTMMRKAIRGHLENNPALEKLLPHIRGNVGFVFTKEDLTEIRDMLLANKVPAAARAGAIAPCEVTVPAQNTGLGPEKTSFFQALGITTKISRGTIEILSDVQLIKTGDKV

SEQ ID NO: 15719 - protein, 107 aa, Artificial Sequence
  Synthetic polypeptide
WAWWHTPIVPAIHEAEVGSQEMQQIRMSLRGKAVVLMGKNTMMRKAIRGHLENNPALEKLLPHIRGNVGFVFTKEDLTEIRDMLLANKVPAAARAGAIAPCEVTVPA

SEQ ID NO: 15720 - protein, 103 aa, Artificial Sequence
  Synthetic polypeptide
WAWWHTPIVPAIHEAEVGSQEMQQIRMSLRGKAVVLMGKNTMMRKAIRGHLENNPALEKLLPHIRGNVGFVFTKEDLTEIRDMLLANKLLPVLVPLPHVKSLC

SEQ ID NO: 15721 - protein, 632 aa, Artificial Sequence
  Synthetic polypeptide
SLLPSLPDPCRRPSSLSHLFHPSCRKQTWEASCTPHSFSISTQFPDALLADLESTTSHISKRPVFLSEETPYSYPTGNHTYQEIAVPPPVPPPPSSEALNGTILDPLDQWQPSSSRFIHQQPQSSSPVYGSSAKTSSVSNPQDSVGSPCSRVGEEEHVYSFPNKQKSAEPSPTVMSTSLGSNLSELDRLLLELNAVQHNPPGFPADEANSSPPLPGALSPLYGVPETNSPLGGKAGPLTKEKPKRNGGRGLEDVRPSVESLLDELESSVPSPVPAITVNQGEMSSPQRVTSTQQQTRISASSATRELDELMASLSDFKIQGLEQRADGERCWAAGWPRDGGRSSPGGQDEGGFMAQGKTGSSSPPGGPPKPGSQLDSMLGSLQSDLNKLGVATVAKGVCGACKKPIAGQVVTAMGKTWHPEHFVCTHCQEEIGSRNFFERDGQPYCEKDYHNLFSPRCYYCNGPILDKVVTALDRTWHPEHFFCAQCGAFFGPEGFHEKDGKAYCRKDYFDMFAPKCGGCARAILENYISALNTLWHPECFVCRECFTPFVNGSFFEHDGQPYCEVHYHERRGSLCSGCQKPITGRCITAMAKKFHPEHFVCAFCLKQLNKGTFKEQNDKPYCQNCFLKLFC

SEQ ID NO: 15722 - protein, 109 aa, Artificial Sequence
  Synthetic polypeptide
TPDPCYRHYLTPAADLLPCLICSIPPAGNKHGRHPALLTPSPYPLSFQTPCWRTWSLPPPTSPNGLCSCRRRPPTHTQLETTHTRRLPCHPPSPHPRPARPSMAQSLTP

SEQ ID NO: 15723 - protein, 96 aa, Artificial Sequence
  Synthetic polypeptide
PLPQTFFPVSSVPSLLQETNMGGILHSSLLLHIHSVSRRPAGGLGVYHLPHLQTACVLVGGDPLLIPNWKPHIPGDCRATPRPPTPVQRGPQWHNP

SEQ ID NO: 15724 - protein, 598 aa, Artificial Sequence
  Synthetic polypeptide
SLLPSLPDPCRRPSSLSHLFHPSCRKQTWEASCTPHSFSISTQFPDALLADLESTTSHISKRPVFLSEETPYSYPTGNHTYQEIAVPPPVPPPPSSEALNGTILDPLDQWQPSSSRFIHQQPQSSSPVYGSSAKTSSVSNPQDSVGSPCSRVGEEEHVYSFPNKQKSAEPSPTVMSTSLGSNLSELDRLLLELNAVQHNPPGFPADEANSSPPLPGALSPLYGVPETNSPLGGKAGPLTKEKPKRNGGRGLEDVRPSVESLLDELESSVPSPVPAITVNQGEMSSPQRVTSTQQQTRISASSATRELDELMASLSDFKFMAQGKTGSSSPPGGPPKPGSQLDSMLGSLQSDLNKLGVATVAKGVCGACKKPIAGQVVTAMGKTWHPEHFVCTHCQEEIGSRNFFERDGQPYCEKDYHNLFSPRCYYCNGPILDKVVTALDRTWHPEHFFCAQCGAFFGPEGFHEKDGKAYCRKDYFDMFAPKCGGCARAILENYISALNTLWHPECFVCRECFTPFVNGSFFEHDGQPYCEVHYHERRGSLCSGCQKPITGRCITAMAKKFHPEHFVCAFCLKQLNKGTFKEQNDKPYCQNCFLKLFC

SEQ ID NO: 15725 - protein, 646 aa, Artificial Sequence
  Synthetic polypeptide
SLLPSLPDPCRRPSSLSHLFHPSCRKQTWEASCTPHSFSISTQFPDALLADLESTTSHISKRPVFLSEETPYSYPTGNHTYQEIAVPPPVPPPPSSEALNGTILDPLDQWQPSSSRFIHQQPQSSSPVYGSSAKTSSVSNPQDSVGSPCSRVGEEEHVYSFPNKQKSAEPSPTVMSTSLGSNLSELDRLLLELNAVQHNPPGFPADEANSSPPLPGALSPLYGVPETNSPLGGKAGPLTKEKPKRNGGRGLEDVRPSVESLLDELESSVPSPVPAITVNQGEMSSPQRVTSTQQQTRISASSATRELDELMASLSDFKGSWPLEEVVLLVSISSSVQEGEKYPHPCAARHRTPSLRSPDQPPPCPQFMAQGKTGSSSPPGGPPKPGSQLDSMLGSLQSDLNKLGVATVAKGVCGACKKPIAGQVVTAMGKTWHPEHFVCTHCQEEIGSRNFFERDGQPYCEKDYHNLFSPRCYYCNGPILDKVVTALDRTWHPEHFFCAQCGAFFGPEGFHEKDGKAYCRKDYFDMFAPKCGGCARAILENYISALNTLWHPECFVCRECFTPFVNGSFFEHDGQPYCEVHYHERRGSLCSGCQKPITGRCITAMAKKFHPEHFVCAFCLKQLNKGTFKEQNDKPYCQNCFLKLFC

SEQ ID NO: 15726 - protein, 104 aa, Artificial Sequence
  Synthetic polypeptide
SLLPSLPDPCRRPSSLSHLFHPSCRKQTWEASCTPHSFSISTQFPDALLADLESTTSHISKRPVFLSEETPYSYPTGNHTYQEIAVPPPVPPPPSSEALNGTIL

SEQ ID NO: 15727 - protein, 107 aa, Artificial Sequence
  Synthetic polypeptide
TPDPCYRHYLTPAADLLPCLICSIPPAGNKHGRHPALLTPSPYPLSFQTPCWRTWSLPPPTSPNGLCSCRRRPPTHTQLETTHTRRLPCHPPSPHPRPARPSMAQSL

SEQ ID NO: 15728 - protein, 216 aa, Artificial Sequence
  Synthetic polypeptide
SLLPSLPDPCRRPSSLSHLFHPSCRKQTWEASCTPHSFSISTQFPDALLADLESTTSHISKRPVFLSEETPYSYPTGNHTYQEIAVPPPVPPPPSSEALNGTILDPLDQWQPSSSRFIHQQPQSSSPVYGSSAKTSSVSNPQDSVGSPCSRVGEEEHVYSFPNKQKSAEPSPTVMSTSLGSNLSELDRLLLELNAVQHNPPGFPADEANSSPPLPG

SEQ ID NO: 15729 - protein, 70 aa, Artificial Sequence
  Synthetic polypeptide
SGRLCPATPSGRRPAGGLGVYHLPHLQTACVLVGGDPLLIPNWKPHIPGDCRATPRPPTPVQRGPQWHNP

SEQ ID NO: 15730 - protein, 634 aa, Artificial Sequence
  Synthetic polypeptide
GAPLPGRHPVWDVRSTSARPPPHLGGVPLPGRPVCEVGASAQPPRLGDALLADLESTTSHISKRPVFLSEETPYSYPTGNHTYQEIAVPPPVPPPPSSEALNGTILDPLDQWQPSSSRFIHQQPQSSSPVYGSSAKTSSVSNPQDSVGSPCSRVGEEEHVYSFPNKQKSAEPSPTVMSTSLGSNLSELDRLLLELNAVQHNPPGFPADEANSSPPLPGALSPLYGVPETNSPLGGKAGPLTKEKPKRNGGRGLEDVRPSVESLLDELESSVPSPVPAITVNQGEMSSPQRVTSTQQQTRISASSATRELDELMASLSDFKIQGLEQRADGERCWAAGWPRDGGRSSPGGQDEGGFMAQGKTGSSSPPGGPPKPGSQLDSMLGSLQSDLNKLGVATVAKGVCGACKKPIAGQVVTAMGKTWHPEHFVCTHCQEEIGSRNFFERDGQPYCEKDYHNLFSPRCYYCNGPILDKVVTALDRTWHPEHFFCAQCGAFFGPEGFHEKDGKAYCRKDYFDMFAPKCGGCARAILENYISALNTLWHPECFVCRECFTPFVNGSFFEHDGQPYCEVHYHERRGSLCSGCQKPITGRCITAMAKKFHPEHFVCAFCLKQLNKGTFKEQNDKPYCQNCFLKLFC

SEQ ID NO: 15731 - protein, 95 aa, Artificial Sequence
  Synthetic polypeptide
GAPLPGRHPIWEECLYPAAPSVKWAPLPSHPVWETPCWRTWSLPPPTSPNGLCSCRRRPPTHTQLETTHTRRLPCHPPSPHPRPARPSMAQSLTP

SEQ ID NO: 15732 - protein, 600 aa, Artificial Sequence
  Synthetic polypeptide
GAPLPGRHPVWDVRSTSARPPPHLGGVPLPGRPVCEVGASAQPPRLGDALLADLESTTSHISKRPVFLSEETPYSYPTGNHTYQEIAVPPPVPPPPSSEALNGTILDPLDQWQPSSSRFIHQQPQSSSPVYGSSAKTSSVSNPQDSVGSPCSRVGEEEHVYSFPNKQKSAEPSPTVMSTSLGSNLSELDRLLLELNAVQHNPPGFPADEANSSPPLPGALSPLYGVPETNSPLGGKAGPLTKEKPKRNGGRGLEDVRPSVESLLDELESSVPSPVPAITVNQGEMSSPQRVTSTQQQTRISASSATRELDELMASLSDFKFMAQGKTGSSSPPGGPPKPGSQLDSMLGSLQSDLNKLGVATVAKGVCGACKKPIAGQVVTAMGKTWHPEHFVCTHCQEEIGSRNFFERDGQPYCEKDYHNLFSPRCYYCNGPILDKVVTALDRTWHPEHFFCAQCGAFFGPEGFHEKDGKAYCRKDYFDMFAPKCGGCARAILENYISALNTLWHPECFVCRECFTPFVNGSFFEHDGQPYCEVHYHERRGSLCSGCQKPITGRCITAMAKKFHPEHFVCAFCLKQLNKGTFKEQNDKPYCQNCFLKLFC

SEQ ID NO: 15733 - protein, 648 aa, Artificial Sequence
  Synthetic polypeptide
GAPLPGRHPVWDVRSTSARPPPHLGGVPLPGRPVCEVGASAQPPRLGDALLADLESTTSHISKRPVFLSEETPYSYPTGNHTYQEIAVPPPVPPPPSSEALNGTILDPLDQWQPSSSRFIHQQPQSSSPVYGSSAKTSSVSNPQDSVGSPCSRVGEEEHVYSFPNKQKSAEPSPTVMSTSLGSNLSELDRLLLELNAVQHNPPGFPADEANSSPPLPGALSPLYGVPETNSPLGGKAGPLTKEKPKRNGGRGLEDVRPSVESLLDELESSVPSPVPAITVNQGEMSSPQRVTSTQQQTRISASSATRELDELMASLSDFKGSWPLEEVVLLVSISSSVQEGEKYPHPCAARHRTPSLRSPDQPPPCPQFMAQGKTGSSSPPGGPPKPGSQLDSMLGSLQSDLNKLGVATVAKGVCGACKKPIAGQVVTAMGKTWHPEHFVCTHCQEEIGSRNFFERDGQPYCEKDYHNLFSPRCYYCNGPILDKVVTALDRTWHPEHFFCAQCGAFFGPEGFHEKDGKAYCRKDYFDMFAPKCGGCARAILENYISALNTLWHPECFVCRECFTPFVNGSFFEHDGQPYCEVHYHERRGSLCSGCQKPITGRCITAMAKKFHPEHFVCAFCLKQLNKGTFKEQNDKPYCQNCFLKLFC

SEQ ID NO: 15734 - protein, 106 aa, Artificial Sequence
  Synthetic polypeptide
GAPLPGRHPVWDVRSTSARPPPHLGGVPLPGRPVCEVGASAQPPRLGDALLADLESTTSHISKRPVFLSEETPYSYPTGNHTYQEIAVPPPVPPPPSSEALNGTIL

SEQ ID NO: 15735 - protein, 93 aa, Artificial Sequence
  Synthetic polypeptide
GAPLPGRHPIWEECLYPAAPSVKWAPLPSHPVWETPCWRTWSLPPPTSPNGLCSCRRRPPTHTQLETTHTRRLPCHPPSPHPRPARPSMAQSL

SEQ ID NO: 15736 - protein, 218 aa, Artificial Sequence
  Synthetic polypeptide
GAPLPGRHPVWDVRSTSARPPPHLGGVPLPGRPVCEVGASAQPPRLGDALLADLESTTSHISKRPVFLSEETPYSYPTGNHTYQEIAVPPPVPPPPSSEALNGTILDPLDQWQPSSSRFIHQQPQSSSPVYGSSAKTSSVSNPQDSVGSPCSRVGEEEHVYSFPNKQKSAEPSPTVMSTSLGSNLSELDRLLLELNAVQHNPPGFPADEANSSPPLPG

SEQ ID NO: 15737 - protein, 12 aa, Artificial Sequence
  Synthetic polypeptide
SQHFGRPSLSGV

SEQ ID NO: 15738 - protein, 276 aa, Artificial Sequence
  Synthetic polypeptide
PGAMVHTCNPSTLGGRVYQVFESVAKKYDVMNDMMSLGIHRVWKDLLLWKMHPLPGTQLLDVAGGTGDIAFRFLNYVQSQHQRKQKRQLRAQQNLSWEEIAKEYQNEEDSLGGSRVVVCDINKEMLKVGKQKALAQGYRAGLAWVLGDAEELPFDDDKFDIYTIAFGIRNVTHIDQALQEAHRVLKPGGRFLCLEFSQVNNPLISRLYDLYSFQVIPVLGEVIAGDWKSYQYLVESIRRFPSQEEFKDMIEDAGFHKVTYESLTSGIVAIHSGFKL

SEQ ID NO: 15739 - protein, 29 aa, Artificial Sequence
  Synthetic polypeptide
QVRWFTPVIPALWEAESIRCLKVWLRSMM

SEQ ID NO: 15740 - protein, 202 aa, Artificial Sequence
  Synthetic polypeptide
PGAMVHTCNPSTLGGRVYQVFESVAKKYDVMNDMMSLGIHRVWKDLLLWKMHPLPGTQLLDVAGGTGLAWVLGDAEELPFDDDKFDIYTIAFGIRNVTHIDQALQEAHRVLKPGGRFLCLEFSQVNNPLISRLYDLYSFQVIPVLGEVIAGDWKSYQYLVESIRRFPSQEEFKDMIEDAGFHKVTYESLTSGIVAIHSGFKL

SEQ ID NO: 15741 - protein, 66 aa, Artificial Sequence
  Synthetic polypeptide
PGAMVHTCNPSTLGGRVYQVFESVAKKYDVMNDMMSLGIHRVWKDLLLWKMHPLPGTQLLDVAGGT

SEQ ID NO: 15742 - protein, 8 aa, Artificial Sequence
  Synthetic polypeptide
SQHFGRLR

SEQ ID NO: 15743 - protein, 710 aa, Artificial Sequence
  Synthetic polypeptide
GRARWLMPVIPALWEAEVAEAQRAEFSPAQFSGPKKINLNHLLNFTFEPRGQTGHFEGSGHGSWGKRNKWGHKPFNKELFLQANCQFVVSEDQDYTAHFADPDTLVNWDFVEQVRICSHEVPSCPICLYPPTAAKITRCGHIFCWACILHYLSLSEKTWSKCPICYSSVHKKDLKSVVATESHQYVVGDTITMQLMKREKGVLVALPKSKWMNVDHPIHLGDEQHSQYSKLLLASKEQVLHRVVLEEKVALEQQLAEEKHTPESCFIEAAIQELKTREEALSGLAGSRREVTGVVAALEQLVLMAPLAKESVFQPRKGVLEYLSAFDEETTEVCSLDTPSRPLALPLVEEEEAVSEPEPEGLPEACDDLELADDNLKEGTICTESSQQEPITKSGFTRLSSSPCYYFYQAEDGQHMFLHPVNVRCLVREYGSLERSPEKISATVVEIAGYSMSEDVRQRHRYLSHLPLTCEFSICELALQPPVVSKETLEMFSDDIEKRKRQRQKKAREERRRERRIEIEENKKQGKYPEVHIPLENLQQFPAFNSYTCSSDSALGPTSTEGHGALSISPLSRSPGSHADFLLTPLSPTASQGSPSFCVGSLEEDSPFPSFAQMLRVGKAKADVWPKTAPKKDENSLVPPAPVDSDGESDNSDRVPVPSFQNSFSQAIEAAFMKLDTPATSDPLSEEKGGKKRKKQKQKLLFSTSVVHTK

SEQ ID NO: 15744 - protein, 715 aa, Artificial Sequence
  Synthetic polypeptide
GRARWLMPVIPALWEAEVAEAQRAEFSPAQFSGPKKINLNHLLNFTFEPRGQTGHFEGSGHGSWGKRNKWGHKPFNKELFLQANCQFVVSEDQDYTAHFADPDTLVNWDFVEQVRICSHEVPSCPICLYPPTAAKITRCGHIFCWACILHYLSLSEKTWSKCPICYSSVHKKDLKSVVATESHQYVVGDTITMQLMKREKGVLVALPKSKWMNVDHPIHLGDEQHSQYSKLLLASKEQVLHRVVLEEKVALEQQLAEEKHTPESCFIEAAIQELKTREEALSGLAGSRREVTGVVAALEQLVLMAPLAKESVFQPRKSLLQQGVLEYLSAFDEETTEVCSLDTPSRPLALPLVEEEEAVSEPEPEGLPEACDDLELADDNLKEGTICTESSQQEPITKSGFTRLSSSPCYYFYQAEDGQHMFLHPVNVRCLVREYGSLERSPEKISATVVEIAGYSMSEDVRQRHRYLSHLPLTCEFSICELALQPPVVSKETLEMFSDDIEKRKRQRQKKAREERRRERRIEIEENKKQGKYPEVHIPLENLQQFPAFNSYTCSSDSALGPTSTEGHGALSISPLSRSPGSHADFLLTPLSPTASQGSPSFCVGSLEEDSPFPSFAQMLRVGKAKADVWPKTAPKKDENSLVPPAPVDSDGESDNSDRVPVPSFQNSFSQAIEAAFMKLDTPATSDPLSEEKGGKKRKKQKQKLLFSTSVVHTK

SEQ ID NO: 15745 - protein, 73 aa, Artificial Sequence
  Synthetic polypeptide
GRARWLMPVIPALWEAEVAEAQRAEFSPAQFSGPKKINLNHLLNFTFEPRGQTGHFEGSGHGSWGKRNKWGHK

SEQ ID NO: 15746 - protein, 54 aa, Artificial Sequence
  Synthetic polypeptide
PWEAEVAVSQDRDTVLPAWATERDSISKKKKKTHSWNPRTGLKSSPHGHRAHLG

SEQ ID NO: 15747 - protein, 148 aa, Artificial Sequence
  Synthetic polypeptide
ARIVTPYSQPGQQSETPSQKKKKKLILGIPEQALSLLHMAIEPILADGAILDKGRAMFLVAKCQVASAASYDQPKKAEALEAAIENLNEAKNYFAKVDCKERIRDVVYFQARLYHTLGKTQERNRCAMLFRQLHQELPSHGVPLINHL

SEQ ID NO: 15748 - protein, 29 aa, Artificial Sequence
  Synthetic polypeptide
HRTPSLGNRARLHLKKKKKNSFLESQNRP

SEQ ID NO: 15749 - protein, 17 aa, Artificial Sequence
  Synthetic polypeptide
RLAWRVPRLCGLRAVGC

SEQ ID NO: 15750 - protein, 61 aa, Artificial Sequence
  Synthetic polypeptide
LLTWPVYQNYPGSFQKNSGAQAAPQTSEIRTSGPGTPGISIFKDLPGGCHVYVGFVLWAAE

SEQ ID NO: 15751 - protein, 414 aa, Artificial Sequence
  Synthetic polypeptide
PGLYIRITQGVFKKILVPRLHHRPVKSEPLGLGPQESVFLKTCLAGATSMWASCCGLLNEVMGTGAVRGQQSAFAGATGPFRFTPNPEFSTYPPAATEGPNIVCKACGLSFSVFRKKHVCCDCKKDFCSVCSVLQENLRRCSTCHLLQETAFQRPQLMRLKVKDLRQYLILRNIPIDTCREKEDLVDLVLCHHGLGSEDDMDTSSLNSSRSQTSSFFTRSFFSNYTAPSATMSSFQGELMDGDQTSRSGVPAQVQSEITSANTEDDDDDDDEDDDDEEENAEDRNPGLSKERVRASLSDLSSLDDVEGMSVRQLKEILARNFVNYSGCCEKWELVEKVNRLYKENEENQKSYGERLQLQDEEDDSLCRICMDAVIDCVLLECGHMVTCTKCGKRMSECPICRQYVVRAVHVFKS

SEQ ID NO: 15752 - protein, 549 aa, Artificial Sequence
  Synthetic polypeptide
PGLYIRITQGVFKKILVPRLHHRPVKSEPLGLGPQESVFLKTCLAGATSMWASCCGLLNEVMGTGAVRGQQSAFAGATGPFRFTPNPEFSTYPPAATEGPNIVCKACGLSFSVFRKKHVCCDCKKDFCSVCSVLQENLRRCSTCHLLQETAFQRPQLMRLKVKDLRQYLILRNIPIDTCREKEDLVDLVLCHHGLGSEDDMDTSSLNSSRSQTSSFFTRSFFSNYTAPSATMSSFQGELMDGDQTSRSGVPAQVQSEITSANTEDDDDDDDEDDDDEEENAEDRNPGLSKERVRASLSDLSSLDDVEGMSVRQLKEILARNFVNYSGCCEKWELVEKVNRLYKENEENQKSYGERLQLQDEEDDSLCRICMDAVIDCVLLECGHMVTCTKCGKRMRMSSCKGRLRNGPESSAVTIQKDQRKVSAHSSPKRVVEQLLPWKDLQNGIALWSVVPRSKWKIKALIFVKSLPSQSPPRIYILILGLTQFLQEFFFYLPKLDTHRHLGYELLTAFLGDLLAVPQVNMTDVSTAFEEGQALISDLIAVCREEIVM

SEQ ID NO: 15753 - protein, 387 aa, Artificial Sequence
  Synthetic polypeptide
GWARWLMPVIPALREAEAGATSMWASCCGLLNEVMGTGAVRGQQSAFAGATGPFRFTPNPEFSTYPPAATEGPNIVCKACGLSFSVFRKKHVCCDCKKDFCSVCSVLQENLRRCSTCHLLQETAFQRPQLMRLKVKDLRQYLILRNIPIDTCREKEDLVDLVLCHHGLGSEDDMDTSSLNSSRSQTSSFFTRSFFSNYTAPSATMSSFQGELMDGDQTSRSGVPAQVQSEITSANTEDDDDDDDEDDDDEEENAEDRNPGLSKERVRASLSDLSSLDDVEGMSVRQLKEILARNFVNYSGCCEKWELVEKVNRLYKENEENQKSYGERLQLQDEEDDSLCRICMDAVIDCVLLECGHMVTCTKCGKRMSECPICRQYVVRAVHVFKS

SEQ ID NO: 15754 - protein, 21 aa, Artificial Sequence
  Synthetic polypeptide
SQHFGRPRRVPRLCGLRAVGC

SEQ ID NO: 15755 - protein, 31 aa, Artificial Sequence
  Synthetic polypeptide
MGTVAHACNPSTSGGRGGCHVYVGFVLWAAE

SEQ ID NO: 15756 - protein, 522 aa, Artificial Sequence
  Synthetic polypeptide
GWARWLMPVIPALREAEAGATSMWASCCGLLNEVMGTGAVRGQQSAFAGATGPFRFTPNPEFSTYPPAATEGPNIVCKACGLSFSVFRKKHVCCDCKKDFCSVCSVLQENLRRCSTCHLLQETAFQRPQLMRLKVKDLRQYLILRNIPIDTCREKEDLVDLVLCHHGLGSEDDMDTSSLNSSRSQTSSFFTRSFFSNYTAPSATMSSFQGELMDGDQTSRSGVPAQVQSEITSANTEDDDDDDDEDDDDEEENAEDRNPGLSKERVRASLSDLSSLDDVEGMSVRQLKEILARNFVNYSGCCEKWELVEKVNRLYKENEENQKSYGERLQLQDEEDDSLCRICMDAVIDCVLLECGHMVTCTKCGKRMRMSSCKGRLRNGPESSAVTIQKDQRKVSAHSSPKRVVEQLLPWKDLQNGIALWSVVPRSKWKIKALIFVKSLPSQSPPRIYILILGLTQFLQEFFFYLPKLDTHRHLGYELLTAFLGDLLAVPQVNMTDVSTAFEEGQALISDLIAVCREEIVM

SEQ ID NO: 15757 - protein, 14 aa, Artificial Sequence
  Synthetic polypeptide
SQEFKTSLANKVLR

SEQ ID NO: 15758 - protein, 258 aa, Artificial Sequence
  Synthetic polypeptide
RFAGGSLEVRSSRPAWPTRCCDKRLWTRIDLNHCKSITPLMLSGIIRRQPVSLDLSWTNISKKQLSWLINRLPGLRDLVLSGCSWIAVSALCSSSCPLLRTLDVQWVEGLKDAQMRDLLSPPTDNRPGQMDNRSKLRNIVELRLAGLDITDASLRLIIRHMPLLSKLHLSYCNHVTDQSINLLTAVGTTTRDSLTEINLSDCNKVTDQCLSFFKRCGNICHIDLRYCKQVTKEGCEQFIAEMSSFQGRSCSTTRLGDE

SEQ ID NO: 15759 - protein, 41 aa, Artificial Sequence
  Synthetic polypeptide
PGAVAHACNPSALRADHLKSGVQDQPGQQGAAISGCGPALT

SEQ ID NO: 15760 - protein, 260 aa, Artificial Sequence
  Synthetic polypeptide
RFAGGSLEVRSSRPAWPTRCCDKRLWTRIDLNHCKSITPLMLSGIIRRQPVSLDLSWTNISKKQLSWLINRLPGLRDLVLSGCSWIAVSALCSSSCPLLRTLDVQWVEGLKDAQMRDLLSPPTDNRPGQMDNRSKLRNIVELRLAGLDITDASLRLIIRHMPLLSKLHLSYCNHVTDQSINLLTAVGTTTRDSLTEINLSDCNKVTDQCLSFFKRCGNICHIDLRYCKQVTKEGCEQFIAEMSVSVQFGQVEEKLLQKLS

SEQ ID NO: 15761 - protein, 24 aa, Artificial Sequence
  Synthetic polypeptide
AMIVPLHSSLGDRGAAQIPLPLLL

SEQ ID NO: 15762 - protein, 958 aa, Artificial Sequence
  Synthetic polypeptide
SCHCTPAWVTEVQPKFRYPFYYEMCWYVLERYVYCVTQRSHLTQEYQRESMLIDAPRKPSIDGFSSDSWLEMEEEACDQQPQEEEEKDEEGEGRDRAPKPPTDGSTSPTSTPSEDQEALGKKPKAPALRFLKRTLSNESEESVKSTTLAVDYPKTPTGSPATEVSAKWTHLTEFELKGLKALVEKLESLPENKKCVPEGIEDPQALLEGVKNVLKEHADDDPSLAITGVPVVTWPKKTPKNRAVGRPKGKLGPASAVKLAANRTTAGARRRRTRCRKCEACLRTECGECHFCKDMKKFGGPGRMKQSCIMRQCIAPVLPHTAVCLVCGEAGKEDTVEEEEGKFNLMLMECSICNEIIHPGCLKIKESEGVVNDELPNCWECPKCNHAGKTGKQKRGPGFKYASNLPGSLLKEQKMNRDNKEGQEPAKRRSECEEAPRRRSDEHSKKVPPDGLLRRKSDDVHLRKKRKYEKPQELSGRKRLKPGKEDKLFRKKRRSWKNAEDRMALANKPLRRFKQEPEDELPEAPPKTRESDHSRSSSPTAGPSTEGAEGPEEKKKVKMRRKRRLPNKELSRELSKELNHEIQRTENSLANENQQPIKSEPESEGEEPKRPPGICERPHRFSKGLNGTPRELRHQLGPSLRSPPRVISRPPPSVSPPKCIQMERHVIRPPPISPPPDSLPLDDGAAHVMHREVWMAVFSYLSHQDLCVCMRVCRTWNRWCCDKRLWTRIDLNHCKSITPLMLSGIIRRQPVSLDLSWTNISKKQLSWLINRLPGLRDLVLSGCSWIAVSALCSSSCPLLRTLDVQWVEGLKDAQMRDLLSPPTDNRPGQMDNRSKLRNIVELRLAGLDITDASLRLIIRHMPLLSKLHLSYCNHVTDQSINLLTAVGTTTRDSLTEINLSDCNKVTDQCLSFFKRCGNICHIDLRYCKQVTKEGCEQFIAEMSSFQGRSCSTTRLGDE

SEQ ID NO: 15763 - protein, 26 aa, Artificial Sequence
  Synthetic polypeptide
QRCSPNSVTPSTMRCAGMSWRDTCTV

SEQ ID NO: 15764 - protein, 998 aa, Artificial Sequence
  Synthetic polypeptide
SCHCTPAWVTEVQPKFRYPFYYEMCWYVLERYVYCVTQRSHLTQEYQRESMLIDAPRKPSIDGFSSDSWLEMEEEACDQQPQEEEEKDEEGEGRDRAPKPPTDGSTSPTSTPSEDQEALGKKPKAPALRFLKRTLSNESEESVKSTTLAVDYPKTPTGSPATEVSAKWTHLTEFELKGLKALVEKLESLPENKKCVPEGIEDPQALLEGVKNVLKEHADDDPSLAITGVPVVTWPKKTPKNRAVGRPKGKLGPASAVKLAANRTTAGARRRRTRCRKCEACLRTECGECHFCKDMKKFGGPGRMKQSCIMRQCIAPVLPHTAVCLVCGEAGKEDTVEEEEGKFNLMLMECSICNEIIHPGCLKIKESEGVVNDELPNCWECPKCNHAGKTGKQKRGPGFKYASNLPGSLLKEQKMNRDNKEGQEPAKRRSECEEAPRRRSDEHSKKVPPDGLLRRKSDDVHLRKKRKYEKPQELSGRKRASSLQTSPGSSSHLSPRPPLGSSLSPWWRSSLTYFQQQLKPGKEDKLFRKKRRSWKNAEDRMALANKPLRRFKQEPEDELPEAPPKTRESDHSRSSSPTAGPSTEGAEGPEEKKKVKMRRKRRLPNKELSRELSKELNHEIQRTENSLANENQQPIKSEPESEGEEPKRPPGICERPHRFSKGLNGTPRELRHQLGPSLRSPPRVISRPPPSVSPPKCIQMERHVIRPPPISPPPDSLPLDDGAAHVMHREVWMAVFSYLSHQDLCVCMRVCRTWNRWCCDKRLWTRIDLNHCKSITPLMLSGIIRRQPVSLDLSWTNISKKQLSWLINRLPGLRDLVLSGCSWIAVSALCSSSCPLLRTLDVQWVEGLKDAQMRDLLSPPTDNRPGQMDNRSKLRNIVELRLAGLDITDASLRLIIRHMPLLSKLHLSYCNHVTDQSINLLTAVGTTTRDSLTEINLSDCNKVTDQCLSFFKRCGNICHIDLRYCKQVTKEGCEQFIAEMSVSVQFGQVEEKLLQKLS

SEQ ID NO: 15765 - protein, 338 aa, Artificial Sequence
  Synthetic polypeptide
SCHCTPAWVTEVQPKFRYPFYYEMCWYVLERYVYCVTQRSHLTQEYQRESMLIDAPRKPSIDGFSSDSWLEMEEEACDQQPQEEEEKDEEGEGRDRAPKPPTDGSTSPTSTPSEDQEALGKKPKAPALRFLKRTLSNESEESVKSTTLAVDYPKTPTGSPATEVSAKWTHLTEFELKGLKALVEKLESLPENKKCVPEGIEDPQALLEGVKNVLKEHADDDPSLAITGVPVVTWPKKTPKNRAVGRPKGKLGPASAVKLAANRTTAGARRRRTRCRKCEACLRTECGECHFCKDMKKFGGPGRMKQSCIMRQCIATAIRSLISACPSSNAVETSVILT

SEQ ID NO: 15766 - protein, 259 aa, Artificial Sequence
  Synthetic polypeptide
SCHCTPAWVTEVQPKFRYPFYYEMCWYVLERYVYCVTQRSHLTQEYQRESMLIDAPRKPSIDGFSSDSWLEMEEEACDQQPQEEEEKDEEGEGRDRAPKPPTDGSTSPTSTPSEDQEALGKKPKAPALRFLKRTLSNESEESVKSTTLAVDYPKTPTGSPATEVSAKWTHLTEFELKGLKALVEKLESLPENKKCVPEGIEDPQALLEGVKNVLKEHADDDPSLAITGVPVVTWPKKTPKVRRSLPAAGGRFPPPSHLL

SEQ ID NO: 15767 - protein, 209 aa, Artificial Sequence
  Synthetic polypeptide
SCHCTPAWVTEVQPKFRYPFYYEMCWYVLERYVYCVTQRSHLTQEYQRESMLIDAPRKPSIDGFSSDSWLEMEEEACDQQPQEEEEKDEEGEGRDRAPKPPTDGSTSPTSTPSEDQEALGKKPKAPALRFLKRTLSNESEESVKSTTLAVDYPKTPTGSPATEVSAKWTHLTEFELKGLKALVEKLESLPENKKCVPEGIEDPQALLEG

SEQ ID NO: 15768 - protein, 85 aa, Artificial Sequence
  Synthetic polypeptide
SCHCTPAWVTEVQPKFRYPFYYEMCWYVLERYVYCVTQRSHLTQEYQRESMLIDAPRKPSIDGFSSDSWLEMEEEACDQQPQEEE

SEQ ID NO: 15769 - protein, 64 aa, Artificial Sequence
  Synthetic polypeptide
SCHCTPAWVTEVQPKFRYPFYYEMCWYVLERYVYCVTQRSHLTQEYQRESMLIDAPRKPSIDGF

SEQ ID NO: 15770 - protein, 47 aa, Artificial Sequence
  Synthetic polypeptide
SCHCTPAWVTEVQPKFRYPFYYEMCWYVLERYVYCVTQRSHLTQEYQ

SEQ ID NO: 15771 - protein, 36 aa, Artificial Sequence
  Synthetic polypeptide
SCHCTPAWVTEVQPKFRYPFYYEMCWYVLERYVYCV

SEQ ID NO: 15772 - protein, 28 aa, Artificial Sequence
  Synthetic polypeptide
LCDVSWLDPCRLHPCRLFGVRRKHPAQL

SEQ ID NO: 15773 - protein, 1008 aa, Artificial Sequence
  Synthetic polypeptide
MALDSKDDWKALGLAADSVTLAGWIHAVYTPVDSLVFGGNILHSFNVPMQLRIYEIEDRTRVQPKFRYPFYYEMCWYVLERYVYCVTQRSHLTQEYQRESMLIDAPRKPSIDGFSSDSWLEMEEEACDQQPQEEEEKDEEGEGRDRAPKPPTDGSTSPTSTPSEDQEALGKKPKAPALRFLKRTLSNESEESVKSTTLAVDYPKTPTGSPATEVSAKWTHLTEFELKGLKALVEKLESLPENKKCVPEGIEDPQALLEGVKNVLKEHADDDPSLAITGVPVVTWPKKTPKNRAVGRPKGKLGPASAVKLAANRTTAGARRRRTRCRKCEACLRTECGECHFCKDMKKFGGPGRMKQSCIMRQCIAPVLPHTAVCLVCGEAGKEDTVEEEEGKFNLMLMECSICNEIIHPGCLKIKESEGVVNDELPNCWECPKCNHAGKTGKQKRGPGFKYASNLPGSLLKEQKMNRDNKEGQEPAKRRSECEEAPRRRSDEHSKKVPPDGLLRRKSDDVHLRKKRKYEKPQELSGRKRLKPGKEDKLFRKKRRSWKNAEDRMALANKPLRRFKQEPEDELPEAPPKTRESDHSRSSSPTAGPSTEGAEGPEEKKKVKMRRKRRLPNKELSRELSKELNHEIQRTENSLANENQQPIKSEPESEGEEPKRPPGICERPHRFSKGLNGTPRELRHQLGPSLRSPPRVISRPPPSVSPPKCIQMERHVIRPPPISPPPDSLPLDDGAAHVMHREVWMAVFSYLSHQDLCVCMRVCRTWNRWCCDKRLWTRIDLNHCKSITPLMLSGIIRRQPVSLDLSWTNISKKQLSWLINRLPGLRDLVLSGCSWIAVSALCSSSCPLLRTLDVQWVEGLKDAQMRDLLSPPTDNRPGQMDNRSKLRNIVELRLAGLDITDASLRLIIRHMPLLSKLHLSYCNHVTDQSINLLTAVGTTTRDSLTEINLSDCNKVTDQCLSFFKRCGNICHIDLRYCKQVTKEGCEQFIAEMSSFQGRSCSTTRLGDE

SEQ ID NO: 15774 - protein, 10 aa, Artificial Sequence
  Synthetic polypeptide
LVGSMPSTPL

SEQ ID NO: 15775 - protein, 1048 aa, Artificial Sequence
  Synthetic polypeptide
MALDSKDDWKALGLAADSVTLAGWIHAVYTPVDSLVFGGNILHSFNVPMQLRIYEIEDRTRVQPKFRYPFYYEMCWYVLERYVYCVTQRSHLTQEYQRESMLIDAPRKPSIDGFSSDSWLEMEEEACDQQPQEEEEKDEEGEGRDRAPKPPTDGSTSPTSTPSEDQEALGKKPKAPALRFLKRTLSNESEESVKSTTLAVDYPKTPTGSPATEVSAKWTHLTEFELKGLKALVEKLESLPENKKCVPEGIEDPQALLEGVKNVLKEHADDDPSLAITGVPVVTWPKKTPKNRAVGRPKGKLGPASAVKLAANRTTAGARRRRTRCRKCEACLRTECGECHFCKDMKKFGGPGRMKQSCIMRQCIAPVLPHTAVCLVCGEAGKEDTVEEEEGKFNLMLMECSICNEIIHPGCLKIKESEGVVNDELPNCWECPKCNHAGKTGKQKRGPGFKYASNLPGSLLKEQKMNRDNKEGQEPAKRRSECEEAPRRRSDEHSKKVPPDGLLRRKSDDVHLRKKRKYEKPQELSGRKRASSLQTSPGSSSHLSPRPPLGSSLSPWWRSSLTYFQQQLKPGKEDKLFRKKRRSWKNAEDRMALANKPLRRFKQEPEDELPEAPPKTRESDHSRSSSPTAGPSTEGAEGPEEKKKVKMRRKRRLPNKELSRELSKELNHEIQRTENSLANENQQPIKSEPESEGEEPKRPPGICERPHRFSKGLNGTPRELRHQLGPSLRSPPRVISRPPPSVSPPKCIQMERHVIRPPPISPPPDSLPLDDGAAHVMHREVWMAVFSYLSHQDLCVCMRVCRTWNRWCCDKRLWTRIDLNHCKSITPLMLSGIIRRQPVSLDLSWTNISKKQLSWLINRLPGLRDLVLSGCSWIAVSALCSSSCPLLRTLDVQWVEGLKDAQMRDLLSPPTDNRPGQMDNRSKLRNIVELRLAGLDITDASLRLIIRHMPLLSKLHLSYCNHVTDQSINLLTAVGTTTRDSLTEINLSDCNKVTDQCLSFFKRCGNICHIDLRYCKQVTKEGCEQFIAEMSVSVQFGQVEEKLLQKLS

SEQ ID NO: 15776 - protein, 388 aa, Artificial Sequence
  Synthetic polypeptide
MALDSKDDWKALGLAADSVTLAGWIHAVYTPVDSLVFGGNILHSFNVPMQLRIYEIEDRTRVQPKFRYPFYYEMCWYVLERYVYCVTQRSHLTQEYQRESMLIDAPRKPSIDGFSSDSWLEMEEEACDQQPQEEEEKDEEGEGRDRAPKPPTDGSTSPTSTPSEDQEALGKKPKAPALRFLKRTLSNESEESVKSTTLAVDYPKTPTGSPATEVSAKWTHLTEFELKGLKALVEKLESLPENKKCVPEGIEDPQALLEGVKNVLKEHADDDPSLAITGVPVVTWPKKTPKNRAVGRPKGKLGPASAVKLAANRTTAGARRRRTRCRKCEACLRTECGECHFCKDMKKFGGPGRMKQSCIMRQCIATAIRSLISACPSSNAVETSVILT

SEQ ID NO: 15777 - protein, 259 aa, Artificial Sequence
  Synthetic polypeptide
MALDSKDDWKALGLAADSVTLAGWIHAVYTPVDSLVFGGNILHSFNVPMQLRIYEIEDRTRVQPKFRYPFYYEMCWYVLERYVYCVTQRSHLTQEYQRESMLIDAPRKPSIDGFSSDSWLEMEEEACDQQPQEEEEKDEEGEGRDRAPKPPTDGSTSPTSTPSEDQEALGKKPKAPALRFLKRTLSNESEESVKSTTLAVDYPKTPTGSPATEVSAKWTHLTEFELKGLKALVEKLESLPENKKCVPEGIEDPQALLEG

SEQ ID NO: 15778 - protein, 135 aa, Artificial Sequence
  Synthetic polypeptide
MALDSKDDWKALGLAADSVTLAGWIHAVYTPVDSLVFGGNILHSFNVPMQLRIYEIEDRTRVQPKFRYPFYYEMCWYVLERYVYCVTQRSHLTQEYQRESMLIDAPRKPSIDGFSSDSWLEMEEEACDQQPQEEE

SEQ ID NO: 15779 - protein, 114 aa, Artificial Sequence
  Synthetic polypeptide
MALDSKDDWKALGLAADSVTLAGWIHAVYTPVDSLVFGGNILHSFNVPMQLRIYEIEDRTRVQPKFRYPFYYEMCWYVLERYVYCVTQRSHLTQEYQRESMLIDAPRKPSIDGF

SEQ ID NO: 15780 - protein, 97 aa, Artificial Sequence
  Synthetic polypeptide
MALDSKDDWKALGLAADSVTLAGWIHAVYTPVDSLVFGGNILHSFNVPMQLRIYEIEDRTRVQPKFRYPFYYEMCWYVLERYVYCVTQRSHLTQEYQ

SEQ ID NO: 15781 - protein, 66 aa, Artificial Sequence
  Synthetic polypeptide
MALDSKDDWKALGLAADSVTLAGWIHAVYTPVDSLVFGGNILHSFNVPMQLRIYEIEDRTREKNKL

SEQ ID NO: 15782 - protein, 24 aa, Artificial Sequence
  Synthetic polypeptide
LCDVSWLDPCRLHPCRLFGVRRKH

SEQ ID NO: 15783 - protein, 40 aa, Artificial Sequence
  Synthetic polypeptide
MALDSKDDWKALGLAADSVTLAGWIHAVYTPVDSLVFGGN

SEQ ID NO: 15784 - protein, 55 aa, Artificial Sequence
  Synthetic polypeptide
GRARWLTPVIPALWEAEKPLNVTVIRRGEKHQLRLVPTRWAGKGLLGCNIIPLQR

SEQ ID NO: 15785 - protein, 10 aa, Artificial Sequence
  Synthetic polypeptide
SQHFGRLRSP

SEQ ID NO: 15786 - protein, 20 aa, Artificial Sequence
  Synthetic polypeptide
GRARWLTPVIPALWEAEKPL

SEQ ID NO: 15787 - protein, 54 aa, Artificial Sequence
  Synthetic polypeptide
GRARWLTPVIPALWEAEPLNVTVIRRGEKHQLRLVPTRWAGKGLLGCNIIPLQR

SEQ ID NO: 15788 - protein, 9 aa, Artificial Sequence
  Synthetic polypeptide
SQHFGRLSP

SEQ ID NO: 15789 - protein, 19 aa, Artificial Sequence
  Synthetic polypeptide
GRARWLTPVIPALWEAEPL

SEQ ID NO: 15790 - protein, 873 aa, Artificial Sequence
  Synthetic polypeptide
GRAWWLMPVISAQAVAKEAEGHANIISCLCVSEDRRWIATADKGPDCLVIIWDSFTGIPVHTIFDSCPEGNGIMAMAMTHDAKYLATISDAEVQKVCIWKWTLAVETPACTLELPTEYGVQNYVTFNPTNNKELVSNSKTRAIYYAWYEERDTLAHSAPLLTEKTFNKLVGKFSQSIFHLNLTQILSATMEGKLVVWDIHRPPSSASTFLGFPYIKPCKLVHLQKEGITVLTTIDSYIVTGDIKGNIKFYDHTLSIVNWYSHLKLGAIRTLSFSKTPATPPTEKSNYPPDCTLKGDLFVLRNFIIGTSDAAVYHLTTDGTKLEKLFVEPKDAICAISCHPYQPLIAIGSICGMIKVWNYENKQYLFSRVFEKGLGVQSLTYNPEGALLGAGFTEGTVYILDAMSLENESPEPFKYSRTSVTHISFSHDSQYMATADRSFTVAVYMLVVRNGQRVWEYLARLRSHRKSIRSLLFGVYLDSNEPRLLSLGTDRLLIEYDLLRSYKDHLEVLDIHHTDQGCYPTCMVWYPPLTRELFLLICNSGYKVKLFNATTKMCRKTLLGPAYGSPIEQTQVLPVRSMAELQKRYLVFINRDKVGLQILPVDGNPHKTSAIVCHPNGVAGMAVSYDGCYAFTAGGHDRSVVQWKITLSVLEAAVSLGGEDLTPFYGLLSGGREGKFYRELEDYFYYSQLRSQGIDTMETRKVSEHICLSELPFVMRAIGFYPSEEKIDDIFNEIKFGEYVDTGKLIDKINLPDFLKVYLNHKPPFGNTMSGIHKSFEVLGYTNSKGKKAIRREDFLRLLVTKGEHMTEEEMLDCFASLFGLNPEGWKSEPATCSVKGSEICLEEELPDEITAEIFATEILGLTISEDSGQDGQ

SEQ ID NO: 15791 - protein, 39 aa, Artificial Sequence
  Synthetic polypeptide
FQHRLWPRRLRATPILSPASASVKTGGGSPQQTKGQTAW

SEQ ID NO: 15792 - protein, 665 aa, Artificial Sequence
  Synthetic polypeptide
GRAWWLMPVISAQAVAKEAEGHANIISCLCVSEDRRWIATADKGPDCLVIIWDSFTGIPVHTIFDSCPEGNGIMAMAMTHDAKYLATISDAEVQKVCIWKWTLAVETPACTLELPTEYGVQNYVTFNPTNNKELVSNSKTRAIYYAWYEERDTLAHSAPLLTEKTFNKLVGKFSQSIFHLNLTQILSATMEGKLVVWDIHRPPSSASTFLGFPYIKPCKLVHLQKEGITVLTTIDSYIVTGDIKGNIKFYDHTLSIVNWYSHLKLGAIRTLSFSKTPATPPTEKSNYPPDCTLKGDLFVLRNFIIGTSDAAVYHLTTDGTKLEKLFVEPKDAICAISCHPYQPLIAIGSICGMIKVWNYENKQYLFSRVFEKGLGVQSLTYNPEGALLGAGFTEGTVYILDAMSLENESPEPFKYSRTSVTHISFSHDSQYMATADRSFTVAVYMLVVRNGQRVWEYLARLRSHRKSIRSLLFGVYLDSNEPRLLSLGTDRLLIEYDLLRSYKDHLEVLDIHHTDQGCYPTCMVWYPPLTRELFLLICNSGYKVKLFNATTKMCRKTLLGPAYGSPIEQTQVLPVRSMAELQKRYLVFINRDKVGLQILPVDGNPHKTSAIVCHPNGVAGMAVSYDGCYAFTAGGHDRSVVQWKITLSHPGSQAPILSPSDTSRS

SEQ ID NO: 15793 - protein, 26 aa, Artificial Sequence
  Synthetic polypeptide
EVQKFALKKNFQTKSLQKYSRLKFLA

SEQ ID NO: 15794 - protein, 43 aa, Artificial Sequence
  Synthetic polypeptide
GVPLPGRDPVWEVRSVSARPPRLRSEETLCLATTPSEKFRNLP

SEQ ID NO: 15795 - protein, 51 aa, Artificial Sequence
  Synthetic polypeptide
EVRRPSAWQPPRLRSSEICLEEELPDEITAEIFATEILGLTISEDSGQDGQ

SEQ ID NO: 15796 - protein, 13 aa, Artificial Sequence
  Synthetic polypeptide
EAEEGGSRGRRNG

SEQ ID NO: 15797 - protein, 21 aa, Artificial Sequence
  Synthetic polypeptide
SQHFRRPRREDHEGEEMGDRW

SEQ ID NO: 15798 - protein, 222 aa, Artificial Sequence
  Synthetic polypeptide
PGTLAHTCNPSTLGGRGGRITREKKWVTVGDTSLRIYKWVPVTEPKVDDKNKNKKKGKDEKCGSEVTTPENSSSPGMMDMHDDNSNQSSIADASPIKQENSSNSSPAPEPNSAVPSDGTEAKVDEAQADGKEHPGAEDASDEQNSQSSMEHSMNSSEKVDRQPSGDSGLAAETSAISQVPRSRSQRGSQIGREPIGLSGDLEGVPPSKKMKLEASQQNSEEM

SEQ ID NO: 15799 - protein, 201 aa, Artificial Sequence
  Synthetic polypeptide
PGTLAHTCNPSTLGGRGGRITREKKWVTVGDTSLRIYKWVPVTEPKVDDKNKNKKKGKDEKCGSEVTTPENSSSPGMMDMHDDNSNQSSIADASPIKQENSSNSSPAPEPNSAVPSDGTEAKVDEAQADGKEHPGAEDASDEQNSQSSMEHSMNSSEKVDRQPSGDSGLAAETSAISQDLEGVPPSKKMKLEASQQNSEEM

SEQ ID NO: 15800 - protein, 90 aa, Artificial Sequence
  Synthetic polypeptide
RTPQEMFLSASCVQEDCLGTITATRAPSQMPPPSNRRTAATPAPLQSPTRLCPATAPRPRWMRPRLMGRSTQELKMLLMSRIHSPRWNIR

SEQ ID NO: 15801 - protein, 20 aa, Artificial Sequence
  Synthetic polypeptide
EPRRRCFSQPRVSRKIVWAR

SEQ ID NO: 15802 - protein, 159 aa, Artificial Sequence
  Synthetic polypeptide
NPAGDVSLSLVCPGRLFGHDNSNQSSIADASPIKQENSSNSSPAPEPNSAVPSDGTEAKVDEAQADGKEHPGAEDASDEQNSQSSMEHSMNSSEKVDRQPSGDSGLAAETSAISQVPRSRSQRGSQIGREPIGLSGDLEGVPPSKKMKLEASQQNSEEM

SEQ ID NO: 15803 - protein, 138 aa, Artificial Sequence
  Synthetic polypeptide
NPAGDVSLSLVCPGRLFGHDNSNQSSIADASPIKQENSSNSSPAPEPNSAVPSDGTEAKVDEAQADGKEHPGAEDASDEQNSQSSMEHSMNSSEKVDRQPSGDSGLAAETSAISQDLEGVPPSKKMKLEASQQNSEEM

SEQ ID NO: 15804 - protein, 35 aa, Artificial Sequence
  Synthetic polypeptide
AEIAPLYSSLGGYSFRKVTYNGTGERPSIESTGSS

SEQ ID NO: 15805 - protein, 890 aa, Artificial Sequence
  Synthetic polypeptide
LLRRLRQENRLNPGGGGCSELRSHHCTPAWVATVSEKSRIMELEKDLALRVQEVAELRRRLESNKPAGDVDMSLSLLQEISSLQEKLEVTRTDHQREITSLKEHFGAREETHQKEIKALYTATEKLSKENESLKSKLEHANKENSDVIALWKSKLETAIASHQQAMEELKVSFSKGLGTETAEFAELKTQIEKMRLDYQHEIENLQNQQDSERAAHAKEMEALRAKLMKVIKEKENSLEAIRSKLDKAEDQHLVEMEDTLNKLQEAEIKASSITRELQGRELKLTNLQENLSEVSQVKETLEKELQILKEKFAEASEEAVSVQRSMQETVNKLHQKEEQFNMLSSDLEKLRENLADMEAKFREKDEREEQLIKAKEKLENDIAEIMKMSGDNSSQLTKMNDELRLKERDVEELQLKLTKANENASFLQKSIEDMTVKAEQSQQEAAKKHEEEKKELERKLSDLEKKMETSHNQCQELKARYERATSETKTKHEEILQNLQKTLLDTEDKLKGAREENSGLLQELEELRKQADKAKAAQTAEDAMQIMEQMTKEKTETLASLEDTKQTNAKLQNELDTLKENNLKNVEELNKSKELLTVENQKMEEFRKEIETLKQAAAQKSQQLSALQEENVKLAEELGRSRDEVTSHQKLEEERSVLNNQLLEMKKRESKFIKDADEEKASLQKSISITSALLTEKDAELEKLRNEVTVLRGENASAKSLHSVVQTLESDKVKLELKVKNLELQLKENKRQLSSSSGNTDTQADEDERAQESQIDFLNSVIVDLQRKNQDLKMKVEMMSEAALNGNGDDLNNYDSDDQEKQSKKKPRLFCDICDCFDLHDTEDCPTQAQMSEDPPHSTHHGSRGEERPYCEICEMFGHWATNCNDDETF

SEQ ID NO: 15806 - protein, 18 aa, Artificial Sequence
  Synthetic polypeptide
DRTIVLQPGWLQFQKSHV

SEQ ID NO: 15807 - protein, 851 aa, Artificial Sequence
  Synthetic polypeptide
LLRRLRQENRLNPGGGGCSELRSHHCTPAWVATVSEKSRIMELEKDLALRVQEVAELRRRLESNKPAGDVDMSLSLLQEISSLQEKLEVTRTDHQREITSLKEHFGAREETHQKEIKALYTATEKLSKENESLKSKLEHANKENSDVIALWKSKLETAIASHQQAMEELKVSFSKGLGTETAEFAELKTQIEKMRLDYQHEIENLQNQQDSERAAHAKEMEALRAKLMKVIKEKENSLEAIRSKLDKAEDQHLVEMEDTLNKLQEAEIKKEKFAEASEEAVSVQRSMQETVNKLHQKEEQFNMLSSDLEKLRENLADMEAKFREKDEREEQLIKAKEKLENDIAEIMKMSGDNSSQLTKMNDELRLKERDVEELQLKLTKANENASFLQKSIEDMTVKAEQSQQEAAKKHEEEKKELERKLSDLEKKMETSHNQCQELKARYERATSETKTKHEEILQNLQKTLLDTEDKLKGAREENSGLLQELEELRKQADKAKAAQTAEDAMQIMEQMTKEKTETLASLEDTKQTNAKLQNELDTLKENNLKNVEELNKSKELLTVENQKMEEFRKEIETLKQAAAQKSQQLSALQEENVKLAEELGRSRDEVTSHQKLEEERSVLNNQLLEMKKRESKFIKDADEEKASLQKSISITSALLTEKDAELEKLRNEVTVLRGENASAKSLHSVVQTLESDKVKLELKVKNLELQLKENKRQLSSSSGNTDTQADEDERAQESQIDFLNSVIVDLQRKNQDLKMKVEMMSEAALNGNGDDLNNYDSDDQEKQSKKKPRLFCDICDCFDLHDTEDCPTQAQMSEDPPHSTHHGSRGEERPYCEICEMFGHWATNCNDDETF

SEQ ID NO: 15808 - protein, 966 aa, Artificial Sequence
  Synthetic polypeptide
LLRRLRQENRLNPGGGGCSELRSHHCTPAWVATVSEKSRIMELEKDLALRVQEVAELRRRLESNKPAGDVDMSLSLLQEISSLQEKLEVTRTDHQREITSLKEHFGAREETHQKEIKALYTATEKLSKENESLKSKLEHANKENSDVIALWKSKLETAIASHQQAMEELKVSFSKGLGTETAEFAELKTQIEKMRLDYQHEIENLQNQQDSERAAHAKEMEALRAKLMKVIKEKENSLEAIRSKLDKAEDQHLVEMEDTLNKLQEAEIKVKELEVLQAKCNEQTKVIDNFTSQLKATEEKLLDLDALRKASSEGKSEMKKLRQQLEAAEKQIKHLEIEKNAESSKASSITRELQGRELKLTNLQENLSEVSQVKETLEKELQILKEKFAEASEEAVSVQRSMQETVNKLHQKEEQFNMLSSDLEKLRENLADMEAKFREKDEREEQLIKAKEKLENDIAEIMKMSGDNSSQLTKMNDELRLKERDVEELQLKLTKANENASFLQKSIEDMTVKAEQSQQEAAKKHEEEKKELERKLSDLEKKMETSHNQCQELKARYERATSETKTKHEEILQNLQKTLLDTEDKLKGAREENSGLLQELEELRKQADKAKAAQTAEDAMQIMEQMTKEKTETLASLEDTKQTNAKLQNELDTLKENNLKNVEELNKSKELLTVENQKMEEFRKEIETLKQAAAQKSQQLSALQEENVKLAEELGRSRDEVTSHQKLEEERSVLNNQLLEMKKRESKFIKDADEEKASLQKSISITSALLTEKDAELEKLRNEVTVLRGENASAKSLHSVVQTLESDKVKLELKVKNLELQLKENKRQLSSSSGNTDTQADEDERAQESQIDFLNSVIVDLQRKNQDLKMKVEMMSEAALNGNGDDLNNYDSDDQEKQSKKKPRLFCDICDCFDLHDTEDCPTQAQMSEDPPHSTHHGSRGEERPYCEICEMFGHWATNCNDDETF

SEQ ID NO: 15809 - protein, 408 aa, Artificial Sequence
  Synthetic polypeptide
LLRRLRQENRLNPGGGGCSELRSHHCTPAWVATVSEKSRIMELEKDLALRVQEVAELRRRLESNKPAGDVDMSLSLLQEISSLQEKLEVTRTDHQREITSLKEHFGAREETHQKEIKALYTATEKLSKENESLKSKLEHANKENSDVIALWKSKLETAIASHQQAMEELKVSFSKGLGTETAEFAELKTQIEKMRLDYQHEIENLQNQQDSERAAHAKEMEALRAKLMKVIKEKENSLEAIRSKLDKAEDQHLVEMEDTLNKLQEAEIKASSITRELQGRELKLTNLQENLSEVSQVKETLEKELQILKEKFAEASEEAVSVQRSMQETVNKLHQKEEQFNMLSSDLEKLRENLADMEAKFREKDEREEQLIKAKEKLENDIAEIMKMSGDNSSQLTKMNDELRLKER

SEQ ID NO: 15810 - protein, 1114 aa, Artificial Sequence
  Synthetic polypeptide
GQVPWLMPVIPALWESQVGGTKAGVVRFLGETDFAKGEWCGVELDEPLGKNDGAVAGTRYFQCQPKYGLFAPVHKVTKIGFPSTTPAKAKANAVRRVMATTSASLKRSPSASSLSSMSSVASSVSSRPSRTGLLTETSSRYARKISGTTALQEALKEKQQHIEQLLAERDLERAEVAKATSHVGEIEQELALARDGHDQHVLELEAKMDQLRTMVEAADREKVELLNQLEEEKRKVEDLQFRVEEESITKGDLEVATVSEKSRIMELEKDLALRVQEVAELRRRLESNKPAGDVDMSLSLLQEISSLQEKLEVTRTDHQREITSLKEHFGAREETHQKEIKALYTATEKLSKENESLKSKLEHANKENSDVIALWKSKLETAIASHQQAMEELKVSFSKGLGTETAEFAELKTQIEKMRLDYQHEIENLQNQQDSERAAHAKEMEALRAKLMKVIKEKENSLEAIRSKLDKAEDQHLVEMEDTLNKLQEAEIKASSITRELQGRELKLTNLQENLSEVSQVKETLEKELQILKEKFAEASEEAVSVQRSMQETVNKLHQKEEQFNMLSSDLEKLRENLADMEAKFREKDEREEQLIKAKEKLENDIAEIMKMSGDNSSQLTKMNDELRLKERDVEELQLKLTKANENASFLQKSIEDMTVKAEQSQQEAAKKHEEEKKELERKLSDLEKKMETSHNQCQELKARYERATSETKTKHEEILQNLQKTLLDTEDKLKGAREENSGLLQELEELRKQADKAKAAQTAEDAMQIMEQMTKEKTETLASLEDTKQTNAKLQNELDTLKENNLKNVEELNKSKELLTVENQKMEEFRKEIETLKQAAAQKSQQLSALQEENVKLAEELGRSRDEVTSHQKLEEERSVLNNQLLEMKKRESKFIKDADEEKASLQKSISITSALLTEKDAELEKLRNEVTVLRGENASAKSLHSVVQTLESDKVKLELKVKNLELQLKENKRQLSSSSGNTDTQADEDERAQESQIDFLNSVIVDLQRKNQDLKMKVEMMSEAALNGNGDDLNNYDSDDQEKQSKKKPRLFCDICDCFDLHDTEDCPTQAQMSEDPPHSTHHGSRGEERPYCEICEMFGHWATNCNDDETF

SEQ ID NO: 15811 - protein, 15 aa, Artificial Sequence
  Synthetic polypeptide
SQHFGSPRLVALRLV

SEQ ID NO: 15812 - protein, 20 aa, Artificial Sequence
  Synthetic polypeptide
PGAVAHACNPSTLGVPGWWH

SEQ ID NO: 15813 - protein, 1225 aa, Artificial Sequence
  Synthetic polypeptide
GQVPWLMPVIPALWESQVGGTKAGVVRFLGETDFAKGEWCGVELDEPLGKNDGAVAGTRYFQCQPKYGLFAPVHKVTKIGFPSTTPAKAKANAVRRVMATTSASLKRSPSASSLSSMSSVASSVSSRPSRTGLLTETSSRYARKISGTTALQEALKEKQQHIEQLLAERDLERAEVAKATSHVGEIEQELALARDGHDQHVLELEAKMDQLRTMVEAADREKVELLNQLEEEKRKVEDLQFRVEEESITKGDLETQTKLEHARIKELEQSLLFEKTKADKLQRELEDTRVATVSEKSRIMELEKDLALRVQEVAELRRRLESNKPAGDVDMSLSLLQEISSLQEKLEVTRTDHQREITSLKEHFGAREETHQKEIKALYTATEKLSKENESLKSKLEHANKENSDVIALWKSKLETAIASHQQAMEELKVSFSKGLGTETAEFAELKTQIEKMRLDYQHEIENLQNQQDSERAAHAKEMEALRAKLMKVIKEKENSLEAIRSKLDKAEDQHLVEMEDTLNKLQEAEIKVKELEVLQAKCNEQTKVIDNFTSQLKATEEKLLDLDALRKASSEGKSEMKKLRQQLEAAEKQIKHLEIEKNAESSKASSITRELQGRELKLTNLQENLSEVSQVKETLEKELQILKEKFAEASEEAVSVQRSMQETVNKLHQKEEQFNMLSSDLEKLRENLADMEAKFREKDEREEQLIKAKEKLENDIAEIMKMSGDNSSQLTKMNDELRLKERDVEELQLKLTKANENASFLQKSIEDMTVKAEQSQQEAAKKHEEEKKELERKLSDLEKKMETSHNQCQELKARYERATSETKTKHEEILQNLQKTLLDTEDKLKGAREENSGLLQELEELRKQADKAKAAQTAEDAMQIMEQMTKEKTETLASLEDTKQTNAKLQNELDTLKENNLKNVEELNKSKELLTVENQKMEEFRKEIETLKQAAAQKSQQLSALQEENVKLAEELGRSRDEVTSHQKLEEERSVLNNQLLEMKKRESKFIKDADEEKASLQKSISITSALLTEKDAELEKLRNEVTVLRGENASAKSLHSVVQTLESDKVKLELKVKNLELQLKENKRQLSSSSGNTDTQADEDERAQESQIDFLNSVIVDLQRKNQDLKMKVEMMSEAALNGNGDDLNNYDSDDQEKQSKKKPRLFCDICDCFDLHDTEDCPTQAQMSEDPPHSTHHGSRGEERPYCEICEMFGHWATNCNDDETF

SEQ ID NO: 15814 - protein, 1190 aa, Artificial Sequence
  Synthetic polypeptide
GQVPWLMPVIPALWESQVGGTKAGVVRFLGETDFAKGEWCGVELDEPLGKNDGAVAGTRYFQCQPKYGLFAPVHKVTKIGFPSTTPAKAKANAVRRVMATTSASLKRSPSASSLSSMSSVASSVSSRPSRTGLLTETSSRYARKISGTTALQEALKEKQQHIEQLLAERDLERAEVAKATSHVGEIEQELALARDGHDQHVLELEAKMDQLRTMVEAADREKVELLNQLEEEKRKVEDLQFRVEEESITKGDLEVATVSEKSRIMELEKDLALRVQEVAELRRRLESNKPAGDVDMSLSLLQEISSLQEKLEVTRTDHQREITSLKEHFGAREETHQKEIKALYTATEKLSKENESLKSKLEHANKENSDVIALWKSKLETAIASHQQAMEELKVSFSKGLGTETAEFAELKTQIEKMRLDYQHEIENLQNQQDSERAAHAKEMEALRAKLMKVIKEKENSLEAIRSKLDKAEDQHLVEMEDTLNKLQEAEIKVKELEVLQAKCNEQTKVIDNFTSQLKATEEKLLDLDALRKASSEGKSEMKKLRQQLEAAEKQIKHLEIEKNAESSKASSITRELQGRELKLTNLQENLSEVSQVKETLEKELQILKEKFAEASEEAVSVQRSMQETVNKLHQKEEQFNMLSSDLEKLRENLADMEAKFREKDEREEQLIKAKEKLENDIAEIMKMSGDNSSQLTKMNDELRLKERDVEELQLKLTKANENASFLQKSIEDMTVKAEQSQQEAAKKHEEEKKELERKLSDLEKKMETSHNQCQELKARYERATSETKTKHEEILQNLQKTLLDTEDKLKGAREENSGLLQELEELRKQADKAKAAQTAEDAMQIMEQMTKEKTETLASLEDTKQTNAKLQNELDTLKENNLKNVEELNKSKELLTVENQKMEEFRKEIETLKQAAAQKSQQLSALQEENVKLAEELGRSRDEVTSHQKLEEERSVLNNQLLEMKKRESKFIKDADEEKASLQKSISITSALLTEKDAELEKLRNEVTVLRGENASAKSLHSVVQTLESDKVKLELKVKNLELQLKENKRQLSSSSGNTDTQADEDERAQESQIDFLNSVIVDLQRKNQDLKMKVEMMSEAALNGNGDDLNNYDSDDQEKQSKKKPRLFCDICDCFDLHDTEDCPTQAQMSEDPPHSTHHGSRGEERPYCEICEMFGHWATNCNDDETF

SEQ ID NO: 15815 - protein, 1236 aa, Artificial Sequence
  Synthetic polypeptide
GQVPWLMPVIPALWESQVGGTKAGVVRFLGETDFAKGEWCGVELDEPLGKNDGAVAGTRYFQCQPKYGLFAPVHKVTKIGFPSTTPAKAKANAVRRVMATTSASLKRSPSASSLSSMSSVASSVSSRPSRTGLLTETSSRYARKISGTTALQEALKEKQQHIEQLLAERDLERAEVAKATSHVGEIEQELALARDGHDQHVLELEAKMDQLRTMVEAADREKVELLNQLEEEKRKVEDLQFRVEEESITKGDLEQKSQISEDPENTQTKLEHARIKELEQSLLFEKTKADKLQRELEDTRVATVSEKSRIMELEKDLALRVQEVAELRRRLESNKPAGDVDMSLSLLQEISSLQEKLEVTRTDHQREITSLKEHFGAREETHQKEIKALYTATEKLSKENESLKSKLEHANKENSDVIALWKSKLETAIASHQQAMEELKVSFSKGLGTETAEFAELKTQIEKMRLDYQHEIENLQNQQDSERAAHAKEMEALRAKLMKVIKEKENSLEAIRSKLDKAEDQHLVEMEDTLNKLQEAEIKVKELEVLQAKCNEQTKVIDNFTSQLKATEEKLLDLDALRKASSEGKSEMKKLRQQLEAAEKQIKHLEIEKNAESSKASSITRELQGRELKLTNLQENLSEVSQVKETLEKELQILKEKFAEASEEAVSVQRSMQETVNKLHQKEEQFNMLSSDLEKLRENLADMEAKFREKDEREEQLIKAKEKLENDIAEIMKMSGDNSSQLTKMNDELRLKERDVEELQLKLTKANENASFLQKSIEDMTVKAEQSQQEAAKKHEEEKKELERKLSDLEKKMETSHNQCQELKARYERATSETKTKHEEILQNLQKTLLDTEDKLKGAREENSGLLQELEELRKQADKAKAAQTAEDAMQIMEQMTKEKTETLASLEDTKQTNAKLQNELDTLKENNLKNVEELNKSKELLTVENQKMEEFRKEIETLKQAAAQKSQQLSALQEENVKLAEELGRSRDEVTSHQKLEEERSVLNNQLLEMKKRESKFIKDADEEKASLQKSISITSALLTEKDAELEKLRNEVTVLRGENASAKSLHSVVQTLESDKVKLELKVKNLELQLKENKRQLSSSSGNTDTQADEDERAQESQIDFLNSVIVDLQRKNQDLKMKVEMMSEAALNGNGDDLNNYDSDDQEKQSKKKPRLFCDICDCFDLHDTEDCPTQAQMSEDPPHSTHHGSRGEERPYCEICEMFGHWATNCNDDETF

SEQ ID NO: 15816 - protein, 601 aa, Artificial Sequence
  Synthetic polypeptide
GQVPWLMPVIPALWESQVGGTKAGVVRFLGETDFAKGEWCGVELDEPLGKNDGAVAGTRYFQCQPKYGLFAPVHKVTKIGFPSTTPAKAKANAVRRVMATTSASLKRSPSASSLSSMSSVASSVSSRPSRTGLHVLELEAKMDQLRTMVEAADREKVELLNQLEEEKRKVEDLQFRVEEESITKGDLETQTKLEHARIKELEQSLLFEKTKADKLQRELEDTRVATVSEKSRIMELEKDLALRVQEVAELRRRLESNKPAGDVDMSLSLLQEISSLQEKLEVTRTDHQREITSLKEHFGAREETHQKEIKALYTATEKLSKENESLKSKLEHANKENSDVIALWKSKLETAIASHQQAMEELKVSFSKGLGTETAEFAELKTQIEKMRLDYQHEIENLQNQQDSERAAHAKEMEALRAKLMKVIKEKENSLEAIRSKLDKAEDQHLVEMEDTLNKLQEAEIKASSITRELQGRELKLTNLQENLSEVSQVKETLEKELQILKEKFAEASEEAVSVQRSMQETVNKLHQKEEQFNMLSSDLEKLRENLADMEAKFREKDEREEQLIKAKEKLENDIAEIMKMSGDNSSQLTKMNDELRLKER

SEQ ID NO: 15817 - protein, 226 aa, Artificial Sequence
  Synthetic polypeptide
GQVPWLMPVIPALWESQVGGTKAGVVRFLGETDFAKGEWCGVELDEPLGKNDGAVAGTRYFQCQPKYGLFAPVHKVTKIGFPSTTPAKAKANAVRRVMATTSASLKRSPSASSLSSMSSVASSVSSRPSRTGLHVLELEAKMDQLRTMVEAADREKVELLNQLEEEKRKVEDLQFRVEEESITKGDLEQKSQISEDPENVRGHLTVWIFPLLTKIDHRLKCLLIYS

SEQ ID NO: 15818 - protein, 148 aa, Artificial Sequence
  Synthetic polypeptide
GQVPWLMPVIPALWESQVGGTKAGVVRFLGETDFAKGEWCGVELDEPLGKNDGAVAGTRYFQCQPKYGLFAPVHKVTKIGFPSTTPAKAKANAVRRVMATTSASLKRSPSASSLSSMSSVASSVSSRPSRTGLVRPLSHYLPPLPRQD

SEQ ID NO: 15819 - protein, 821 aa, Artificial Sequence
  Synthetic polypeptide
TSEGTNSRRATLRAVTLTSGVRGFILEISFQPVFRQHFLTKKDLIKALVENIDMDTSLILEYCSTFQLDCDAVLQLFIETLLHNTNAGQGQGDASMDSAKRRHPKLLAKALEMVPLLTSTKDLVISLSGILHKLDPYDYEMIEVVLKVIERADEKITNININQALSILKHLKSYRRISPPVDLEYQYMLEHVITLPSAAQTRLPFHLIFFGTAQNFWKILSTELSEESFPTLLLISKLMKFSLDTLYVSTAKHVFEKKLKPKLLKLTQAKSSTLINKEITKITQTIESCLLSIVNPEWAVAIAISLAQDIPEGSFKISALKFCLYLAERWLQNIPSQDEKREKAEALLKKLHIQYRRSGTEAVLIAHKLNTEEYLRVIGKPAHLIVSLYEHPSINQRIQNSSGTDYPDIHAAAKEIAEVNEINLEKVWDMLLEKWLCPSTKPGEKPSELFELQEDEALRRVQYLLLSRPIDYSSRMLFVFATSTTTTLGMHQLTFAHRTRALQCLFYLADKETIESLFKKPIEEVKSYLRCITFLASFETLNIPITYELFCSSPKEGMIKGLWKNHSHESMAVRLVTELCLEYKIYDLQLWNGLLQKLLGFNMIPYLRKVLKAISSIHSLWQVPYFSKAWQRVIQIPLLSASCPLSPDQLSDCSESLIAVLECPVSGDLDLIGVARQYIQLELPAFALACLMLMPHSEKRHQQIKNFLGSCDPQVILKQLEEHMNTGQLAGFSHQIRSLILNNIINKKEFGILAKTKYFQMLKMHAMNTNNITELVNYLANDLSLDEASVLITEYSKHCGKPVPPDTAPCEILKMFLSGLS

SEQ ID NO: 15820 - protein, 36 aa, Artificial Sequence
  Synthetic polypeptide
HSPRGSAASFLKFLFNQFSGNIFSPRKTSLKLLWRI

SEQ ID NO: 15821 - protein, 59 aa, Artificial Sequence
  Synthetic polypeptide
EPHLYKAHFSWTAMQFFSSSLKRCSTTQMPAKAREMQAWTLQSGGIPNSWPKPLRWFLY

SEQ ID NO: 15822 - protein, 23 aa, Artificial Sequence
  Synthetic polypeptide
HSESPISTKHISVGLRCSSSALH

SEQ ID NO: 15823 - protein, 776 aa, Artificial Sequence
  Synthetic polypeptide
GQELETSLGDIVRAPSLQSTFQLDCDAVLQLFIETLLHNTNAGQGQGDASMDSAKRRHPKLLAKALEMVPLLTSTKDLVISLSGILHKLDPYDYEMIEVVLKVIERADEKITNININQALSILKHLKSYRRISPPVDLEYQYMLEHVITLPSAAQTRLPFHLIFFGTAQNFWKILSTELSEESFPTLLLISKLMKFSLDTLYVSTAKHVFEKKLKPKLLKLTQAKSSTLINKEITKITQTIESCLLSIVNPEWAVAIAISLAQDIPEGSFKISALKFCLYLAERWLQNIPSQDEKREKAEALLKKLHIQYRRSGTEAVLIAHKLNTEEYLRVIGKPAHLIVSLYEHPSINQRIQNSSGTDYPDIHAAAKEIAEVNEINLEKVWDMLLEKWLCPSTKPGEKPSELFELQEDEALRRVQYLLLSRPIDYSSRMLFVFATSTTTTLGMHQLTFAHRTRALQCLFYLADKETIESLFKKPIEEVKSYLRCITFLASFETLNIPITYELFCSSPKEGMIKGLWKNHSHESMAVRLVTELCLEYKIYDLQLWNGLLQKLLGFNMIPYLRKVLKAISSIHSLWQVPYFSKAWQRVIQIPLLSASCPLSPDQLSDCSESLIAVLECPVSGDLDLIGVARQYIQLELPAFALACLMLMPHSEKRHQQIKNFLGSCDPQVILKQLEEHMNTGQLAGFSHQIRSLILNNIINKKEFGILAKTKYFQMLKMHAMNTNNITELVNYLANDLSLDEASVLITEYSKHCGKPVPPDTAPCEILKMFLSGLS

SEQ ID NO: 15824 - protein, 112 aa, Artificial Sequence
  Synthetic polypeptide
GQELETSLGDIVRAPSLQSTFQLDCDAVLQLFIETLLHNTNAGQGQGDASMDSAKRRHPKLLAKALEMVPLLTSTKDLVISLSGILHKLDPYDYEMIEVVLKVIERADEKIT

SEQ ID NO: 15825 - protein, 31 aa, Artificial Sequence
  Synthetic polypeptide
AEIVPLHSSLGDRARLRLKKKKKFTQTRSWN

SEQ ID NO: 15826 - protein, 171 aa, Artificial Sequence
  Synthetic polypeptide
SQLLRRVRQENGVNLGGRACREPRSCHCTPAWVTEQDSVSKKKKNSPKQEAGISEGQGTAGEEEEKKKQKRGGRGQIKQKKKTVPQKVTIAKIPRAKKKYVTRVCGLATFEIDLKEAQRFFAQKFSCGASVTGEDEIIIQGDFTDDIIDVIQEKWPEVDDDSIEDLGEVKK

SEQ ID NO: 15827 - protein, 43 aa, Artificial Sequence
  Synthetic polypeptide
QSKTPSQKKKKIHPNKKLELVRVKEQQGKKRRRKNRREVEGVK

SEQ ID NO: 15828 - protein, 133 aa, Artificial Sequence
  Synthetic polypeptide
SQLLRRVRQENGVNLGGRACREPRSCHCTPAWVTEQDSVSKKKKNSPKQEAGISEGQGTAGEEEEKKKQKRGGRGQIKQKKKTVPQKVTIAKIPRAKKKYVTRVCGLATFEIDLKEAQRFFAQKFSCGASPPK

SEQ ID NO: 15829 - protein, 40 aa, Artificial Sequence
  Synthetic polypeptide
WLTPVIIPALWEADMGGSPEKLILKKHKDFLLKNSPVVPQ

SEQ ID NO: 15830 - protein, 15 aa, Artificial Sequence
  Synthetic polypeptide
SQHFGRLTWADHLRN

SEQ ID NO: 15831 - protein, 43 aa, Artificial Sequence
  Synthetic polypeptide
WLTPVIIPALWEADMGGSPEKLILKKHKDFLLKNSPVVPHLPS

SEQ ID NO: 15832 - protein, 23 aa, Artificial Sequence
  Synthetic polypeptide
LLCIPLLWHLTHILHRMFSLTKK

SEQ ID NO: 15833 - protein, 9 aa, Artificial Sequence
  Synthetic polypeptide
HTFYTECSA

SEQ ID NO: 15834 - protein, 265 aa, Artificial Sequence
  Synthetic polypeptide
GLLASLYTSPVALDTHFTQNVQLNKEMTLASNRSLAEGNLLYQPQLDTLKARLTQKYQELQVLFEAYQIKKTKLDRQSSSASLETLLALLQAEGAKIEEDTENMAEKFLDGELPLDSFIDVYQSKRKLAHMRRVKIEKLQEMVLKGQRLPQALAPLPPRLPELAPTAPLPYPAPEASGPPAVAPRRIPPPPPPVPAGRLATPFTAAMSSGQAVPYPGLQCPPLPPRVGLPTQQGFSSQFVSPYPPPLPQRPPPRLPPHQPGFILQ

SEQ ID NO: 15835 - protein, 166 aa, Artificial Sequence
  Synthetic polypeptide
GLLASLYTSPVALDTHFTQNVQLNKEMTLASNRSLAEGNLLYQPQLDTLKARLTQKYQELQVLFEAYQIKKTKLDRQSSSASLETLLALLQAEGAKIEEDTENMAEKFLDGELPLDSFIDVYQSKRKLAHMRRVKIEKLQEMVLKGQRLPQALAPLPPRLPELAPT

SEQ ID NO: 15836 - protein, 7 aa, Artificial Sequence
  Synthetic polypeptide
DDTECSA

SEQ ID NO: 15837 - protein, 253 aa, Artificial Sequence
  Synthetic polypeptide
HCSKMTQNVQLNKEMTLASNRSLAEGNLLYQPQLDTLKARLTQKYQELQVLFEAYQIKKTKLDRQSSSASLETLLALLQAEGAKIEEDTENMAEKFLDGELPLDSFIDVYQSKRKLAHMRRVKIEKLQEMVLKGQRLPQALAPLPPRLPELAPTAPLPYPAPEASGPPAVAPRRIPPPPPPVPAGRLATPFTAAMSSGQAVPYPGLQCPPLPPRVGLPTQQGFSSQFVSPYPPPLPQRPPPRLPPHQPGFILQ

SEQ ID NO: 15838 - protein, 154 aa, Artificial Sequence
  Synthetic polypeptide
HCSKMTQNVQLNKEMTLASNRSLAEGNLLYQPQLDTLKARLTQKYQELQVLFEAYQIKKTKLDRQSSSASLETLLALLQAEGAKIEEDTENMAEKFLDGELPLDSFIDVYQSKRKLAHMRRVKIEKLQEMVLKGQRLPQALAPLPPRLPELAPT

SEQ ID NO: 15839 - protein, 20 aa, Artificial Sequence
  Synthetic polypeptide
PQHFGKLRRDLPALLHGPRH

SEQ ID NO: 15840 - protein, 68 aa, Artificial Sequence
  Synthetic polypeptide
LRPVTPALWEAEERPSCPTTRAAPLMASSSRKAWISSARLSSSCACWPLAAHLPQVFGAAFLPSYLPD

SEQ ID NO: 15841 - protein, 106 aa, Artificial Sequence
  Synthetic polypeptide
LRPVTPALWEAEERPSCPTTRAAPLMASSSRKAWISSARLSSSCACWPLAGIRGGIFTLIFARLNIRLRNCLFRSLVSQETSFFDENRTASHGSSPWSPSWASPSS

SEQ ID NO: 15842 - protein, 84 aa, Artificial Sequence
  Synthetic polypeptide
LRPVTPALWEAEERPSCPTTRAAPLMASSSRKAWISSARLSSSCACWPLAGIRGGIFTLIFARLNIRLRNCLFRSLVSQETSFF

SEQ ID NO: 15843 - protein, 9 aa, Artificial Sequence
  Synthetic polypeptide
RDPAQPRLC

SEQ ID NO: 15844 - protein, 317 aa, Artificial Sequence
  Synthetic polypeptide
LSLPRFSHRKGILRSRGCVSAKDFQQLLAELEQEVERRQRLGQESAARKALIASSYHPARPEVYDSLQDAALAPEFLAVTEYSVSPDADLKGLLQRLETVSEEKRIYRVPVFTAPFCQALLEELEHFEQSDMPKGRPNTMNNYGVLLHELGLDEPLMTPLRERFLQPLMALLYPDCGGGRLDSHRAFVVKYAPGQDLELGCHYDNAELTLNVALGKVFTGGALYFGGLFQAPTALTEPLEVEHVVGQGVLHRGGQLHGARPLGTGERWNLVVWLRASAVRNSLCPMCCREPDLVDDEGFGDGFTREEPATVDVCALT

SEQ ID NO: 15845 - protein, 27 aa, Artificial Sequence
  Synthetic polypeptide
SLCLGFLTVKGSCAAEAVLAPRTSSSC

SEQ ID NO: 15846 - protein, 174 aa, Artificial Sequence
  Synthetic polypeptide
LSLPRFSHRKGILRSRGCVSAKDFQQLLAEAAARAAAPLPPPPSPGVSGGKLPRRVLSNLWNTGLGHDCLLSLCGPRWLSFFICTVASGGWEAPPGNNPVPPQLEQEVERRQRLGQESAARKALIASSYHPARPEVYDSLQDAALAPEFLAVTEYSVSPDADLKGLLQRLETVS

SEQ ID NO: 15847 - protein, 96 aa, Artificial Sequence
  Synthetic polypeptide
LSLPRFSHRKGILRSRGCVSAKDFQQLLAEWPQEDGRPHLVTTLCHPSLSRRWSGGSGWGRSQQLGKPSSRVPTTRHGLRSTTHCRMQLWPPSSWP

SEQ ID NO: 15848 - protein, 223 aa, Artificial Sequence
  Synthetic polypeptide
VAHQMKGEEKRIYRVPVFTAPFCQALLEELEHFEQSDMPKGRPNTMNNYGVLLHELGLDEPLMTPLRERFLQPLMALLYPDCGGGRLDSHRAFVVKYAPGQDLELGCHYDNAELTLNVALGKVFTGGALYFGGLFQAPTALTEPLEVEHVVGQGVLHRGGQLHGARPLGTGERWNLVVWLRASAVRNSLCPMCCREPDLVDDEGFGDGFTREEPATVDVCALT

SEQ ID NO: 15849 - protein, 40 aa, Artificial Sequence
  Synthetic polypeptide
KERRSASTGCLFSQRPSARPCWKSWSTSSNRTCLRGGPTP

SEQ ID NO: 15850 - protein, 38 aa, Artificial Sequence
  Synthetic polypeptide
GSSDERRGEAHLPGACFHSALLPGPAGRAGALRAIGHA

SEQ ID NO: 15851 - protein, 89 aa, Artificial Sequence
  Synthetic polypeptide
GQAQWLMPVIPALWEAECHQTRSVDQNRKLARKILQEKVDVFYNGENSPVHKEKREAAKKKQERKKRAKETLEKKKLLKELWESSKKVH

SEQ ID NO: 15852 - protein, 20 aa, Artificial Sequence
  Synthetic polypeptide
SQHFGRPSAIRQDQLIRTES

SEQ ID NO: 15853 - protein, 23 aa, Artificial Sequence
  Synthetic polypeptide
PGTVAHACNPSTLGGRVPSDKIS

SEQ ID NO: 15854 - protein, 61 aa, Artificial Sequence
  Synthetic polypeptide
GQAQWLMPVIPALWEAECHQTRSVDQNRKLARKILQEKVDVFYNGENSPVHKEKREAAKKK

SEQ ID NO: 15855 - protein, 35 aa, Artificial Sequence
  Synthetic polypeptide
PTWRNPVSTKNAKYYPRMVMHTCNSSHLGGRGRLR

SEQ ID NO: 15856 - protein, 149 aa, Artificial Sequence
  Synthetic polypeptide
CIPVIPATWEAEVVSDDALMHWLDQYNSSADTCTHAYWRGNCKKASLGLVCEIGLRCRTYYVLCGSVLSVWTKVEGVLASVSGTNVKMQIVRLRTEDGQRIVGLIIPANCVSPLVNLLSTSDQSQQLAVQQKQLWQQHHPQSITNLSNA

SEQ ID NO: 15857 - protein, 14 aa, Artificial Sequence
  Synthetic polypeptide
FQPLGRPRSSQMMP

SEQ ID NO: 15858 - protein, 72 aa, Artificial Sequence
  Synthetic polypeptide
FCGPGQTPAHPLSHSVTIAGRCPSPARWRRRRRRRRWQRRPRARRWWSGGARGGPAPTGRTYLPGSQRSIPT

SEQ ID NO: 15859 - protein, 134 aa, Artificial Sequence
  Synthetic polypeptide
VTVSPLQEDVQAPRGGGGGGGGGGGSDGPGPGDGGAEGPGEAPHRRGERIYRAVKDLFLHEPEQMLWNAFPPSGRELSYTSRSQMPGETISRNLQETRREKKCWERSTERHEVRGTEDQRRQERSPGTFSKPKI

SEQ ID NO: 15860 - protein, 377 aa, Artificial Sequence
  Synthetic polypeptide
GFDTWPHHFLVLWPGTNPCTSLESQCHHCRKMSKPRAVEAAAAAAAVAATAPGPEMVERRGPGRPRTDGENVFTGQSKIYSYMSPNKCSGMRFPLQEENSVTHHEVKCQGKPLAGIYRKREEKRNAGNAVRSAMKSEEQKIKDARKGPLVPFPNQKSEAAEPPKTPPSSCDSTNAAIAKQALKKPIKGKQAPRKKAQGKTQQNRKLTDFYPVRRSSRKSKAELQSEERKRIDELIESGKEEGMKIDLIDGKGRGVIATKQFSRGDFVVEYHGDLIEITDAKKREALYAQDPSTGCYMYYFQYLSKTYCVDATRETNRLGRLINHSKCGNCQTKLHDIDGVPHLILIASRDIAAGEELLYDYGDRSKASIEAHPWLKH

SEQ ID NO: 15861 - protein, 141 aa, Artificial Sequence
  Synthetic polypeptide
NPSACTCKIDLIDGKGRGVIATKQFSRGDFVVEYHGDLIEITDAKKREALYAQDPSTGCYMYYFQYLSKTYCVDATRETNRLGRLINHSKCGNCQTKLHDIDGVPHLILIASRDIAAGEELLYDYGDRSKASIEAHPWLKH

SEQ ID NO: 15862 - protein, 33 aa, Artificial Sequence
  Synthetic polypeptide
SWPVVTVAQLYTLHKTHQPVHVKLTSSMAKAGV

SEQ ID NO: 15863 - protein, 97 aa, Artificial Sequence
  Synthetic polypeptide
NPSACTCKIDLIDGKGRGVIATKQFSRGDFVVEYHGDLIEITDAKKREALYAQDPSTGCYMYYFQYLSKTYCVDATRETNRLGRLINHSKCGNCQTK

SEQ ID NO: 15864 - protein, 82 aa, Artificial Sequence
  Synthetic polypeptide
KLASEEMEEENRIPQPPPIAHPRTSPQPESGIKRLFSFFSRDKKRLANTQRNVHIQESFGQWANTHRDDGYTEQGQEALQHL

SEQ ID NO: 15865 - protein, 80 aa, Artificial Sequence
  Synthetic polypeptide
PVKKWKRKTEYPNPHPSPTRGRPPSRSRASSDCLASSPEIRSAWPTHRETCTSRSPLDSGQTPTAMTVTQSKDRKPCSIC

SEQ ID NO: 15866 - protein, 35 aa, Artificial Sequence
  Synthetic polypeptide
LCDFRSWSWWRMCGEGRRRTSSPRSPSCRRRTSSS

SEQ ID NO: 15867 - protein, 64 aa, Artificial Sequence
  Synthetic polypeptide
GVPIPPLPFNSCVTLGAGAGGGCVARGGAGPPLPDRPAAGGEQAAHDQPLPQGCQFLRGGVPEA

SEQ ID NO: 15868 - protein, 15 aa, Artificial Sequence
  Synthetic polypeptide
TYLHHGESRSCHSWC

SEQ ID NO: 15869 - protein, 123 aa, Artificial Sequence
  Synthetic polypeptide
HIYIMEKADLVIVGAEGVVENGGIINKIGTNQMAVCAKAQNKPFYVVAESFKFVRLFPLNQQDVPDKFKYKADTLKVAQTGQDLKEEHPWVDYTAPSLITLLFTDLGVLTPSAVSDELIKLYL

SEQ ID NO: 15870 - protein, 11 aa, Artificial Sequence
  Synthetic polypeptide
ISTSWRKQILS

SEQ ID NO: 15871 - protein, 15 aa, Artificial Sequence
  Synthetic polypeptide
HIYIMEKADLVIVGA

SEQ ID NO: 15872 - protein, 41 aa, Artificial Sequence
  Synthetic polypeptide
PGVVAHSCGPSYLGGSDNIDSRLLQSGPESPGSSRGGQEAI

SEQ ID NO: 15873 - protein, 235 aa, Artificial Sequence
  Synthetic polypeptide
SQHFGKPRHADCLSPGVQDQPGQHGKTSSLLKIQKVSQAWWHTPVVPATWEAQTILTHAYSRVVLRVLEAAVAAKKRFSVYVTESQPDLSGKKMAKALCHLNVPVTVVLDAAVGYIMEKADLVIVGAEGVVENGGIINKIGTNQMAVCAKAQNKPFYVVAESFKFVRLFPLNQQDVPDKFKYKADTLKVAQTGQDLKEEHPWVDYTAPSLITLLFTDLGVLTPSAVSDELIKLYL

SEQ ID NO: 15874 - protein, 24 aa, Artificial Sequence
  Synthetic polypeptide
KYKKLARRGGTLLWSQLLGRLRQY

SEQ ID NO: 15875 - protein, 145 aa, Artificial Sequence
  Synthetic polypeptide
SQHFGKPRHADCLSPGVQDQPGQHGKTSSLLKIQKVSQAWWHTPVVPATWEAQTILTHAYSRVVLRVLEAAVAAKKRFSVYVTESQPDLSGKKMAKALCHLNVPVTVVLDAAVGLEPTRWLCVPKHRTNLSMWLQKVSSLSGSFH

SEQ ID NO: 15876 - protein, 152 aa, Artificial Sequence
  Synthetic polypeptide
SQHFGKPRHADCLSPGVQDQPGQHGKTSSLLKIQKVSQAWWHTPVVPATWEAQTILTHAYSRVVLRVLEAAVAAKKRFSVYVTESQPDLSGQVPFCSVMCPAIILQSKLRITVQQDQNQNVPPACQQSALPFIVPFPAFGRKITEFAAGRSI

SEQ ID NO: 15877 - protein, 5 aa, Artificial Sequence
  Synthetic polypeptide
EAERT

SEQ ID NO: 15878 - protein, 25 aa, Artificial Sequence
  Synthetic polypeptide
TLPEHDGAHLWSQLLERLRERDCHS

SEQ ID NO: 15879 - protein, 63 aa, Artificial Sequence
  Synthetic polypeptide
GRSRWLMPVIPALWEAKAAVPKAQPPHPDWRPPGQCLTPEATGPEAAEAASGCHPPHPGHQSP

SEQ ID NO: 15880 - protein, 1586 aa, Artificial Sequence
  Synthetic polypeptide
SQHFGKPRLLSPRPSLLTPTGDPRANASPQKPLDLKQLKQRAAAIPPIQVTKVHEPPREDAAPTKPAPPAPPPPQNLQPESDAPQQPGSSPRGKSRSPAPPADKEAFAAEAQKLPGDPPCWTSGLPFPVPPREVIKASPHAPDPSAFSYAPPGHPLPLGLHDTARPVLPRPPTISNPPPLISSAKHPSVLERQIGAISQGMSVQLHVPYSEHAKAPVGPVTMGLPLPMDPKKLAPFSGVKQEQLSPRGQAGPPESLGVPTAQEASVLRGTALGSVPGGSITKGIPSTRVPSDSAITYRGSITHGTPADVLYKGTITRIIGEDSPSRLDRGREDSLPKGHVIYEGKKGHVLSYEGGMSVTQCSKEDGRSSSGPPHETAAPKRTYDMMEGRVGRAISSASIEGLMGRAIPPERHSPHHLKEQHHIRGSITQGIPRSYVEAQEDYLRREAKLLKREGTPPPPPPSRDLTEAYKTQALGPLKLKPAHEGLVATVKEAGRSIHEIPREELRHTPELPLAPRPLKEGSITQGTPLKYDTGASTTGSKKHDVRSLIGSPGRTFPPVHPLDVMADARALERACYEESLKSRPGTASSSGGSIARGAPVIVPELGKPRQSPLTYEDHGAPFAGHLPRGSPVTTREPTPRLQEGSLSSSKASQDRKLTSTPREIAKSPHSTVPEHHPHPISPYEHLLRGVSGVDLYRSHIPLAFDPTSIPRGIPLDAAAAYYLPRHLAPNPTYPHLYPPYLIRGYPDTAALENRQTIINDYITSQQMHHNAATAMAQRADMLRGLSPRESSLALNYAAGPRGIIDLSQVPHLPVLVPPTPGTPATAMDRLAYLPTAPQPFSSRHSSSPLSPGGPTHLTKPTTTSSSERERDRDRERDRDREREKSILTSTTTVEHAPIWRPGTEQSSGSSGGGGGSSSRPASHSHAHQHSPISPRTQDALQQRPSVLHNTGMKGIITAVEPSTPTVLRSTSTSSPVRPAATFPPATHCPLGGTLDGVYPTLMEPVLLPKEAPRVARPERPRADTGHAFLAKPPARSGLEPASSPSKGSEPRPLVPPVSGHATIARTPAKNLAPHHASPDPPAPPASASDPHREKTQSKPFSIQELELRSLGYHGSSYSPEGVEPVSPVSSPSLTHDKGLPKHLEELDKSHLEGELRPKQPGPVKLGGEAAHLPHLRPLPESQPSSSPLLQTAPGVKGHQRVVTLAQHISEVITQDYTRHHPQQLSAPLPAPLYSFPGASCPVLDLRRPPSDLYLPPPDHGAPARGSPHSEGGKRSPEPNKTSVLGGGEDGIEPVSPPEGMTEPGHSRSAVYPLLYRDGEQTEPSRMGSKSPGNTSQPPAFFSKLTESNSAMVKSKKQEINKKLNTHNRNEPEYNISQPGTEIFNMPAITGTGLMTYRSQAVQEHASTNMGLEAIIRKALMGKYDQWEESPPLSANAFNPLNASASLPAAMPITAADGRSDHTLTSPGGGGKAKVSGRPSSRKAKSPAPGLASGDRPPSVSSVHSEGDCNRRTPLTNRVWEDRPSSAGSTPFPYNPLIMRLQAGVMASPPPPGLPAGSGPLAGPHHAWDEEPKPLLCSQYETLSDSE

SEQ ID NO: 15881 - protein, 43 aa, Artificial Sequence
  Synthetic polypeptide
PVAVAHACNPSTLGSQGCCPQGPASSPRLATPGPMPHPRSHWT

SEQ ID NO: 15882 - protein, 1548 aa, Artificial Sequence
  Synthetic polypeptide
SQHFGKPRLLSPRPSLLTPTGDPRANASPQKPLDLKQLKQRAAAIPPIQVTKVHEPPREDAAPTKPAPPAPPPPQNLQPESDAPQQPGSSPRGKSRSPAPPADKEAEKPVFFPAFAAEAQKLPGDPPCWTSGLPFPVPPREVIKASPHAPDPSAFSYAPPGHPLPLGLHDTARPVLPRPPTISNPPPLISSAKHPSVLERQIGAISQGMSVQLHVPYSEHAKAPVGPVTMGLPLPMDPKKLAPFSGVKQEQLSPRGQAGPPESLGVPTAQEASVLRGTALGSVPGGSITKGIPSTRVPSDSAITYRGSITHGTPADVLYKGTITRIIGEDSPSRLDRGREDSLPKGHVIYEGKKGHVLSYEGGMSVTQCSKEDGRSSSGPPHETAAPKRTYDMMEGRVGRAISSASIEGLMGRAIPPERHSPHHLKEQHHIRGSITQGIPRSYVEAQEDYLRREAKLLKREGTPPPPPPSRDLTEAYKTQALGPLKLKPAHEGLVATVKEAGRSIHEIPREELRHTPELPLAPRPLKEGSITQGTPLKYDTGASTTGSKKHDVRSLIGSPGRTFPPVHPLDVMADARALERACYEESLKSRPGTASSSGGSIARGAPVIVPELGKPRQSPLTYEDHGAPFAGHLPRGSPVTTREPTPRLQEGSLSSSKASQDRKLTSTPREIAKSPHSTVPEHHPHPISPYEHLLRGVSGVDLYRSHIPLAFDPTSIPRGIPLDAAAAYYLPRHLAPNPTYPHLYPPYLIRGYPDTAALENRQTIINDYITSQQMHHNAATAMAQRADMLRGLSPRESSLALNYAAGPRGIIDLSQVPHLPVLVPPTPGTPATAMDRLAYLPTAPQPFSSRHSSSPLSPGGPTHLTKPTTTSSSERERDRDRERDRDREREKSILTSTTTVEHAPIWRPGTEQSSGSSGGGGGSSSRPASHSHAHQHSPISPRTQDALQQRPSVLHNTGMKGIITAVEPSTPTVLRSTSTSSPVRPAATFPPATHCPLGGTLDGVYPTLMEPVLLPKEAPRVARPERPRADTGHAFLAKPPARSGLEPASSPSKGSEPRPLVPPVSGHATIARTPAKNLAPHHASPDPPAPPASASDPHREKTQSKPFSIQELELRSLGYHGSSYSPEGVEPVSPVSSPSLTHDKGLPKHLEELDKSHLEGELRPKQPGPVKLGGEAAHLPHLRPLPESQPSSSPLLQTAPGVKGHQRVVTLAQHISEVITQDYTRHHPQQLSAPLPAPLYSFPGASCPVLDLRRPPSDLYLPPPDHGAPARGSPHSEGGKRSPEPNKTSVLGGGEDGIEPVSPPEGMTEPGHSRSAVYPLLYRDGEQTEPSRMGSKSPGNTSQPPAFFSKLTESNSAMVKSKKQEINKKLNTHNRNEPEYNISQPGTEIFNMPAITGTGLMTYRSQAVQEHASTNMGLEAIIRKALMGGGGKAKVSGRPSSRKAKSPAPGLASGDRPPSVSSVHSEGDCNRRTPLTNRVWEDRPSSAGSTPFPYNPLIMRLQAGVMASPPPPGLPAGSGPLAGPHHAWDEEPKPLLCSQYETLSDSE

SEQ ID NO: 15883 - protein, 62 aa, Artificial Sequence
  Synthetic polypeptide
GRSRWLMPVIPALWEAKAAVPKAQPPHPDWRPPGQCLTPEATGPEAAEAASGCHPPHRHQSP

SEQ ID NO: 15884 - protein, 1593 aa, Artificial Sequence
  Synthetic polypeptide
SQHFGKPRLLSPRPSLLTPTGDPRANASPQKPLDLKQLKQRAAAIPPIVTKVHEPPREDAAPTKPAPPAPPPPQNLQPESDAPQQPGSSPRGKSRSPAPPADKEAEKPVFFPAFAAEAQKLPGDPPCWTSGLPFPVPPREVIKASPHAPDPSAFSYAPPGHPLPLGLHDTARPVLPRPPTISNPPPLISSAKHPSVLERQIGAISQGMSVQLHVPYSEHAKAPVGPVTMGLPLPMDPKKLAPFSGVKQEQLSPRGQAGPPESLGVPTAQEASVLRGTALGSVPGGSITKGIPSTRVPSDSAITYRGSITHGTPADVLYKGTITRIIGEDSPSRLDRGREDSLPKGHVIYEGKKGHVLSYEGGMSVTQCSKEDGRSSSGPPHETAAPKRTYDMMEGRVGRAISSASIEGLMGRAIPPERHSPHHLKEQHHIRGSITQGIPRSYVEAQEDYLRREAKLLKREGTPPPPPPSRDLTEAYKTQALGPLKLKPAHEGLVATVKEAGRSIHEIPREELRHTPELPLAPRPLKEGSITQGTPLKYDTGASTTGSKKHDVRSLIGSPGRTFPPVHPLDVMADARALERACYEESLKSRPGTASSSGGSIARGAPVIVPELGKPRQSPLTYEDHGAPFAGHLPRGSPVTTREPTPRLQEGSLSSSKASQDRKLTSTPREIAKSPHSTVPEHHPHPISPYEHLLRGVSGVDLYRSHIPLAFDPTSIPRGIPLDAAAAYYLPRHLAPNPTYPHLYPPYLIRGYPDTAALENRQTIINDYITSQQMHHNAATAMAQRADMLRGLSPRESSLALNYAAGPRGIIDLSQVPHLPVLVPPTPGTPATAMDRLAYLPTAPQPFSSRHSSSPLSPGGPTHLTKPTTTSSSERERDRDRERDRDREREKSILTSTTTVEHAPIWRPGTEQSSGSSGGGGGSSSRPASHSHAHQHSPISPRTQDALQQRPSVLHNTGMKGIITAVEPSTPTVLRSTSTSSPVRPAATFPPATHCPLGGTLDGVYPTLMEPVLLPKEAPRVARPERPRADTGHAFLAKPPARSGLEPASSPSKGSEPRPLVPPVSGHATIARTPAKNLAPHHASPDPPAPPASASDPHREKTQSKPFSIQELELRSLGYHGSSYSPEGVEPVSPVSSPSLTHDKGLPKHLEELDKSHLEGELRPKQPGPVKLGGEAAHLPHLRPLPESQPSSSPLLQTAPGVKGHQRVVTLAQHISEVITQDYTRHHPQQLSAPLPAPLYSFPGASCPVLDLRRPPSDLYLPPPDHGAPARGSPHSEGGKRSPEPNKTSVLGGGEDGIEPVSPPEGMTEPGHSRSAVYPLLYRDGEQTEPSRMGSKSPGNTSQPPAFFSKLTESNSAMVKSKKQEINKKLNTHNRNEPEYNISQPGTEIFNMPAITGTGLMTYRSQAVQEHASTNMGLEAIIRKALMGKYDQWEESPPLSANAFNPLNASASLPAAMPITAADGRSDHTLTSPGGGGKAKVSGRPSSRKAKSPAPGLASGDRPPSVSSVHSEGDCNRRTPLTNRVWEDRPSSAGSTPFPYNPLIMRLQAGVMASPPPPGLPAGSGPLAGPHHAWDEEPKPLLCSQYETLSDSE

SEQ ID NO: 15885 - protein, 1594 aa, Artificial Sequence
  Synthetic polypeptide
SQHFGKPRLLSPRPSLLTPTGDPRANASPQKPLDLKQLKQRAAAIPPIQVTKVHEPPREDAAPTKPAPPAPPPPQNLQPESDAPQQPGSSPRGKSRSPAPPADKEAEKPVFFPAFAAEAQKLPGDPPCWTSGLPFPVPPREVIKASPHAPDPSAFSYAPPGHPLPLGLHDTARPVLPRPPTISNPPPLISSAKHPSVLERQIGAISQGMSVQLHVPYSEHAKAPVGPVTMGLPLPMDPKKLAPFSGVKQEQLSPRGQAGPPESLGVPTAQEASVLRGTALGSVPGGSITKGIPSTRVPSDSAITYRGSITHGTPADVLYKGTITRIIGEDSPSRLDRGREDSLPKGHVIYEGKKGHVLSYEGGMSVTQCSKEDGRSSSGPPHETAAPKRTYDMMEGRVGRAISSASIEGLMGRAIPPERHSPHHLKEQHHIRGSITQGIPRSYVEAQEDYLRREAKLLKREGTPPPPPPSRDLTEAYKTQALGPLKLKPAHEGLVATVKEAGRSIHEIPREELRHTPELPLAPRPLKEGSITQGTPLKYDTGASTTGSKKHDVRSLIGSPGRTFPPVHPLDVMADARALERACYEESLKSRPGTASSSGGSIARGAPVIVPELGKPRQSPLTYEDHGAPFAGHLPRGSPVTTREPTPRLQEGSLSSSKASQDRKLTSTPREIAKSPHSTVPEHHPHPISPYEHLLRGVSGVDLYRSHIPLAFDPTSIPRGIPLDAAAAYYLPRHLAPNPTYPHLYPPYLIRGYPDTAALENRQTIINDYITSQQMHHNAATAMAQRADMLRGLSPRESSLALNYAAGPRGIIDLSQVPHLPVLVPPTPGTPATAMDRLAYLPTAPQPFSSRHSSSPLSPGGPTHLTKPTTTSSSERERDRDRERDRDREREKSILTSTTTVEHAPIWRPGTEQSSGSSGGGGGSSSRPASHSHAHQHSPISPRTQDALQQRPSVLHNTGMKGIITAVEPSTPTVLRSTSTSSPVRPAATFPPATHCPLGGTLDGVYPTLMEPVLLPKEAPRVARPERPRADTGHAFLAKPPARSGLEPASSPSKGSEPRPLVPPVSGHATIARTPAKNLAPHHASPDPPAPPASASDPHREKTQSKPFSIQELELRSLGYHGSSYSPEGVEPVSPVSSPSLTHDKGLPKHLEELDKSHLEGELRPKQPGPVKLGGEAAHLPHLRPLPESQPSSSPLLQTAPGVKGHQRVVTLAQHISEVITQDYTRHHPQQLSAPLPAPLYSFPGASCPVLDLRRPPSDLYLPPPDHGAPARGSPHSEGGKRSPEPNKTSVLGGGEDGIEPVSPPEGMTEPGHSRSAVYPLLYRDGEQTEPSRMGSKSPGNTSQPPAFFSKLTESNSAMVKSKKQEINKKLNTHNRNEPEYNISQPGTEIFNMPAITGTGLMTYRSQAVQEHASTNMGLEAIIRKALMGKYDQWEESPPLSANAFNPLNASASLPAAMPITAADGRSDHTLTSPGGGGKAKVSGRPSSRKAKSPAPGLASGDRPPSVSSVHSEGDCNRRTPLTNRVWEDRPSSAGSTPFPYNPLIMRLQAGVMASPPPPGLPAGSGPLAGPHHAWDEEPKPLLCSQYETLSDSE

SEQ ID NO: 15886 - protein, 523 aa, Artificial Sequence
  Synthetic polypeptide
SQHFGKPRLLSPRPSLLTPTGDPRANASPQKPLDLKQLKQRAAAIPPIQVTKVHEPPREDAAPTKPAPPAPPPPQNLQPESDAPQQPGSSPRGKSRSPAPPADKEAEKPVFFPAFAAEAQKLPGDPPCWTSGLPFPVPPREVIKASPHAPDPSAFSYAPPGHPLPLGLHDTARPVLPRPPTISNPPPLISSAKHPSVLERQIGAISQGMSVQLHVPYSEHAKAPVGPVTMGLPLPMDPKKLAPFSGVKQEQLSPRGQAGPPESLGVPTAQEASVLRGTALGSVPGGSITKGIPSTRVPSDSAITYRGSITHGTPADVLYKGTITRIIGEDSPSRLDRGREDSLPKGHVIYEGKKGHVLSYEGGMSVTQCSKEDGRSSSGPPHETAAPKRTYDMMEGRVGRAISSASIEGLMGRAIPPERHSPHHLKEQHHIRGSITQGIPRSYVEAQEDYLRREAKLLKREGTPPPPPPSRDLTEAYKTQALGPLKLKPAHEGLVATVKEAGRSIHEIPREELRHTPELPLAP

SEQ ID NO: 15887 - protein, 1912 aa, Artificial Sequence
  Synthetic polypeptide
GPGGQEVWGPTPALPPLAGPLSLGLLEHGRNWSAIARMVGSKTVSQCKNFYFNYKKRQNLDEILQQHKLKMEKERNARRKKKKAPAAASEEAAFPPVVEDEEMEASGVSGNEEEMVEEAEALHASGNEVPRGECSGPATVNNSSDTESIPSPHTEAAKDTGQNGPKPPATLGADGPPPGPPTPPPEDIPAPTEPTPASEATGAPTPPPAPPSPSAPPPVVPKEEKEEETAAAPPVEEGEEQKPPAAEELAVDTGKAEEPVKSECTEEAEEGPAKGKDAEAAEATAEGALKAEKKEGGSGRATTAKSSGAPQDSDSSATCSADEVDEAEGGDKNRLLSPRPSLLTPTGDPRANASPQKPLDLKQLKQRAAAIPPIQVTKVHEPPREDAAPTKPAPPAPPPPQNLQPESDAPQQPGSSPRGKSRSPAPPADKEAFAAEAQKLPGDPPCWTSGLPFPVPPREVIKASPHAPDPSAFSYAPPGHPLPLGLHDTARPVLPRPPTISNPPPLISSAKHPSVLERQIGAISQGMSVQLHVPYSEHAKAPVGPVTMGLPLPMDPKKLAPFSGVKQEQLSPRGQAGPPESLGVPTAQEASVLRGTALGSVPGGSITKGIPSTRVPSDSAITYRGSITHGTPADVLYKGTITRIIGEDSPSRLDRGREDSLPKGHVIYEGKKGHVLSYEGGMSVTQCSKEDGRSSSGPPHETAAPKRTYDMMEGRVGRAISSASIEGLMGRAIPPERHSPHHLKEQHHIRGSITQGIPRSYVEAQEDYLRREAKLLKREGTPPPPPPSRDLTEAYKTQALGPLKLKPAHEGLVATVKEAGRSIHEIPREELRHTPELPLAPRPLKEGSITQGTPLKYDTGASTTGSKKHDVRSLIGSPGRTFPPVHPLDVMADARALERACYEESLKSRPGTASSSGGSIARGAPVIVPELGKPRQSPLTYEDHGAPFAGHLPRGSPVTTREPTPRLQEGSLSSSKASQDRKLTSTPREIAKSPHSTVPEHHPHPISPYEHLLRGVSGVDLYRSHIPLAFDPTSIPRGIPLDAAAAYYLPRHLAPNPTYPHLYPPYLIRGYPDTAALENRQTIINDYITSQQMHHNAATAMAQRADMLRGLSPRESSLALNYAAGPRGIIDLSQVPHLPVLVPPTPGTPATAMDRLAYLPTAPQPFSSRHSSSPLSPGGPTHLTKPTTTSSSERERDRDRERDRDREREKSILTSTTTVEHAPIWRPGTEQSSGSSGGGGGSSSRPASHSHAHQHSPISPRTQDALQQRPSVLHNTGMKGIITAVEPSTPTVLRSTSTSSPVRPAATFPPATHCPLGGTLDGVYPTLMEPVLLPKEAPRVARPERPRADTGHAFLAKPPARSGLEPASSPSKGSEPRPLVPPVSGHATIARTPAKNLAPHHASPDPPAPPASASDPHREKTQSKPFSIQELELRSLGYHGSSYSPEGVEPVSPVSSPSLTHDKGLPKHLEELDKSHLEGELRPKQPGPVKLGGEAAHLPHLRPLPESQPSSSPLLQTAPGVKGHQRVVTLAQHISEVITQDYTRHHPQQLSAPLPAPLYSFPGASCPVLDLRRPPSDLYLPPPDHGAPARGSPHSEGGKRSPEPNKTSVLGGGEDGIEPVSPPEGMTEPGHSRSAVYPLLYRDGEQTEPSRMGSKSPGNTSQPPAFFSKLTESNSAMVKSKKQEINKKLNTHNRNEPEYNISQPGTEIFNMPAITGTGLMTYRSQAVQEHASTNMGLEAIIRKALMGKYDQWEESPPLSANAFNPLNASASLPAAMPITAADGRSDHTLTSPGGGGKAKVSGRPSSRKAKSPAPGLASGDRPPSVSSVHSEGDCNRRTPLTNRVWEDRPSSAGSTPFPYNPLIMRLQAGVMASPPPPGLPAGSGPLAGPHHAWDEEPKPLLCSQYETLSDSE

SEQ ID NO: 15888 - protein, 47 aa, Artificial Sequence
  Synthetic polypeptide
AWVSWNTAATGRPSPGWWAPRLCRSVRTSTSTTRRGRTSMRSCSSTS

SEQ ID NO: 15889 - protein, 46 aa, Artificial Sequence
  Synthetic polypeptide
TRRAGSLGPHARVAPLGWSSKLGSPGTRPQLVGHRPDGGLQDCVAV

SEQ ID NO: 15890 - protein, 1857 aa, Artificial Sequence
  Synthetic polypeptide
GPGGQEVWGPTPALPPLAGPLSLGLLEHGRNWSAIARMVGSKTVSQCKNFYFNYKKRQNLDEILQQHKLKMEKERNARRKKKKAPAAASEEAAFPPVVEDEEMEASGVSGNEEEMVEEAEATVNNSSDTESIPSPHTEAAKDTGQNGPKPPATLGADGPPPGPPTPPPEDIPAPTEPTPASEATGAPTPPPAPPSPSAPPPVVPKEEKEEETAAAPPVEEGEEQKPPAAEELAVDTGKAEEPVKSECTEEAEEGPAKGKDAEAAEATAEGALKAEKKEGGSGRATTAKSSGAPQDSDSSATCSADEVDEAEGGDKNRLLSPRPSLLTPTGDPRANASPQKPLDLKQLKQRAAAIPPIQVTKVHEPPREDAAPTKPAPPAPPPPQNLQPESDAPQQPGSSPRGKSRSPAPPADKEAEKPVFFPAFAAEAQKLPGDPPCWTSGLPFPVPPREVIKASPHAPDPSAFSYAPPGHPLPLGLHDTARPVLPRPPTISNPPPLISSAKHPSVLERQIGAISQGMSVQLHVPYSEHAKAPVGPVTMGLPLPMDPKKLAPFSGVKQEQLSPRGQAGPPESLGVPTAQEASVLRGTALGSVPGGSITKGIPSTRVPSDSAITYRGSITHGTPADVLYKGTITRIIGEDSPSRLDRGREDSLPKGHVIYEGKKGHVLSYEGGMSVTQCSKEDGRSSSGPPHETAAPKRTYDMMEGRVGRAISSASIEGLMGRAIPPERHSPHHLKEQHHIRGSITQGIPRSYVEAQEDYLRREAKLLKREGTPPPPPPSRDLTEAYKTQALGPLKLKPAHEGLVATVKEAGRSIHEIPREELRHTPELPLAPRPLKEGSITQGTPLKYDTGASTTGSKKHDVRSLIGSPGRTFPPVHPLDVMADARALERACYEESLKSRPGTASSSGGSIARGAPVIVPELGKPRQSPLTYEDHGAPFAGHLPRGSPVTTREPTPRLQEGSLSSSKASQDRKLTSTPREIAKSPHSTVPEHHPHPISPYEHLLRGVSGVDLYRSHIPLAFDPTSIPRGIPLDAAAAYYLPRHLAPNPTYPHLYPPYLIRGYPDTAALENRQTIINDYITSQQMHHNAATAMAQRADMLRGLSPRESSLALNYAAGPRGIIDLSQVPHLPVLVPPTPGTPATAMDRLAYLPTAPQPFSSRHSSSPLSPGGPTHLTKPTTTSSSERERDRDRERDRDREREKSILTSTTTVEHAPIWRPGTEQSSGSSGGGGGSSSRPASHSHAHQHSPISPRTQDALQQRPSVLHNTGMKGIITAVEPSTPTVLRSTSTSSPVRPAATFPPATHCPLGGTLDGVYPTLMEPVLLPKEAPRVARPERPRADTGHAFLAKPPARSGLEPASSPSKGSEPRPLVPPVSGHATIARTPAKNLAPHHASPDPPAPPASASDPHREKTQSKPFSIQELELRSLGYHGSSYSPEGVEPVSPVSSPSLTHDKGLPKHLEELDKSHLEGELRPKQPGPVKLGGEAAHLPHLRPLPESQPSSSPLLQTAPGVKGHQRVVTLAQHISEVITQDYTRHHPQQLSAPLPAPLYSFPGASCPVLDLRRPPSDLYLPPPDHGAPARGSPHSEGGKRSPEPNKTSVLGGGEDGIEPVSPPEGMTEPGHSRSAVYPLLYRDGEQTEPSRMGSKSPGNTSQPPAFFSKLTESNSAMVKSKKQEINKKLNTHNRNEPEYNISQPGTEIFNMPAITGTGLMTYRSQAVQEHASTNMGLEAIIRKALMGGGGKAKVSGRPSSRKAKSPAPGLASGDRPPSVSSVHSEGDCNRRTPLTNRVWEDRPSSAGSTPFPYNPLIMRLQAGVMASPPPPGLPAGSGPLAGPHHAWDEEPKPLLCSQYETLSDSE

SEQ ID NO: 15891 - protein, 1919 aa, Artificial Sequence
  Synthetic polypeptide
GPGGQEVWGPTPALPPLAGPLSLGLLEHGRNWSAIARMVGSKTVSQCKNFYFNYKKRQNLDEILQQHKLKMEKERNARRKKKKAPAAASEEAAFPPVVEDEEMEASGVSGNEEEMVEEAEALHASGNEVPRGECSGPATVNNSSDTESIPSPHTEAAKDTGQNGPKPPATLGADGPPPGPPTPPPEDIPAPTEPTPASEATGAPTPPPAPPSPSAPPPVVPKEEKEEETAAAPPVEEGEEQKPPAAEELAVDTGKAEEPVKSECTEEAEEGPAKGKDAEAAEATAEGALKAEKKEGGSGRATTAKSSGAPQDSDSSATCSADEVDEAEGGDKNRLLSPRPSLLTPTGDPRANASPQKPLDLKQLKQRAAAIPPIVTKVHEPPREDAAPTKPAPPAPPPPQNLQPESDAPQQPGSSPRGKSRSPAPPADKEAEKPVFFPAFAAEAQKLPGDPPCWTSGLPFPVPPREVIKASPHAPDPSAFSYAPPGHPLPLGLHDTARPVLPRPPTISNPPPLISSAKHPSVLERQIGAISQGMSVQLHVPYSEHAKAPVGPVTMGLPLPMDPKKLAPFSGVKQEQLSPRGQAGPPESLGVPTAQEASVLRGTALGSVPGGSITKGIPSTRVPSDSAITYRGSITHGTPADVLYKGTITRIIGEDSPSRLDRGREDSLPKGHVIYEGKKGHVLSYEGGMSVTQCSKEDGRSSSGPPHETAAPKRTYDMMEGRVGRAISSASIEGLMGRAIPPERHSPHHLKEQHHIRGSITQGIPRSYVEAQEDYLRREAKLLKREGTPPPPPPSRDLTEAYKTQALGPLKLKPAHEGLVATVKEAGRSIHEIPREELRHTPELPLAPRPLKEGSITQGTPLKYDTGASTTGSKKHDVRSLIGSPGRTFPPVHPLDVMADARALERACYEESLKSRPGTASSSGGSIARGAPVIVPELGKPRQSPLTYEDHGAPFAGHLPRGSPVTTREPTPRLQEGSLSSSKASQDRKLTSTPREIAKSPHSTVPEHHPHPISPYEHLLRGVSGVDLYRSHIPLAFDPTSIPRGIPLDAAAAYYLPRHLAPNPTYPHLYPPYLIRGYPDTAALENRQTIINDYITSQQMHHNAATAMAQRADMLRGLSPRESSLALNYAAGPRGIIDLSQVPHLPVLVPPTPGTPATAMDRLAYLPTAPQPFSSRHSSSPLSPGGPTHLTKPTTTSSSERERDRDRERDRDREREKSILTSTTTVEHAPIWRPGTEQSSGSSGGGGGSSSRPASHSHAHQHSPISPRTQDALQQRPSVLHNTGMKGIITAVEPSTPTVLRSTSTSSPVRPAATFPPATHCPLGGTLDGVYPTLMEPVLLPKEAPRVARPERPRADTGHAFLAKPPARSGLEPASSPSKGSEPRPLVPPVSGHATIARTPAKNLAPHHASPDPPAPPASASDPHREKTQSKPFSIQELELRSLGYHGSSYSPEGVEPVSPVSSPSLTHDKGLPKHLEELDKSHLEGELRPKQPGPVKLGGEAAHLPHLRPLPESQPSSSPLLQTAPGVKGHQRVVTLAQHISEVITQDYTRHHPQQLSAPLPAPLYSFPGASCPVLDLRRPPSDLYLPPPDHGAPARGSPHSEGGKRSPEPNKTSVLGGGEDGIEPVSPPEGMTEPGHSRSAVYPLLYRDGEQTEPSRMGSKSPGNTSQPPAFFSKLTESNSAMVKSKKQEINKKLNTHNRNEPEYNISQPGTEIFNMPAITGTGLMTYRSQAVQEHASTNMGLEAIIRKALMGKYDQWEESPPLSANAFNPLNASASLPAAMPITAADGRSDHTLTSPGGGGKAKVSGRPSSRKAKSPAPGLASGDRPPSVSSVHSEGDCNRRTPLTNRVWEDRPSSAGSTPFPYNPLIMRLQAGVMASPPPPGLPAGSGPLAGPHHAWDEEPKPLLCSQYETLSDSE

SEQ ID NO: 15892 - protein, 1903 aa, Artificial Sequence
  Synthetic polypeptide
GPGGQEVWGPTPALPPLAGPLSLGLLEHGRNWSAIARMVGSKTVSQCKNFYFNYKKRQNLDEILQQHKLKMEKERNARRKKKKAPAAASEEAAFPPVVEDEEMEASGVSGNEEEMVEEAEATVNNSSDTESIPSPHTEAAKDTGQNGPKPPATLGADGPPPGPPTPPPEDIPAPTEPTPASEATGAPTPPPAPPSPSAPPPVVPKEEKEEETAAAPPVEEGEEQKPPAAEELAVDTGKAEEPVKSECTEEAEEGPAKGKDAEAAEATAEGALKAEKKEGGSGRATTAKSSGAPQDSDSSATCSADEVDEAEGGDKNRLLSPRPSLLTPTGDPRANASPQKPLDLKQLKQRAAAIPPIQVTKVHEPPREDAAPTKPAPPAPPPPQNLQPESDAPQQPGSSPRGKSRSPAPPADKEAEKPVFFPAFAAEAQKLPGDPPCWTSGLPFPVPPREVIKASPHAPDPSAFSYAPPGHPLPLGLHDTARPVLPRPPTISNPPPLISSAKHPSVLERQIGAISQGMSVQLHVPYSEHAKAPVGPVTMGLPLPMDPKKLAPFSGVKQEQLSPRGQAGPPESLGVPTAQEASVLRGTALGSVPGGSITKGIPSTRVPSDSAITYRGSITHGTPADVLYKGTITRIIGEDSPSRLDRGREDSLPKGHVIYEGKKGHVLSYEGGMSVTQCSKEDGRSSSGPPHETAAPKRTYDMMEGRVGRAISSASIEGLMGRAIPPERHSPHHLKEQHHIRGSITQGIPRSYVEAQEDYLRREAKLLKREGTPPPPPPSRDLTEAYKTQALGPLKLKPAHEGLVATVKEAGRSIHEIPREELRHTPELPLAPRPLKEGSITQGTPLKYDTGASTTGSKKHDVRSLIGSPGRTFPPVHPLDVMADARALERACYEESLKSRPGTASSSGGSIARGAPVIVPELGKPRQSPLTYEDHGAPFAGHLPRGSPVTTREPTPRLQEGSLSSSKASQDRKLTSTPREIAKSPHSTVPEHHPHPISPYEHLLRGVSGVDLYRSHIPLAFDPTSIPRGIPLDAAAAYYLPRHLAPNPTYPHLYPPYLIRGYPDTAALENRQTIINDYITSQQMHHNAATAMAQRADMLRGLSPRESSLALNYAAGPRGIIDLSQVPHLPVLVPPTPGTPATAMDRLAYLPTAPQPFSSRHSSSPLSPGGPTHLTKPTTTSSSERERDRDRERDRDREREKSILTSTTTVEHAPIWRPGTEQSSGSSGGGGGSSSRPASHSHAHQHSPISPRTQDALQQRPSVLHNTGMKGIITAVEPSTPTVLRSTSTSSPVRPAATFPPATHCPLGGTLDGVYPTLMEPVLLPKEAPRVARPERPRADTGHAFLAKPPARSGLEPASSPSKGSEPRPLVPPVSGHATIARTPAKNLAPHHASPDPPAPPASASDPHREKTQSKPFSIQELELRSLGYHGSSYSPEGVEPVSPVSSPSLTHDKGLPKHLEELDKSHLEGELRPKQPGPVKLGGEAAHLPHLRPLPESQPSSSPLLQTAPGVKGHQRVVTLAQHISEVITQDYTRHHPQQLSAPLPAPLYSFPGASCPVLDLRRPPSDLYLPPPDHGAPARGSPHSEGGKRSPEPNKTSVLGGGEDGIEPVSPPEGMTEPGHSRSAVYPLLYRDGEQTEPSRMGSKSPGNTSQPPAFFSKLTESNSAMVKSKKQEINKKLNTHNRNEPEYNISQPGTEIFNMPAITGTGLMTYRSQAVQEHASTNMGLEAIIRKALMGKYDQWEESPPLSANAFNPLNASASLPAAMPITAADGRSDHTLTSPGGGGKAKVSGRPSSRKAKSPAPGLASGDRPPSVSSVHSEGDCNRRTPLTNRVWEDRPSSAGSTPFPYNPLIMRLQAGVMASPPPPGLPAGSGPLAGPHHAWDEEPKPLLCSQYETLSDSE

SEQ ID NO: 15893 - protein, 849 aa, Artificial Sequence
  Synthetic polypeptide
GPGGQEVWGPTPALPPLAGPLSLGLLEHGRNWSAIARMVGSKTVSQCKNFYFNYKKRQNLDEILQQHKLKMEKERNARRKKKKAPAAASEEAAFPPVVEDEEMEASGVSGNEEEMVEEAEALHASGNEVPRGECSGPATVNNSSDTESIPSPHTEAAKDTGQNGPKPPATLGADGPPPGPPTPPPEDIPAPTEPTPASEATGAPTPPPAPPSPSAPPPVVPKEEKEEETAAAPPVEEGEEQKPPAAEELAVDTGKAEEPVKSECTEEAEEGPAKGKDAEAAEATAEGALKAEKKEGGSGRATTAKSSGAPQDSDSSATCSADEVDEAEGGDKNRLLSPRPSLLTPTGDPRANASPQKPLDLKQLKQRAAAIPPIQVTKVHEPPREDAAPTKPAPPAPPPPQNLQPESDAPQQPGSSPRGKSRSPAPPADKEAEKPVFFPAFAAEAQKLPGDPPCWTSGLPFPVPPREVIKASPHAPDPSAFSYAPPGHPLPLGLHDTARPVLPRPPTISNPPPLISSAKHPSVLERQIGAISQGMSVQLHVPYSEHAKAPVGPVTMGLPLPMDPKKLAPFSGVKQEQLSPRGQAGPPESLGVPTAQEASVLRGTALGSVPGGSITKGIPSTRVPSDSAITYRGSITHGTPADVLYKGTITRIIGEDSPSRLDRGREDSLPKGHVIYEGKKGHVLSYEGGMSVTQCSKEDGRSSSGPPHETAAPKRTYDMMEGRVGRAISSASIEGLMGRAIPPERHSPHHLKEQHHIRGSITQGIPRSYVEAQEDYLRREAKLLKREGTPPPPPPSRDLTEAYKTQALGPLKLKPAHEGLVATVKEAGRSIHEIPREELRHTPELPLAP

SEQ ID NO: 15894 - protein, 170 aa, Artificial Sequence
  Synthetic polypeptide
GPGGQEVWGPTPALPPLAGPLSLGLLEHGRNWSAIARMVGSKTVSQCKNFYFNYKKRQNLDEILQQHKLKMEKERNARRKKKKAPAAASEEAAFPPVVEDEEMEASGVSGNEEEMVEEAEATVNNSSDTESIPSPHTEAAKDTGQNGPKPPATLGADGPPPGPPTPPPED

SEQ ID NO: 15895 - protein, 106 aa, Artificial Sequence
  Synthetic polypeptide
FQLSHTWSRSSASAMTSSWRPGRRRWSASRTTPGGGPRRARCASTTRSSSLRSASSASCRSACRAGWASGAVGCPCRPPAASTRCQRSSMASQSRRTWRSRCASWP

SEQ ID NO: 15896 - protein, 11 aa, Artificial Sequence
  Synthetic polypeptide
ATHGAEVLPAL

SEQ ID NO: 15897 - protein, 2276 aa, Artificial Sequence
  Synthetic polypeptide
CTAQLPVVWQWAPSGLSGAAGAPAACGCWTLEAWLGRTRARLLNFTGFVISVEPHMEQKFCQRYDQLMEAWEKKVERIENNPRRRAKESKVREYYEKQFPEIRKQRELQERMQSRVGQRGSGLSMSAARSEHEVSEIIDGLSEQENLEKQMRQLAVIPPMLYDADQQRIKFINMNGLMADPMKVYKDRQVMNMWSEQEKETFREKFMQHPKNFGLIASFLERKTVAECVLYYYLTKKNENYKSLVRRSYRRRGKSQQQQQQQQQQQQQQQQQPMPRSSQEEKDEKEKEKEAEKEEEKPEVENDKEDLLKEKTDDTSGEDNDEKEAVASKGRKTANSQGRRKGRITRSMANEANSEEAITPQQSAELASMELNESSRWTEEEMETAKKGLLEHGRNWSAIARMVGSKTVSQCKNFYFNYKKRQNLDEILQQHKLKMEKERNARRKKKKAPAAASEEAAFPPVVEDEEMEASGVSGNEEEMVEEAEALHASGNEVPRGECSGPATVNNSSDTESIPSPHTEAAKDTGQNGPKPPATLGADGPPPGPPTPPPEDIPAPTEPTPASEATGAPTPPPAPPSPSAPPPVVPKEEKEEETAAAPPVEEGEEQKPPAAEELAVDTGKAEEPVKSECTEEAEEGPAKGKDAEAAEATAEGALKAEKKEGGSGRATTAKSSGAPQDSDSSATCSADEVDEAEGGDKNRLLSPRPSLLTPTGDPRANASPQKPLDLKQLKQRAAAIPPIQVTKVHEPPREDAAPTKPAPPAPPPPQNLQPESDAPQQPGSSPRGKSRSPAPPADKEAFAAEAQKLPGDPPCWTSGLPFPVPPREVIKASPHAPDPSAFSYAPPGHPLPLGLHDTARPVLPRPPTISNPPPLISSAKHPSVLERQIGAISQGMSVQLHVPYSEHAKAPVGPVTMGLPLPMDPKKLAPFSGVKQEQLSPRGQAGPPESLGVPTAQEASVLRGTALGSVPGGSITKGIPSTRVPSDSAITYRGSITHGTPADVLYKGTITRIIGEDSPSRLDRGREDSLPKGHVIYEGKKGHVLSYEGGMSVTQCSKEDGRSSSGPPHETAAPKRTYDMMEGRVGRAISSASIEGLMGRAIPPERHSPHHLKEQHHIRGSITQGIPRSYVEAQEDYLRREAKLLKREGTPPPPPPSRDLTEAYKTQALGPLKLKPAHEGLVATVKEAGRSIHEIPREELRHTPELPLAPRPLKEGSITQGTPLKYDTGASTTGSKKHDVRSLIGSPGRTFPPVHPLDVMADARALERACYEESLKSRPGTASSSGGSIARGAPVIVPELGKPRQSPLTYEDHGAPFAGHLPRGSPVTTREPTPRLQEGSLSSSKASQDRKLTSTPREIAKSPHSTVPEHHPHPISPYEHLLRGVSGVDLYRSHIPLAFDPTSIPRGIPLDAAAAYYLPRHLAPNPTYPHLYPPYLIRGYPDTAALENRQTIINDYITSQQMHHNAATAMAQRADMLRGLSPRESSLALNYAAGPRGIIDLSQVPHLPVLVPPTPGTPATAMDRLAYLPTAPQPFSSRHSSSPLSPGGPTHLTKPTTTSSSERERDRDRERDRDREREKSILTSTTTVEHAPIWRPGTEQSSGSSGGGGGSSSRPASHSHAHQHSPISPRTQDALQQRPSVLHNTGMKGIITAVEPSTPTVLRSTSTSSPVRPAATFPPATHCPLGGTLDGVYPTLMEPVLLPKEAPRVARPERPRADTGHAFLAKPPARSGLEPASSPSKGSEPRPLVPPVSGHATIARTPAKNLAPHHASPDPPAPPASASDPHREKTQSKPFSIQELELRSLGYHGSSYSPEGVEPVSPVSSPSLTHDKGLPKHLEELDKSHLEGELRPKQPGPVKLGGEAAHLPHLRPLPESQPSSSPLLQTAPGVKGHQRVVTLAQHISEVITQDYTRHHPQQLSAPLPAPLYSFPGASCPVLDLRRPPSDLYLPPPDHGAPARGSPHSEGGKRSPEPNKTSVLGGGEDGIEPVSPPEGMTEPGHSRSAVYPLLYRDGEQTEPSRMGSKSPGNTSQPPAFFSKLTESNSAMVKSKKQEINKKLNTHNRNEPEYNISQPGTEIFNMPAITGTGLMTYRSQAVQEHASTNMGLEAIIRKALMGKYDQWEESPPLSANAFNPLNASASLPAAMPITAADGRSDHTLTSPGGGGKAKVSGRPSSRKAKSPAPGLASGDRPPSVSSVHSEGDCNRRTPLTNRVWEDRPSSAGSTPFPYNPLIMRLQAGVMASPPPPGLPAGSGPLAGPHHAWDEEPKPLLCSQYETLSDSE

SEQ ID NO: 15898 - protein, 105 aa, Artificial Sequence
  Synthetic polypeptide
FQLSHTWSRSSASAMTSSWRPGRRRWSASRTTPGGGPRRARCASTTRSSSLRSASSASCRSACRGWASGAVGCPCRPPAASTRCQRSSMASQSRRTWRSRCASWP

SEQ ID NO: 15899 - protein, 2220 aa, Artificial Sequence
  Synthetic polypeptide
CTAQLPVVWQWAPSGLSGAAGAPAACGCWTLEAWLGRTRARLLNFTGFVISVEPHMEQKFCQRYDQLMEAWEKKVERIENNPRRRAKESKVREYYEKQFPEIRKQRELQERMQRVGQRGSGLSMSAARSEHEVSEIIDGLSEQENLEKQMRQLAVIPPMLYDADQQRIKFINMNGLMADPMKVYKDRQVMNMWSEQEKETFREKFMQHPKNFGLIASFLERKTVAECVLYYYLTKKNENYKSLVRRSYRRRGKSQQQQQQQQQQQQQQQQQPMPRSSQEEKDEKEKEKEAEKEEEKPEVENDKEDLLKEKTDDTSGEDNDEKEAVASKGRKTANSQGRRKGRITRSMANEANSEEAITPQQSAELASMELNESSRWTEEEMETAKKGLLEHGRNWSAIARMVGSKTVSQCKNFYFNYKKRQNLDEILQQHKLKMEKERNARRKKKKAPAAASEEAAFPPVVEDEEMEASGVSGNEEEMVEEAEATVNNSSDTESIPSPHTEAAKDTGQNGPKPPATLGADGPPPGPPTPPPEDIPAPTEPTPASEATGAPTPPPAPPSPSAPPPVVPKEEKEEETAAAPPVEEGEEQKPPAAEELAVDTGKAEEPVKSECTEEAEEGPAKGKDAEAAEATAEGALKAEKKEGGSGRATTAKSSGAPQDSDSSATCSADEVDEAEGGDKNRLLSPRPSLLTPTGDPRANASPQKPLDLKQLKQRAAAIPPIQVTKVHEPPREDAAPTKPAPPAPPPPQNLQPESDAPQQPGSSPRGKSRSPAPPADKEAEKPVFFPAFAAEAQKLPGDPPCWTSGLPFPVPPREVIKASPHAPDPSAFSYAPPGHPLPLGLHDTARPVLPRPPTISNPPPLISSAKHPSVLERQIGAISQGMSVQLHVPYSEHAKAPVGPVTMGLPLPMDPKKLAPFSGVKQEQLSPRGQAGPPESLGVPTAQEASVLRGTALGSVPGGSITKGIPSTRVPSDSAITYRGSITHGTPADVLYKGTITRIIGEDSPSRLDRGREDSLPKGHVIYEGKKGHVLSYEGGMSVTQCSKEDGRSSSGPPHETAAPKRTYDMMEGRVGRAISSASIEGLMGRAIPPERHSPHHLKEQHHIRGSITQGIPRSYVEAQEDYLRREAKLLKREGTPPPPPPSRDLTEAYKTQALGPLKLKPAHEGLVATVKEAGRSIHEIPREELRHTPELPLAPRPLKEGSITQGTPLKYDTGASTTGSKKHDVRSLIGSPGRTFPPVHPLDVMADARALERACYEESLKSRPGTASSSGGSIARGAPVIVPELGKPRQSPLTYEDHGAPFAGHLPRGSPVTTREPTPRLQEGSLSSSKASQDRKLTSTPREIAKSPHSTVPEHHPHPISPYEHLLRGVSGVDLYRSHIPLAFDPTSIPRGIPLDAAAAYYLPRHLAPNPTYPHLYPPYLIRGYPDTAALENRQTIINDYITSQQMHHNAATAMAQRADMLRGLSPRESSLALNYAAGPRGIIDLSQVPHLPVLVPPTPGTPATAMDRLAYLPTAPQPFSSRHSSSPLSPGGPTHLTKPTTTSSSERERDRDRERDRDREREKSILTSTTTVEHAPIWRPGTEQSSGSSGGGGGSSSRPASHSHAHQHSPISPRTQDALQQRPSVLHNTGMKGIITAVEPSTPTVLRSTSTSSPVRPAATFPPATHCPLGGTLDGVYPTLMEPVLLPKEAPRVARPERPRADTGHAFLAKPPARSGLEPASSPSKGSEPRPLVPPVSGHATIARTPAKNLAPHHASPDPPAPPASASDPHREKTQSKPFSIQELELRSLGYHGSSYSPEGVEPVSPVSSPSLTHDKGLPKHLEELDKSHLEGELRPKQPGPVKLGGEAAHLPHLRPLPESQPSSSPLLQTAPGVKGHQRVVTLAQHISEVITQDYTRHHPQQLSAPLPAPLYSFPGASCPVLDLRRPPSDLYLPPPDHGAPARGSPHSEGGKRSPEPNKTSVLGGGEDGIEPVSPPEGMTEPGHSRSAVYPLLYRDGEQTEPSRMGSKSPGNTSQPPAFFSKLTESNSAMVKSKKQEINKKLNTHNRNEPEYNISQPGTEIFNMPAITGTGLMTYRSQAVQEHASTNMGLEAIIRKALMGGGGKAKVSGRPSSRKAKSPAPGLASGDRPPSVSSVHSEGDCNRRTPLTNRVWEDRPSSAGSTPFPYNPLIMRLQAGVMASPPPPGLPAGSGPLAGPHHAWDEEPKPLLCSQYETLSDSE

SEQ ID NO: 15900 - protein, 2283 aa, Artificial Sequence
  Synthetic polypeptide
CTAQLPVVWQWAPSGLSGAAGAPAACGCWTLEAWLGRTRARLLNFTGFVISVEPHMEQKFCQRYDQLMEAWEKKVERIENNPRRRAKESKVREYYEKQFPEIRKQRELQERMQSRVGQRGSGLSMSAARSEHEVSEIIDGLSEQENLEKQMRQLAVIPPMLYDADQQRIKFINMNGLMADPMKVYKDRQVMNMWSEQEKETFREKFMQHPKNFGLIASFLERKTVAECVLYYYLTKKNENYKSLVRRSYRRRGKSQQQQQQQQQQQQQQQQQPMPRSSQEEKDEKEKEKEAEKEEEKPEVENDKEDLLKEKTDDTSGEDNDEKEAVASKGRKTANSQGRRKGRITRSMANEANSEEAITPQQSAELASMELNESSRWTEEEMETAKKGLLEHGRNWSAIARMVGSKTVSQCKNFYFNYKKRQNLDEILQQHKLKMEKERNARRKKKKAPAAASEEAAFPPVVEDEEMEASGVSGNEEEMVEEAEALHASGNEVPRGECSGPATVNNSSDTESIPSPHTEAAKDTGQNGPKPPATLGADGPPPGPPTPPPEDIPAPTEPTPASEATGAPTPPPAPPSPSAPPPVVPKEEKEEETAAAPPVEEGEEQKPPAAEELAVDTGKAEEPVKSECTEEAEEGPAKGKDAEAAEATAEGALKAEKKEGGSGRATTAKSSGAPQDSDSSATCSADEVDEAEGGDKNRLLSPRPSLLTPTGDPRANASPQKPLDLKQLKQRAAAIPPIVTKVHEPPREDAAPTKPAPPAPPPPQNLQPESDAPQQPGSSPRGKSRSPAPPADKEAEKPVFFPAFAAEAQKLPGDPPCWTSGLPFPVPPREVIKASPHAPDPSAFSYAPPGHPLPLGLHDTARPVLPRPPTISNPPPLISSAKHPSVLERQIGAISQGMSVQLHVPYSEHAKAPVGPVTMGLPLPMDPKKLAPFSGVKQEQLSPRGQAGPPESLGVPTAQEASVLRGTALGSVPGGSITKGIPSTRVPSDSAITYRGSITHGTPADVLYKGTITRIIGEDSPSRLDRGREDSLPKGHVIYEGKKGHVLSYEGGMSVTQCSKEDGRSSSGPPHETAAPKRTYDMMEGRVGRAISSASIEGLMGRAIPPERHSPHHLKEQHHIRGSITQGIPRSYVEAQEDYLRREAKLLKREGTPPPPPPSRDLTEAYKTQALGPLKLKPAHEGLVATVKEAGRSIHEIPREELRHTPELPLAPRPLKEGSITQGTPLKYDTGASTTGSKKHDVRSLIGSPGRTFPPVHPLDVMADARALERACYEESLKSRPGTASSSGGSIARGAPVIVPELGKPRQSPLTYEDHGAPFAGHLPRGSPVTTREPTPRLQEGSLSSSKASQDRKLTSTPREIAKSPHSTVPEHHPHPISPYEHLLRGVSGVDLYRSHIPLAFDPTSIPRGIPLDAAAAYYLPRHLAPNPTYPHLYPPYLIRGYPDTAALENRQTIINDYITSQQMHHNAATAMAQRADMLRGLSPRESSLALNYAAGPRGIIDLSQVPHLPVLVPPTPGTPATAMDRLAYLPTAPQPFSSRHSSSPLSPGGPTHLTKPTTTSSSERERDRDRERDRDREREKSILTSTTTVEHAPIWRPGTEQSSGSSGGGGGSSSRPASHSHAHQHSPISPRTQDALQQRPSVLHNTGMKGIITAVEPSTPTVLRSTSTSSPVRPAATFPPATHCPLGGTLDGVYPTLMEPVLLPKEAPRVARPERPRADTGHAFLAKPPARSGLEPASSPSKGSEPRPLVPPVSGHATIARTPAKNLAPHHASPDPPAPPASASDPHREKTQSKPFSIQELELRSLGYHGSSYSPEGVEPVSPVSSPSLTHDKGLPKHLEELDKSHLEGELRPKQPGPVKLGGEAAHLPHLRPLPESQPSSSPLLQTAPGVKGHQRVVTLAQHISEVITQDYTRHHPQQLSAPLPAPLYSFPGASCPVLDLRRPPSDLYLPPPDHGAPARGSPHSEGGKRSPEPNKTSVLGGGEDGIEPVSPPEGMTEPGHSRSAVYPLLYRDGEQTEPSRMGSKSPGNTSQPPAFFSKLTESNSAMVKSKKQEINKKLNTHNRNEPEYNISQPGTEIFNMPAITGTGLMTYRSQAVQEHASTNMGLEAIIRKALMGKYDQWEESPPLSANAFNPLNASASLPAAMPITAADGRSDHTLTSPGGGGKAKVSGRPSSRKAKSPAPGLASGDRPPSVSSVHSEGDCNRRTPLTNRVWEDRPSSAGSTPFPYNPLIMRLQAGVMASPPPPGLPAGSGPLAGPHHAWDEEPKPLLCSQYETLSDSE

SEQ ID NO: 15901 - protein, 2221 aa, Artificial Sequence
  Synthetic polypeptide
CTAQLPVVWQWAPSGLSGAAGAPAACGCWTLEAWLGRTRARLLNFTGFVISVEPHMEQKFCQRYDQLMEAWEKKVERIENNPRRRAKESKVREYYEKQFPEIRKQRELQERMQSRVGQRGSGLSMSAARSEHEVSEIIDGLSEQENLEKQMRQLAVIPPMLYDADQQRIKFINMNGLMADPMKVYKDRQVMNMWSEQEKETFREKFMQHPKNFGLIASFLERKTVAECVLYYYLTKKNENYKSLVRRSYRRRGKSQQQQQQQQQQQQQQQQQPMPRSSQEEKDEKEKEKEAEKEEEKPEVENDKEDLLKEKTDDTSGEDNDEKEAVASKGRKTANSQGRRKGRITRSMANEANSEEAITPQQSAELASMELNESSRWTEEEMETAKKGLLEHGRNWSAIARMVGSKTVSQCKNFYFNYKKRQNLDEILQQHKLKMEKERNARRKKKKAPAAASEEAAFPPVVEDEEMEASGVSGNEEEMVEEAEATVNNSSDTESIPSPHTEAAKDTGQNGPKPPATLGADGPPPGPPTPPPEDIPAPTEPTPASEATGAPTPPPAPPSPSAPPPVVPKEEKEEETAAAPPVEEGEEQKPPAAEELAVDTGKAEEPVKSECTEEAEEGPAKGKDAEAAEATAEGALKAEKKEGGSGRATTAKSSGAPQDSDSSATCSADEVDEAEGGDKNRLLSPRPSLLTPTGDPRANASPQKPLDLKQLKQRAAAIPPIQVTKVHEPPREDAAPTKPAPPAPPPPQNLQPESDAPQQPGSSPRGKSRSPAPPADKEAEKPVFFPAFAAEAQKLPGDPPCWTSGLPFPVPPREVIKASPHAPDPSAFSYAPPGHPLPLGLHDTARPVLPRPPTISNPPPLISSAKHPSVLERQIGAISQGMSVQLHVPYSEHAKAPVGPVTMGLPLPMDPKKLAPFSGVKQEQLSPRGQAGPPESLGVPTAQEASVLRGTALGSVPGGSITKGIPSTRVPSDSAITYRGSITHGTPADVLYKGTITRIIGEDSPSRLDRGREDSLPKGHVIYEGKKGHVLSYEGGMSVTQCSKEDGRSSSGPPHETAAPKRTYDMMEGRVGRAISSASIEGLMGRAIPPERHSPHHLKEQHHIRGSITQGIPRSYVEAQEDYLRREAKLLKREGTPPPPPPSRDLTEAYKTQALGPLKLKPAHEGLVATVKEAGRSIHEIPREELRHTPELPLAPRPLKEGSITQGTPLKYDTGASTTGSKKHDVRSLIGSPGRTFPPVHPLDVMADARALERACYEESLKSRPGTASSSGGSIARGAPVIVPELGKPRQSPLTYEDHGAPFAGHLPRGSPVTTREPTPRLQEGSLSSSKASQDRKLTSTPREIAKSPHSTVPEHHPHPISPYEHLLRGVSGVDLYRSHIPLAFDPTSIPRGIPLDAAAAYYLPRHLAPNPTYPHLYPPYLIRGYPDTAALENRQTIINDYITSQQMHHNAATAMAQRADMLRGLSPRESSLALNYAAGPRGIIDLSQVPHLPVLVPPTPGTPATAMDRLAYLPTAPQPFSSRHSSSPLSPGGPTHLTKPTTTSSSERERDRDRERDRDREREKSILTSTTTVEHAPIWRPGTEQSSGSSGGGGGSSSRPASHSHAHQHSPISPRTQDALQQRPSVLHNTGMKGIITAVEPSTPTVLRSTSTSSPVRPAATFPPATHCPLGGTLDGVYPTLMEPVLLPKEAPRVARPERPRADTGHAFLAKPPARSGLEPASSPSKGSEPRPLVPPVSGHATIARTPAKNLAPHHASPDPPAPPASASDPHREKTQSKPFSIQELELRSLGYHGSSYSPEGVEPVSPVSSPSLTHDKGLPKHLEELDKSHLEGELRPKQPGPVKLGGEAAHLPHLRPLPESQPSSSPLLQTAPGVKGHQRVVTLAQHISEVITQDYTRHHPQQLSAPLPAPLYSFPGASCPVLDLRRPPSDLYLPPPDHGAPARGSPHSEGGKRSPEPNKTSVLGGGEDGIEPVSPPEGMTEPGHSRSAVYPLLYRDGEQTEPSRMGSKSPGNTSQPPAFFSKLTESNSAMVKSKKQEINKKLNTHNRNEPEYNISQPGTEIFNMPAITGTGLMTYRSQAVQEHASTNMGLEAIIRKALMGGGGKAKVSGRPSSRKAKSPAPGLASGDRPPSVSSVHSEGDCNRRTPLTNRVWEDRPSSAGSTPFPYNPLIMRLQAGVMASPPPPGLPAGSGPLAGPHHAWDEEPKPLLCSQYETLSDSE

SEQ ID NO: 15902 - protein, 2266 aa, Artificial Sequence
  Synthetic polypeptide
CTAQLPVVWQWAPSGLSGAAGAPAACGCWTLEAWLGRTRARLLNFTGFVISVEPHMEQKFCQRYDQLMEAWEKKVERIENNPRRRAKESKVREYYEKQFPEIRKQRELQERMQRVGQRGSGLSMSAARSEHEVSEIIDGLSEQENLEKQMRQLAVIPPMLYDADQQRIKFINMNGLMADPMKVYKDRQVMNMWSEQEKETFREKFMQHPKNFGLIASFLERKTVAECVLYYYLTKKNENYKSLVRRSYRRRGKSQQQQQQQQQQQQQQQQQPMPRSSQEEKDEKEKEKEAEKEEEKPEVENDKEDLLKEKTDDTSGEDNDEKEAVASKGRKTANSQGRRKGRITRSMANEANSEEAITPQQSAELASMELNESSRWTEEEMETAKKGLLEHGRNWSAIARMVGSKTVSQCKNFYFNYKKRQNLDEILQQHKLKMEKERNARRKKKKAPAAASEEAAFPPVVEDEEMEASGVSGNEEEMVEEAEATVNNSSDTESIPSPHTEAAKDTGQNGPKPPATLGADGPPPGPPTPPPEDIPAPTEPTPASEATGAPTPPPAPPSPSAPPPVVPKEEKEEETAAAPPVEEGEEQKPPAAEELAVDTGKAEEPVKSECTEEAEEGPAKGKDAEAAEATAEGALKAEKKEGGSGRATTAKSSGAPQDSDSSATCSADEVDEAEGGDKNRLLSPRPSLLTPTGDPRANASPQKPLDLKQLKQRAAAIPPIQVTKVHEPPREDAAPTKPAPPAPPPPQNLQPESDAPQQPGSSPRGKSRSPAPPADKEAEKPVFFPAFAAEAQKLPGDPPCWTSGLPFPVPPREVIKASPHAPDPSAFSYAPPGHPLPLGLHDTARPVLPRPPTISNPPPLISSAKHPSVLERQIGAISQGMSVQLHVPYSEHAKAPVGPVTMGLPLPMDPKKLAPFSGVKQEQLSPRGQAGPPESLGVPTAQEASVLRGTALGSVPGGSITKGIPSTRVPSDSAITYRGSITHGTPADVLYKGTITRIIGEDSPSRLDRGREDSLPKGHVIYEGKKGHVLSYEGGMSVTQCSKEDGRSSSGPPHETAAPKRTYDMMEGRVGRAISSASIEGLMGRAIPPERHSPHHLKEQHHIRGSITQGIPRSYVEAQEDYLRREAKLLKREGTPPPPPPSRDLTEAYKTQALGPLKLKPAHEGLVATVKEAGRSIHEIPREELRHTPELPLAPRPLKEGSITQGTPLKYDTGASTTGSKKHDVRSLIGSPGRTFPPVHPLDVMADARALERACYEESLKSRPGTASSSGGSIARGAPVIVPELGKPRQSPLTYEDHGAPFAGHLPRGSPVTTREPTPRLQEGSLSSSKASQDRKLTSTPREIAKSPHSTVPEHHPHPISPYEHLLRGVSGVDLYRSHIPLAFDPTSIPRGIPLDAAAAYYLPRHLAPNPTYPHLYPPYLIRGYPDTAALENRQTIINDYITSQQMHHNAATAMAQRADMLRGLSPRESSLALNYAAGPRGIIDLSQVPHLPVLVPPTPGTPATAMDRLAYLPTAPQPFSSRHSSSPLSPGGPTHLTKPTTTSSSERERDRDRERDRDREREKSILTSTTTVEHAPIWRPGTEQSSGSSGGGGGSSSRPASHSHAHQHSPISPRTQDALQQRPSVLHNTGMKGIITAVEPSTPTVLRSTSTSSPVRPAATFPPATHCPLGGTLDGVYPTLMEPVLLPKEAPRVARPERPRADTGHAFLAKPPARSGLEPASSPSKGSEPRPLVPPVSGHATIARTPAKNLAPHHASPDPPAPPASASDPHREKTQSKPFSIQELELRSLGYHGSSYSPEGVEPVSPVSSPSLTHDKGLPKHLEELDKSHLEGELRPKQPGPVKLGGEAAHLPHLRPLPESQPSSSPLLQTAPGVKGHQRVVTLAQHISEVITQDYTRHHPQQLSAPLPAPLYSFPGASCPVLDLRRPPSDLYLPPPDHGAPARGSPHSEGGKRSPEPNKTSVLGGGEDGIEPVSPPEGMTEPGHSRSAVYPLLYRDGEQTEPSRMGSKSPGNTSQPPAFFSKLTESNSAMVKSKKQEINKKLNTHNRNEPEYNISQPGTEIFNMPAITGTGLMTYRSQAVQEHASTNMGLEAIIRKALMGKYDQWEESPPLSANAFNPLNASASLPAAMPITAADGRSDHTLTSPGGGGKAKVSGRPSSRKAKSPAPGLASGDRPPSVSSVHSEGDCNRRTPLTNRVWEDRPSSAGSTPFPYNPLIMRLQAGVMASPPPPGLPAGSGPLAGPHHAWDEEPKPLLCSQYETLSDSE

SEQ ID NO: 15903 - protein, 1213 aa, Artificial Sequence
  Synthetic polypeptide
CTAQLPVVWQWAPSGLSGAAGAPAACGCWTLEAWLGRTRARLLNFTGFVISVEPHMEQKFCQRYDQLMEAWEKKVERIENNPRRRAKESKVREYYEKQFPEIRKQRELQERMQSRVGQRGSGLSMSAARSEHEVSEIIDGLSEQENLEKQMRQLAVIPPMLYDADQQRIKFINMNGLMADPMKVYKDRQVMNMWSEQEKETFREKFMQHPKNFGLIASFLERKTVAECVLYYYLTKKNENYKSLVRRSYRRRGKSQQQQQQQQQQQQQQQQQPMPRSSQEEKDEKEKEKEAEKEEEKPEVENDKEDLLKEKTDDTSGEDNDEKEAVASKGRKTANSQGRRKGRITRSMANEANSEEAITPQQSAELASMELNESSRWTEEEMETAKKGLLEHGRNWSAIARMVGSKTVSQCKNFYFNYKKRQNLDEILQQHKLKMEKERNARRKKKKAPAAASEEAAFPPVVEDEEMEASGVSGNEEEMVEEAEALHASGNEVPRGECSGPATVNNSSDTESIPSPHTEAAKDTGQNGPKPPATLGADGPPPGPPTPPPEDIPAPTEPTPASEATGAPTPPPAPPSPSAPPPVVPKEEKEEETAAAPPVEEGEEQKPPAAEELAVDTGKAEEPVKSECTEEAEEGPAKGKDAEAAEATAEGALKAEKKEGGSGRATTAKSSGAPQDSDSSATCSADEVDEAEGGDKNRLLSPRPSLLTPTGDPRANASPQKPLDLKQLKQRAAAIPPIQVTKVHEPPREDAAPTKPAPPAPPPPQNLQPESDAPQQPGSSPRGKSRSPAPPADKEAEKPVFFPAFAAEAQKLPGDPPCWTSGLPFPVPPREVIKASPHAPDPSAFSYAPPGHPLPLGLHDTARPVLPRPPTISNPPPLISSAKHPSVLERQIGAISQGMSVQLHVPYSEHAKAPVGPVTMGLPLPMDPKKLAPFSGVKQEQLSPRGQAGPPESLGVPTAQEASVLRGTALGSVPGGSITKGIPSTRVPSDSAITYRGSITHGTPADVLYKGTITRIIGEDSPSRLDRGREDSLPKGHVIYEGKKGHVLSYEGGMSVTQCSKEDGRSSSGPPHETAAPKRTYDMMEGRVGRAISSASIEGLMGRAIPPERHSPHHLKEQHHIRGSITQGIPRSYVEAQEDYLRREAKLLKREGTPPPPPPSRDLTEAYKTQALGPLKLKPAHEGLVATVKEAGRSIHEIPREELRHTPELPLAP

SEQ ID NO: 15904 - protein, 255 aa, Artificial Sequence
  Synthetic polypeptide
CTAQLPVVWQWAPSGLSGAAGAPAACGCWTLEAWLGRTRARLLNFTGFVISVEPHMEQKFCQRYDQLMEAWEKKVERIENNPRRRAKESKVREYYEKQFPEIRKQRELQERMQSRVGQRGSGLSMSAARSEHEVSEIIDGLSEQENLEKQMRQLAVIPPMLYDADQQRIKFINMNGLMADPMKVYKDRQVMNMWSEQEKETFREKFMQHPKNFGLIASFLERKTVAECVLYYYLTKKNENYKSLVRRSYRRRGKS

SEQ ID NO: 15905 - protein, 65 aa, Artificial Sequence
  Synthetic polypeptide
FQLSHTWSRSSASAMTSSWRPGRRRWSASRTTPGGGPRRARCASTTRSSSLRSASSASCRSACRG

SEQ ID NO: 15906 - protein, 114 aa, Artificial Sequence
  Synthetic polypeptide
CTAQLPVVWQWAPSGLSGAAGAPAACGCWTLEAWLGRTRARLLNFTGFVISVEPHMEQKFCQRYDQLMEAWEKKVERIENNPRRRAKESKVREYYEKQFPEIRKQRELQERMQR

SEQ ID NO: 15907 - protein, 55 aa, Artificial Sequence
  Synthetic polypeptide
FQLSHTWSRSSASAMTSSWRPGRRRWSASRTTPGGGPRRARCASTTRSSSLRSAS

SEQ ID NO: 15908 - protein, 105 aa, Artificial Sequence
  Synthetic polypeptide
CTAQLPVVWQWAPSGLSGAAGAPAACGCWTLEAWLGRTRARLLNFTGFVISVEPHMEQKFCQRYDQLMEAWEKKVERIENNPRRRAKESKVREYYEKQFPEIRKQ

SEQ ID NO: 15909 - protein, 26 aa, Artificial Sequence
  Synthetic polypeptide
YFSNIGCRACLVNTAVQPALRHPAVS

SEQ ID NO: 15910 - protein, 2261 aa, Artificial Sequence
  Synthetic polypeptide
TPLYNQPSDTRQYHENIKINQAMRKKLILYFKRRNHARKQWEQKFCQRYDQLMEAWEKKVERIENNPRRRAKESKVREYYEKQFPEIRKQRELQERMQSRVGQRGSGLSMSAARSEHEVSEIIDGLSEQENLEKQMRQLAVIPPMLYDADQQRIKFINMNGLMADPMKVYKDRQVMNMWSEQEKETFREKFMQHPKNFGLIASFLERKTVAECVLYYYLTKKNENYKSLVRRSYRRRGKSQQQQQQQQQQQQQQQQQPMPRSSQEEKDEKEKEKEAEKEEEKPEVENDKEDLLKEKTDDTSGEDNDEKEAVASKGRKTANSQGRRKGRITRSMANEANSEEAITPQQSAELASMELNESSRWTEEEMETAKKGLLEHGRNWSAIARMVGSKTVSQCKNFYFNYKKRQNLDEILQQHKLKMEKERNARRKKKKAPAAASEEAAFPPVVEDEEMEASGVSGNEEEMVEEAEALHASGNEVPRGECSGPATVNNSSDTESIPSPHTEAAKDTGQNGPKPPATLGADGPPPGPPTPPPEDIPAPTEPTPASEATGAPTPPPAPPSPSAPPPVVPKEEKEEETAAAPPVEEGEEQKPPAAEELAVDTGKAEEPVKSECTEEAEEGPAKGKDAEAAEATAEGALKAEKKEGGSGRATTAKSSGAPQDSDSSATCSADEVDEAEGGDKNRLLSPRPSLLTPTGDPRANASPQKPLDLKQLKQRAAAIPPIQVTKVHEPPREDAAPTKPAPPAPPPPQNLQPESDAPQQPGSSPRGKSRSPAPPADKEAFAAEAQKLPGDPPCWTSGLPFPVPPREVIKASPHAPDPSAFSYAPPGHPLPLGLHDTARPVLPRPPTISNPPPLISSAKHPSVLERQIGAISQGMSVQLHVPYSEHAKAPVGPVTMGLPLPMDPKKLAPFSGVKQEQLSPRGQAGPPESLGVPTAQEASVLRGTALGSVPGGSITKGIPSTRVPSDSAITYRGSITHGTPADVLYKGTITRIIGEDSPSRLDRGREDSLPKGHVIYEGKKGHVLSYEGGMSVTQCSKEDGRSSSGPPHETAAPKRTYDMMEGRVGRAISSASIEGLMGRAIPPERHSPHHLKEQHHIRGSITQGIPRSYVEAQEDYLRREAKLLKREGTPPPPPPSRDLTEAYKTQALGPLKLKPAHEGLVATVKEAGRSIHEIPREELRHTPELPLAPRPLKEGSITQGTPLKYDTGASTTGSKKHDVRSLIGSPGRTFPPVHPLDVMADARALERACYEESLKSRPGTASSSGGSIARGAPVIVPELGKPRQSPLTYEDHGAPFAGHLPRGSPVTTREPTPRLQEGSLSSSKASQDRKLTSTPREIAKSPHSTVPEHHPHPISPYEHLLRGVSGVDLYRSHIPLAFDPTSIPRGIPLDAAAAYYLPRHLAPNPTYPHLYPPYLIRGYPDTAALENRQTIINDYITSQQMHHNAATAMAQRADMLRGLSPRESSLALNYAAGPRGIIDLSQVPHLPVLVPPTPGTPATAMDRLAYLPTAPQPFSSRHSSSPLSPGGPTHLTKPTTTSSSERERDRDRERDRDREREKSILTSTTTVEHAPIWRPGTEQSSGSSGGGGGSSSRPASHSHAHQHSPISPRTQDALQQRPSVLHNTGMKGIITAVEPSTPTVLRSTSTSSPVRPAATFPPATHCPLGGTLDGVYPTLMEPVLLPKEAPRVARPERPRADTGHAFLAKPPARSGLEPASSPSKGSEPRPLVPPVSGHATIARTPAKNLAPHHASPDPPAPPASASDPHREKTQSKPFSIQELELRSLGYHGSSYSPEGVEPVSPVSSPSLTHDKGLPKHLEELDKSHLEGELRPKQPGPVKLGGEAAHLPHLRPLPESQPSSSPLLQTAPGVKGHQRVVTLAQHISEVITQDYTRHHPQQLSAPLPAPLYSFPGASCPVLDLRRPPSDLYLPPPDHGAPARGSPHSEGGKRSPEPNKTSVLGGGEDGIEPVSPPEGMTEPGHSRSAVYPLLYRDGEQTEPSRMGSKSPGNTSQPPAFFSKLTESNSAMVKSKKQEINKKLNTHNRNEPEYNISQPGTEIFNMPAITGTGLMTYRSQAVQEHASTNMGLEAIIRKALMGKYDQWEESPPLSANAFNPLNASASLPAAMPITAADGRSDHTLTSPGGGGKAKVSGRPSSRKAKSPAPGLASGDRPPSVSSVHSEGDCNRRTPLTNRVWEDRPSSAGSTPFPYNPLIMRLQAGVMASPPPPGLPAGSGPLAGPHHAWDEEPKPLLCSQYETLSDSE

SEQ ID NO: 15911 - protein, 36 aa, Artificial Sequence
  Synthetic polypeptide
GGAVLIFFQHRVPRLPCKHRCTTSPPTPGSIMRTSK

SEQ ID NO: 15912 - protein, 2205 aa, Artificial Sequence
  Synthetic polypeptide
TPLYNQPSDTRQYHENIKINQAMRKKLILYFKRRNHARKQWEQKFCQRYDQLMEAWEKKVERIENNPRRRAKESKVREYYEKQFPEIRKQRELQERMQRVGQRGSGLSMSAARSEHEVSEIIDGLSEQENLEKQMRQLAVIPPMLYDADQQRIKFINMNGLMADPMKVYKDRQVMNMWSEQEKETFREKFMQHPKNFGLIASFLERKTVAECVLYYYLTKKNENYKSLVRRSYRRRGKSQQQQQQQQQQQQQQQQQPMPRSSQEEKDEKEKEKEAEKEEEKPEVENDKEDLLKEKTDDTSGEDNDEKEAVASKGRKTANSQGRRKGRITRSMANEANSEEAITPQQSAELASMELNESSRWTEEEMETAKKGLLEHGRNWSAIARMVGSKTVSQCKNFYFNYKKRQNLDEILQQHKLKMEKERNARRKKKKAPAAASEEAAFPPVVEDEEMEASGVSGNEEEMVEEAEATVNNSSDTESIPSPHTEAAKDTGQNGPKPPATLGADGPPPGPPTPPPEDIPAPTEPTPASEATGAPTPPPAPPSPSAPPPVVPKEEKEEETAAAPPVEEGEEQKPPAAEELAVDTGKAEEPVKSECTEEAEEGPAKGKDAEAAEATAEGALKAEKKEGGSGRATTAKSSGAPQDSDSSATCSADEVDEAEGGDKNRLLSPRPSLLTPTGDPRANASPQKPLDLKQLKQRAAAIPPIQVTKVHEPPREDAAPTKPAPPAPPPPQNLQPESDAPQQPGSSPRGKSRSPAPPADKEAEKPVFFPAFAAEAQKLPGDPPCWTSGLPFPVPPREVIKASPHAPDPSAFSYAPPGHPLPLGLHDTARPVLPRPPTISNPPPLISSAKHPSVLERQIGAISQGMSVQLHVPYSEHAKAPVGPVTMGLPLPMDPKKLAPFSGVKQEQLSPRGQAGPPESLGVPTAQEASVLRGTALGSVPGGSITKGIPSTRVPSDSAITYRGSITHGTPADVLYKGTITRIIGEDSPSRLDRGREDSLPKGHVIYEGKKGHVLSYEGGMSVTQCSKEDGRSSSGPPHETAAPKRTYDMMEGRVGRAISSASIEGLMGRAIPPERHSPHHLKEQHHIRGSITQGIPRSYVEAQEDYLRREAKLLKREGTPPPPPPSRDLTEAYKTQALGPLKLKPAHEGLVATVKEAGRSIHEIPREELRHTPELPLAPRPLKEGSITQGTPLKYDTGASTTGSKKHDVRSLIGSPGRTFPPVHPLDVMADARALERACYEESLKSRPGTASSSGGSIARGAPVIVPELGKPRQSPLTYEDHGAPFAGHLPRGSPVTTREPTPRLQEGSLSSSKASQDRKLTSTPREIAKSPHSTVPEHHPHPISPYEHLLRGVSGVDLYRSHIPLAFDPTSIPRGIPLDAAAAYYLPRHLAPNPTYPHLYPPYLIRGYPDTAALENRQTIINDYITSQQMHHNAATAMAQRADMLRGLSPRESSLALNYAAGPRGIIDLSQVPHLPVLVPPTPGTPATAMDRLAYLPTAPQPFSSRHSSSPLSPGGPTHLTKPTTTSSSERERDRDRERDRDREREKSILTSTTTVEHAPIWRPGTEQSSGSSGGGGGSSSRPASHSHAHQHSPISPRTQDALQQRPSVLHNTGMKGIITAVEPSTPTVLRSTSTSSPVRPAATFPPATHCPLGGTLDGVYPTLMEPVLLPKEAPRVARPERPRADTGHAFLAKPPARSGLEPASSPSKGSEPRPLVPPVSGHATIARTPAKNLAPHHASPDPPAPPASASDPHREKTQSKPFSIQELELRSLGYHGSSYSPEGVEPVSPVSSPSLTHDKGLPKHLEELDKSHLEGELRPKQPGPVKLGGEAAHLPHLRPLPESQPSSSPLLQTAPGVKGHQRVVTLAQHISEVITQDYTRHHPQQLSAPLPAPLYSFPGASCPVLDLRRPPSDLYLPPPDHGAPARGSPHSEGGKRSPEPNKTSVLGGGEDGIEPVSPPEGMTEPGHSRSAVYPLLYRDGEQTEPSRMGSKSPGNTSQPPAFFSKLTESNSAMVKSKKQEINKKLNTHNRNEPEYNISQPGTEIFNMPAITGTGLMTYRSQAVQEHASTNMGLEAIIRKALMGGGGKAKVSGRPSSRKAKSPAPGLASGDRPPSVSSVHSEGDCNRRTPLTNRVWEDRPSSAGSTPFPYNPLIMRLQAGVMASPPPPGLPAGSGPLAGPHHAWDEEPKPLLCSQYETLSDSE

SEQ ID NO: 15913 - protein, 2268 aa, Artificial Sequence
  Synthetic polypeptide
TPLYNQPSDTRQYHENIKINQAMRKKLILYFKRRNHARKQWEQKFCQRYDQLMEAWEKKVERIENNPRRRAKESKVREYYEKQFPEIRKQRELQERMQSRVGQRGSGLSMSAARSEHEVSEIIDGLSEQENLEKQMRQLAVIPPMLYDADQQRIKFINMNGLMADPMKVYKDRQVMNMWSEQEKETFREKFMQHPKNFGLIASFLERKTVAECVLYYYLTKKNENYKSLVRRSYRRRGKSQQQQQQQQQQQQQQQQQPMPRSSQEEKDEKEKEKEAEKEEEKPEVENDKEDLLKEKTDDTSGEDNDEKEAVASKGRKTANSQGRRKGRITRSMANEANSEEAITPQQSAELASMELNESSRWTEEEMETAKKGLLEHGRNWSAIARMVGSKTVSQCKNFYFNYKKRQNLDEILQQHKLKMEKERNARRKKKKAPAAASEEAAFPPVVEDEEMEASGVSGNEEEMVEEAEALHASGNEVPRGECSGPATVNNSSDTESIPSPHTEAAKDTGQNGPKPPATLGADGPPPGPPTPPPEDIPAPTEPTPASEATGAPTPPPAPPSPSAPPPVVPKEEKEEETAAAPPVEEGEEQKPPAAEELAVDTGKAEEPVKSECTEEAEEGPAKGKDAEAAEATAEGALKAEKKEGGSGRATTAKSSGAPQDSDSSATCSADEVDEAEGGDKNRLLSPRPSLLTPTGDPRANASPQKPLDLKQLKQRAAAIPPIVTKVHEPPREDAAPTKPAPPAPPPPQNLQPESDAPQQPGSSPRGKSRSPAPPADKEAEKPVFFPAFAAEAQKLPGDPPCWTSGLPFPVPPREVIKASPHAPDPSAFSYAPPGHPLPLGLHDTARPVLPRPPTISNPPPLISSAKHPSVLERQIGAISQGMSVQLHVPYSEHAKAPVGPVTMGLPLPMDPKKLAPFSGVKQEQLSPRGQAGPPESLGVPTAQEASVLRGTALGSVPGGSITKGIPSTRVPSDSAITYRGSITHGTPADVLYKGTITRIIGEDSPSRLDRGREDSLPKGHVIYEGKKGHVLSYEGGMSVTQCSKEDGRSSSGPPHETAAPKRTYDMMEGRVGRAISSASIEGLMGRAIPPERHSPHHLKEQHHIRGSITQGIPRSYVEAQEDYLRREAKLLKREGTPPPPPPSRDLTEAYKTQALGPLKLKPAHEGLVATVKEAGRSIHEIPREELRHTPELPLAPRPLKEGSITQGTPLKYDTGASTTGSKKHDVRSLIGSPGRTFPPVHPLDVMADARALERACYEESLKSRPGTASSSGGSIARGAPVIVPELGKPRQSPLTYEDHGAPFAGHLPRGSPVTTREPTPRLQEGSLSSSKASQDRKLTSTPREIAKSPHSTVPEHHPHPISPYEHLLRGVSGVDLYRSHIPLAFDPTSIPRGIPLDAAAAYYLPRHLAPNPTYPHLYPPYLIRGYPDTAALENRQTIINDYITSQQMHHNAATAMAQRADMLRGLSPRESSLALNYAAGPRGIIDLSQVPHLPVLVPPTPGTPATAMDRLAYLPTAPQPFSSRHSSSPLSPGGPTHLTKPTTTSSSERERDRDRERDRDREREKSILTSTTTVEHAPIWRPGTEQSSGSSGGGGGSSSRPASHSHAHQHSPISPRTQDALQQRPSVLHNTGMKGIITAVEPSTPTVLRSTSTSSPVRPAATFPPATHCPLGGTLDGVYPTLMEPVLLPKEAPRVARPERPRADTGHAFLAKPPARSGLEPASSPSKGSEPRPLVPPVSGHATIARTPAKNLAPHHASPDPPAPPASASDPHREKTQSKPFSIQELELRSLGYHGSSYSPEGVEPVSPVSSPSLTHDKGLPKHLEELDKSHLEGELRPKQPGPVKLGGEAAHLPHLRPLPESQPSSSPLLQTAPGVKGHQRVVTLAQHISEVITQDYTRHHPQQLSAPLPAPLYSFPGASCPVLDLRRPPSDLYLPPPDHGAPARGSPHSEGGKRSPEPNKTSVLGGGEDGIEPVSPPEGMTEPGHSRSAVYPLLYRDGEQTEPSRMGSKSPGNTSQPPAFFSKLTESNSAMVKSKKQEINKKLNTHNRNEPEYNISQPGTEIFNMPAITGTGLMTYRSQAVQEHASTNMGLEAIIRKALMGKYDQWEESPPLSANAFNPLNASASLPAAMPITAADGRSDHTLTSPGGGGKAKVSGRPSSRKAKSPAPGLASGDRPPSVSSVHSEGDCNRRTPLTNRVWEDRPSSAGSTPFPYNPLIMRLQAGVMASPPPPGLPAGSGPLAGPHHAWDEEPKPLLCSQYETLSDSE

SEQ ID NO: 15914 - protein, 2206 aa, Artificial Sequence
  Synthetic polypeptide
TPLYNQPSDTRQYHENIKINQAMRKKLILYFKRRNHARKQWEQKFCQRYDQLMEAWEKKVERIENNPRRRAKESKVREYYEKQFPEIRKQRELQERMQSRVGQRGSGLSMSAARSEHEVSEIIDGLSEQENLEKQMRQLAVIPPMLYDADQQRIKFINMNGLMADPMKVYKDRQVMNMWSEQEKETFREKFMQHPKNFGLIASFLERKTVAECVLYYYLTKKNENYKSLVRRSYRRRGKSQQQQQQQQQQQQQQQQQPMPRSSQEEKDEKEKEKEAEKEEEKPEVENDKEDLLKEKTDDTSGEDNDEKEAVASKGRKTANSQGRRKGRITRSMANEANSEEAITPQQSAELASMELNESSRWTEEEMETAKKGLLEHGRNWSAIARMVGSKTVSQCKNFYFNYKKRQNLDEILQQHKLKMEKERNARRKKKKAPAAASEEAAFPPVVEDEEMEASGVSGNEEEMVEEAEATVNNSSDTESIPSPHTEAAKDTGQNGPKPPATLGADGPPPGPPTPPPEDIPAPTEPTPASEATGAPTPPPAPPSPSAPPPVVPKEEKEEETAAAPPVEEGEEQKPPAAEELAVDTGKAEEPVKSECTEEAEEGPAKGKDAEAAEATAEGALKAEKKEGGSGRATTAKSSGAPQDSDSSATCSADEVDEAEGGDKNRLLSPRPSLLTPTGDPRANASPQKPLDLKQLKQRAAAIPPIQVTKVHEPPREDAAPTKPAPPAPPPPQNLQPESDAPQQPGSSPRGKSRSPAPPADKEAEKPVFFPAFAAEAQKLPGDPPCWTSGLPFPVPPREVIKASPHAPDPSAFSYAPPGHPLPLGLHDTARPVLPRPPTISNPPPLISSAKHPSVLERQIGAISQGMSVQLHVPYSEHAKAPVGPVTMGLPLPMDPKKLAPFSGVKQEQLSPRGQAGPPESLGVPTAQEASVLRGTALGSVPGGSITKGIPSTRVPSDSAITYRGSITHGTPADVLYKGTITRIIGEDSPSRLDRGREDSLPKGHVIYEGKKGHVLSYEGGMSVTQCSKEDGRSSSGPPHETAAPKRTYDMMEGRVGRAISSASIEGLMGRAIPPERHSPHHLKEQHHIRGSITQGIPRSYVEAQEDYLRREAKLLKREGTPPPPPPSRDLTEAYKTQALGPLKLKPAHEGLVATVKEAGRSIHEIPREELRHTPELPLAPRPLKEGSITQGTPLKYDTGASTTGSKKHDVRSLIGSPGRTFPPVHPLDVMADARALERACYEESLKSRPGTASSSGGSIARGAPVIVPELGKPRQSPLTYEDHGAPFAGHLPRGSPVTTREPTPRLQEGSLSSSKASQDRKLTSTPREIAKSPHSTVPEHHPHPISPYEHLLRGVSGVDLYRSHIPLAFDPTSIPRGIPLDAAAAYYLPRHLAPNPTYPHLYPPYLIRGYPDTAALENRQTIINDYITSQQMHHNAATAMAQRADMLRGLSPRESSLALNYAAGPRGIIDLSQVPHLPVLVPPTPGTPATAMDRLAYLPTAPQPFSSRHSSSPLSPGGPTHLTKPTTTSSSERERDRDRERDRDREREKSILTSTTTVEHAPIWRPGTEQSSGSSGGGGGSSSRPASHSHAHQHSPISPRTQDALQQRPSVLHNTGMKGIITAVEPSTPTVLRSTSTSSPVRPAATFPPATHCPLGGTLDGVYPTLMEPVLLPKEAPRVARPERPRADTGHAFLAKPPARSGLEPASSPSKGSEPRPLVPPVSGHATIARTPAKNLAPHHASPDPPAPPASASDPHREKTQSKPFSIQELELRSLGYHGSSYSPEGVEPVSPVSSPSLTHDKGLPKHLEELDKSHLEGELRPKQPGPVKLGGEAAHLPHLRPLPESQPSSSPLLQTAPGVKGHQRVVTLAQHISEVITQDYTRHHPQQLSAPLPAPLYSFPGASCPVLDLRRPPSDLYLPPPDHGAPARGSPHSEGGKRSPEPNKTSVLGGGEDGIEPVSPPEGMTEPGHSRSAVYPLLYRDGEQTEPSRMGSKSPGNTSQPPAFFSKLTESNSAMVKSKKQEINKKLNTHNRNEPEYNISQPGTEIFNMPAITGTGLMTYRSQAVQEHASTNMGLEAIIRKALMGGGGKAKVSGRPSSRKAKSPAPGLASGDRPPSVSSVHSEGDCNRRTPLTNRVWEDRPSSAGSTPFPYNPLIMRLQAGVMASPPPPGLPAGSGPLAGPHHAWDEEPKPLLCSQYETLSDSE

SEQ ID NO: 15915 - protein, 2251 aa, Artificial Sequence
  Synthetic polypeptide
TPLYNQPSDTRQYHENIKINQAMRKKLILYFKRRNHARKQWEQKFCQRYDQLMEAWEKKVERIENNPRRRAKESKVREYYEKQFPEIRKQRELQERMQRVGQRGSGLSMSAARSEHEVSEIIDGLSEQENLEKQMRQLAVIPPMLYDADQQRIKFINMNGLMADPMKVYKDRQVMNMWSEQEKETFREKFMQHPKNFGLIASFLERKTVAECVLYYYLTKKNENYKSLVRRSYRRRGKSQQQQQQQQQQQQQQQQQPMPRSSQEEKDEKEKEKEAEKEEEKPEVENDKEDLLKEKTDDTSGEDNDEKEAVASKGRKTANSQGRRKGRITRSMANEANSEEAITPQQSAELASMELNESSRWTEEEMETAKKGLLEHGRNWSAIARMVGSKTVSQCKNFYFNYKKRQNLDEILQQHKLKMEKERNARRKKKKAPAAASEEAAFPPVVEDEEMEASGVSGNEEEMVEEAEATVNNSSDTESIPSPHTEAAKDTGQNGPKPPATLGADGPPPGPPTPPPEDIPAPTEPTPASEATGAPTPPPAPPSPSAPPPVVPKEEKEEETAAAPPVEEGEEQKPPAAEELAVDTGKAEEPVKSECTEEAEEGPAKGKDAEAAEATAEGALKAEKKEGGSGRATTAKSSGAPQDSDSSATCSADEVDEAEGGDKNRLLSPRPSLLTPTGDPRANASPQKPLDLKQLKQRAAAIPPIQVTKVHEPPREDAAPTKPAPPAPPPPQNLQPESDAPQQPGSSPRGKSRSPAPPADKEAEKPVFFPAFAAEAQKLPGDPPCWTSGLPFPVPPREVIKASPHAPDPSAFSYAPPGHPLPLGLHDTARPVLPRPPTISNPPPLISSAKHPSVLERQIGAISQGMSVQLHVPYSEHAKAPVGPVTMGLPLPMDPKKLAPFSGVKQEQLSPRGQAGPPESLGVPTAQEASVLRGTALGSVPGGSITKGIPSTRVPSDSAITYRGSITHGTPADVLYKGTITRIIGEDSPSRLDRGREDSLPKGHVIYEGKKGHVLSYEGGMSVTQCSKEDGRSSSGPPHETAAPKRTYDMMEGRVGRAISSASIEGLMGRAIPPERHSPHHLKEQHHIRGSITQGIPRSYVEAQEDYLRREAKLLKREGTPPPPPPSRDLTEAYKTQALGPLKLKPAHEGLVATVKEAGRSIHEIPREELRHTPELPLAPRPLKEGSITQGTPLKYDTGASTTGSKKHDVRSLIGSPGRTFPPVHPLDVMADARALERACYEESLKSRPGTASSSGGSIARGAPVIVPELGKPRQSPLTYEDHGAPFAGHLPRGSPVTTREPTPRLQEGSLSSSKASQDRKLTSTPREIAKSPHSTVPEHHPHPISPYEHLLRGVSGVDLYRSHIPLAFDPTSIPRGIPLDAAAAYYLPRHLAPNPTYPHLYPPYLIRGYPDTAALENRQTIINDYITSQQMHHNAATAMAQRADMLRGLSPRESSLALNYAAGPRGIIDLSQVPHLPVLVPPTPGTPATAMDRLAYLPTAPQPFSSRHSSSPLSPGGPTHLTKPTTTSSSERERDRDRERDRDREREKSILTSTTTVEHAPIWRPGTEQSSGSSGGGGGSSSRPASHSHAHQHSPISPRTQDALQQRPSVLHNTGMKGIITAVEPSTPTVLRSTSTSSPVRPAATFPPATHCPLGGTLDGVYPTLMEPVLLPKEAPRVARPERPRADTGHAFLAKPPARSGLEPASSPSKGSEPRPLVPPVSGHATIARTPAKNLAPHHASPDPPAPPASASDPHREKTQSKPFSIQELELRSLGYHGSSYSPEGVEPVSPVSSPSLTHDKGLPKHLEELDKSHLEGELRPKQPGPVKLGGEAAHLPHLRPLPESQPSSSPLLQTAPGVKGHQRVVTLAQHISEVITQDYTRHHPQQLSAPLPAPLYSFPGASCPVLDLRRPPSDLYLPPPDHGAPARGSPHSEGGKRSPEPNKTSVLGGGEDGIEPVSPPEGMTEPGHSRSAVYPLLYRDGEQTEPSRMGSKSPGNTSQPPAFFSKLTESNSAMVKSKKQEINKKLNTHNRNEPEYNISQPGTEIFNMPAITGTGLMTYRSQAVQEHASTNMGLEAIIRKALMGKYDQWEESPPLSANAFNPLNASASLPAAMPITAADGRSDHTLTSPGGGGKAKVSGRPSSRKAKSPAPGLASGDRPPSVSSVHSEGDCNRRTPLTNRVWEDRPSSAGSTPFPYNPLIMRLQAGVMASPPPPGLPAGSGPLAGPHHAWDEEPKPLLCSQYETLSDSE

SEQ ID NO: 15916 - protein, 1198 aa, Artificial Sequence
  Synthetic polypeptide
TPLYNQPSDTRQYHENIKINQAMRKKLILYFKRRNHARKQWEQKFCQRYDQLMEAWEKKVERIENNPRRRAKESKVREYYEKQFPEIRKQRELQERMQSRVGQRGSGLSMSAARSEHEVSEIIDGLSEQENLEKQMRQLAVIPPMLYDADQQRIKFINMNGLMADPMKVYKDRQVMNMWSEQEKETFREKFMQHPKNFGLIASFLERKTVAECVLYYYLTKKNENYKSLVRRSYRRRGKSQQQQQQQQQQQQQQQQQPMPRSSQEEKDEKEKEKEAEKEEEKPEVENDKEDLLKEKTDDTSGEDNDEKEAVASKGRKTANSQGRRKGRITRSMANEANSEEAITPQQSAELASMELNESSRWTEEEMETAKKGLLEHGRNWSAIARMVGSKTVSQCKNFYFNYKKRQNLDEILQQHKLKMEKERNARRKKKKAPAAASEEAAFPPVVEDEEMEASGVSGNEEEMVEEAEALHASGNEVPRGECSGPATVNNSSDTESIPSPHTEAAKDTGQNGPKPPATLGADGPPPGPPTPPPEDIPAPTEPTPASEATGAPTPPPAPPSPSAPPPVVPKEEKEEETAAAPPVEEGEEQKPPAAEELAVDTGKAEEPVKSECTEEAEEGPAKGKDAEAAEATAEGALKAEKKEGGSGRATTAKSSGAPQDSDSSATCSADEVDEAEGGDKNRLLSPRPSLLTPTGDPRANASPQKPLDLKQLKQRAAAIPPIQVTKVHEPPREDAAPTKPAPPAPPPPQNLQPESDAPQQPGSSPRGKSRSPAPPADKEAEKPVFFPAFAAEAQKLPGDPPCWTSGLPFPVPPREVIKASPHAPDPSAFSYAPPGHPLPLGLHDTARPVLPRPPTISNPPPLISSAKHPSVLERQIGAISQGMSVQLHVPYSEHAKAPVGPVTMGLPLPMDPKKLAPFSGVKQEQLSPRGQAGPPESLGVPTAQEASVLRGTALGSVPGGSITKGIPSTRVPSDSAITYRGSITHGTPADVLYKGTITRIIGEDSPSRLDRGREDSLPKGHVIYEGKKGHVLSYEGGMSVTQCSKEDGRSSSGPPHETAAPKRTYDMMEGRVGRAISSASIEGLMGRAIPPERHSPHHLKEQHHIRGSITQGIPRSYVEAQEDYLRREAKLLKREGTPPPPPPSRDLTEAYKTQALGPLKLKPAHEGLVATVKEAGRSIHEIPREELRHTPELPLAP

SEQ ID NO: 15917 - protein, 240 aa, Artificial Sequence
  Synthetic polypeptide
TPLYNQPSDTRQYHENIKINQAMRKKLILYFKRRNHARKQWEQKFCQRYDQLMEAWEKKVERIENNPRRRAKESKVREYYEKQFPEIRKQRELQERMQSRVGQRGSGLSMSAARSEHEVSEIIDGLSEQENLEKQMRQLAVIPPMLYDADQQRIKFINMNGLMADPMKVYKDRQVMNMWSEQEKETFREKFMQHPKNFGLIASFLERKTVAECVLYYYLTKKNENYKSLVRRSYRRRGKS

SEQ ID NO: 15918 - protein, 99 aa, Artificial Sequence
  Synthetic polypeptide
TPLYNQPSDTRQYHENIKINQAMRKKLILYFKRRNHARKQWEQKFCQRYDQLMEAWEKKVERIENNPRRRAKESKVREYYEKQFPEIRKQRELQERMQR

SEQ ID NO: 15919 - protein, 90 aa, Artificial Sequence
  Synthetic polypeptide
TPLYNQPSDTRQYHENIKINQAMRKKLILYFKRRNHARKQWEQKFCQRYDQLMEAWEKKVERIENNPRRRAKESKVREYYEKQFPEIRKQ

SEQ ID NO: 15920 - protein, 14 aa, Artificial Sequence
  Synthetic polypeptide
QVPVASATLEAEGY

SEQ ID NO: 15921 - protein, 79 aa, Artificial Sequence
  Synthetic polypeptide
AQKFETNLGSKTLSLLKIQKLAGCGNKCLWPQLLWRLRAIEWPDFPNKCQIGETGLSAGVAALPPISRSPASVCRGRCF

SEQ ID NO: 15922 - protein, 12 aa, Artificial Sequence
  Synthetic polypeptide
CLPSHVELWICL

SEQ ID NO: 15923 - protein, 96 aa, Artificial Sequence
  Synthetic polypeptide
LCSSFTFSCDCDASPAMWNYGSVCRNSVQLHAGAPEKIRQVCRADPESERDVRHPPPHTDGHRPDCAPAGQAQQHAARGRAAGALQHEARPRAQAV

SEQ ID NO: 15924 - protein, 115 aa, Artificial Sequence
  Synthetic polypeptide
FCKGEFPYTSSLACRHVRCDFAPHSLLAVIVMPPQPCGTMDLSVETLFSFMQERQKRYAKYAEQIQKVNEMSAILRRIQMGIDQTVPLLDRLNSMLPEGERLEPFSMKPDRELRL

SEQ ID NO: 15925 - protein, 11 aa, Artificial Sequence
  Synthetic polypeptide
VKEARHQGPHG

SEQ ID NO: 15926 - protein, 15 aa, Artificial Sequence
  Synthetic polypeptide
KKPDIKGHMGKWILL

SEQ ID NO: 15927 - protein, 756 aa, Artificial Sequence
  Synthetic polypeptide
RLHILGCYSAKKRNEAATQATTWKNLENMTLSERSQTSRATWVNGSFYEILQVDFGIDNSSDLAGAQQITWQVEYPIEDSMSELVVSEIFVSQTTFVGIVPLAMDTEVLNTAILTGKPVSVPVKVVGVQEDGSVVDVSESVECKSADEDVIKVSNNCDSIFVNGKEMKSKVDTIVNFTHQHFTSQFEVTVWAPRLPLQIEISDTELSQIKGWRIPVAANRRPTRESDDEDDEEKKGRGCSLQYQHATVRVLTQFVAESPDLGQLTYMLGPDWQFDITDLVTEFMKVEEPKIAQLQDGRTLAGREPGITTVQVLSPLSDSILAEKTVIVLDDRVTIAELGVQLVAGMSLSLQPHRADKRAIVSTAAALDVLQSPQQEAIVSSWILFSDGSVTPLDIYDPKDYSVTVSSLDEMVVSVQANLESKWPIVVAEGEGQGPLIKLEMMISEPCQKTKRKSVLAVGKGNVKVKFEPSSDEHQGGSNDIEGINREYKDHLSNSIEREGNQERAVQEWFHRGTPVGQEESTNKSTTPQSPMEGKNKLLKSGGPDAFTSFPTQGKSPDPNNPSDLTVTSRGLTDLEIGMYALLCVFCLAILVFLINCVAFAWKYRHKRFAVSEQGNIPHSHDWVWLGNEVELLENPVDITLPSEECTTMIDRGLQFEERNFLLNGSSQKTFHSQLLRPSDYVYEKEIKNEPMNSSGPKRKRVKFTSYTTILPEDGGPYTNSILFDSDDNIKWVCQDMGLGDSQDFRDYMESLQDQM

SEQ ID NO: 15928 - protein, 663 aa, Artificial Sequence
  Synthetic polypeptide
GQELKTSLDNMDTEVLNTAILTGKPVSVPVKVVGVQEDGSVVDVSESVECKSADEDVIKVSNNCDSIFVNGKEMKSKVDTIVNFTHQHFTSQFEVTVWAPRLPLQIEISDTELSQIKGWRIPVAANRRPTRESDDEDDEEKKGRGCSLQYQHATVRVLTQFVAESPDLGQLTYMLGPDWQFDITDLVTEFMKVEEPKIAQLQDGRTLAGREPGITTVQVLSPLSDSILAEKTVIVLDDRVTIAELGVQLVAGMSLSLQPHRADKRAIVSTAAALDVLQSPQQEAIVSSWILFSDGSVTPLDIYDPKDYSVTVSSLDEMVVSVQANLESKWPIVVAEGEGQGPLIKLEMMISEPCQKTKRKSVLAVGKGNVKVKFEPSSDEHQGGSNDIEGINREYKDHLSNSIEREGNQERAVQEWFHRGTPVGQEESTNKSTTPQSPMEGKNKLLKSGGPDAFTSFPTQGKSPDPNNPSDLTVTSRGLTDLEIGMYALLCVFCLAILVFLINCVAFAWKYRHKRFAVSEQGNIPHSHDWVWLGNEVELLENPVDITLPSEECTTMIDRGLQFEERNFLLNGSSQKTFHSQLLRPSDYVYEKEIKNEPMNSSGPKRKRVKFTSYTTILPEDGGPYTNSILFDSDDNIKWVCQDMGLGDSQDFRDYMESLQDQM

SEQ ID NO: 15929 - protein, 23 aa, Artificial Sequence
  Synthetic polypeptide
AQEGGWLEARSLRPAWTTWTPRF

SEQ ID NO: 15930 - protein, 40 aa, Artificial Sequence
  Synthetic polypeptide
DQPGQHGHRGFEHCHSHWKACFSSCQSRGGPGGWFCGRCV

SEQ ID NO: 15931 - protein, 11 aa, Artificial Sequence
  Synthetic polypeptide
QSGWRQSKEAR

SEQ ID NO: 15932 - protein, 128 aa, Artificial Sequence
  Synthetic polypeptide
AMMVPLCSSLGNRVVGGKVKKPGKRGRKPAKIDLKAKLERSRQSARECRARKKLRYQYLEELVSSRERAICALREELEMYKQWCMAMDQGKIPSEIKALLTGEEQNKSQQNSSRHTKAGKTDANSNSW

SEQ ID NO: 15933 - protein, 16 aa, Artificial Sequence
  Synthetic polypeptide
WCHCAPAWVTEWLEAK

SEQ ID NO: 15934 - protein, 14 aa, Artificial Sequence
  Synthetic polypeptide
TLLNCTLLKGEFYG

SEQ ID NO: 15935 - protein, 400 aa, Artificial Sequence
  Synthetic polypeptide
RVNFMVKDRGPEATRRFFNWFYWSINLGAILSLGGIAYIQQNVSFVTGYAIPTVCVGLAFVVFLCGQSVFITKPPDGSAFTDMFKILTYSCCSQKRSGERQSNGEGIGVFQQSSKQSLFDSCKMSHGGPFTEEKVEDVKALVKIVPVFLALIPYWTVYFQMQTTYVLQSLHLRIPEISNITTTPHTLPAAWLTMFDAVLILLLIPLKDKLVDPILRRHGLLPSSLKRIAVGMFFVMCSAFAAGILESKRLNLVKEKTINQTIGNVVYHAADLSLWWQVPQYLLIGISEIFASIAGLEFAYSAAPKSMQSAIMGLFFFFSGVGSFVGSGLLALVSIKAIGWMSSHTDFGNINGCYLNYYFFLLAAIQGATLLLFLIISVKYDHHRDHQRSRANGVPTSRRA

SEQ ID NO: 15936 - protein, 30 aa, Artificial Sequence
  Synthetic polypeptide
ILWLKIEVRKPLGDFLIGFIGALTWERSCR

SEQ ID NO: 15937 - protein, 115 aa, Artificial Sequence
  Synthetic polypeptide
RVNFMVKDRGPEATRRFFNWFYWSINLGAILSLGGIAYIQQNVSFVTGYAIPTVCVGLAFVVFLCGQSVFITKPPDGSAFTDMFKILTYSCCSQKRSGERQSNGCRQHMFYRVFI

SEQ ID NO: 15938 - protein, 35 aa, Artificial Sequence
  Synthetic polypeptide
WTNVAFLRLKIEVRKPLGDFLIGFIGALTWERSCR

SEQ ID NO: 15939 - protein, 12 aa, Artificial Sequence
  Synthetic polypeptide
LANNGPMLPFLG

SEQ ID NO: 15940 - protein, 47 aa, Artificial Sequence
  Synthetic polypeptide
IEISRSQPRPTESEFPGMGPGIYIYVVISLGLQKLALERQAPLLCPF

SEQ ID NO: 15941 - protein, 25 aa, Artificial Sequence
  Synthetic polypeptide
RFLGPSQDLLNQNFQAWDRAYIYMS

SEQ ID NO: 15942 - protein, 359 aa, Artificial Sequence
  Synthetic polypeptide
IRISRHGTGHIYICRDIIGLAETGSGKTGAFALPILNALLETPQRLFALVLTPTRELAFQISEQFEALGSSIGVQSAVIVGGIDSMSQSLALAKKPHIIIATPGRLIDHLENTKGFNLRALKYLVMDEADRILNMDFETEVDKILKVIPRDRKTFLFSATMTKKVQKLQRAALKNPVKCAVSSKYQTVEKLQQYYIFIPSKFKSKRLGSLNKFKAKARSILLATDVASRGLDIPHVDVVVNFDIPTHSKDYIHRVGRTARAGRSGKAITFVTQYDVELFQRIEHLIGKKLPGFPTQDDEVMMLTERVAEAQRFARMELREHGEKKKRSREDAGDNDDTEGAIGVRNKVAGGKMKKRKGR

SEQ ID NO: 15943 - protein, 408 aa, Artificial Sequence
  Synthetic polypeptide
IRISRHGTGHIYICRDIIGLAETGSGKTGAFALPILNALLETPQRLFALVLTPTRELAFQISEQFEALGSSIGVQSAVIVGGIDSMSQSLALAKKPHIIIATPGRLIDHLENTKGFNLRALKYLVMDEADRILNMDFETEVDKILKVIPRDRKTFLFSATMTKKVQKLQRAALKNPVKCAVSSKYQTVEKLQQYYIFIPSKFKDTYLVYILNELAGNSFMIFCSTCNNTQRTALLLRNLGFTAIPLHGQMSQSKRLGSLNKFKAKARSILLATDVASRGLDIPHVDVVVNFDIPTHSKDYIHRVGRTARAGRSGKAITFVTQYDVELFQRIEHLIGKKLPGFPTQDDEVMMLTERVAEAQRFARMELREHGEKKKRSREDAGDNDDTEGAIGVRNKVAGGKMKKRKGR

SEQ ID NO: 15944 - protein, 6 aa, Artificial Sequence
  Synthetic polypeptide
RDIRSG

SEQ ID NO: 15945 - protein, 15 aa, Artificial Sequence
  Synthetic polypeptide
GTSGVAKQVRLPAPG

SEQ ID NO: 15946 - protein, 553 aa, Artificial Sequence
  Synthetic polypeptide
GHQEWLSRFGYLPPADPTTGQLQTQEELSKAITAMQQFGGLEATGILDEATLALMKTPRCSLPDLPVLTQARRRRQAPAPTKWNKRNLSWRVRTFPRDSPLGHDTVRALMYYALKVWSDIAPLNFHEVAGSAADIQIDFSKADHNDGYPFDGPGGTVAHAFFPGHHHTAGDTHFDDDEAWTFRSSDAHGMDLFAVAVHEFGHAIGLSHVAAAHSIMRPYYQGPVGDPLRYGLPYEDKVRVWQLYGVRESVSPTAQPEEPPLLPEPPDNRSSAPPRKDVPHRCSTHFDAVAQIRGEAFFFKGKYFWRLTRDRHLVSLQPAQMHRFWRGLPLHLDSVDAVYERTSDHKIVFFKGDRYWVFKDNNVEEGYPRPVSDFSLPPGGIDAAFSWAHNDRTYFFKDQLYWRYDDHTRHMDPGYPAQSPLWRGVPSTLDDAMRWSDGASYFFRGQEYWKVLDGELEVAPGYPQSTARDWLVCGDSQADGSVAAGVDAAEGPRAPPGQHDQSRSEDGYEVCSCTSGASSPPGAPGPLVAATMLLLLPPLSPGALWTAAQALTL

SEQ ID NO: 15947 - protein, 31 aa, Artificial Sequence
  Synthetic polypeptide
RDIRFIKTLFRQLPREETRGVAKQVRLPAPG

SEQ ID NO: 15948 - protein, 569 aa, Artificial Sequence
  Synthetic polypeptide
GTSGLLRHFSGSCPGKRQEEWLSRFGYLPPADPTTGQLQTQEELSKAITAMQQFGGLEATGILDEATLALMKTPRCSLPDLPVLTQARRRRQAPAPTKWNKRNLSWRVRTFPRDSPLGHDTVRALMYYALKVWSDIAPLNFHEVAGSAADIQIDFSKADHNDGYPFDGPGGTVAHAFFPGHHHTAGDTHFDDDEAWTFRSSDAHGMDLFAVAVHEFGHAIGLSHVAAAHSIMRPYYQGPVGDPLRYGLPYEDKVRVWQLYGVRESVSPTAQPEEPPLLPEPPDNRSSAPPRKDVPHRCSTHFDAVAQIRGEAFFFKGKYFWRLTRDRHLVSLQPAQMHRFWRGLPLHLDSVDAVYERTSDHKIVFFKGDRYWVFKDNNVEEGYPRPVSDFSLPPGGIDAAFSWAHNDRTYFFKDQLYWRYDDHTRHMDPGYPAQSPLWRGVPSTLDDAMRWSDGASYFFRGQEYWKVLDGELEVAPGYPQSTARDWLVCGDSQADGSVAAGVDAAEGPRAPPGQHDQSRSEDGYEVCSCTSGASSPPGAPGPLVAATMLLLLPPLSPGALWTAAQALTL

SEQ ID NO: 15949 - protein, 15 aa, Artificial Sequence
  Synthetic polypeptide
DTFPAAAQGRDKRSG

SEQ ID NO: 15950 - protein, 496 aa, Artificial Sequence
  Synthetic polypeptide
GWAWWLTPVIMALWEAKAGGSFEVRSSRPAWPTWVRTFPRDSPLGHDTVRALMYYALKVWSDIAPLNFHEVAGSAADIQIDFSKADHNDGYPFDGPGGTVAHAFFPGHHHTAGDTHFDDDEAWTFRSSDAHGMDLFAVAVHEFGHAIGLSHVAAAHSIMRPYYQGPVGDPLRYGLPYEDKVRVWQLYGVRESVSPTAQPEEPPLLPEPPDNRSSAPPRKDVPHRCSTHFDAVAQIRGEAFFFKGKYFWRLTRDRHLVSLQPAQMHRFWRGLPLHLDSVDAVYERTSDHKIVFFKGDRYWVFKDNNVEEGYPRPVSDFSLPPGGIDAAFSWAHNDRTYFFKDQLYWRYDDHTRHMDPGYPAQSPLWRGVPSTLDDAMRWSDGASYFFRGQEYWKVLDGELEVAPGYPQSTARDWLVCGDSQADGSVAAGVDAAEGPRAPPGQHDQSRSEDGYEVCSCTSGASSPPGAPGPLVAATMLLLLPPLSPGALWTAAQALTL

SEQ ID NO: 15951 - protein, 56 aa, Artificial Sequence
  Synthetic polypeptide
SWHFGRPRRADHLRSGVRDQPGQHGSGRSHGTHHWGTTRCVHSCTTPSRSGATLRP

SEQ ID NO: 15952 - protein, 64 aa, Artificial Sequence
  Synthetic polypeptide
GQEFETSLANMGPDVPTGLTTGARHGACTHVLRPQGLERHCAPELPRGGGQRRRHPDRLLQGRP

SEQ ID NO: 15953 - protein, 166 aa, Artificial Sequence
  Synthetic polypeptide
GWAWWLTPVIMALWEAKAGGSFEVRSSRPAWPTWVRTFPRDSPLGHDTVRALMYYALKVWSDIAPLNFHEVAGSAADIQIDFSKADHNDGYPFDGPGGTVAHAFFPGHHHTAGDTHFDDDEAWTFRSSDAHGMDLFAVAVHEFGHAIGLSHVAAAHSIMRPYYQGP

SEQ ID NO: 15954 - protein, 92 aa, Artificial Sequence
  Synthetic polypeptide
GWAWWLTPVIMALWEAKAGGSFEVRSSRPAWPTWVRTFPRDSPLGHDTVRALMYYALKVWSDIAPLNFHEVAGSAADIQIDFSKADHNDGYP

SEQ ID NO: 15955 - protein, 53 aa, Artificial Sequence
  Synthetic polypeptide
NPVSTTKYKKFAGRGGGHLLFQLLGRLRQENGVNLGGGVCSEETGTGCSRTIT

SEQ ID NO: 15956 - protein, 18 aa, Artificial Sequence
  Synthetic polypeptide
TWEAEFAVRRQVLGVQGQ

SEQ ID NO: 15957 - protein, 198 aa, Artificial Sequence
  Synthetic polypeptide
NPVSTTKYKKFAGRGGGHLLFQLLGRLRQENGVNLGGGVCSEDQLYWRYDDHTRHMDPGYPAQSPLWRGVPSTLDDAMRWSDGASYFFRGQEYWKVLDGELEVAPGYPQSTARDWLVCGDSQADGSVAAGVDAAEGPRAPPGQHDQSRSEDGYEVCSCTSGASSPPGAPGPLVAATMLLLLPPLSPGALWTAAQALTL

SEQ ID NO: 15958 - protein, 162 aa, Artificial Sequence
  Synthetic polypeptide
TWEAEFAVRTSCTGATMTTRGTWTPATPPRAPCGGVSPARWTTPCAGPTVPPTSSVARSTGKCWMASWRWHPGTHSPRPGTGWCVETHRPMDLWLRAWTRQRGPAPLQDNMTRAARRTVTRSAHAPLGHPLPRGPQAHWWLPPCCCCCRHCHQAPCGQRPRP

SEQ ID NO: 15959 - protein, 56 aa, Artificial Sequence
  Synthetic polypeptide
NPVSTTKYKKFAGRGGGHLLFQLLGRLRQENGVNLGGGVCSEDQLYWRYDDHTRHM

SEQ ID NO: 15960 - protein, 23 aa, Artificial Sequence
  Synthetic polypeptide
TWEAEFAVRTSCTGATMTTRGTW

SEQ ID NO: 15961 - protein, 50 aa, Artificial Sequence
  Synthetic polypeptide
NPVSTTKYKKFAGRGGGHLLFQLLGRLRQENGVNLGGGVCSEDQLYWRYD

SEQ ID NO: 15962 - protein, 17 aa, Artificial Sequence
  Synthetic polypeptide
TWEAEFAVRTSCTGATM

SEQ ID NO: 15963 - protein, 83 aa, Artificial Sequence
  Synthetic polypeptide
NPVSTTKYKKFAGRGGGHLLFQLLGRLRQENGVNLGGGVCSEDQLYWRYDDHTRHMDPGYPAQSPLWRGVPSTLDDAMRWSDG

SEQ ID NO: 15964 - protein, 50 aa, Artificial Sequence
  Synthetic polypeptide
TWEAEFAVRTSCTGATMTTRGTWTPATPPRAPCGGVSPARWTTPCAGPTV

SEQ ID NO: 15965 - protein, 50 aa, Artificial Sequence
  Synthetic polypeptide
NPVSTKDTKISRVCWWMPVIPATQEAEAGELREPGRRRLKVCPQPARWYP

SEQ ID NO: 15966 - protein, 287 aa, Artificial Sequence
  Synthetic polypeptide
TWEAEVEGVSAAGQVVSLKVWLIDDILEKINSHLPSHIRILGLKRVTGGFNSKNRCDARTYCYLLPTFAFAHKDRDVQDETYRLSAETLQQVNRLLACYKGTHNFHNFTSQKGPQDPSACRYILEMYCEEPFVREGLEFAVIRVKGQSFMMHQIRKMVGLVVAIVKGYAPESVLERSWGTEKVDVPKAPGLGLVLERVHFEKYNQRFGNDGLHEPLDWAQEEGKVAAFKEEHIYPTIIGTERDERSMAQWLSTLPIHNFSATALTAGGTGAKVPSPLEGSEGDGDTD

SEQ ID NO: 15967 - protein, 272 aa, Artificial Sequence
  Synthetic polypeptide
TWEAEVEGVSAAGQVVSLKVWLIDDILEKINSHLPSHIRILGLKRVTGGFNSKNRCDARTYCYLLPTFAFAHKDRDVQDETYRLSAETLQQVNRLLACYKGTHNFHNFTSQKGPQDPSACRYILEMYCEEPFVREGLEFAVIRVKGQSFMMHQIRKMVGLVVAIVKGYAPESVLERSWGTEKVDVPKAPGLGLVLERVHFEKYNQRFGNDGLHEPLDWAQEEGKVAAFKEEHIYPTIIGTERDERSMAQWLSTLPIHNFSATALTAGGTGAK

SEQ ID NO: 15968 - protein, 41 aa, Artificial Sequence
  Synthetic polypeptide
TWEAEVEGVSAAGQVVSLKVWLIDDILEKINSHLPSHIRIL

SEQ ID NO: 15969 - protein, 121 aa, Artificial Sequence
  Synthetic polypeptide
SLRPQVAKLPQVVQQQTPVASIQQVASASQQASPQTVALTQATAAGQQVQMIPAVTATAQVVQQKLIQQQVVTTASAPLQTPGAPNPAQVPASSDSPSQQPKLQMRVPAVRLKTPTKPPCQ

SEQ ID NO: 15970 - protein, 73 aa, Artificial Sequence
  Synthetic polypeptide
PLTVLSSRFFILPAFDRSMEMSDPSGLRLQNFLKLFNSKHPWPASSKLPLLPSRLLHRLWRSRRRRRPGSRCR

SEQ ID NO: 15971 - protein, 133 aa, Artificial Sequence
  Synthetic polypeptide
VPDSSSYLPLTDPWRCLIPQASGCKTSSSCSTANTRGQHPASCLCFPAGFSTDCGAHAGDGGRAAGADDPCSDRDCPGGSAETHSAAGGDHGVGPAPDSRRSQPSPGARQLRQPKPAAQVTDEGPCCQAKDTY

SEQ ID NO: 15972 - protein, 950 aa, Artificial Sequence
  Synthetic polypeptide
AEKDMALKPHERKEKWERRLIKKPRESETCPPAEPSENRRPLEAGSPGQDLEPACDGARKVPLQPSKQMKVTVSKGGDRDSDDDSVLEATSSRDPLSDSSAHAVSGRGYSCDSESGPDDKASVGSEKLFAPGTDKGPALEKSEAKAGPVPKVSGLERSRELSAESFLPTASPAPHAAPCPGPPPGSRANPLVKKEPPAPHRHTPQPPPPQPRGLLPTHVPASLGAFAGHSQAAANGLHGLSRSSSAPLGLGKHVSLSPHGPGPHLSTSHLALRSQAQHQLHAAMFAAPPTLPPPPALPASSLVLPGHPADHELLRQELNTRFLVQSAERPGASLGPGALLRAEFHQHQHTHQHTHQHTHQHQHTFAPFPAGLPPTPPAAPPPFDKYAPKLDSPYFRHSSVSFFPSFPPAIPGLPTLLPHPGPFGSLQGAFQPKVSDPYRAVVKVSTCWEGPWQGRTLVPPGRPRGARDSRSLQKTWVGVAPAPLSASILSQKPGRWCAVHVQIAWQIYRHQQKIKEMQLDPHKLEVGAKLDLFGRPPAPGVFAGFHYPQDLARPLFPSTGAAHPASNPFGPSAHPGSFLPTGPLTDPFSRPSTFGGLGSLSSHAFGGLGSHALAPGGSIFAPKEGSSVHGLPSPHEAWNRLHRAPPSFPAPPPWPKSVDAERVSALTNHDREPDNGKEEQERDLLEKTRLLSRASPATPAGHPVSGLLLRAQSELGRSGAPAEREAEPRVKESRSPAKEEAAKMPARASPPHSKAAPGDVKVKEERGEDEASEPPAGGLHPAPLQLGLGRERLGAPGFAWEPFRGLELPRRAFPAAAPAPGSAALLEPPERPYRDREPHGYSPERLRGELERARAPHLPPAAPALDGALLPSLGALHFPRLSPAALHNGLLARTPPAAAALGAPPPLVTAAGPPTPPGPPRSRTTPLGGLGPGEARDYSPSRNPPEVEAR

SEQ ID NO: 15973 - protein, 6 aa, Artificial Sequence
  Synthetic polypeptide
RRRIWP

SEQ ID NO: 15974 - protein, 9 aa, Artificial Sequence
  Synthetic polypeptide
GEGYGPEAT

SEQ ID NO: 15975 - protein, 444 aa, Artificial Sequence
  Synthetic polypeptide
WAPEVWPVQEMQLDPHKLEVGAKLDLFGRPPAPGVFAGFHYPQDLARPLFPSTGAAHPASNPFGPSAHPGSFLPTGPLTDPFSRPSTFGGLGSLSSHAFGGLGSHALAPGGSIFAPKEGSSVHGLPSPHEAWNRLHRAPPSFPAPPPWPKSVDAERVSALTNHDREPDNGKEEQERDLLEKTRLLSRASPATPAGHPVSGLLLRAQSELGRSGAPAEREAEPRVKESRSPAKEEAAKMPARASPPHSKAAPGDVKVKEERGEDEASEPPAGGLHPAPLQLGLGRERLGAPGFAWEPFRGLELPRRAFPAAAPAPGSAALLEPPERPYRDREPHGYSPERLRGELERARAPHLPPAAPALDGALLPSLGALHFPRLSPAALHNGLLARTPPAAAALGAPPPLVTAAGPPTPPGPPRSRTTPLGGLGPGEARDYSPSRNPPEVEAR

SEQ ID NO: 15976 - protein, 77 aa, Artificial Sequence
  Synthetic polypeptide
GHLKCGQCRRCSWTPTSWRWVQSWTCSADPLPRACLQASTTHRTWPGPSSPAQVPPILPPTHLDPQPILAASCPLAP

SEQ ID NO: 15977 - protein, 125 aa, Artificial Sequence
  Synthetic polypeptide
SVASAGDAAGPPQAGGGCKAGPVRQTPCPGRVCRLPLPTGPGPAPLPQHRCRPSCLQPIWTLSPSWQLPAHWPPDRPFQQTEHLWGPGQPEQPRLWGPGQPCTGSRWQHLCPQGGLLRARPAQPP

SEQ ID NO: 15978 - protein, 29 aa, Artificial Sequence
  Synthetic polypeptide
KRDLHAALFTLARRWQQGKRPAMGENHCL

SEQ ID NO: 15979 - protein, 30 aa, Artificial Sequence
  Synthetic polypeptide
RGDGNRASVQQWARTTVSDQRAEEERGIWG

SEQ ID NO: 15980 - protein, 57 aa, Artificial Sequence
  Synthetic polypeptide
GPAIPLLGTDAKQSMKERSARSTVHASEEMATGQASSNGREPLSLINVRKRNVESGE

SEQ ID NO: 15981 - protein, 76 aa, Artificial Sequence
  Synthetic polypeptide
RGDGNRASVQQWARTTVSDQRAEEERGIWGRRAGVQAGPLQSQGHAAHLPHQAFPVPRGWLPGEGPHSDPAGSGAG

SEQ ID NO: 15982 - protein, 103 aa, Artificial Sequence
  Synthetic polypeptide
GPAIPLLGTDAKQSMKERSARSTVHASEEMATGQASSNGREPLSLINVRKRNVESGEEELASKLDHYKAKATRHIFLIRHSQYHVDGSLEKDRTLTPLGREQA

SEQ ID NO: 15983 - protein, 230 aa, Artificial Sequence
  Synthetic polypeptide
GPAIPLLGTDAKQSMKERSARSTVHASEEMATGQASSNGREPLSLINVRKRNVESGEEELASKLDHYKAKATRHIFLIRHSQYHVDGSLEKDRTLTPLGREQAELTGLRLASLGLKFNKIVHSSMTRAIETTDIISRHLPGVCKVSTDLLREGAPIEPDPPVSHWKPEAVQYYEDGARIEAAFRNYIHRADARQEEDSYEIFICHANVIRYIVCSIPPLLSAGDFVLLGS

SEQ ID NO: 15984 - protein, 264 aa, Artificial Sequence
  Synthetic polypeptide
GPAIPLLGTDAKQSMKERSARSTVHASEEMATGQASSNGREPLSLINVRKRNVESGEEELASKLDHYKAKATRHIFLIRHSQYHVDGSLEKDRTLTPLGREQAELTGLRLASLGLKFNKIVHSSMTRAIETTDIISRHLPGVCKVSTDLLREGAPIEPDPPVSHWKPEAVQYYEDGARIEAAFRNYIHRADARQEEDSYEIFICHANVIRYIVCRALQFPPEGWLRLSLNNGSITHLVIRPNGRVALRTLGDTGFMPPDKITRS

SEQ ID NO: 15985 - protein, 32 aa, Artificial Sequence
  Synthetic polypeptide
HGRRFSQALENSTSRESRLPSPRQEVGPGKRL

SEQ ID NO: 15986 - protein, 440 aa, Artificial Sequence
  Synthetic polypeptide
GRAPGRMPEIPALWEAEAGGSRGQEIETILANTAEDFRKLWKTPPREKAGFLHHVKKSDPERGFERVGRELAHELGYPWVEYWEFLGCFVDLSSQEGLQRLEEYLTQQEIGKKAQQETGEREASCRDKATTSGSNSISVRAFLDEDDMSLEEIKNRQNAARNNSPPTVGAFGHTRCSAFPLEQEADLIEAAEPGGPHSSRNGLCHPLNHSRTLAGKRPKAPRGEEAHLPPVSDLTVEFDKLNLQNIGRSVSKTPDESTKTKDQILTSRINAVERDLLEPSPADQLGNGHRRTESEMSARIAKMSLSPSSPRHEDQLEVTREPARRLFLFGEEPSKLDQDVLAALECADVDPHQFPAVHRWKSAVLCYSPSDRQSWPSPAVKGRFKSQLPDLSGPHSYSPGRNSVAGSNPAKPGLGSPGRYSPVHGSQLRRMARLAELAAL

SEQ ID NO: 15987 - protein, 70 aa, Artificial Sequence
  Synthetic polypeptide
AGRRDACLKSQHFGRPRRVDHEVRRSRPSWLTRQKIFASSGKLHLERKQASFTTSRSRTRKEALREWEGS

SEQ ID NO: 15988 - protein, 150 aa, Artificial Sequence
  Synthetic polypeptide
GRAPGRMPEIPALWEAEAGGSRGQEIETILANTAEDFRKLWKTPPREKAGFLHHVKKSDPERGFERVGRELAHELGYPWVEYWEFLGCFVDLSSQEGLQRLEEYLTQQEIGKKAQQETGEREASCRDKATTSVEMRFHRIDQAGLELLTS

SEQ ID NO: 15989 - protein, 68 aa, Artificial Sequence
  Synthetic polypeptide
GRAPGRMPEIPALWEAEAGGSRGQEIETILANTAEDFRKLWKTPPREKAGFLHHVKKSDPERGFERVG

SEQ ID NO: 15990 - protein, 68 aa, Artificial Sequence
  Synthetic polypeptide
AGRRDACLKSQHFGRPRRVDHEVRRSRPSWLTRQKIFASSGKLHLERKQASFTTSRSRTRKEALREWE

SEQ ID NO: 15991 - protein, 486 aa, Artificial Sequence
  Synthetic polypeptide
SLASSSSRPAWATEQDPISTKSHYYVPLLRAEETSSPVIGELWSPDQTAEASHVSRYGGSPRDPVLTLRAFAGPLSPAKAEDFRKLWKTPPREKAGFLHHVKKSDPERGFERVGRELAHELGYPWVEYWEFLGCFVDLSSQEGLQRLEEYLTQQEIGKKAQQETGEREASCRDKATTSGSNSISVRAFLDEDDMSLEEIKNRQNAARNNSPPTVGAFGHTRCSAFPLEQEADLIEAAEPGGPHSSRNGLCHPLNHSRTLAGKRPKAPRGEEAHLPPVSDLTVEFDKLNLQNIGRSVSKTPDESTKTKDQILTSRINAVERDLLEPSPADQLGNGHRRTESEMSARIAKMSLSPSSPRHEDQLEVTREPARRLFLFGEEPSKLDQDVLAALECADVDPHQFPAVHRWKSAVLCYSPSDRQSWPSPAVKGRFKSQLPDLSGPHSYSPGRNSVAGSNPAKPGLGSPGRYSPVHGSQLRRMARLAELAAL

SEQ ID NO: 15992 - protein, 39 aa, Artificial Sequence
  Synthetic polypeptide
SQNFWRWRWNDHLHPAVRDQPGQQSKTPSLQKATTTCPS

SEQ ID NO: 15993 - protein, 68 aa, Artificial Sequence
  Synthetic polypeptide
MGTAAHTCNPRTFGGGGGMITCIQQFETSLGNRARPHLYKKPLLRAPPESGRDFFSSHRGAVVPRPDG

SEQ ID NO: 15994 - protein, 196 aa, Artificial Sequence
  Synthetic polypeptide
SLASSSSRPAWATEQDPISTKSHYYVPLLRAEETSSPVIGELWSPDQTAEASHVSRYGGSPRDPVLTLRAFAGPLSPAKAEDFRKLWKTPPREKAGFLHHVKKSDPERGFERVGRELAHELGYPWVEYWEFLGCFVDLSSQEGLQRLEEYLTQQEIGKKAQQETGEREASCRDKATTSVEMRFHRIDQAGLELLTS

SEQ ID NO: 15995 - protein, 114 aa, Artificial Sequence
  Synthetic polypeptide
SLASSSSRPAWATEQDPISTKSHYYVPLLRAEETSSPVIGELWSPDQTAEASHVSRYGGSPRDPVLTLRAFAGPLSPAKAEDFRKLWKTPPREKAGFLHHVKKSDPERGFERVG

SEQ ID NO: 15996 - protein, 29 aa, Artificial Sequence
  Synthetic polypeptide
SLASSSSRPAWATEQDPISTKSHYYVPLL

SEQ ID NO: 15997 - protein, 48 aa, Artificial Sequence
  Synthetic polypeptide
MGTAAHTCNPRTFGGGGGMITCIQQFETSLGNRARPHLYKKPLLRAPP

SEQ ID NO: 15998 - protein, 662 aa, Artificial Sequence
  Synthetic polypeptide
TSSLKIHGLCLSESETVNKERANSYKNPRTQDLTAKLRKAVEKGEEDTFSDLIWSNPRYLIGSGDNPTIVQEGCRYNVMHVAAKENQASICQLTLDVLENPDFMRLMYPDDDEAMLQKRIRYVVDLYLNTPDKMGYDTPLHFACKFGNADVVNVLSSHHLIVKNSRNKYDKTPEDVICERSKNKSVELKERIREYLKGHYYVPLLRAEETSSPVIGELWSPDQTAEASHVSRYGGSPRDPVLTLRAFAGPLSPAKAEDFRKLWKTPPREKAGFLHHVKKSDPERGFERVGRELAHELGYPWVEYWEFLGCFVDLSSQEGLQRLEEYLTQQEIGKKAQQETGEREASCRDKATTSGSNSISVRAFLDEDDMSLEEIKNRQNAARNNSPPTVGAFGHTRCSAFPLEQEADLIEAAEPGGPHSSRNGLCHPLNHSRTLAGKRPKAPRGEEAHLPPVSDLTVEFDKLNLQNIGRSVSKTPDESTKTKDQILTSRINAVERDLLEPSPADQLGNGHRRTESEMSARIAKMSLSPSSPRHEDQLEVTREPARRLFLFGEEPSKLDQDVLAALECADVDPHQFPAVHRWKSAVLCYSPSDRQSWPSPAVKGRFKSQLPDLSGPHSYSPGRNSVAGSNPAKPGLGSPGRYSPVHGSQLRRMARLAELAAL

SEQ ID NO: 15999 - protein, 55 aa, Artificial Sequence
  Synthetic polypeptide
KYMVCACRNQKQSTKSERTVTKIPARRTSPPSFGKLWRRERRTPFLTLSGATPGI

SEQ ID NO: 16000 - protein, 61 aa, Artificial Sequence
  Synthetic polypeptide
SQEFETSLGNIDLISKNTWFVLVGIRNSQQRASEQLQKSPHAGPHRQASESCGEGRGGHLF

SEQ ID NO: 16001 - protein, 372 aa, Artificial Sequence
  Synthetic polypeptide
TSSLKIHGLCLSESETVNKERANSYKNPRTQDLTAKLRKAVEKGEEDTFSDLIWSNPRYLIGSGDNPTIVQEGCRYNVMHVAAKENQASICQLTLDVLENPDFMRLMYPDDDEAMLQKRIRYVVDLYLNTPDKMGYDTPLHFACKFGNADVVNVLSSHHLIVKNSRNKYDKTPEDVICERSKNKSVELKERIREYLKGHYYVPLLRAEETSSPVIGELWSPDQTAEASHVSRYGGSPRDPVLTLRAFAGPLSPAKAEDFRKLWKTPPREKAGFLHHVKKSDPERGFERVGRELAHELGYPWVEYWEFLGCFVDLSSQEGLQRLEEYLTQQEIGKKAQQETGEREASCRDKATTSVEMRFHRIDQAGLELLTS

SEQ ID NO: 16002 - protein, 205 aa, Artificial Sequence
  Synthetic polypeptide
TSSLKIHGLCLSESETVNKERANSYKNPRTQDLTAKLRKAVEKGEEDTFSDLIWSNPRYLIGSGDNPTIVQEGCRYNVMHVAAKENQASICQLTLDVLENPDFMRLMYPDDDEAMLQKRIRYVVDLYLNTPDKMGYDTPLHFACKFGNADVVNVLSSHHLIVKNSRNKYDKTPEDVICERSKNKSVELKERIREYLKGHYYVPLL

SEQ ID NO: 16003 - protein, 54 aa, Artificial Sequence
  Synthetic polypeptide
KPKRAGFRELPDSTWGFLEAVPREALNFQALPPGFTSRISSPVFFVILYTLLVK

SEQ ID NO: 16004 - protein, 6 aa, Artificial Sequence
  Synthetic polypeptide
SFILCW

SEQ ID NO: 16005 - protein, 917 aa, Artificial Sequence
  Synthetic polypeptide
YVGVPGGGAQRGPEFPSASPRFYVTHLFTCILCNPLYSAGEMTMDALLARLKLLNPDDLREEIVKAGLKCGPITSTTRFIFEKKLAQALLEQGGRLSSFYHHEAGVTALSQDPQRILKPAEGNPTDQAGFSEDRDFGYSVGLNPPEEEAVTSKTCSVPPSDTDTYRAGATASKEPPLYYGVCPVYEDVPARNERIYVYENKKEALQAVKMIKGSRFKAFSTREDAEKFARGICDYFPSPSKTSLPLSPVKTAPLFSNDRLKDGLCLSESETVNKERANSYKNPRTQDLTAKLRKAVEKGEEDTFSDLIWSNPRYLIGSGDNPTIVQEGCRYNVMHVAAKENQASICQLTLDVLENPDFMRLMYPDDDEAMLQKRIRYVVDLYLNTPDKMGYDTPLHFACKFGNADVVNVLSSHHLIVKNSRNKYDKTPEDVICERSKNKSVELKERIREYLKGHYYVPLLRAEETSSPVIGELWSPDQTAEASHVSRYGGSPRDPVLTLRAFAGPLSPAKAEDFRKLWKTPPREKAGFLHHVKKSDPERGFERVGRELAHELGYPWVEYWEFLGCFVDLSSQEGLQRLEEYLTQQEIGKKAQQETGEREASCRDKATTSGSNSISVRAFLDEDDMSLEEIKNRQNAARNNSPPTVGAFGHTRCSAFPLEQEADLIEAAEPGGPHSSRNGLCHPLNHSRTLAGKRPKAPRGEEAHLPPVSDLTVEFDKLNLQNIGRSVSKTPDESTKTKDQILTSRINAVERDLLEPSPADQLGNGHRRTESEMSARIAKMSLSPSSPRHEDQLEVTREPARRLFLFGEEPSKLDQDVLAALECADVDPHQFPAVHRWKSAVLCYSPSDRQSWPSPAVKGRFKSQLPDLSGPHSYSPGRNSVAGSNPAKPGLGSPGRYSPVHGSQLRRMARLAELAAL

SEQ ID NO: 16006 - protein, 627 aa, Artificial Sequence
  Synthetic polypeptide
YVGVPGGGAQRGPEFPSASPRFYVTHLFTCILCNPLYSAGEMTMDALLARLKLLNPDDLREEIVKAGLKCGPITSTTRFIFEKKLAQALLEQGGRLSSFYHHEAGVTALSQDPQRILKPAEGNPTDQAGFSEDRDFGYSVGLNPPEEEAVTSKTCSVPPSDTDTYRAGATASKEPPLYYGVCPVYEDVPARNERIYVYENKKEALQAVKMIKGSRFKAFSTREDAEKFARGICDYFPSPSKTSLPLSPVKTAPLFSNDRLKDGLCLSESETVNKERANSYKNPRTQDLTAKLRKAVEKGEEDTFSDLIWSNPRYLIGSGDNPTIVQEGCRYNVMHVAAKENQASICQLTLDVLENPDFMRLMYPDDDEAMLQKRIRYVVDLYLNTPDKMGYDTPLHFACKFGNADVVNVLSSHHLIVKNSRNKYDKTPEDVICERSKNKSVELKERIREYLKGHYYVPLLRAEETSSPVIGELWSPDQTAEASHVSRYGGSPRDPVLTLRAFAGPLSPAKAEDFRKLWKTPPREKAGFLHHVKKSDPERGFERVGRELAHELGYPWVEYWEFLGCFVDLSSQEGLQRLEEYLTQQEIGKKAQQETGEREASCRDKATTSVEMRFHRIDQAGLELLTS

SEQ ID NO: 16007 - protein, 38 aa, Artificial Sequence
  Synthetic polypeptide
TQEAEVVALQILPCPWRRRSRSDFRLGSGWKSSSNSTG

SEQ ID NO: 16008 - protein, 82 aa, Artificial Sequence
  Synthetic polypeptide
KYQSRQGSCCMPVIPPTQEAVAGESLEPRRQRLWLYRFSPAPGEGGAGPTSGSEVAGRAAQTVQGEAPAGEVQSTCNQNETF

SEQ ID NO: 16009 - protein, 1383 aa, Artificial Sequence
  Synthetic polypeptide
SHLLRRLWQENRLNPGGRGCGSTDSPLPLEKEEQVRLQARKWLEEQLKQYRVKRQQERSSQPATKTRLFSTLDPELMLNPENLPRASTLAMTKEYSFLRTSVPRGPKVGSLGLPAHPREKKTSKSSKIRSLADYRTEDSNAGNSGGNVPAPDSTKGSLKQNRSSAASVVSEISLSPDTDDRLENTSLAGDSVSEVDGNDSDSSSYSSASTRGTYGILSKTVGTQDTPYMVNGQEIPADTLGQFPSIKDVLQAAAAEHQDQGQEVNGEVRSRRDSICSSVSLESSAAETQEEMLQVLKEKMRLEGQLEALSLEASQALKEKAELQAQLAALSTKLQAQVECSHSSQQRQDSLSSEVDTLKQSCWDLERAMTDLQNMLEAKNASLASSNNDLQVAEEQYQRLMAKVEDMQRSMLSKDNTVHDLRQQMTALQSQLQQVQLERTTLTSKLKASQAEISSLQSVRQWYQQQLALAQEARVRLQGEMAHIQVGQMTQAGLLEHLKLENVSLSQQLTETQHRSMKEKGRIAAQLQGIEADMLDQEAAFMQIQEAKTMVEEDLQRRLEEFEGERERLQRMADSAASLEQQLEQVKLTLLQRDQQLEALQQEHLDLMKQLTLTQEALQSREQSLDALQTHYDELQARLGELQGEAASREDTICLLQNEKIILEAALQAAKSGKEELDRGARRLEEGTEETSETLEKLREELAIKSGQVEHLQQETAALKKQMQKIKEQFLQQKVMVEAYRRDATSKDQLISELKATRKRLDSELKELRQELMQVHGEKRTAEAELSRLHREVAQVRQHMADLEGHLQSAQKERDEMETHLQSLQFDKEQMVAVTEANEALKKQIEELQQEARKAITEQKQKMRRLGSDLTSAQKEMKTKHKAYENAVGILSRRLQEALAAKEAADAELGQLRAQGGSSDSSLALHERIQALEAELQAVSHSKTLLEKELQEVIALTSQELEESREKVLELEDELQESRGFRKKIKRLEESNKKLALELEHEKGKLTGLGQSNAALREHNSILETALAKREADLVQLNLQVQAVLQRKEEEDRQMKHLVQALQASLEKEKEKVNSLKEQVAAAKVEAGHNRRHFKAASLELSEVKKELQAKEHLVQKLQAEADDLQIREGKHSQEIAQFQAELAEARAQLQLLQKQLDEQLSKQPVGNQEMENLKWEVDQKEREIQSLKQQLDLTEQQGRKELEGLQQLLQNVKSELEMAQEDLSMTQKDKFMLQAKVSELKNNMKTLLQQNQQLKLDLRRGAAKTRKEPKGEASSSNPATPIKIPDCPVPASLLEELLRPPPAVSKEPLKNLNSCLQQLKQEMDSLQRQMEEHALTVHESLSSWTPLEPATASPVPPGGHAGPRGDPQRHSQSRASKEGPGE

SEQ ID NO: 16010 - protein, 1275 aa, Artificial Sequence
  Synthetic polypeptide
SHLLRRLWQENRLNPGGRGCGSTDSPLPLEKEEQVRLQARKWLEEQLKQYRVKRQQERSSQPATKTRLFSTLDPELMLNPENLPRASTLAMTKEYSFLRTSVPRGPKVGSLGLPAHPREKKTSKSSKIRSLADYRTEDSNAGNSGGNVPAPDSTKGSLKQNRSSAASVVSEISLSPDTDDRLENTSLAGDSVSEVDGNDSDSSSYSSASTRGTYGILSKTVGTQDTPYMVNGQEIPADTLGQFPSIKDVLQAAAAEHQDQGQEVNGEVRSRRDSICSSVSLESSAAETQEEMLQVLKEKMRLEGQLEALSLEASQALKEKAELQAQLAALSTKLQAQVECSHSSQQRQDSLSSEVDTLKQSCWDLERAMTDLQNMLEAKNASLASSNNDLQVAEEQYQRLMAKVEDMQRSMLSKDNTVHDLRQQMTALQSQLQQVQLERTTLTSKLKASQAEISSLQSVRQWYQQQLALAQEARVRLQGEMAHIQVGQMTQAGLLEHLKLENVSLSQQLTETQHRSMKEKGRIAAQLQGIEADMLDQEAAFMQIQEAKTMVEEDLQRRLEEFEGERERLQRMADSAASLEQQLEQVKLTLLQRDQQLEALQQEHLDLMKQLTLTQEALQSREQSLDALQTHYDELQARLGELQGEAASREDTICLLQNEKIILEAALQAAKSGKEELDRGARRLEEGTEETSETLEKLREELAIKSGQVEHLQQETAALKKQMQKIKEQFLQQKVMVEAYRRDATSKDQLISELKATRKRLDSELKELRQELMQVHGEKRTAEAELSRLHREVAQVRQHMADLEGHLQSAQKERDEMETHLQSLQFDKEQMVAVTEANEALKKQIEELQQEARKAITEQKQKMRRLGSDLTSAQKEMKTKHKAYENAVGILSRRLQEALAAKEAADAELGQLRAQGGSSDSSLALHERIQALEAELQAVSHSKTLLEKELQEVIALTSQELEESREKVLELEDELQESRGFRKKIKRLEESNKKLALELEHEKGKLTGLGQSNAALREHNSILETALAKREADLVQLNLQVQAVLQRKEEEDRQMKHLVQALQASLEKEKEKVNSLKEQVAAAKVEAGHNRRHFKAASLELSEVKKELQAKEHLVQKLQAEADDLQIREGKHSQEIAQFQAELAEARAQLQLLQKQLDEQLSKQPVGNQEMENLKWEVDQKEREIQSLKQQLDLTEQQGRKELEGLQQLLQNVKSELEMAQEDLSMTQKDKFMLQAKVSELKNNMKTLLQQNQQLKLDLRRGAAKTVLRPASLPG

SEQ ID NO: 16011 - protein, 1019 aa, Artificial Sequence
  Synthetic polypeptide
SHLLRRLWQENRLNPGGRGCGSTDSPLPLEKEEQVRLQARKWLEEQLKQYRVKRQQERSSQPATKTRLFSTLDPELMLNPENLPRASTLAMTKEYSFLRTSVPRGPKVGSLGLPAHPREKKTSKSSKIRSLADYRTEDSNAGNSGGNVPAPDSTKGSLKQNRSSAASVVSEISLSPDTDDRLENTSLAGDSVSEVDGNDSDSSSYSSASTRGTYGILSKTVGTQDTPYMVNGQEIPADTLGQFPSIKDVLQAAAAEHQDQGQEVNGEVRSRRDSICSSVSLESSAAETQEEMLQVLKEKMRLEGQLEALSLEASQALKEKAELQAQLAALSTKLQAQVECSHSSQQRQDSLSSEVDTLKQSCWDLERAMTDLQNMLEAKNASLASSNNDLQVAEEQYQRLMAKVEDMQRSMLSKDNTVHDLRQQMTALQSQLQQVQLERTTLTSKLKASQAEISSLQSVRQWYQQQLALAQEARVRLQGEMAHIQVGQMTQAGLLEHLKLENVSLSQQLTETQHRSMKEKGRIAAQLQGIEADMLDQEAAFMQIQEAKTMVEEDLQRRLEEFEGERERLQRMADSAASLEQQLEQVKLTLLQRDQQLEALQQEHLDLMKQLTLTQEALQSREQSLDALQTHYDELQARLGELQGEAASREDTICLLQNEKIILEAALQAAKSGKEELDRGARRLEEGTEETSETLEKLREELAIKSGQVEHLQQETAALKKQMQKIKEQFLQQKVMVEAYRRDATSKDQLISELKATRKRLDSELKELRQELMQVHGEKRTAEAELSRLHREVAQVRQHMADLEGHLQSAQKERDEMETHLQSLQFDKEQMVAVTEANEALKKQIEELQQEARKAITEQKQKMRRLGSDLTSAQKEMKTKHKAYENAVGILSRRLQEALAAKEAADAELGQLRAQGGSSDSSLALHERIQALEAELQAVSHSKTLLEKELQEVIALTSQELEESREKVLELEDEVRPGHLLWRQRGAGHVSPGHAATRETRRTKLHRVPSVATFGVATF

SEQ ID NO: 16012 - protein, 53 aa, Artificial Sequence
  Synthetic polypeptide
GRAQWLTPVIPALWEAEAGGSRGRRFSQALENSTSRESRLPSPRQEVGPGKRL

SEQ ID NO: 16013 - protein, 420 aa, Artificial Sequence
  Synthetic polypeptide
SQHFGRPRRVDHEAEDFRKLWKTPPREKAGFLHHVKKSDPERGFERVGRELAHELGYPWVEYWEFLGCFVDLSSQEGLQRLEEYLTQQEIGKKAQQETGEREASCRDKATTSGSNSISVRAFLDEDDMSLEEIKNRQNAARNNSPPTVGAFGHTRCSAFPLEQEADLIEAAEPGGPHSSRNGLCHPLNHSRTLAGKRPKAPRGEEAHLPPVSDLTVEFDKLNLQNIGRSVSKTPDESTKTKDQILTSRINAVERDLLEPSPADQLGNGHRRTESEMSARIAKMSLSPSSPRHEDQLEVTREPARRLFLFGEEPSKLDQDVLAALECADVDPHQFPAVHRWKSAVLCYSPSDRQSWPSPAVKGRFKSQLPDLSGPHSYSPGRNSVAGSNPAKPGLGSPGRYSPVHGSQLRRMARLAELAAL

SEQ ID NO: 16014 - protein, 59 aa, Artificial Sequence
  Synthetic polypeptide
PGAVAHACNPSTLGGRGGWITRQKIFASSGKLHLERKQASFTTSRSRTRKEALREWEGS

SEQ ID NO: 16015 - protein, 130 aa, Artificial Sequence
  Synthetic polypeptide
SQHFGRPRRVDHEAEDFRKLWKTPPREKAGFLHHVKKSDPERGFERVGRELAHELGYPWVEYWEFLGCFVDLSSQEGLQRLEEYLTQQEIGKKAQQETGEREASCRDKATTSVEMRFHRIDQAGLELLTS

SEQ ID NO: 16016 - protein, 48 aa, Artificial Sequence
  Synthetic polypeptide
SQHFGRPRRVDHEAEDFRKLWKTPPREKAGFLHHVKKSDPERGFERVG

SEQ ID NO: 16017 - protein, 57 aa, Artificial Sequence
  Synthetic polypeptide
PGAVAHACNPSTLGGRGGWITRQKIFASSGKLHLERKQASFTTSRSRTRKEALREWE

SEQ ID NO: 16018 - protein, 14 aa, Artificial Sequence
  Synthetic polypeptide
FARLPFCVSAPVEQ

SEQ ID NO: 16019 - protein, 15 aa, Artificial Sequence
  Synthetic polypeptide
MPGCRFVCRHQWNSD

SEQ ID NO: 16020 - protein, 554 aa, Artificial Sequence
  Synthetic polypeptide
CPVAVLCVGTSGTVINKLKVVKKQTCPLQTGDVIYLVYRKNEPEHNVAYLYESLSEKQGMTQESFEMVPCCVAQAGLKLLGSSDPPTLASQSIVITGSGGGGISPKGSGPSVASDEVSSFASALPDRKTASFSSLEPQDQEDLEPVKKKMRGDGDLDLNGQLLVAQPRRNAQTVHEDVRAAAGKPDKMEETLTCIICQDLLHDCVSLQPCMHTFCAACYSGWMERSSLCPTCRCPVERICKNHILNNLVEAYLIQHPDKSRSEEDVQSMDARNKITQDMLQPKVRRSFSDEEGSSEDLLELSDVDSESSDISQPYVVCRQCPEYRRQAAQPPHCPAPEGEPGAPQALGDAPSTSVSLTTAVQDYVCPLQGSHALCTCCFQPMPDRRAEREQDPRVAPQQCAVCLQPFCHLYWGCTRTGCYGCLAPFCELNLGDKCLDGVLNNNSYESDILKNYLATRGLTWKNMLTESLVALQRGVFLLSDYRVTGDTVLCYCCGLRSFRELTYQYRQNIPASELPVAVTSRPDCYWGRNCRTQVKAHHAMKFNHICEQTRFKN

SEQ ID NO: 16021 - protein, 594 aa, Artificial Sequence
  Synthetic polypeptide
CPVAVLCVGTSGTVINKLKVVKKQTCPLQTGDVIYLVYRKNEPEHNVAYLYESLSEKQGMTQESFEANKENVFHGTKDTSGAGAGRGADPRVPPSSPATQVCFEEPQPSTSTSDLFPTASASSTEPSPAGRERSSSCGSGGGGISPKGSGPSVASDEVSSFASALPDRKTASFSSLEPQDQEDLEPVKKKMRGDGDLDLNGQLLVAQPRRNAQTVHEDVRAAAGKPDKMEETLTCIICQDLLHDCVSLQPCMHTFCAACYSGWMERSSLCPTCRCPVERICKNHILNNLVEAYLIQHPGNSRSEEDVQSMDARNKITQDMLQPKVRRSFSDEEGSSEDLLELSDVDSESSDISQPYVVCRQCPEYRRQAAQPPHCPAPEGEPGAPQALGDAPSTSVSLTTVQDYVCPLQGSHALCTCCFQPMPDRRAEREQDPRVAPQQCAVCLQPFCHLYWGCTRTGCYGCLAPFCELNLGDKCLDGVLNNNSYESDILKNYLATRGLTWKNMLTESLVALQRGVFLLSDYRVTGDTVLCYCCGLRSFRELTYQYRQNIPASELPVAVTSRPDCYWGRNCRTQVKAHHAMKFNHICEQTRFKN

SEQ ID NO: 16022 - protein, 503 aa, Artificial Sequence
  Synthetic polypeptide
CPVAVLCVGTSGTVINKLKVVKKQTCPLQTGDVIYLVYRKNEPEHRSGGGGISPKGSGPSVASDEVSSFASALPDRKTASFSSLEPQDQEDLEPVKKKMRGDGDLDLNGQLLVAQPRRNAQTVHEDVRAAAGKPDKMEETLTCIICQDLLHDCVSLQPCMHTFCAACYSGWMERSSLCPTCRCPVERICKNHILNNLVEAYLIQHPDKSRSEEDVQSMDARNKITQDMLQPKVRRSFSDEEGSSEDLLELSDVDSESSDISQPYVVCRQCPEYRRQAAQPPHCPAPEGEPGAPQALGDAPSTSVSLTTAVQDYVCPLQGSHALCTCCFQPMPDRRAEREQDPRVAPQQCAVCLQPFCHLYWGCTRTGCYGCLAPFCELNLGDKCLDGVLNNNSYESDILKNYLATRGLTWKNMLTESLVALQRGVFLLSDYRVTGDTVLCYCCGLRSFRELTYQYRQNIPASELPVAVTSRPDCYWGRNCRTQVKAHHAMKFNHICEQTRFKN

SEQ ID NO: 16023 - protein, 583 aa, Artificial Sequence
  Synthetic polypeptide
CPVAVLCVGTSGTVINKLKVVKKQTCPLQTGDVIYLVYRKNEPEHNVAYLYESLSEKQGMTQESFDTSGAGAGRGADPRVPPSSPATQVCFEEPQPSTSTSDLFPTASASSTEPSPAGRERSSSCGSGGGGISPKGSGPSVASDEVSSFASALPDRKTASFSSLEPQDQEDLEPVKKKMRGDGDLDLNGQLLVAQPRRNAQTVHEDVRAAAGKPDKMEETLTCIICQDLLHDCVSLQPCMHTFCAACYSGWMERSSLCPTCRCPVERICKNHILNNLVEAYLIQHPDKSRSEEDVQSMDARNKITQDMLQPKVRRSFSDEEGSSEDLLELSDVDSESSDISQPYVVCRQCPEYRRQAAQPPHCPAPEGEPGAPQALGDAPSTSVSLTTAVQDYVCPLQGSHALCTCCFQPMPDRRAEREQDPRVAPQQCAVCLQPFCHLYWGCTRTGCYGCLAPFCELNLGDKCLDGVLNNNSYESDILKNYLATRGLTWKNMLTESLVALQRGVFLLSDYRVTGDTVLCYCCGLRSFRELTYQYRQNIPASELPVAVTSRPDCYWGRNCRTQVKAHHAMKFNHICEQTRFKN

SEQ ID NO: 16024 - protein, 595 aa, Artificial Sequence
  Synthetic polypeptide
CPVAVLCVGTSGTVINKLKVVKKQTCPLQTGDVIYLVYRKNEPEHNVAYLYESLSEKQGMTQESFEANKENVFHGTKDTSGAGAGRGADPRVPPSSPATQVCFEEPQPSTSTSDLFPTASASSTEPSPAGRERSSSCGSGGGGISPKGSGPSVASDEVSSFASALPDRKTASFSSLEPQDQEDLEPVKKKMRGDGDLDLNGQLLVAQPRRNAQTVHEDVRAAAGKPDKMEETLTCIICQDLLHDCVSLQPCMHTFCAACYSGWMERSSLCPTCRCPVERICKNHILNNLVEAYLIQHPDKSRSEEDVQSMDARNKITQDMLQPKVRRSFSDEEGSSEDLLELSDVDSESSDISQPYVVCRQCPEYRRQAAQPPHCPAPEGEPGAPQALGDAPSTSVSLTTAVQDYVCPLQGSHALCTCCFQPMPDRRAEREQDPRVAPQQCAVCLQPFCHLYWGCTRTGCYGCLAPFCELNLGDKCLDGVLNNNSYESDILKNYLATRGLTWKNMLTESLVALQRGVFLLSDYRVTGDTVLCYCCGLRSFRELTYQYRQNIPASELPVAVTSRPDCYWGRNCRTQVKAHHAMKFNHICEQTRFKN

SEQ ID NO: 16025 - protein, 154 aa, Artificial Sequence
  Synthetic polypeptide
CPVAVLCVGTSGTVINKLKVVKKQTCPLQTGDVIYLVYRKNEPEHNVAYLYESLSEKQGMTQESFDTSGAGAGRGADPRVPPSSPATQVCFEEPQPSTSTSDLFPTASASSTEPSPAGRERSSSCGSGGGGISPKGSGPSVASDEVSSFASALP

SEQ ID NO: 16026 - protein, 50 aa, Artificial Sequence
  Synthetic polypeptide
NADVMTRAILDWVALEVEAMDYCHSRIYLWSSPGMNGSYWILHRSTCTEM

SEQ ID NO: 16027 - protein, 24 aa, Artificial Sequence
  Synthetic polypeptide
TGLPWKWKPWIIVIQGYIYGVHLG

SEQ ID NO: 16028 - protein, 82 aa, Artificial Sequence
  Synthetic polypeptide
SHLRLGCPGSGSHGLLSFKDISMEFTWDEWQLLDSTQKYLYRDVILENYHNLISVDGWEEWYQNNQDELESIERSYACSVLG

SEQ ID NO: 16029 - protein, 535 aa, Artificial Sequence
  Synthetic polypeptide
SHLRLGCPGSGSHGLLSFKDISMEFTWDEWQLLDSTQKYLYRDVILENYHNLISVGYHGTKPDLIFKLEQGEDPWIINAKISRQSCPDGWEEWYQNNQDELESIERSYACSVLGRLNLSKTHDSSRQRLYNTRGKSLTQNSAPSRSYLRKNPDKFHGYEEPYFLKHQRAHSIEKNCVCSECGKAFRCKSQLIVHLRIHTGERPYECSKCERAFSAKSNLNAHQRVHTGEKPYSCSECEKVFSFRSQLIVHQEIHTGGKPYGCSECGKAYSWKSQLLLHQRSHTGVKPYECSECGKAFSLKSPFVVHQRTHTGVKPHKCSECGKAFRSKSYLLVHIRMHTGEKPYQCSDCGKAFNMKTQLIVHQGVHTGNNPYQCGECGKAFGRKEQLTAHLRAHAGEKPYGCSECGKAFSSKSYLVIHRRTHTGERPYECSLCERAFCGKSQLIIHQRTHSTEKPYECNECEKAYPRKASLQIHQKTHSGEKPFKCSECGKAFTQKSSLSEHQRVHTGEKPWKCSECGKSFCWNSGLRIHRKTHK

SEQ ID NO: 16030 - protein, 122 aa, Artificial Sequence
  Synthetic polypeptide
SHLRLGCPGSGSHGLLSFKDISMEFTWDEWQLLDSTQKYLYRDVILENYHNLISVGYHGTKPDLIFKLEQGEDPWIINAKISRQSCPDGWEEWYQNNQDELESIERSYACSVLGRLNLSKTH

SEQ ID NO: 16031 - protein, 47 aa, Artificial Sequence
  Synthetic polypeptide
GLVWWLTPVIPALWEAEAGGSRGQKIKTILANTIQNGQFRRTSEKSL

SEQ ID NO: 16032 - protein, 1296 aa, Artificial Sequence
  Synthetic polypeptide
SQHFGRPRQVDHEVRRSRPSWLTRFRMDSLEEPQKKVFKARKTMRVSDRQQLEAVYKVKEELLKTDVKLLNGNHENGDLDPTSPLENMDYIKDKEEVNGIEEICFDPEGSKAEWKETPCILSVNVKNKQDDDLNCEPLSPHNITPEPVSKLPAEPVSGDPAPGDLDAGDPASGVLASGDSTSGDPTSSEPSSSDAASGDATSGDAPSGDVSPGDATSGDATADDLSSGDPTSSDPIPGEPVPVEPISGDCAADDIASSEITSVDLASGAPASTDPASDDLASGDLSSSELASDDLATGELASDELTSESTFDRTFEPKSVPVCEPVPEIDNIEPSSNKDDDFLEKNGADEKLEQIQSKDSLDEKNKADNNIDANEETLETDDTTICSDRPPENEKKVEEDIITELALGEDAISSSMEIDQGEKNEDETSADLVETINENVIEDNKSENILENTDSMETDEIIPILEKLAPSEDELTCFSKTSLLPIDETNPDLEEKMESSFGSPSKQESSESLPKEAFLVLSDEEDISGEKDESEVISQNETCSPAEVESNEKDNKPEEEEQVIHEDDERPSEKNEFSRRKRSKSEDMDNVQSKRRRYMEEEYEAEFQVKITAKGDINQKLQKVIQWLLEEKLCALQCAVFDKTLAELKTRVEKIECNKRHKTVLTELQAKIARLTKRFEAAKEDLKKRHEHPPNPPVSPGKTVNDVNSNNNMSYRNAGTVRQMLESKRNVSESAPPSFQTPVNTVSSTNLVTPPAVVSSQPKLQTPVTSGSLTATSVLPAPNTATVVATTQVPSGNPQPTISLQPLPVILHVPVAVSSQPQLLQSHPGTLVTNQPSGNVEFISVQSPPTVSGLTKNPVSLPSLPNPTKPNNVPSVPSPSIQRNPTASAAPLGTTLAVQAVPTAHSIVQATRTSLPTVGPSGLYSPSTNRGPIQMKIPISAFSTSSAAEQNSNTTPRIENQTNKTIDASVSKKAADSTSQCGKATGSDSSGVIDLTMDDEESGASQDPKKLNHTPVSTMSSSQPVSRPLQPIQPAPPLQPSGVPTSGPSQTTIHLLPTAPTTVNVTHRPVTQVTTRLPVPRAPANHQVVYTTLPAPPAQAPLRGTVMQAPAVRQVNPQNSVTVRVPQTTTYVVNNGLTLGSTGPQLTVHHRPPQVHTEPPRPVHPAPLPEAPQPQRLPPEAASTSLPQKPHLKLARVQSQNGIVLSWSVLEVDRSCATVDSYHLYAYHEEPSATVPSQWKKIGEVKALPLPMACTLTQFVSGSKYYFAVRAKDIYGRFGPFCDPQSTDVISSTQSS

SEQ ID NO: 16033 - protein, 7 aa, Artificial Sequence
  Synthetic polypeptide
HDSEWTV

SEQ ID NO: 16034 - protein, 27 aa, Artificial Sequence
  Synthetic polypeptide
PTWLYSGCWKKNCVRCSVLYLIRLWQN

SEQ ID NO: 16035 - protein, 42 aa, Artificial Sequence
  Synthetic polypeptide
SQSFGRLRWMDHLKSGVQDQPDQHGYTVVAGRKIVCAAVCCI

SEQ ID NO: 16036 - protein, 684 aa, Artificial Sequence
  Synthetic polypeptide
SQEFKTSLTNMVIQWLLEEKLCALQCAVFDKTLAELKTRVEKIECNKRHKTVLTELQAKIARLTKRFEAAKEDLKKRHEHPPNPPVSPGKTVNDVNSNNNMSYRNAGTVRQMLESKRNVSESAPPSFQTPVNTVSSTNLVTPPAVVSSQPKLQTPVTSGSLTATSVLPAPNTATVVATTQVPSGNPQPTISLQPLPVILHVPVAVSSQPQLLQSHPGTLVTNQPSGNVEFISVQSPPTVSGLTKNPVSLPSLPNPTKPNNVPSVPSPSIQRNPTASAAPLGTTLAVQAVPTAHSIVQATRTSLPTVGPSGLYSPSTNRGPIQMKIPISAFSTSSAAEQNSNTTPRIENQTNKTIDASVSKKAADSTSQCGKATGSDSSGVIDLTMDDEESGASQDPKKLNHTPVSTMSSSQPVSRPLQPIQPAPPLQPSGVPTSGPSQTTIHLLPTAPTTVNVTHRPVTQVTTRLPVPRAPANHQVVYTTLPAPPAQAPLRGTVMQAPAVRQVNPQNSVTVRVPQTTTYVVNNGLTLGSTGPQLTVHHRPPQVHTEPPRPVHPAPLPEAPQPQRLPPEAASTSLPQKPHLKLARVQSQNGIVLSWSVLEVDRSCATVDSYHLYAYHEEPSATVPSQWKKIGEVKALPLPMACTLTQFVSGSKYYFAVRAKDIYGRFGPFCDPQSTDVISSTQSS

SEQ ID NO: 16037 - protein, 71 aa, Artificial Sequence
  Synthetic polypeptide
SQEFKTSLTNMVIQWLLEEKLCALQCAVFDKTLAELKTRVEKIECNKRHKTVLTELQAKIARLTKRFEAAK

SEQ ID NO: 16038 - protein, 50 aa, Artificial Sequence
  Synthetic polypeptide
SQEFKTSLTNMVIQWLLEEKLCALQCAVFDKTLAELKTRVEKIECNKRHK

SEQ ID NO: 16039 - protein, 520 aa, Artificial Sequence
  Synthetic polypeptide
SQEFKTSLTNMVIQWLLEEKLCALQCAVFDKTLAELKTRVEKIECNKRHKTVLTELQAKIARLTKRFEAAKEDLKKRHEHPPNPPVSPGKTVNDVNSNNNMSYRNAGTVRQMLESKRNVSESAPPSFQTPVNTVSSTNLVTPPAVVSSQPKLQTPVTSGSLTATSVLPAPNTATVVATTQVPSGNPQPTISLQPLPVILHVPVAVSSQPQLLQSHPGTLVTNQPSGNVEFISVQSPPTVSGLTKNPVSLPSLPNPTKPNNVPSVPSPSIQRNPTASAAPLGTTLAVQAVPTAHSIVQATRTSLPTVGPSGLYSPSTNRGPIQMKIPISAFSTSSAAEQNSNTTPRIENQTNKTIDASVSKKAADSTSQCGKATGSDSSGVIDLTMDDEESGASQDPKKLNHTPVSTMSSSQPVSRPLQPIQPAPPLQPSGVPTSGPSQTTIHLLPTAPTTVNVTHRPVTQVTTRLPVPRAPANHQVVYTTLPAPPAQAPLRGTVMQAPAVRQVNPQNSKRFFLYMAPRYM

SEQ ID NO: 16040 - protein, 310 aa, Artificial Sequence
  Synthetic polypeptide
QESYLGRPQFSTACKRVGPILEFALNKPLAIRPNNVTAVACPFSVAIKIDFDFAPGSFDDQYQGCSKQVMEKLTQGDYFTKDIEAQKNYFRMWQKAHLAWLNQGKVLPQNMTTTHAVAILFYTLNSNVHSDFTRAMASVARTPQQYERSFHFKYLHYYLTSAIQLLRKDSIMENGTLCYEVHYRTKDVHFNAYTGATIRFGQFLSTSLLKEEAQEFGNQTLFTIFTCLGAPVQYFSLKKEVLIPPYELFKVINMSYHPRGDWLQLRSTGNLSTYNCQLLKASSKKCIPDPIAIASLSFLTSVIIFSKSRV

SEQ ID NO: 16041 - protein, 33 aa, Artificial Sequence
  Synthetic polypeptide
RALFQLQLKSTSTSHQVLLMISTKAVANRLWRN

SEQ ID NO: 16042 - protein, 13 aa, Artificial Sequence
  Synthetic polypeptide
QCDCCSVPFFSCN

SEQ ID NO: 16043 - protein, 78 aa, Artificial Sequence
  Synthetic polypeptide
QESYLGRPQFSTACKRVGPILEFALNKPLAIRPNNVTAVACPFSVAIKIDFDFAPGSFDDQYQGCSKQLPARNASLIL

SEQ ID NO: 16044 - protein, 36 aa, Artificial Sequence
  Synthetic polypeptide
RALFQLQLKSTSTSHQVLLMISTKAVANSFQQEMHP

SEQ ID NO: 16045 - protein, 286 aa, Artificial Sequence
  Synthetic polypeptide
QESYLGRPQFSTACKRVGPILEFALNKPLAIRPNNVTAVACPFSVAIKIDFDFAPGSFDDQYQGCSKQVMEKLTQGDYFTKDIEAQKNYFRMWQKAHLAWLNQGKVLPQNMTTTHAVAILFYTLNSNVHSDFTRAMASVARTPQQYERSFHFKYLHYYLTSAIQLLRKDSIMENGTLCYEVHYRTKDVHFNAYTGATIRFGQFLSTSLLKEEAQEFGNQTLFTIFTCLGAPVQYFSLKKEVLIPPYELFKVINMSYHPRGDWLQLRSTGNLSTYNCQLLKGILYLN

SEQ ID NO: 16046 - protein, 39 aa, Artificial Sequence
  Synthetic polypeptide
SSLSHFSGVTSSLKLFCSSIGDMRACDSPVMTPATSCRQ

SEQ ID NO: 16047 - protein, 167 aa, Artificial Sequence
  Synthetic polypeptide
HLPHHVDNEQLNLEDEDIESIDATKLSRFIEINSLHMVTEYNPVTVIGLFNSVIQIHLLLIMNKASPEYEENMHRYQKAAKLFQGKILFILVDSGMKENGKVISFFKLKESQLPALAIYQTLDDEWDTLPTAEVSVEHVQNFCDGFLSGKLLKENRESEGKTPKVEL

SEQ ID NO: 16048 - protein, 10 aa, Artificial Sequence
  Synthetic polypeptide
FSCDDTCHIM

SEQ ID NO: 16049 - protein, 133 aa, Artificial Sequence
  Synthetic polypeptide
ECRLWSGMPMFRFYHHHVLASDLDKIIQPLLELDQNRSKLKLYIGHLTTLCHDRDPLILRGLTPPASYNLDDDQAAWENELQKMTRGQLQDELEKGERDNAELQEFANAILQQIADHCPDILEQVVNALEESS

SEQ ID NO: 16050 - protein, 11 aa, Artificial Sequence
  Synthetic polypeptide
LLIWTRSSSPS

SEQ ID NO: 16051 - protein, 11 aa, Artificial Sequence
  Synthetic polypeptide
FGQDHPAPLRT

SEQ ID NO: 16052 - protein, 103 aa, Artificial Sequence
  Synthetic polypeptide
ECRLWSGMPMFRFYHHHVLASDLDKIIQPLLELDQNRSKLKLYIGHLTTLCHDRDPLILRGLTPPASYNLDDDQAAWENELQKMTRGQNPLHPKAMEKLPFFM

SEQ ID NO: 16053 - protein, 95 aa, Artificial Sequence
  Synthetic polypeptide
ECRLWSGMPMFRFYHHHVLASDLDKIIQPLLELDQNRSKLKLYIGHLTTLCHDRDPLILRGLTPPASYNLDDDQAAWENELQKMTRGQVSLSLKL

SEQ ID NO: 16054 - protein, 42 aa, Artificial Sequence
  Synthetic polypeptide
TSLGPRYTNALSPARHQAERLCWLQPKDQGPVSSKGTGQILA

SEQ ID NO: 16055 - protein, 163 aa, Artificial Sequence
  Synthetic polypeptide
LSFSFEQVSEPLLGLGIQMLSVQPDTKPKGCAGCNRKIKDRYLLKALDKYWHEDCLKCACCDCRLGEVGSTLYTKANLILCRRDYLRLFGVTGNCAACSKLIPAFEMVMRAKDNVYHLDCFACQLCNQRFCVGDKFFLKNNMILCQTDYEEGLMKEGYAPQVR

SEQ ID NO: 16056 - protein, 45 aa, Artificial Sequence
  Synthetic polypeptide
RNCLSALSKSLNLSWASVYKCSQSSQTPSRKVVLAATERSRTGIF

SEQ ID NO: 16057 - protein, 59 aa, Artificial Sequence
  Synthetic polypeptide
ISLGLPRSQADTSITLPGQPTEPYTNALSPARHQAERLCWLQPKDQGPVSSKGTGQILA

SEQ ID NO: 16058 - protein, 167 aa, Artificial Sequence
  Synthetic polypeptide
ASPEVKQILASHFLDSLQNRIQMLSVQPDTKPKGCAGCNRKIKDRYLLKALDKYWHEDCLKCACCDCRLGEVGSTLYTKANLILCRRDYLRLFGVTGNCAACSKLIPAFEMVMRAKDNVYHLDCFACQLCNQRFCVGDKFFLKNNMILCQTDYEEGLMKEGYAPQVR

SEQ ID NO: 16059 - protein, 38 aa, Artificial Sequence
  Synthetic polypeptide
HHTSWTAYRTVYKCSQSSQTPSRKVVLAATERSRTGIF

SEQ ID NO: 16060 - protein, 52 aa, Artificial Sequence
  Synthetic polypeptide
RSFLSAWSSAMIISFLRPPQQCRTVYKCSQSSQTPSRKVVLAATERSRTGIF

SEQ ID NO: 16061 - protein, 44 aa, Artificial Sequence
  Synthetic polypeptide
GLPSNAELYTNALSPARHQAERLCWLQPKDQGPVSSKGTGQILA

SEQ ID NO: 16062 - protein, 198 aa, Artificial Sequence
  Synthetic polypeptide
VLTRSNGFIRALTPLLIHSSLSCHHVKKLSFCLVFRHDYKFPEASPAMQNCIQMLSVQPDTKPKGCAGCNRKIKDRYLLKALDKYWHEDCLKCACCDCRLGEVGSTLYTKANLILCRRDYLRLFGVTGNCAACSKLIPAFEMVMRAKDNVYHLDCFACQLCNQRFCVGDKFFLKNNMILCQTDYEEGLMKEGYAPQVR

SEQ ID NO: 16063 - protein, 13 aa, Artificial Sequence
  Synthetic polypeptide
NTCKLSPYSEVSY

SEQ ID NO: 16064 - protein, 5 aa, Artificial Sequence
  Synthetic polypeptide
IKPLQ

SEQ ID NO: 16065 - protein, 49 aa, Artificial Sequence
  Synthetic polypeptide
DWPAVGFNTLMHVSRGRPNEAGIPPAQILGGNAAVQHCGWAVHTELRGQ

SEQ ID NO: 16066 - protein, 33 aa, Artificial Sequence
  Synthetic polypeptide
KVSISSAWKVRIIIGLACCGIQYTHACEPRASK

SEQ ID NO: 16067 - protein, 2 aa, Artificial Sequence
  Synthetic polypeptide
KP

SEQ ID NO: 16068 - protein, 581 aa, Artificial Sequence
  Synthetic polypeptide
KGAAVESHNERKVTCKHPVTGQPSQDNCIFVVNEQTVATMTSEEKKERPISMINEASNYNVTSDYAVHPMSPVGRTSRASKKVHNFGKRSNSIKRNPNAPVVRRGWLYKQDSTGMKLWKKRWFVLSDLCLFYYRDEKEEGILGSILLPSFQIALLTSEDHINRKYAFKAAHPNMRTYYFCTDTGKEMELWMKAMLDAALVQTEPVKRVDKITSENAPTKETNNIPNHRVLIKPEIQNNQKNKEMSKIEEKKALEAEKYGFQKDGQDRPLTKINSVKLNSLPSEYESGSACPAQTVHYRPINLSSSENKIVNVSLADLRGGNRPNTGPLYTEADRVIQRTNSMQQLEQWIKIQKGRGHEEETRGVISYQTLPRNMPSHRAQIMARYPEGYRTLPRNSKTRPESICSVTPSTHDKTLGPGAEEKRRSMRDDTMWQLYEWQQRQFYNKQSTLPRHSTLSSPKTMVNISDQTMHSIPTSPSHGSIAAYQGYSPQRTYRSEVSSPIQRGDVTIDRRHRAHHPKHVYVPDRRSVPAGLTLQSVSPQSLQGKTWGREKVATATGAAEAVASDTHLPRTGSSSPSLLCV

SEQ ID NO: 16069 - protein, 12 aa, Artificial Sequence
  Synthetic polypeptide
KGQLLKAIMKGK

SEQ ID NO: 16070 - protein, 1110 aa, Artificial Sequence
  Synthetic polypeptide
KGAAVESHNERKVTCKHPVTGQPSQDNCIFVVNEQTVATMTSEEKKERPISMINEASNYNVTSDYAVHPMSPVGRTSRASKKVHNFGKRSNSIKRNPNAPVVRRGWLYKQDSTGMKLWKKRWFVLSDLCLFYYRDEKEEGILGSILLPSFQIALLTSEDHINRKYAFKAAHPNMRTYYFCTDTGKEMELWMKAMLDAALVQTEPVKRVDKITSENAPTKETNNIPNHRVLIKPEIQNNQKNKEMSKIEEKKALEAEKYGFQKDGQDRPLTKINSVKLNSLPSEYESGSACPAQTVHYRPINLSSSENKIVNVSLADLRGGNRPNTGPLYTEADRVIQRTNSMQQLEQWIKIQKGRGHEEETRGVISYQTLPRNMPSHRAQIMARYPEGYRTLPRNSKTRPESICSVTPSTHDKTLGPGAEEKRRSMRDDTMWQLYEWQQRQFYNKQSTLPRHSTLSSPKTMVNISDQTMHSIPTSPSHGSIAAYQGYSPQRTYRSEVSSPIQRGDVTIDRRHRAHHPKHVYVPDRRSVPAGLTLQSVSPQSLQGKTLSQDEGRGTLYKYRPEEVDIDAKLSRLCEQDKVVHALEEKLQQLHKEKYTLEQALLSASQEIEMHADNPAAIQTVVLQRDDLQNGLLSTCRELSRATAELERAWREYDKLEYDVTVTRNQMQEQLDHLGEVQTESAGIQRAQIQKELWRIQDVMEGLSKHKQQRGTTEIGMIGSKPFSTVKYKNEEEEVVPPRPPLPRSYDFTEQPPIIPPLPSDSSSLLCYSRGPVHLPEEKKMYQVQGYPRNGSHCGPDYRLYKSEPELTTVAEVDESNGEEKSEPVSEIETSVVKGSHFPVGVVPPRAKSPTPESSTIASYVTLRKTKKMMDLRTERPRSAVEQLCLAESTRPRMTVEEQMERIRRHQQACLREKKKGLNVIGASDQSPLQSPSNLRDNPFRTTQTRRRDDKELDTAIRENDVKPDHETPATEIVQLKETEPQNVDFSKELKKTENISYEMLFEPEPNGVNSVEMMDKERNKDKMPEDVTFSPQDETQTANHKPEEHPEENTKNSVDEQEETVISYESTPEVSRGNQTMAVKSLSPSPESSASPVPSTQPQLTEGSHFMCV

SEQ ID NO: 16071 - protein, 1105 aa, Artificial Sequence
  Synthetic polypeptide
KGAAVESHNERKVTCKHPVTGQPSQDNCIFVVNEQTVATMTSEEKKERPISMINEASNYNVTSDYAVHPMSPVGRTSRASKKVHNFGKRSNSIKRNPNAPVVRRGWLYKQDSTGMKLWKKRWFVLSDLCLFYYRDEKEEGILGSILLPSFQIALLTSEDHINRKYAFKAAHPNMRTYYFCTDTGKEMELWMKAMLDAALVQTEPVKRVDKITSENAPTKETNNIPNHRVLIKPEIQNNQKNKEMSKIEEKKALEAEKYGFQKDGQDRPLTKINSVKLNSLPSEYESGSACPAQTVHYRPINLSSSENKIVNVSLADLRGGNRPNTGPLYTEADRVIQRTNSMQQLEQWIKIQKGRGHEEETRGVISYQTLPRNMPSHRAQIMARYPEGYRTLPRNSKTRPESICSVTPSTHDKTLGPGAEEKRRSMRDDTMWQLYEWQQRQFYNKQSTLPRHSTLSSPKTMVNISDQTMHSIPTSPSHGSIAAYQGYSPQRTYRSEVSSPIQRGDVTIDRRHRAHHPKHVYVPDRRSVPAGLTLQSVSPQSLQGKTPEELTLLLIKLRRQQAELSSIREHTLAQLMQLKLEAHSPKNEILSHHLQRNTIYLDHQLSQDEGRGTLYKYRPEEVDIDAKLSRLCEQDKVVHALEEKLQQLHKEKYTLEQALLSASQEIEMHADNPAAIQTVVLQRDDLQNGLLSTCRELSRATAELERAWREYDKLEYDVTVTRNQMQEQLDHLGEVQTESAGIQRAQIQKELWRIQDVMEGLSKHKQQRGTTEIGMIGSKPFSTVKYKNEGPDYRLYKSEPELTTVAEVDESNGEEKSEPVSEIETSVVKGSHFPVGVVPPRAKSPTPESSTIASYVTLRKTKKMMDLRTERPRSAVEQLCLAESTRPRMTVEEQMERIRRHQQACLREKKKGLNVIGASDQSPLQSPSNLRDNPFRTTQTRRRDDKELDTAIRENDVKPDHETPATEIVQLKETEPQNVDFSKELKKTENISYEMLFEPEPNGVNSVEMMDKERNKDKMPEDVTFSPQDETQTANHKPEEHPEENTKNSVDEQEETVISYESTPEVSRGNQTMAVKSLSPSPESSASPVPSTQPQLTEGSHFMCV

SEQ ID NO: 16072 - protein, 991 aa, Artificial Sequence
  Synthetic polypeptide
KGAAVESHNERKVTCKHPVTGQPSQDNCIFVVNEQTVATMTSEEKKERPISMINEASNYNVTSDYAVHPMSPVGRTSRASKKVHNFGKRSNSIKRNPNAPVVRRGWLYKQDSTGMKLWKKRWFVLSDLCLFYYRDEKEEGILGSILLPSFQIALLTSEDHINRKYAFKAAHPNMRTYYFCTDTGKEMELWMKAMLDAALVQTEPVKRVDKITSENAPTKETNNIPNHRVLIKPEIQNNQKNKEMSKIEEKKALEAEKYGFQKDGQDRPLTKINSVKLNSLPSEYESGSACPAQTVHYRPINLSSSENKIVNVSLADLRGGNRPNTGPLYTEADRVIQRTNSMQQLEQWIKIQKGRGHEEETRGVISYQTLPRNMPSHRAQIMARYPEGYRTLPRNSKTRPESICSVTPSTHDKTLGPGAEEKRRSMRDDTMWQLYEWQQRQFYNKQSTLPRHSTLSSPKTMVNISDQTMHSIPTSPSHGSIAAYQGYSPQRTYRSEVSSPIQRGDVTIDRRHRAHHPKHVYVPDRRSVPAGLTLQSVSPQSLQGKTLSQDEGRGTLYKYRPEEVDIDAKLSRLCEQDKVVHALEEKLQQLHKEKYTLEQALLSASQEIEMHADNPAAIQTVVLQRDDLQNGLLSTCRELSRATAELERAWREYDKLEYDVTVTRNQMQEQLDHLGEVQTESAGIQRAQIQKELWRIQDVMEGLSKHKQQRGTTEIGSHFPVGVVPPRAKSPTPESSTIASYVTLRKTKKMMDLRTERPRSAVEQLCLAESTRPRMTVEEQMERIRRHQQACLREKKKGLNVIGASDQSPLQSPSNLRDNPFRTTQTRRRDDKELDTAIRENDVKPDHETPATEIVQLKETEPQNVDFSKELKKTENISYEMLFEPEPNGVNSVEMMDKERNKDKMPEDVTFSPQDETQTANHKPEEHPEENTKNSVDEQEETVISYESTPEVSRGNQTMAVKSLSPSPESSASPVPSTQPQLTEGSHFMCV

SEQ ID NO: 16073 - protein, 1213 aa, Artificial Sequence
  Synthetic polypeptide
KGAAVESHNERKVTCKHPVTGQPSQDNCIFVVNEQTVATMTSEEKKERPISMINEASNYNVTSDYAVHPMSPVGRTSRASKKVHNFGKRSNSIKRNPNAPVVRRGWLYKQDSTGMKLWKKRWFVLSDLCLFYYRDEKEEGILGSILLPSFQIALLTSEDHINRKYAFKAAHPNMRTYYFCTDTGKEMELWMKAMLDAALVQTEPVKRITFNFRVDKITSENAPTKETNNIPNHRVLIKPEIQNNQKNKEMSKIEEKKALEAEKYGFQKDGQDRPLTKINSVKLNSLPSEYESGSACPAQTVHYRPINLSSSENKIVNVSLADLRGGNRPNTGPLYTEADRVIQRTNSMQQLEQWIKIQKGRGHEEETRGVISYQTLPRNMPSHRAQIMARYPEGYRTLPRNSKTRPESICSVTPSTHDKTLGPGAEEKRRSMRDDTMWQLYEWQQRQFYNKQSTLPRHSTLSSPKTMVNISDQTMHSIPTSPSHGSIAAYQGYSPQRTYRSEVSSPIQRGDVTIDRRHRAHHPKHVYVPDRRSVPAGLTLQSVSPQSLQGKTPEELTLLLIKLRRQQAELSSIREHTLAQLMQLKLEAHSPKNEILSHHLQRNTIYLDHQMKENEPIITMVHTMIENSALRPQLYQQFLRQKSKISLYCLSQDEGRGTLYKYRPEEVDIDAKLSRLCEQDKVVHALEEKLQQLHKEKYTLEQALLSASQEIEMHADNPAAIQTVVLQRDDLQNGLLSTCRELSRATAELERAWREYDKLEYDVTVTRNQMQEQLDHLGEVQTESAGIQRAQIQKELWRIQDVMEGLSKHKQQRGTTEIGMIGSKPFSTVKYKNEEEEVVPPRPPLPRSYDFTEQPPIIPPLPSDSSSLLCYSRGPVHLPEEKKMYQVQGYPRNGSHCGPDYRLYKSEPELTTVAEVDESNGEEKSEPVSEIETSVVKGSHFPVGVVPPRAKSPTPESSTIASYVTLRKTKKMMDLRTERPRSAVEQLCLAESTRPRMTVEEQMERIRRHQQACLREKKKGLNVIGASDQSPLQSPSNLRDNPFRTTQTRRRDDKELDTAIRENDVKPDHETPATEIVQLKETEPQNVDFSKELKKTENISYEMLFEPEPNGVNSVEMMDKERNKDKMPEDVTFSPQDETQTANHKPEEHPEENTKNSVDEQEETVISYESTPEVSRGNQTMAVKSLSPSPESSASPVPSTQPQLTEGSHFMCV

SEQ ID NO: 16074 - protein, 1047 aa, Artificial Sequence
  Synthetic polypeptide
KGAAVESHNERKVTCKHPVTGQPSQDNCIFVVNEQTVATMTSEEKKERPISMINEASNYNVTSDYAVHPMSPVGRTSRASKKVHNFGKRSNSIKRNPNAPVVRRGWLYKQDSTGMKLWKKRWFVLSDLCLFYYRDEKEEGILGSILLPSFQIALLTSEDHINRKYAFKAAHPNMRTYYFCTDTGKEMELWMKAMLDAALVQTEPVKRVDKITSENAPTKETNNIPNHRVLIKPEIQNNQKNKEMSKIEEKKALEAEKYGFQKDGQDRPLTKINSVKLNSLPSEYESGSACPAQTVHYRPINLSSSENKIVNVSLADLRGGNRPNTGPLYTEADRVIQRTNSMQQLEQWIKIQKGRGHEEETRGVISYQTLPRNMPSHRAQIMARYPEGYRTLPRNSKTRPESICSVTPSTHDKTLGPGAEEKRRSMRDDTMWQLYEWQQRQFYNKQSTLPRHSTLSSPKTMVNISDQTMHSIPTSPSHGSIAAYQGYSPQRTYRSEVSSPIQRGDVTIDRRHRAHHPKHVYVPDRRSVPAGLTLQSVSPQSLQGKTLSQDEGRGTLYKYRPEEVDIDAKLSRLCEQDKVVHALEEKLQQLHKEKYTLEQALLSASQEIEMHADNPAAIQTVVLQRDDLQNGLLSTCRELSRATAELERAWREYDKLEYDVTVTRNQMQEQLDHLGEVQTESAGIQRAQIQKELWRIQDVMEGLSKHKQQRGTTEIGMIGSKPFSTVKYKNEGPDYRLYKSEPELTTVAEVDESNGEEKSEPVSEIETSVVKGSHFPVGVVPPRAKSPTPESSTIASYVTLRKTKKMMDLRTERPRSAVEQLCLAESTRPRMTVEEQMERIRRHQQACLREKKKGLNVIGASDQSPLQSPSNLRDNPFRTTQTRRRDDKELDTAIRENDVKPDHETPATEIVQLKETEPQNVDFSKELKKTENISYEMLFEPEPNGVNSVEMMDKERNKDKMPEDVTFSPQDETQTANHKPEEHPEENTKNSVDEQEETVISYESTPEVSRGNQTMAVKSLSPSPESSASPVPSTQPQLTEGSHFMCV

SEQ ID NO: 16075 - protein, 154 aa, Artificial Sequence
  Synthetic polypeptide
GRARWLTSVIPALWEAEAGESRGQEIETILANTLKKTENISYEMLFEPEPNGVNSVEMMDKERNKDKMPEDVTFSPQDETQTANHKPEEHPEENTKNSVDEQEETVISYESTPEVSRGNQTMAVKSLSPSPESSASPVPSTQPQLTEGSHFMCV

SEQ ID NO: 16076 - protein, 24 aa, Artificial Sequence
  Synthetic polypeptide
SQHFGRLRQANHEVRRSRPSWLTR

SEQ ID NO: 16077 - protein, 5 aa, Artificial Sequence
  Synthetic polypeptide
HVKKN

SEQ ID NO: 16078 - protein, 60 aa, Artificial Sequence
  Synthetic polypeptide
GRARWLTSVIPALWEAEAGESRGQEIETILANTLKKTENISYEMLFEPEPNGVNSVEMMD

SEQ ID NO: 16079 - protein, 27 aa, Artificial Sequence
  Synthetic polypeptide
GPVRWFTPIIPTLWEAENNAAEEVEEV

SEQ ID NO: 16080 - protein, 23 aa, Artificial Sequence
  Synthetic polypeptide
GGSRPLSQHFGRPRTMPQKRLKR

SEQ ID NO: 16081 - protein, 23 aa, Artificial Sequence
  Synthetic polypeptide
PGEVVHAHYPNTLGGREQCRRRG

SEQ ID NO: 16082 - protein, 41 aa, Artificial Sequence
  Synthetic polypeptide
GPVRWFTPIIPTLWEAENNAAEEVEENSDKKSVQFVFKQTV

SEQ ID NO: 16083 - protein, 37 aa, Artificial Sequence
  Synthetic polypeptide
GGSRPLSQHFGRPRTMPQKRLKRTLIRKVFNLYLSKQ

SEQ ID NO: 16084 - protein, 35 aa, Artificial Sequence
  Synthetic polypeptide
GPVRWFTPIIPTLWEAENNAAEEVEEVRQAFHLLP

SEQ ID NO: 16085 - protein, 40 aa, Artificial Sequence
  Synthetic polypeptide
GGSRPLSQHFGRPRTMPQKRLKRSDKPFTFCHDCEASSAM

SEQ ID NO: 16086 - protein, 62 aa, Artificial Sequence
  Synthetic polypeptide
GPVRWFTPIIPTLWEAENNAAEEVEEMEFHSCCPGWCAMARSWLTATSASRVQAILLPQLPE

SEQ ID NO: 16087 - protein, 62 aa, Artificial Sequence
  Synthetic polypeptide
GGSRPLSQHFGRPRTMPQKRLKRWSFTLVAQAGVQWRDLGSPQPPLPGFKRFFCLSFLSSWD

SEQ ID NO: 16088 - protein, 11 aa, Artificial Sequence
  Synthetic polypeptide
IYGVHLWNLVL

SEQ ID NO: 16089 - protein, 521 aa, Artificial Sequence
  Synthetic polypeptide
SRNNRNSKYTVSIYGIWFYDKEECQRIAELMKNLTQYEQLKAHQGTGAGISPVILNSGEGKEVDILRMLIKAKDEYTKCKTCSEPKKITSSSAIYDNPNLIKPIPVKPSENQQQRIPQPNQTLDPEPQHLSLTALFGKQDKATCQETVEPPQTLHQQQQQQQQQQEKLPIRQGVVRSLSYEEPRRHSPPIEKQLCPAIQKLMVRSADLHPLSELPENRPCENGSTHSAGEFFTGPVQPGSPHNIGTSRGVQNASRTQNLFEKLQSTPGAANKCDPSTPAPASSAALNRSRAPTSVTPVAPGKGLAQPPQAYFNGSLPPQTVGHQAHGREQSTLPRQTLPISGSQTGSSGVISPQELLKKLQIVQQEQQLHASNRPALAAKFPVLAQSSGTGKPLESWINKTPNTEQQTPLFQVISPQRIPATAAPSLLMSPMVFAQPTSVPPKERESGLLPVGGQEPPAAATSLLLPIQSPEPSVITSSPLTKLQLQEALLYLIQNDDNFLNIIYEAYLFSMTQAAMKKTM

SEQ ID NO: 16090 - protein, 50 aa, Artificial Sequence
  Synthetic polypeptide
KKFFRLEGIISKGKLELQDEVGTTEIVNIRCPSMEFGFMIRKNAKELQSL

SEQ ID NO: 16091 - protein, 269 aa, Artificial Sequence
  Synthetic polypeptide
ISVVYKMFLAALSFSYIAKALGGIIMKISITQIERRFDISSSLAGLIDGSFEIGNLLVIVFVSYFGSKLHRPKLIGIGCLLMGTGSILTSLPHFFMGYYRYSKETHINPSENSTSSLSTCLINQTLSFNGTSPEIVEKDCVKESGSHMWIYVFMGNMLRGIGETPIVPLGISYIDDFAKEGHSSLYLGSLNAIGMIGPVIGFALGSLFAKMYVDIGYVDLSTIRITPKDSRWVGAWWLGFLVSGLFSIISSIPFFFLPKNPNKPQKERK

SEQ ID NO: 16092 - protein, 43 aa, Artificial Sequence
  Synthetic polypeptide
EDGPLPAAVLISDFSTSGTVTSKFLLFIRCSWQPCHSAILLKH

SEQ ID NO: 16093 - protein, 680 aa, Artificial Sequence
  Synthetic polypeptide
ISVVYKMFLAALSFSYIAKALGGIIMKISITQIERRFDISSSLAGLIDGSFEIGNLLVIVFVSYFGSKLHRPKLIGIGCLLMGTGSILTSLPHFFMGYYRYSKETHINPSENSTSSLSTCLINQTLSFNGTSPEIVEKDCVKESGSHMWIYVFMGNMLRGIGETPIVPLGISYIDDFAKEGHSSLYLGSLNAIGMIGPVIGFALGSLFAKMYVDIGYVDLSTIRITPKDSRWVGAWWLGFLVSGLFSIISSIPFFFLPKNPNKPQKERKISLSLHVLKTNDDRNQTANLTNQGKNVTKNVTGFFQSLKSILTNPLYVIFLLLTLLQVSSFIGSFTYVFKYMEQQYGQSASHANFLLGIITIPTVATGMFLGGFIIKKFKLSLVGIAKFSFLTSMISFLFQLLYFPLICESKSVAGLTLTYDGNNSVASHVDVPLSYCNSECNCDESQWEPVCGNNGITYLSPCLAGCKSSSGIKKHTVFYNCSCVEVTGLQNRNYSAHLGECPRDNTCTRKFFIYVAIQVINSLFSATGGTTFILLTVKIVQPELKALAMGFQSMVIRTLGGILAPIYFGALIDKTCMKWSTNSCGAQGACRIYNSVFFGRVYLGLSIALRFPALVLYIVFIFAMKKKFQGKDTKASDNERKVMDEANLEFLNNGEHFVPSAGTDSKTCNLDMQDNAAAN

SEQ ID NO: 16094 - protein, 665 aa, Artificial Sequence
  Synthetic polypeptide
ISVVYKMFLAALSFSYIAKALGGIIMKISITQIERRFDISSSLAGLIDGSFEIGNLLVIVFVSYFGSKLHRPKLIGIGCLLMGTGSILTSLPHFFMGYYRYSKETNIDPSENSTSNLPNCLINQMLSLNRTPSEIIERGCVKESGSHMWIYVFMGNMLRGIGETPIVPLGISYIDDFAKEGHSSLYLGTVNVMGMTGLVFAFMLGSLFAKMYVDIGYVDLSTIRITPKDSRWVGAWWLGFLVSGIVSIISSIPFFFLPLNPNKPQKERKVSLFLHVLKTNDKRNQIANLTNRRKYITKNVTGFFQSLKSILTNPLYVIFVIFTLLHMSSYIASLTYIIKMVEQQYGWSASKTNFLLGVLALPAVAIGMFSGGYIIKKFKLSLVGLAKLAFCSATVHLLSQVLYFFLICESKSVAGLTLTYDGNSPVRSHVDVPLSYCNSECNCDESQWEPVCGNNGITYLSPCLAGCKSSSGNKEPIVFYNCSCVEVIGLQNKNYSAHLGECPRDDACTRKSYVYFVIQVLDAFLCAVGLTSYSVLVIRIVQPELKALAIGFHSMIMRSLGGILVPIYFGALIDTTCMKWSTNSCGARGACRIYNSTYLGRAFFGLKVALIFPVLVLLTVFIFVVRKKSHGKDTKVLENERQVMDEANLEFLNDSEHFVPSAEEQ

SEQ ID NO: 16095 - protein, 726 aa, Artificial Sequence
  Synthetic polypeptide
ISVVYKMFLAALSFSYIAKALGGIIMKISITQIERRFDISSSLAGLIDGSFEIGNLLVIVFVSYFGSKLHRPKLIGIGCLLMGTGSILTSLPHFFMGYYRYSKETHINPSENSTSSLSTCLINQTLSFNGTSPEIVEKDCVKESGSHMWIYVFMGNMLRGIGETPIVPLGISYIDDFAKEGHSSLYLGSLNAIGMIGPVIGFALGSLFAKMYVDIGYVDLSTIRITPKDSRWVGAWWLGFLVSGLFSIISSIPFFFLPKNPNKPQKERKISLSLHVLKTNDDRNQTANLTNQGKNVTKNVTGFFQSLKSILTNPLYVIFLLLTLLQVSSFIGSFTYVFKYMEQQYGQSASHANFLLGIITIPTVATGMFLGGFIIKKFKLSLVGIAKFSFLTSMISFLFQLLYFPLICESKSVAGLTLTYDGNNSVASHVDVPLSYCNSECNCDESQWEPVCGNNGITYLSPCLAGCKSSSGIKKHTVFYNCSCVEVTGLQNRNYSAHLGECPRDNTCTRKFFIYVAIQVINSLFSATGGTTFILLTVKIVQPELKALAMGFQSMVIRTLGGILAPIYFGALIDKTCMKWSTNSCGAQGACRIYNSVFFGIVQPELKALAIGFHSMIMRSLGGILVPIYFGALIDTTCMKWSTNSCGARGACRIYNSTYLGRAFFGLKVALIFPVLVLLTVFIFVVRKKSHGKDTKVLENERQVMDEANLEFLNDSEHFVPSAEEQ

SEQ ID NO: 16096 - protein, 24 aa, Artificial Sequence
  Synthetic polypeptide
RFSHQHFTEAALSKKIQHQVYQPV

SEQ ID NO: 16097 - protein, 25 aa, Artificial Sequence
  Synthetic polypeptide
GFPISISLKLLFLRKFNIKFINLFN

SEQ ID NO: 16098 - protein, 107 aa, Artificial Sequence
  Synthetic polypeptide
LLEAFRPHDSPVPCCPTSGQSEKVSVCPSLGAHVIFKPYKDWPVCARTLTPARSPNLIKNRACHPSLLSKLFLDQLIILSYSPQKASLFGYSLSIGRYSLGNSFSCY

SEQ ID NO: 16099 - protein, 122 aa, Artificial Sequence
  Synthetic polypeptide
SCPILPRKPHYLATHFPSEDILLVTASPVIKAVTNFKQISKILEEFDVEEQSSTMLGKRFPNIKVIESGVKQLKSEEHCIVTEDGNQHVYKKLCLCAGAKPKLICEGNPYVLGIRDTDSAQV

SEQ ID NO: 16100 - protein, 42 aa, Artificial Sequence
  Synthetic polypeptide
KQGLSPFSALQAIFGSAYNPVLFSPESLIIWLLTFHRKIFSW

SEQ ID NO: 16101 - protein, 38 aa, Artificial Sequence
  Synthetic polypeptide
SCPILPRKPHYLATHFPSEDILLVTASPVIKAVTNFKQ

SEQ ID NO: 16102 - protein, 483 aa, Artificial Sequence
  Synthetic polypeptide
SCPILPRKPHYLATHFPSEDILLVTASPVIKAVTNFKQISKILEEFDVEEQSSTMLGKRFPNIKVIESGVKQLKSEEHCIVTEDGNQHVYKKLCLCAGAKPKLICEGNPYVLGIRDTDSAQEFQKQLTKAKRIMIIGNGGIALELVYEIEGCEVIWAIKDKAIGNTFFDAGAAEFLTSKLIAEKSEAKIAHKRTRYTTEGRKKEARSKSKADNVGSALGPDWHEGLNLKGTKEFSHKIHLETMCEVKKIYLQDEFRILKKKSFTFPRDHKSVTADTEMWPVYVELTNEKIYGCDFIVSATGVTPNVEPFLHGNSFDLGEDGGLKVDDHMHTSLPDIYAAGDICTTSWQLSPVWQQMRLWTQARQMGWYAAKCMAAASSGDSIDMDFSFELFAHVTKFFNYKVVLLGKYNAQGLGSDHELMLRCTKGREYIKVVMQNGRMMGAVLIGETDLEETFENLILNQMNLSSYGEDLLDPNIDIEDYFD

SEQ ID NO: 16103 - protein, 11 aa, Artificial Sequence
  Synthetic polypeptide
VNAECMGFDRP

SEQ ID NO: 16104 - protein, 381 aa, Artificial Sequence
  Synthetic polypeptide
EVTNLFLIFQAHRWKRLALSQMRLWTVDFELMLNVWVSTDHDEIENVAKQFGAQVHRRSSEVSKDSSTSLDAIIEFLNYHNEVDIVGNIQATSPCLHPTDLQKVAEMIREEGYDSVFSVVRRHQFRWSEIQKGVREVTEPLNLNPAKRPRRQDWDGELYENGSFYFAKRHLIEMGYLQGGKMAYYEMRAEHSVDIDVDIDWPIAEQRVLRYGYFGKEKLKEIKLLVCNIDGCLTNGHIYVSGDQKEIISYDVKDAIGISLLKKSGIEVRLISERACSKQTLSSLKLDCKMEVSVSDKLAVVDEWRKEMGLCWKEVAYLGNEVSDEECLKRVGLSGAPADACSTAQKAVGYICKCNGGRGAIREFAEHICLLMEKVNNSCQK

SEQ ID NO: 16105 - protein, 210 aa, Artificial Sequence
  Synthetic polypeptide
EVTNLFLIFQAHRWKRLALSQMRLWTVDFELMLNVWVSTDHDEIENVAKQFGAQVHRRSSEVSKDSSTSLDAIIEFLNYHNEVDIVGNIQATSPCLHPTDLQKVAEMIREEGYDSVFSVVRRHQFRWSEIQKGVREVTEPLNLNPAKRPRRQDWDGELYENGSFYFAKRHLIEMGYLQGGKMAYYEMRAEHSVDIDVDIDWPIAEQRVLR

SEQ ID NO: 16106 - protein, 97 aa, Artificial Sequence
  Synthetic polypeptide
QMTLEQHMFELRSPLPCRLSSTSATPETEDQLFFFLLLLSLLSVKTMRIKTFTMIHFHLIKVYGFRQTMMKLRMWPNNLVHKFIEEVLKFQKTALPH

SEQ ID NO: 16107 - protein, 8 aa, Artificial Sequence
  Synthetic polypeptide
KCMGFDRP

SEQ ID NO: 16108 - protein, 382 aa, Artificial Sequence
  Synthetic polypeptide
NRRSTVLLSPPPQSTQCEDNEDKDLYNDPLSLNKSVWVSTDHDEIENVAKQFGAQVHRRSSEVSKDSSTSLDAIIEFLNYHNEVDIVGNIQATSPCLHPTDLQKVAEMIREEGYDSVFSVVRRHQFRWSEIQKGVREVTEPLNLNPAKRPRRQDWDGELYENGSFYFAKRHLIEMGYLQGGKMAYYEMRAEHSVDIDVDIDWPIAEQRVLRYGYFGKEKLKEIKLLVCNIDGCLTNGHIYVSGDQKEIISYDVKDAIGISLLKKSGIEVRLISERACSKQTLSSLKLDCKMEVSVSDKLAVVDEWRKEMGLCWKEVAYLGNEVSDEECLKRVGLSGAPADACSTAQKAVGYICKCNGGRGAIREFAEHICLLMEKVNNSCQK

SEQ ID NO: 16109 - protein, 211 aa, Artificial Sequence
  Synthetic polypeptide
NRRSTVLLSPPPQSTQCEDNEDKDLYNDPLSLNKSVWVSTDHDEIENVAKQFGAQVHRRSSEVSKDSSTSLDAIIEFLNYHNEVDIVGNIQATSPCLHPTDLQKVAEMIREEGYDSVFSVVRRHQFRWSEIQKGVREVTEPLNLNPAKRPRRQDWDGELYENGSFYFAKRHLIEMGYLQGGKMAYYEMRAEHSVDIDVDIDWPIAEQRVLR

SEQ ID NO: 16110 - protein, 38 aa, Artificial Sequence
  Synthetic polypeptide
DQSGQHGKTSSLPKNTKVSQVSEPSVVQKDICGQHENL

SEQ ID NO: 16111 - protein, 184 aa, Artificial Sequence
  Synthetic polypeptide
GVETSPDNMAKPRLYQKIQKLARFQNLLWSRKTFVDNMKIYNHSYIYMPAFSMKTGTEPSLRVYYTLSDVGANQTVLFANPNFLRSIGKFWKSRGIHAKRLSTGLFLVSAALGLCEEVAIYGFWPFSVNMHEQPISHHYYDNVLPFSGFHAMPEEFLQLWYLHKIGALRMQLDPCEDTSLQPTS

SEQ ID NO: 16112 - protein, 16 aa, Artificial Sequence
  Synthetic polypeptide
PGFRTFCGPERHLWTT

SEQ ID NO: 16113 - protein, 67 aa, Artificial Sequence
  Synthetic polypeptide
GVETSPDNMAKPRLYQKIQKLARFQNLLWSRKTFVDNMKIYNHSYIYMPAFSMKTGTEPSLRVYYTL

SEQ ID NO: 16114 - protein, 230 aa, Artificial Sequence
  Synthetic polypeptide
TATPFQLPLKKCAVVGNGGILKKSGCGRQIDEANFVMRCNLPPLSSEYTKDVGSKSQLVTANPSIIRQRFQNLLWSRKTFVDNMKIYNHSYIYMPAFSMKTGTEPSLRVYYTLSDVGANQTVLFANPNFLRSIGKFWKSRGIHAKRLSTGLFLVSAALGLCEEVAIYGFWPFSVNMHEQPISHHYYDNVLPFSGFHAMPEEFLQLWYLHKIGALRMQLDPCEDTSLQPTS

SEQ ID NO: 16115 - protein, 15 aa, Artificial Sequence
  Synthetic polypeptide
GLPRHAELQPHSSCH

SEQ ID NO: 16116 - protein, 41 aa, Artificial Sequence
  Synthetic polypeptide
LFPEASPAMLNCNPIPAAIEEMRGGGKWWDSEEEWLWPSNR

SEQ ID NO: 16117 - protein, 113 aa, Artificial Sequence
  Synthetic polypeptide
TATPFQLPLKKCAVVGNGGILKKSGCGRQIDEANFVMRCNLPPLSSEYTKDVGSKSQLVTANPSIIRQRFQNLLWSRKTFVDNMKIYNHSYIYMPAFSMKTGTEPSLRVYYTL

SEQ ID NO: 16118 - protein, 69 aa, Artificial Sequence
  Synthetic polypeptide
TATPFQLPLKKCAVVGNGGILKKSGCGRQIDEANFVMRCNLPPLSSEYTKDVGSKSQLVTANPSIIRQR

SEQ ID NO: 16119 - protein, 21 aa, Artificial Sequence
  Synthetic polypeptide
AIICQETNGRLLRPCPSLCYD

SEQ ID NO: 16120 - protein, 287 aa, Artificial Sequence
  Synthetic polypeptide
EDQFEPSYVRKQMEDCCDPAHLFAMTKMNSPMGKSMWYDGEFLYSFTIDNSTYSLFPQATPFQLPLKKCAVVGNGGILKKSGCGRQIDEANFVMRCNLPPLSSEYTKDVGSKSQLVTANPSIIRQRFQNLLWSRKTFVDNMKIYNHSYIYMPAFSMKTGTEPSLRVYYTLSDVGANQTVLFANPNFLRSIGKFWKSRGIHAKRLSTGLFLVSAALGLCEEVAIYGFWPFSVNMHEQPISHHYYDNVLPFSGFHAMPEEFLQLWYLHKIGALRMQLDPCEDTSLQPTS

SEQ ID NO: 16121 - protein, 24 aa, Artificial Sequence
  Synthetic polypeptide
RTSLSHHMSGNKWKTAATLPISLL

SEQ ID NO: 16122 - protein, 66 aa, Artificial Sequence
  Synthetic polypeptide
EDQFEPSYVRKQMEDCCDPAHLFAMTKMNSPMGKSMWYDGEFLYSFTIDNSTYSLFPQMQSPSFVK

SEQ ID NO: 16123 - protein, 170 aa, Artificial Sequence
  Synthetic polypeptide
EDQFEPSYVRKQMEDCCDPAHLFAMTKMNSPMGKSMWYDGEFLYSFTIDNSTYSLFPQATPFQLPLKKCAVVGNGGILKKSGCGRQIDEANFVMRCNLPPLSSEYTKDVGSKSQLVTANPSIIRQRFQNLLWSRKTFVDNMKIYNHSYIYMPAFSMKTGTEPSLRVYYTL

SEQ ID NO: 16124 - protein, 126 aa, Artificial Sequence
  Synthetic polypeptide
EDQFEPSYVRKQMEDCCDPAHLFAMTKMNSPMGKSMWYDGEFLYSFTIDNSTYSLFPQATPFQLPLKKCAVVGNGGILKKSGCGRQIDEANFVMRCNLPPLSSEYTKDVGSKSQLVTANPSIIRQR

SEQ ID NO: 16125 - protein, 397 aa, Artificial Sequence
  Synthetic polypeptide
GLPSHASCTDCRTDCSNGCSAECTGEGGSKEVVGTFKAKDLIVTPATILKEKPDPNNLVFGTVFTDHMLTVEWSSEFGWEKPHIKPLQNLSLHPGSSALHYAVELFEGLKAFRGVDNKIRLFQPNLNMDRMYRSAVRATLPVFDKEELLECIQQLVKLDQEWVPYSTSASLYIRPTFIGTEPSLGVKKPTKALLFVLLSPVGPYFSSGTFNPVSLWANPKYVRAWKGGTGDCKMGGNYGSSLFAQCEAVDNGCQQVLWLYGEDHQITEVGTMNLFLYWINEDGEEELATPPLDGIILPGVTRRCILDLAHQWGEFKVSERYLTMDDLTTALEGNRVREMFGSGTACVVCPVSDILYKGETIHIPTMENGPKLASRILSKLTDIQYGREESDWTIVLS

SEQ ID NO: 16126 - protein, 56 aa, Artificial Sequence
  Synthetic polypeptide
RACFPFPFCHDCKFPEASPAMLPVQTAELIAVTDAPQSVPEKEDQKRWWGLLRLKT

SEQ ID NO: 16127 - protein, 360 aa, Artificial Sequence
  Synthetic polypeptide
GLPSHASCTDCRTDCSNGCSAECTGEGGSKEVVGTFKAKDLIVTPATILKEKPDPNNLVFGTVFTDHMLTVEWSSEFGWEKPHIKPLQNLSLHPGSSALHYAVEVFDKEELLECIQQLVKLDQEWVPYSTSASLYIRPTFIGTEPSLGVKKPTKALLFVLLSPVGPYFSSGTFNPVSLWANPKYVRAWKGGTGDCKMGGNYGSSLFAQCEAVDNGCQQVLWLYGEDHQITEVGTMNLFLYWINEDGEEELATPPLDGIILPGVTRRCILDLAHQWGEFKVSERYLTMDDLTTALEGNRVREMFGSGTACVVCPVSDILYKGETIHIPTMENGPKLASRILSKLTDIQYGREESDWTIVLS

SEQ ID NO: 16128 - protein, 414 aa, Artificial Sequence
  Synthetic polypeptide
CACFHLPHFCHGMTFMRYSTMFLDFPASRNDCSNGCSAECTGEGGSKEVVGTFKAKDLIVTPATILKEKPDPNNLVFGTVFTDHMLTVEWSSEFGWEKPHIKPLQNLSLHPGSSALHYAVELFEGLKAFRGVDNKIRLFQPNLNMDRMYRSAVRATLPVFDKEELLECIQQLVKLDQEWVPYSTSASLYIRPTFIGTEPSLGVKKPTKALLFVLLSPVGPYFSSGTFNPVSLWANPKYVRAWKGGTGDCKMGGNYGSSLFAQCEAVDNGCQQVLWLYGEDHQITEVGTMNLFLYWINEDGEEELATPPLDGIILPGVTRRCILDLAHQWGEFKVSERYLTMDDLTTALEGNRVREMFGSGTACVVCPVSDILYKGETIHIPTMENGPKLASRILSKLTDIQYGREESDWTIVLS

SEQ ID NO: 16129 - protein, 41 aa, Artificial Sequence
  Synthetic polypeptide
DTAPCSWTSQPPETIAVTDAPQSVPEKEDQKRWWGLLRLKT

SEQ ID NO: 16130 - protein, 42 aa, Artificial Sequence
  Synthetic polypeptide
VQFPSSLGLVCLLPPSPLLPWDDLHEIQHHVLGLPSLQKRLQ

SEQ ID NO: 16131 - protein, 377 aa, Artificial Sequence
  Synthetic polypeptide
CACFHLPHFCHGMTFMRYSTMFLDFPASRNDCSNGCSAECTGEGGSKEVVGTFKAKDLIVTPATILKEKPDPNNLVFGTVFTDHMLTVEWSSEFGWEKPHIKPLQNLSLHPGSSALHYAVEVFDKEELLECIQQLVKLDQEWVPYSTSASLYIRPTFIGTEPSLGVKKPTKALLFVLLSPVGPYFSSGTFNPVSLWANPKYVRAWKGGTGDCKMGGNYGSSLFAQCEAVDNGCQQVLWLYGEDHQITEVGTMNLFLYWINEDGEEELATPPLDGIILPGVTRRCILDLAHQWGEFKVSERYLTMDDLTTALEGNRVREMFGSGTACVVCPVSDILYKGETIHIPTMENGPKLASRILSKLTDIQYGREESDWTIVLS

SEQ ID NO: 16132 - protein, 59 aa, Artificial Sequence
  Synthetic polypeptide
GWAWWLTPVIPALWEAEAGRSRGTSPAHDNIAFQDSTSKDKTILNLEAKEEPETIEEHK

SEQ ID NO: 16133 - protein, 34 aa, Artificial Sequence
  Synthetic polypeptide
SQHFGRLRQADHEAQVQLMIILHSKTLRVRIKPY

SEQ ID NO: 16134 - protein, 11 aa, Artificial Sequence
  Synthetic polypeptide
GRQITRHKSSS

SEQ ID NO: 16135 - protein, 289 aa, Artificial Sequence
  Synthetic polypeptide
GWAWWLTPVIPALWEAEAGRSRGTSPAHDNIAFQDSTSKDKTILNLEAKEEPETIEEHKKEHASGDSVVSPLPVTTVKSVNLRQSENTSANEKEVEAEFLRLSLGFKCDWFTLEKRVKLEERSRDLAEENLKKEITNCLKLLESLTPLCEDDNQAQEIIKKLEKSIKFLSQCAARVASRAEMLGAINQESRVSKAVEVMIQHVENLKRMYAKEHAELEELKQVLLQNERSFNPLEDDDDCQIKKRSASLNSKPSSLRRVTIASLPRNIGNAGMVAGMENNDRFSRRSSS

SEQ ID NO: 16136 - protein, 61 aa, Artificial Sequence
  Synthetic polypeptide
GWAWWLTPVIPALWEAEAGRSRGTSPAHDNIAFQDSTSKDKTILNLEAKEEPETIEEHKKE

SEQ ID NO: 16137 - protein, 440 aa, Artificial Sequence
  Synthetic polypeptide
GWAWWLTPVIPALWEAEAGRSRGTSPAHDNIAFQDSTSKDKTILNLEAKEEPETIEEHKKEHASGDSVVSPLPVTTVKSVNLRQSENTSANEKEVEAEFLRLSLGFKCDWFTLEKRVKLEERSRDLAEENLKKEITNCLKLLESLTPLCEDDNQAQEIIKKLEKSIKFLSQCAARVASRAEMLGAINQESRVSKAVEVMIQHVENLKRMYAKEHAELEELKQVLLQNERSFNPLEDDDDCQIKKRSASLNSKPSSLRRVTIASLPRNIGNAGMVAGMENNDRFSRRSSSWRILGSKQSEHRPSLPRFISTYSWADAEEEKCELKTKDDSEPSGEETVERTRKPSLSEKKNNPSKWDVSSVYDTIASWATNLKSSIRKANKALWLSIAFIVLFAALMSFLTGQLFQKSVDAAPTQQEDSWTSLEHILWPFTRLRHNGPPPV

SEQ ID NO: 16138 - protein, 34 aa, Artificial Sequence
  Synthetic polypeptide
QGSPVAAEPGIRTHSRLLGIAPHSRRKPKRNQKQ

SEQ ID NO: 16139 - protein, 19 aa, Artificial Sequence
  Synthetic polypeptide
ELRRTAGGSQRGTRNNRRT

SEQ ID NO: 16140 - protein, 31 aa, Artificial Sequence
  Synthetic polypeptide
ARDQNPFEAVRNCAAQQEEAKEEPETIEEHK

SEQ ID NO: 16141 - protein, 261 aa, Artificial Sequence
  Synthetic polypeptide
ARDQNPFEAVRNCAAQQEEAKEEPETIEEHKKEHASGDSVVSPLPVTTVKSVNLRQSENTSANEKEVEAEFLRLSLGFKCDWFTLEKRVKLEERSRDLAEENLKKEITNCLKLLESLTPLCEDDNQAQEIIKKLEKSIKFLSQCAARVASRAEMLGAINQESRVSKAVEVMIQHVENLKRMYAKEHAELEELKQVLLQNERSFNPLEDDDDCQIKKRSASLNSKPSSLRRVTIASLPRNIGNAGMVAGMENNDRFSRRSSS

SEQ ID NO: 16142 - protein, 33 aa, Artificial Sequence
  Synthetic polypeptide
ARDQNPFEAVRNCAAQQEEAKEEPETIEEHKKE

SEQ ID NO: 16143 - protein, 412 aa, Artificial Sequence
  Synthetic polypeptide
ARDQNPFEAVRNCAAQQEEAKEEPETIEEHKKEHASGDSVVSPLPVTTVKSVNLRQSENTSANEKEVEAEFLRLSLGFKCDWFTLEKRVKLEERSRDLAEENLKKEITNCLKLLESLTPLCEDDNQAQEIIKKLEKSIKFLSQCAARVASRAEMLGAINQESRVSKAVEVMIQHVENLKRMYAKEHAELEELKQVLLQNERSFNPLEDDDDCQIKKRSASLNSKPSSLRRVTIASLPRNIGNAGMVAGMENNDRFSRRSSSWRILGSKQSEHRPSLPRFISTYSWADAEEEKCELKTKDDSEPSGEETVERTRKPSLSEKKNNPSKWDVSSVYDTIASWATNLKSSIRKANKALWLSIAFIVLFAALMSFLTGQLFQKSVDAAPTQQEDSWTSLEHILWPFTRLRHNGPPPV

SEQ ID NO: 16144 - protein, 39 aa, Artificial Sequence
  Synthetic polypeptide
RGVPLHMLFACCHVRYDFAPPLPSAMIVRPPQPCGIETM

SEQ ID NO: 16145 - protein, 28 aa, Artificial Sequence
  Synthetic polypeptide
GLPSHVELKQCDENHSWGGRDDDPDGTQ

SEQ ID NO: 16146 - protein, 521 aa, Artificial Sequence
  Synthetic polypeptide
GRARWLTPVIPALWEADAGGSRGQEIKTILANMTLLSNSSETGTASGLVFILRPEQSTCTWYLGTSGIQPVQNMAILLSYSERDPVPGGCNLEFDLDIDPNIYLEYNFFETTIKFAPANLGYARGVDPPPCDAGTDQDSRWRLQYDVYQYFLPENDLTEEMLLKHLQRMVSVPQVKASALKVVTLTANDKTSVSFSSLPGQGVIYNVIVWDPFLNTSAAYIPAHTYACSFEAGEGSCASLGRVSSKVFFTLFALLGFFICFFGHRFWKTELFFIGFIIMGFFFYILITRLTPIKYDVNLILTAVTGSVGGMFLVAVWWRFGILSICMLCVGLVLGFLISSVTFFTPLGNLKIFHDDGVFWVTFSCIAILIPVVFMGCLRILNILTCGVIGSYSVVLAIDSYWSTSLSYITLNVLKRALNKDFHRAFTNVPFQTNDFIILAVWGMLAVSGITLQIRRERGRPFFPPHPYKLWKQERERRVTNILDPSYHIPPLRERLYGRLTQIKGLFQKEQPAGERTPLLL

SEQ ID NO: 16147 - protein, 20 aa, Artificial Sequence
  Synthetic polypeptide
HDSPFQFLGNRHCQWTGFHP

SEQ ID NO: 16148 - protein, 52 aa, Artificial Sequence
  Synthetic polypeptide
GRARWLTPVIPALWEADAGGSRGQEIKTILANMTLLSNSSETGTASGLVFIL

SEQ ID NO: 16149 - protein, 87 aa, Artificial Sequence
  Synthetic polypeptide
GRARWLTPVIPALWEADAGGSRGQEIKTILANMTLLSNSSETGTASGLVFILRPEQSTCTWYLGTSGIQPVQNMAILLSYSERDPVP

SEQ ID NO: 16150 - protein, 62 aa, Artificial Sequence
  Synthetic polypeptide
GRARWLTPVIPALWEADAGGSRGQEIKTILANMTLLSNSSETGTASGLVFILRPEQSTCTWY

SEQ ID NO: 16151 - protein, 292 aa, Artificial Sequence
  Synthetic polypeptide
GRRITSAERTPGNERPPRRKALPPRTEKMAVDQDWPSVYPVAAPFKPSAVPLPVRMGYPVKKGVPMAKEGNLELLKIPNFLHLTPVAIKKHCEALKDFCTEWPAALDSDEKCEKHFPIEIDSTDYVSSGPSVRNPRARVVVLRVKLSSLNLDDHAKKKLIKLVGERYCKTTDVLTIKTDRCPLRRQNYDYAVYLLTVLYHESWNTEEWEKSKTEADMEEYIWENSSSERNILETLLQMKAAEKNMEINKEELLGTKEIEEYKKSVVSLKNEEENENSISQYKESVKRLLNVT

SEQ ID NO: 16152 - protein, 75 aa, Artificial Sequence
  Synthetic polypeptide
ARHSGSHLPTALWETEAGGSLQRKEHPEMKGHQEERHYLLGQRKWLLTRTGLVFTQLQHHLNPLQYLFLFEWVIQ

SEQ ID NO: 16153 - protein, 28 aa, Artificial Sequence
  Synthetic polypeptide
LGTVAHTCPPHFGRLRQADHFSGKNTRK

SEQ ID NO: 16154 - protein, 163 aa, Artificial Sequence
  Synthetic polypeptide
GRRITSAERTPGNERPPRRKALPPRTEKMAVDQDWPSVYPVAAPFKPSAVPLPVRMGYPVKKGVPMAKEGNLELLKIPNFLHLTPVAIKKHCEALKDFCTEWPAALDSDEKCEKHFPIEIDSTDYVSSGPSVRNPRARVVVLRVPFKEAELRLCSVSTNSVIP

SEQ ID NO: 16155 - protein, 145 aa, Artificial Sequence
  Synthetic polypeptide
GRRITSAERTPGNERPPRRKALPPRTEKMAVDQDWPSVYPVAAPFKPSAVPLPVRMGYPVKKGVPMAKEGNLELLKIPNFLHLTPVAIKKHCEALKDFCTEWPAALDSDEKCEKHFPIEIDSTDYVSSGPSVRNPRARVVVLREM

SEQ ID NO: 16156 - protein, 91 aa, Artificial Sequence
  Synthetic polypeptide
DLMVLYRAVPLHTLSCLQPCKLCLCFSFTFHHDCEASPAMWNLSGVHLSPSSPEIVLDRDHSSSIGCLSSDAIISSPENTHAANSIVSQTI

SEQ ID NO: 16157 - protein, 84 aa, Artificial Sequence
  Synthetic polypeptide
WFYIGQFPCTHSLACSHVSCAFASPSPSTMIVRPPQPCGIYLESIFHHLLLRLYWTVTTLLPLAASLLMPLFHHQRIHMQQIAL

SEQ ID NO: 16158 - protein, 18 aa, Artificial Sequence
  Synthetic polypeptide
GLPSHVEFIWSPSFTIFS

SEQ ID NO: 16159 - protein, 411 aa, Artificial Sequence
  Synthetic polypeptide
DLMVLYRAVPLHTLSCLQPCKLCLCFSFTFHHDCEASPAMWNLSGVHLSPSSPEIVLDRDHSSSIGCLSSDAIISSPENTHAANSIVSQTIPKAQIQQSTHTHLDISLFPLGLTDEKSNGTIALVDDSEDPGANVSNIQLQQKISSLEIKLKVSEEEKQRIKQDVESLMEKHNVLEKGFLKEKEQEAISFQDRYKELQEKHKQELEDMRKAGHEALSIIVDEYKHQRLLEMLDTEKELLKEKIKEALIQQSQEQKEILEKCLEEERQRNKEALVSAAKLEKEAVKDAVLKVVEEERKNLEKAHAEERELWKTEHAKDQEKVSQEIQKAIQEQRKISQETVKAAIIEEQKRSEKAVEEAVKRTRDELIEYIKEQKRLDQVIRQRSLSSLELFLSCAQKQLSALIATEPVDIE

SEQ ID NO: 16160 - protein, 367 aa, Artificial Sequence
  Synthetic polypeptide
DLMVLYRAVPLHTLSCLQPCKLCLCFSFTFHHDCEASPAMWNLSGVHLSPSSPEIVLDRDHSSSIGCLSSDAIISSPENTHAANSIVSQTIPKAQIQQSTHTHLDISLFPLGLTDEKSNGTIALVDDSEDPGANVSNIQLQQKISSLEIKLKVSEEEKQRIKQDVESLMEKHNVLEKGFLKEKEQEAISFQDRYKELQEKHKQELEDMRKAGHEALSIIVDEYKALLQSSVKQQVEAIEKQYISAIEKQAHKCEELLNAQHQRLLEMLDTEKELLKEKIKEALIQQSQEQKEILEKCLEEERQRNKEALVSAAKLEKEAVKDAVLKVVEEERKNLEKAHAEERELWKTEHAKDQEKVSQEIQKAIQE

SEQ ID NO: 16161 - protein, 447 aa, Artificial Sequence
  Synthetic polypeptide
DLMVLYRAVPLHTLSCLQPCKLCLCFSFTFHHDCEASPAMWNLSGVHLSPSSPEIVLDRDHSSSIGCLSSDAIISSPENTHAANSIVSQTIPKAQIQQSTHTHLDISLFPLGLTDEKSNGTIALVDDSEDPGANVSNIQLQQKISSLEIKLKVSEEEKQRIKQDVESLMEKHNVLEKGFLKEKEQEAISFQDRYKELQEKHKQELEDMRKAGHEALSIIVDEYKALLQSSVKQQVEAIEKQYISAIEKQAHKCEELLNAQHQRLLEMLDTEKELLKEKIKEALIQQSQEQKEILEKCLEEERQRNKEALVSAAKLEKEAVKDAVLKVVEEERKNLEKAHAEERELWKTEHAKDQEKVSQEIQKAIQEQRKISQETVKAAIIEEQKRSEKAVEEAVKRTRDELIEYIKEQKRLDQVIRQRSLSSLELFLSCAQKQLSALIATEPVDIE

SEQ ID NO: 16162 - protein, 97 aa, Artificial Sequence
  Synthetic polypeptide
DLMVLYRAVPLHTLSCLQPCKLCLCFSFTFHHDCEASPAMWNLSGVHLSPSSPEIVLDRDHSSSIGCLSSDAIISSPENTHAANSIVSQTIPKAQIQ

SEQ ID NO: 16163 - protein, 273 aa, Artificial Sequence
  Synthetic polypeptide
DLMVLYRAVPLHTLSCLQPCKLCLCFSFTFHHDCEASPAMWNLSGVHLSPSSPEIVLDRDHSSSIGCLSSDAIISSPENTHAANSIVSQTIPKAQIQQSTHTHLDISLFPLGLTDEKSNGTIALVDDSEDPGANVSNIQLQQKISSLEIKLKVSEEEKQRIKQDVESLMEKHNVLEKGFLKEKEQEAISFQDRYKELQEKHKQELEDMRKAGHEALSIIVDEYKALLQSSVKQQVEAIEKQYISAIEKQAHKCEELLNAQSALFSILPAIGCF

SEQ ID NO: 16164 - protein, 368 aa, Artificial Sequence
  Synthetic polypeptide
DLMVLYRAVPLHTLSCLQPCKLCLCFSFTFHHDCEASPAMWNLSGVHLSPSSPEIVLDRDHSSSIGCLSSDAIISSPENTHAANSIVSQTIPKAQIQQSTHTHLDISLFPLGLTDEKSNGTIALVDDSEDPGANVSNIQLQQKISSLEIKLKVSEEEKQRIKQDVESLMEKHNVLEKGFLKEKEQEAISFQDRYKELQEKHKQELEDMRKAGHEALSIIVDEYKALLQSSVKQQVEAIEKQYISAIEKQAHKCEELLNAQHQRLLEMLDTEKELLKEKIKEALIQQSQEQKEILEKCLEEERQRNKEALVSAAKLEKEAVKDAVLKVVEEERKNLEKAHAEERELWKTEHAKDQEKVSQEIQKAIQEQ

SEQ ID NO: 16165 - protein, 92 aa, Artificial Sequence
  Synthetic polypeptide
DQVLWLTPVIPALWEAEVSPDFDTAAGSLFPAYQKHQNRARHSSRKPTTSKFPHLTFESPQSSSSETLGIPLIRECPSESEKDVSRRPLVPV

SEQ ID NO: 16166 - protein, 45 aa, Artificial Sequence
  Synthetic polypeptide
SQHFGRLRYHLILIQQQEACSQPTRNTKTGRDTQVENLPPPSFHI

SEQ ID NO: 16167 - protein, 199 aa, Artificial Sequence
  Synthetic polypeptide
DQVLWLTPVIPALWEAEVSPDFDTAAGSLFPAYQKHQNRARHSSRKPTTSKFPHLTFESPQSSSSETLGIPLIRECPSESEKDVSRRPLVPVLSPQSCGNMSVQALQSLPYVFIPPDIQTPESSSVKEELIPQDQKENSLLSCTLHTGTPNSPEPGPVLVKDTPEDKYGIKVTWRRRQHLLAYLRERGKLSRSQFLVKS

SEQ ID NO: 16168 - protein, 25 aa, Artificial Sequence
  Synthetic polypeptide
DQVLWLTPVIPALWEAEVSPDFDTA

SEQ ID NO: 16169 - protein, 15 aa, Artificial Sequence
  Synthetic polypeptide
SQHFGRLRYHLILIQ

SEQ ID NO: 16170 - protein, 66 aa, Artificial Sequence
  Synthetic polypeptide
DQVLWLTPVIPALWEAEVSPDFDTAAGSLFPAYQKHQNRARHSSRKPTTSKFPHLTFESPQSSSSE

SEQ ID NO: 16171 - protein, 45 aa, Artificial Sequence
  Synthetic polypeptide
SQHFGRLSCHLPEEHGDTILARSRTSTRRSNISIQHSRKRSPANT

SEQ ID NO: 16172 - protein, 19 aa, Artificial Sequence
  Synthetic polypeptide
GWVFMPVIPALWEAELPFT

SEQ ID NO: 16173 - protein, 15 aa, Artificial Sequence
  Synthetic polypeptide
SQHFGRLSCHLPEEH

SEQ ID NO: 16174 - protein, 44 aa, Artificial Sequence
  Synthetic polypeptide
SPISTKNTKISWVWWLMPLVPGSNSPRQATVFTSFSKSSHGKGL

SEQ ID NO: 16175 - protein, 246 aa, Artificial Sequence
  Synthetic polypeptide
SQAAIPPGKQPSSLASPNPPMAKGSEQGFQSPPASSSSVTINTAPFQAMQTVFNVNAPLPPRKEQEIKESPYSPGYNQSFTTASTQTPPQCQLPSIHVEQTVHSQETANYHPDGTIQVSNGSLAFYPAQTNVFPRPTQPFVNSRGSVRGCTRGGRLITNSYRSPGGYKGFDTYRGLPSISNGNYSQLQFQAREYSGAPYSQRCLETSEPLWLLGKARIISSSVISEEGHLVVHEQIREQGGVILLR

SEQ ID NO: 16176 - protein, 22 aa, Artificial Sequence
  Synthetic polypeptide
LGVVAHASSPRQQFPQASNRLH

SEQ ID NO: 16177 - protein, 226 aa, Artificial Sequence
  Synthetic polypeptide
SQAAIPPGKQPSSLASPNPPMAKGSEQGFQSPPASSSSVTINTAPFQAMQTVFNVNAPLPPRKEQEIKESPYSPGYNQSFTTASTQTPPQCQLPSIHVEQTVHSQETAQTNVFPRPTQPFVNSRGSVRGCTRGGRLITNSYRSPGGYKGFDTYRGLPSISNGNYSQLQFQAREYSGAPYSQRDNFQQCYKRGGTSGGPRANSRANCFIMRNSLLLIKQQGGVILLR

SEQ ID NO: 16178 - protein, 413 aa, Artificial Sequence
  Synthetic polypeptide
SQAAIPPGKQPSSLASPNPPMAKGSEQGFQSPPASSSSVTINTAPFQAMQTVFNVNAPLPPRKEQEIKESPYSPGYNQSFTTASTQTPPQCQLPSIHVEQTVHSQETAANYHPDGTIQVSNGSLAFYPAQTNVFPRPTQPFVNSRGSVRGCTRGGRLITNSYRSPGGYKGFDTYRGLPSISNGNYSQLQFQAREYSGAPYSQRDNFQQCYKRGGTSGGPRANSRAGWSDSSQVSSPERDNETFNSGDSGQGDSRSMTPVDVPVTNPAATILPVHVYPLPQQMRVAFSAARTSNLAPGTLDQPIVFDLLLNNLGETFDLQLGRFNCPVNGTYVFIFHMLKLAVNVPLYVNLMKNEEVLVSAYANDGAPDHETASNHAILQLFQGDQIWLRLHRGAIYGSSWKYSTFSGYLLYQD

SEQ ID NO: 16179 - protein, 412 aa, Artificial Sequence
  Synthetic polypeptide
SQAAIPPGKQPSSLASPNPPMAKGSEQGFQSPPASSSSVTINTAPFQAMQTVFNVNAPLPPRKEQEIKESPYSPGYNQSFTTASTQTPPQCQLPSIHVEQTVHSQETANYHPDGTIQVSNGSLAFYPAQTNVFPRPTQPFVNSRGSVRGCTRGGRLITNSYRSPGGYKGFDTYRGLPSISNGNYSQLQFQAREYSGAPYSQRDNFQQCYKRGGTSGGPRANSRAGWSDSSQVSSPERDNETFNSGDSGQGDSRSMTPVDVPVTNPAATILPVHVYPLPQQMRVAFSAARTSNLAPGTLDQPIVFDLLLNNLGETFDLQLGRFNCPVNGTYVFIFHMLKLAVNVPLYVNLMKNEEVLVSAYANDGAPDHETASNHAILQLFQGDQIWLRLHRGAIYGSSWKYSTFSGYLLYQD

SEQ ID NO: 16180 - protein, 246 aa, Artificial Sequence
  Synthetic polypeptide
SQAAIPPGKQPSSLASPNPPMAKGSEQGFQSPPASSSSVTINTAPFQAMQTVFNVNAPLPPRKEQEIKESPYSPGYNQSFTTASTQTPPQCQLPSIHVEQTVHSQETANYHPDGTIQVSNGSLAFYPAQTNVFPRPTQPFVNSRGSVRGCTRGGRLITNSYRSPGGYKGFDTYRGLPSISNGNYSQLQFQAREYSGAPYSQRDNFQQCYKRGGTSGGPRANSRANCFIMRNSLLLIKQQGGVILLR

SEQ ID NO: 16181 - protein, 69 aa, Artificial Sequence
  Synthetic polypeptide
SQAAIPPGKQPSSLASPNPPMAKGSEQGFQSPPASSSSVTINTAPFQAMQTVFNVNAPLPPRKEQEIKE

SEQ ID NO: 16182 - protein, 71 aa, Artificial Sequence
  Synthetic polypeptide
PDASFPAALNFLQRTRPSSVLSEDLLMQRAVAKHPALLPWQMSSSPLRPGSGVVLVASEWMRMRMTWRKNT

SEQ ID NO: 16183 - protein, 13 aa, Artificial Sequence
  Synthetic polypeptide
GLAQVSSWWLRSG

SEQ ID NO: 16184 - protein, 729 aa, Artificial Sequence
  Synthetic polypeptide
GFAHATCCGQTPCPPPLADVFLSFKAWLRCRLGGFGVDEDEDDLEEEHITKIYYCSRTHSQLAQFVHEVKKSPFGKDVRLVSLGSRQNLCVNEDVKSLGSVQLINDRCVDMQRSRHEKKKGAEEEKPKRRRQEKQAACPFYNHEQMGLLRDEALAEVKDMEQLLALGKEARACPYYGSRLAIPAAQLVVLPYQMLLHAATRQAAGIRLQDQVVIIDEAHNLIDTITGMHSVEVSGSQLCQAHSQLLQYVERYGKRLKAKNLMYLKQILYLLEKFVAVLGGNIKQNPNTQSLSQTGTELKTINDFLFQSQIDNINLFKVQRYCEKSMISRKLFGFTERYGAVFSSREQPKLAGFQQFLQSLQPRTTEALAAPADESQASTLRPASPLMHIQGFLAALTTANQDGRVILSRQGSLSQSTLKFLLLNPAVHFAQVVKECRAVVIAGGTMQPVSDFRQQLLACAGVEAERVVEFSCGHVIPPDNILPLVICSGISNQPLEFTFQKRELPQMMDEVGRILCNLCGVVPGGVVCFFPSYEYLRQVHAHWEKGGLLGRLAARKKIFQEPKSAHQVEQVLLAYSRCIQACGQERGQVTGALLLSVVGGKMSEGINFSDNLGRCVVMVGMPFPNIRSAELQEKMAYLDQTLPRAPGQAPPGKALVENLCMKAVNQSIGRAIRHQKDFASVVLLDQRYARPPVLAKLPAWIRARVEVKATFGPAIAAVQKFHREKSASS

SEQ ID NO: 16185 - protein, 49 aa, Artificial Sequence
  Synthetic polypeptide
GFAHATCCGQTPCPPPLADVFLSFKAWLRCRLGGFGVDEDEDDLEEEHI

SEQ ID NO: 16186 - protein, 793 aa, Artificial Sequence
  Synthetic polypeptide
GFAHATCCGQTPCPPPLADVFLSFKAWLRCRLGGFGVDEDEDDLEEEHITKIYYCSRTHSQLAQFVHEVKKSPFGKDVRLVSLGSRQNLCVNEDVKSLGSVQLINDRCVDMQRSRHEKKKGAEEEKPKRRRQEKQAACPFYNHEQMGLLRDEALAEVKDMEQLLALGKEARACPYYGSRLAIPAAQLVVLPYQMLLHAATRQAAGIRLQDQVVIIDEAHNLIDTITGMHSVEVSGSQLCQAHSQLLQYVERYGKRLKAKNLMYLKQILYLLEKFVAVLGGNIKQNPNTQSLSQTGTELKTINDFLFQSQIDNINLFKVQRYCEKSMISRKLFGFTERYGAVFSSREQPKLAGFQQFLQSLQPRTTEALAAPADESQASTLRPASPLMHIQGFLAALTTANQDGRVILSRQGSLSQSTLKFLLLNPAVHFAQVVKECRAVVIAGGTMQPVSDFRQQLLACAGVEAERVVEFSCGHVIPPDNILPLVICSGISNQPLEFTFQKRELPQMMDEVGRILCNLCGVVPGGVVCFFPSYEYLRQVHAHWEKGGLLGRLAARKKIFQEPKSAHQVEQVLLAYSRCIQACGQERGQVTGALLLSVVGGKMSEGINFSDNLGRCVVMVGMPFPNIRSAELQEKMAYLDQTLSPRPGTPREGSGGEPVHEGRQPVHRQGHQAPEGFCQRSAPGPAICPAPCPGQAAGLDPSPCGGQSYLWPRHCCCAEVSPGEVGLFLMGNHTTAWRRALPLSCPLETVFVVGVVCGDPVTKVKPRRRVWSPECCQDPGTGVSSRRRKWGNPE

SEQ ID NO: 16187 - protein, 127 aa, Artificial Sequence
  Synthetic polypeptide
GFAHATCCGQTPCPPPLADVFLSFKAWLRCRLGGFGVDEDEDDLEEEHITKIYYCSRTHSQLAQFVHEVKKSPFGKDVRLVSLGSRQRRRKELRRRSQRGGGRRSRQPAPSTTTSRWAFSGMRPWQR

SEQ ID NO: 16188 - protein, 154 aa, Artificial Sequence
  Synthetic polypeptide
GFAHATCCGQTPCPPPLADVFLSFKAWLRCRLGGFGVDEDEDDLEEEHITKIYYCSRTHSQLAQFVHEVKKSPFGKDVRLVSLGSRQNLCVNEDVKSLGSVQLINDRCVDMQRSRHEKKKGAEEEKPKRRRQEKQAACPFYNHEQMGLLRDEAL

SEQ ID NO: 16189 - protein, 137 aa, Artificial Sequence
  Synthetic polypeptide
GFAHATCCGQTPCPPPLADVFLSFKAWLRCRLGGFGVDEDEDDLEEEHITKIYYCSRTHSQLAQFVHEVKKSPFGKDVRLVSLGSRQNLCVNEDVKSLGSVQLINDRCVDMQRSRHVAVLSVFSLCACATLREEERS

SEQ ID NO: 16190 - protein, 120 aa, Artificial Sequence
  Synthetic polypeptide
GFAHATCCGQTPCPPPLADVFLSFKAWLRCRLGGFGVDEDEDDLEEEHITKIYYCSRTHSQLAQFVHEVKKSPFGKDVRLVSLGSRQNLCVNEDVKSLGSVQLINDRCVDMQRSRHEERS

SEQ ID NO: 16191 - protein, 73 aa, Artificial Sequence
  Synthetic polypeptide
GFAHATCCGQTPCPPPLADVFLSFKAWLRCRLGGFGVDEDEDDLEEEHITKIYYCSRTHSQLAQFVHEVKKSP

SEQ ID NO: 16192 - protein, 679 aa, Artificial Sequence
  Synthetic polypeptide
GFAHATCCGQTPCPPPLADVFLSFKAWLRCRLGGFGVDEDEDDLEEEHITKIYYCSRTHSQLAQFVHEVKKSPFGKDVRLVSLGSRQNLCVNEDVKSLGSVQLINDRCVDMQRSRHEKKKGAEEEKPKRRRQEKQAACPFYNHEQMGLLRDEALAEVKDMEQLLALGKEARACPYYGSRLAIPAAQLVVLPYQMLLHAATRQAAGIRLQDQVVIIDEAHNLIDTITGMHSVEVSGSQLCQAHSQLLQYVERYGKRLKAKNLMYLKQILYLLEKFVAVLGGNIKQNPNTQSLSQTGTELKTINDFLFQSQIDNINLFKVQRYCEKSMISRKLFGFTERYGAVFSSREQPKLAGFQQFLQSLQPRTTEALAAPADESQASTLRPASPLMHIQGFLAALTTANQDGRVILSRQGSLSQSTLKFLLLNPAVHFAQVVKECRAVVIAGGTMQPVSDFRQQLLACAGVEAERVVEFSCGHVIPPDNILPLVICSGISNQPLEFTFQKRELPQMIFQEPKSAHQVEQVLLAYSRCIQACGQERGQVTGALLLSVVGGKMSEGINFSDNLGRCVVMVGMPFPNIRSAELQEKMAYLDQTLPRAPGQAPPGKALVENLCMKAVNQSIGRAIRHQKDFASVVLLDQRYARPPVLAKLPAWIRARVEVKATFGPAIAAVQKFHREKSASS

SEQ ID NO: 16193 - protein, 61 aa, Artificial Sequence
  Synthetic polypeptide
PDASFPAALNFLQRTRPSSVLSEDLLMQRAVAKHPALLPWQMSSSPLRPGSGVVLVASEWM

SEQ ID NO: 16194 - protein, 38 aa, Artificial Sequence
  Synthetic polypeptide
GFAHATCCGQTPCPPPLADVFLSFKAWLRCRLGGFGVD

SEQ ID NO: 16195 - protein, 16 aa, Artificial Sequence
  Synthetic polypeptide
AENPMLGRYKKELEKL

SEQ ID NO: 16196 - protein, 24 aa, Artificial Sequence
  Synthetic polypeptide
MRTQCWADTRRNWRSCEQYCETFS

SEQ ID NO: 16197 - protein, 31 aa, Artificial Sequence
  Synthetic polypeptide
LWWCMSVVPTTWEAEMPLVLHEEYFQISHRH

SEQ ID NO: 16198 - protein, 253 aa, Artificial Sequence
  Synthetic polypeptide
SQLLGRLRCLWCFMKNISRYLTDIKPLPPNIKDRLIKIMSMQGQITDSNISEILHPEVQTLDLRSCDISDAALLHLSNCRKLKKLNLNASKGNRVSVTSEGIKAVASSCSYLHEASLKRCCNLTDEGVVALALNCQLLKIIDLGGCLSITDVSLHALGKNCPFLQCVDFSATQVSDSGVIALVSGPCAKKLEEIHMGHCVNLTDGAVEAVLTYCPQIRILLFHGCPLITDHSREVLEQLVGPNKLKQVTWTVY

SEQ ID NO: 16199 - protein, 28 aa, Artificial Sequence
  Synthetic polypeptide
RRRWAISAFPTEMPLVLHEEYFQISHRH

SEQ ID NO: 16200 - protein, 274 aa, Artificial Sequence
  Synthetic polypeptide
KMAKWEQLQSAAPSKIDAEDGRFLHFQLRCLWCFMKNISRYLTDIKPLPPNIKDRLIKIMSMQGQITDSNISEILHPEVQTLDLRSCDISDAALLHLSNCRKLKKLNLNASKGNRVSVTSEGIKAVASSCSYLHEASLKRCCNLTDEGVVALALNCQLLKIIDLGGCLSITDVSLHALGKNCPFLQCVDFSATQVSDSGVIALVSGPCAKKLEEIHMGHCVNLTDGAVEAVLTYCPQIRILLFHGCPLITDHSREVLEQLVGPNKLKQVTWTVY

SEQ ID NO: 16201 - protein, 42 aa, Artificial Sequence
  Synthetic polypeptide
GWVRWLTPVIPALWEAEAGRSRGQEMETIPANMAAVPVQRSL

SEQ ID NO: 16202 - protein, 47 aa, Artificial Sequence
  Synthetic polypeptide
SQHFGRLRRADHEVKRWRPSRPTWQQYLSKDRFSSTLLHKQHNHTGW

SEQ ID NO: 16203 - protein, 864 aa, Artificial Sequence
  Synthetic polypeptide
GGQITRSRDGDHPGQHGSSTCPKIALVPPCSTSSTTTLVGENVSEEEAQGINGNRPAKHSAASPKPQVPPKPLHLQNSPSSNIHQTPRHKALPSAKPRMEEIKPASASCVSKEKPSKVSDLISRFEGGSSLSNYSDLKKESAVNLNAPRTPGRHGLTTTPQQKLLSQHLPQRQGNDTDKTQGAQTCVANGVMAAQNQMECEEEKAATLSSDTSIQASEPLLDTHIVNGERDETATAPASPTTDSCDGNASDSSYRTPGIGPVLPLEERGAETETKVQERENGESPLELEQLDQHHEMKETNEQKLHKIANELLLTERAYVNRLDLLDQVFYCKLLEEANRGSFPAEMVNKIFSNISSINAFHSKFLLPELEKRMQEWETTPRIGDILQKLAPFLKMYGEYVKGFDNAMELVKNMTERIPQFKSVVEEIQKQKICGSLTLQHHMLEPVQRIPRYEMLLKDYLRKLPPDSLDWNDAKKSLEIISTAASHSNSAIRKMENLKKLLEIYEMLGEEEDIVNPSNELIKEGQILKLAARNTSAQERYLFLFNNMLLYCVPKFSLVGSKFTVRTRVGIDGMKIVETQNEEYPHTFQVSGKERTLELQASSAQDKEEWIKALQETIDAFHQRHETFRNAIAKDNDIHSEVSTAELGKRAPRWIRDNEVTMCMKCKEPFNALTRRRHHCRACGYVVCWKCSDYKAQLEYDGGKLSKVCKDCYQIISGFTDSEEKKRKGILEIESAEVSGNSVVCSFLQYMEKSKPWQKAWCVIPKQDPLVLYMYGAPQDVRAQATIPLLGYVVDEMPRSADLPHSFKLTQSKSVHSFAADSEELKQKWLKVILLAVTGETPGGPNEHPATLDDHPEPKKKSEC

SEQ ID NO: 16204 - protein, 37 aa, Artificial Sequence
  Synthetic polypeptide
FQHFGRPRQADHLRQQYLSKDRFSSTLLHKQHNHTGW

SEQ ID NO: 16205 - protein, 31 aa, Artificial Sequence
  Synthetic polypeptide
PGAWLMPVIPALWEAKAGGSPEAAVPVQRSL

SEQ ID NO: 16206 - protein, 570 aa, Artificial Sequence
  Synthetic polypeptide
FNIMETNEQKLHKIANELLLTERAYVNRLDLLDQVFYCKLLEEANRGSFPAEMVNKIFSNISSINAFHSKFLLPELEKRMQEWETTPRIGDILQKLAPFLKMYGEYVKGFDNAMELVKNMTERIPQFKSVVEEIQKQKICGSLTLQHHMLEPVQRIPRYEMLLKDYLRKLPPDSLDWNDAKKSLEIISTAASHSNSAIRKMENLKKLLEIYEMLGEEEDIVNPSNELIKEGQILKLAARNTSAQERYLFLFNNMLLYCVPKFSLVGSKFTVRTRVGIDGMKIVETQNEEYPHTFQVSGKERTLELQASSAQDKEEWIKALQETIDAFHQRHETFRNAIAKDNDIHSEVSTAELGKRAPRWIRDNEVTMCMKCKEPFNALTRRRHHCRACGYVVCWKCSDYKAQLEYDGGKLSKVCKDCYQIISGFTDSEEKKRKGILEIESAEVSGNSVVCSFLQYMEKSKPWQKAWCVIPKQDPLVLYMYGAPQDVRAQATIPLLGYVVDEMPRSADLPHSFKLTQSKSVHSFAADSEELKQKWLKVILLAVTGETPGGPNEHPATLDDHPEPKKKSEC

SEQ ID NO: 16207 - protein, 24 aa, Artificial Sequence
  Synthetic polypeptide
LQENKIRSPTDSTLWRLMSKNFTK

SEQ ID NO: 16208 - protein, 30 aa, Artificial Sequence
  Synthetic polypeptide
SVAVSHHSQMGLSSCRKTRSGLPLIQHYGD

SEQ ID NO: 16209 - protein, 39 aa, Artificial Sequence
  Synthetic polypeptide
FNIMETNEQKLHKIANELLLTERAYVNRLDLLDQKIEWR

SEQ ID NO: 16210 - protein, 14 aa, Artificial Sequence
  Synthetic polypeptide
FNIMETNEQKLHKI

SEQ ID NO: 16211 - protein, 683 aa, Artificial Sequence
  Synthetic polypeptide
FPHLIHSSSGKSSVLESLVGRDLLPRGTGIVTRRPLILQLVHVSQEDKRKTTGEENGVEAEEWGKFLHTKNKLYTDFDEIRQEIENETERISGNNKGVSPEPIHLKIFSPNVVNLTLVDLPGMTKVPVGDQPKDIELQIRELILRFISNPNSIILAVTAANTDMATSEALKISREVDPDGRRTLAVITKLDLMDAGTDAMDVLMGRVIPVKLGIIGVVNRSQLDINNKKSVTDSIRDEYAFLQKKYPSLANRNGTKYLARTLNRLLMHHIRDCLPELKTRINVLAAQYQSLLNSYGEPVDDKSATLLQLITKFATEYCNTIEGTAKYIETSELCGGARICYIFHETFGRTLESVDPLGGLNTIDILTAIRNATGPRPALFVPEVSFELLVKRQIKRLEEPSLRCVELVHEEMQRIIQHCSNYSTQELLRFPKLHDAIVEVVTCLLRKRLPVTNEMVHNLVAIELAYINTKHPDFADACGLMNNNIEEQRRNRLARELPSAVSRDKLIQDSRRETKNVASGGGGVGDGVQEPTTGNWRGMLKTSKAEELLAEEKSKPIPIMPASPQKGHAVNLLDVPVPVARKLSAREQRDCEVIERLIKSYFLIVRKNIQDSVPKAVMHFLVNHVKDTLQSELVGQLYKSSLLDDLLTESEDMAQRRKEAADMLKALQGASQIIAEIRETHLW

SEQ ID NO: 16212 - protein, 32 aa, Artificial Sequence
  Synthetic polypeptide
GALAGNWRKEEKKSPGLDSPISYILAAERAQC

SEQ ID NO: 16213 - protein, 722 aa, Artificial Sequence
  Synthetic polypeptide
FPHLIHSSSGKSSVLESLVGRDLLPRGTGIVTRRPLILQLVHVSQEDKRKTTGEENDPATWKNSRHLSKGVEAEEWGKFLHTKNKLYTDFDEIRQEIENETERISGNNKGVSPEPIHLKIFSPNVVNLTLVDLPGMTKVPVGDQPKDIELQIRELILRFISNPNSIILAVTAANTDMATSEALKISREVDPDGRRTLAVITKLDLMDAGTDAMDVLMGRVIPVKLGIIGVVNRSQLDINNKKSVTDSIRDEYAFLQKKYPSLANRNGTKYLARTLNRLLMHHIRDCLPELKTRINVLAAQYQSLLNSYGEPVDDKSATLLQLITKFATEYCNTIEGTAKYIETSELCGGARICYIFHETFGRTLESVDPLGGLNTIDILTAIRNATGPRPALFVPEVSFELLVKRQIKRLEEPSLRCVELVHEEMQRIIQHCSNYSTQELLRFPKLHDAIVEVVTCLLRKRLPVTNEMVHNLVAIELAYINTKHPDFADACGLMNNNIEEQRRNRLARELPSAVSRDKSSKVPSALAPASQEPSPAASAEADGKLIQDSRRETKNVASGGGGVGDGVQEPTTGNWRGMLKTSKAEELLAEEKSKPIPIMPASPQKGHAVNLLDVPVPVARKLSAREQRDCEVIERLIKSYFLIVRKNIQDSVPKAVMHFLVNHVKDTLQSELVGQLYKSSLLDDLLTESEDMAQRRKEAADMLKALQGASQIIAEIRETHLW

SEQ ID NO: 16214 - protein, 709 aa, Artificial Sequence
  Synthetic polypeptide
FPHLIHSSSGKSSVLESLVGRDLLPRGTGIVTRRPLILQLVHVSQEDKRKTTGEENGVEAEEWGKFLHTKNKLYTDFDEIRQEIENETERISGNNKGVSPEPIHLKIFSPNVVNLTLVDLPGMTKVPVGDQPKDIELQIRELILRFISNPNSIILAVTAANTDMATSEALKISREVDPDGRRTLAVITKLDLMDAGTDAMDVLMGRVIPVKLGIIGVVNRSQLDINNKKSVTDSIRDEYAFLQKKYPSLANRNGTKYLARTLNRLLMHHIRDCLPELKTRINVLAAQYQSLLNSYGEPVDDKSATLLQLITKFATEYCNTIEGTAKYIETSELCGGARICYIFHETFGRTLESVDPLGGLNTIDILTAIRNATGPRPALFVPEVSFELLVKRQIKRLEEPSLRCVELVHEEMQRIIQHCSNYSTQELLRFPKLHDAIVEVVTCLLRKRLPVTNEMVHNLVAIELAYINTKHPDFADACGLMNNNIEEQRRNRLARELPSAVSRDKSSKVPSALAPASQEPSPAASAEADGKLIQDSRRETKNVASGGGGVGDGVQEPTTGNWRGMLKTSKAEELLAEEKSKPIPIMPASPQKGHAVNLLDVPVPVARKLSAREQRDCEVIERLIKSYFLIVRKNIQDSVPKAVMHFLVNHVKDTLQSELVGQLYKSSLLDDLLTESEDMAQRRKEAADMLKALQGASQIIAEIRETHLW

SEQ ID NO: 16215 - protein, 685 aa, Artificial Sequence
  Synthetic polypeptide
FPHLIHSSSGKSSVLESLVGRDLLPRGTGIVTRRPLILQLVHVSQEDKRKTTGEENDPATWKNSRHLSKGVEAEEWGKFLHTKNKLYTDFDEIRQEIENETERISGNNKGVSPEPIHLKIFSPNVVNLTLVDLPGMTKVPVGDQPKDIELQIRELILRFISNPNSIILAVTAANTDMATSEALKISREVDPDGRRTLAVITKLDLMDAGTDAMDVLMGRVIPVKLGIIGVVNRSQLDINNKKSVTDSIRDEYAFLQKKYPSLANRNGTKYLARTLNRLLMHHIRDCLPELKTRINVLAAQYQSLLNSYGEPVDDKSATLLQLITKFATEYCNTIEGTAKYIETSELCGGARICYIFHETFGRTLESVDPLGGLNTIDILTAIRNATGPRPALFVPEVSFELLVKRQIKRLEEPSLRCVELVHEEMQRIIQHCSNYSTQELLRFPKLHDAIVEVVTCLLRKRLPVTNEMVHNLVAIELAYINTKHPDFADACGLMNNNIEEQRRNRLARELPSAVSRDKVASGGGGVGDGVQEPTTGNWRGMLKTSKAEELLAEEKSKPIPIMPASPQKGHAVNLLDVPVPVARKLSAREQRDCEVIERLIKSYFLIVRKNIQDSVPKAVMHFLVNHVKDTLQSELVGQLYKSSLLDDLLTESEDMAQRRKEAADMLKALQGASQIIAEIRETHLW

SEQ ID NO: 16216 - protein, 672 aa, Artificial Sequence
  Synthetic polypeptide
FPHLIHSSSGKSSVLESLVGRDLLPRGTGIVTRRPLILQLVHVSQEDKRKTTGEENGVEAEEWGKFLHTKNKLYTDFDEIRQEIENETERISGNNKGVSPEPIHLKIFSPNVVNLTLVDLPGMTKVPVGDQPKDIELQIRELILRFISNPNSIILAVTAANTDMATSEALKISREVDPDGRRTLAVITKLDLMDAGTDAMDVLMGRVIPVKLGIIGVVNRSQLDINNKKSVTDSIRDEYAFLQKKYPSLANRNGTKYLARTLNRLLMHHIRDCLPELKTRINVLAAQYQSLLNSYGEPVDDKSATLLQLITKFATEYCNTIEGTAKYIETSELCGGARICYIFHETFGRTLESVDPLGGLNTIDILTAIRNATGPRPALFVPEVSFELLVKRQIKRLEEPSLRCVELVHEEMQRIIQHCSNYSTQELLRFPKLHDAIVEVVTCLLRKRLPVTNEMVHNLVAIELAYINTKHPDFADACGLMNNNIEEQRRNRLARELPSAVSRDKVASGGGGVGDGVQEPTTGNWRGMLKTSKAEELLAEEKSKPIPIMPASPQKGHAVNLLDVPVPVARKLSAREQRDCEVIERLIKSYFLIVRKNIQDSVPKAVMHFLVNHVKDTLQSELVGQLYKSSLLDDLLTESEDMAQRRKEAADMLKALQGASQIIAEIRETHLW

SEQ ID NO: 16217 - protein, 70 aa, Artificial Sequence
  Synthetic polypeptide
FPHLIHSSSGKSSVLESLVGRDLLPRGTGIVTRRPLILQLVHVSQEDKRKTTGEENVPRENSLDPGGKSP

SEQ ID NO: 16218 - protein, 145 aa, Artificial Sequence
  Synthetic polypeptide
FPHLIHSSSGKSSVLESLVGRDLLPRDPATWKNSRHLSKGVEAEEWGKFLHTKNKLYTDFDEIRQEIENETERISGNNKGVSPEPIHLKIFSPNVVNLTLVDLPGMTKVPVGDQPKDIELQIRELILRFISNPNSIILAVTAANT

SEQ ID NO: 16219 - protein, 141 aa, Artificial Sequence
  Synthetic polypeptide
FPHLIHSSSGKSSVLESLVGRDLLPRGTGIVTRRPLILQLVHVSQEDKRKTTGEENGVEAEEWGKFLHTKNKGVSPEPIHLKIFSPNVVNLTLVDLPGMTKVPVGDQPKDIELQIRELILRFISNPNSIILAVTAANTDMA

SEQ ID NO: 16220 - protein, 129 aa, Artificial Sequence
  Synthetic polypeptide
FPHLIHSSSGKSSVLESLVGRDLLPRGTGIVTRRPLILQLVHVSQEDKRKTTGEENGVEAEEWGKFLHTKNKLYTDFDEIRQEIENETERISGNNKGVSPEPIHLKIFSPNVVNLTLVDLPGMTKVAEP

SEQ ID NO: 16221 - protein, 153 aa, Artificial Sequence
  Synthetic polypeptide
FPHLIHSSSGKSSVLESLVGRDLLPRGTGIVTRRPLILQLVHVSQEDKRKTTGEENGVEAEEWGKFLHTKNKLYTDFDEIRQEIENETERISGNNKVPVGDQPKDIELQIRELILRFISNPNSIILAVTAANTDMATSEALKISREVDPDGAS

SEQ ID NO: 16222 - protein, 698 aa, Artificial Sequence
  Synthetic polypeptide
FPHLIHSSSGKSSVLESLVGRDLLPRGTGIVTRRPLILQLVHVSQEDKRKTTGEENGVEAEEWGKFLHTKNKLYTDFDEIRQEIENETERISGNNKGVSPEPIHLKIFSPNVVNLTLVDLPGMTKVPVGDQPKDIELQIRELILRFISNPNSIILAVTAANTDMATSEALKISREVDPDGRRTLAVITKLDLMDAGTDAMDVLMGRVIPVKLGIIGVVNRSQLDINNKKSVTDSIRDEYAFLQKKYPSLANRNGTKYLARTLNRLLMHHIRDCLPELKTRINVLAAQYQSLLNSYGEPVDDKSATLLQLITKFATEYCNTIEGTAKYIETSELCGGARICYIFHETFGRTLESVDPLGGLNTIDILTAIRNATGPRPALFVPEVSFELLVKRQIKRLEEPSLRCVELVHEEMQRIIQHCSNYSTQELLRFPKLHDAIVEVVTCLLRKRLPVTNEMVHNLVAIELAYINTKHPDFADACGLMNNNIEEQRRNRLARELPSAVSRDKSSKVPSALAPASQEPSPAASAEADGKVASGGGGVGDGVQEPTTGNWRGMLKTSKAEELLAEEKSKPIPIMPASPQKGHAVNLLDVPVPVARKLSAREQRDCEVIERLIKSYFLIVRKNIQDSVPKAVMHFLVNHVKDTLQSELVGQLYKSSLLDDLLTESEDMAQRRKEAADMLKALQGASQIIAEIRETHLW

SEQ ID NO: 16223 - protein, 90 aa, Artificial Sequence
  Synthetic polypeptide
FPHLIHSSSGKSSVLESLVGRDLLPRGTGIVTRRPLILQLVHVSQEDKRKTTGEENDPATWKNSRHLSKGVEAEEWGKFLHTKNKEPARY

SEQ ID NO: 16224 - protein, 711 aa, Artificial Sequence
  Synthetic polypeptide
FPHLIHSSSGKSSVLESLVGRDLLPRGTGIVTRRPLILQLVHVSQEDKRKTTGEENDPATWKNSRHLSKGVEAEEWGKFLHTKNKLYTDFDEIRQEIENETERISGNNKGVSPEPIHLKIFSPNVVNLTLVDLPGMTKVPVGDQPKDIELQIRELILRFISNPNSIILAVTAANTDMATSEALKISREVDPDGRRTLAVITKLDLMDAGTDAMDVLMGRVIPVKLGIIGVVNRSQLDINNKKSVTDSIRDEYAFLQKKYPSLANRNGTKYLARTLNRLLMHHIRDCLPELKTRINVLAAQYQSLLNSYGEPVDDKSATLLQLITKFATEYCNTIEGTAKYIETSELCGGARICYIFHETFGRTLESVDPLGGLNTIDILTAIRNATGPRPALFVPEVSFELLVKRQIKRLEEPSLRCVELVHEEMQRIIQHCSNYSTQELLRFPKLHDAIVEVVTCLLRKRLPVTNEMVHNLVAIELAYINTKHPDFADACGLMNNNIEEQRRNRLARELPSAVSRDKSSKVPSALAPASQEPSPAASAEADGKVASGGGGVGDGVQEPTTGNWRGMLKTSKAEELLAEEKSKPIPIMPASPQKGHAVNLLDVPVPVARKLSAREQRDCEVIERLIKSYFLIVRKNIQDSVPKAVMHFLVNHVKDTLQSELVGQLYKSSLLDDLLTESEDMAQRRKEAADMLKALQGASQIIAEIRETHLW

SEQ ID NO: 16225 - protein, 234 aa, Artificial Sequence
  Synthetic polypeptide
FPHLIHSSSGKSSVLESLVGRDLLPRGTGIVTRRPLILQLVHVSQEDKRKTTGEENGVEAEEWGKFLHTKNKLYTDFDEIRQEIENETERISGNNKVPVGDQPKDIELQIRELILRFISNPNSIILAVTAANTDMATSEALKISREVDPDGRRTLAVITKLDLMDAGTDAMDVLMGRVIPVKLGIIGVVNRSQLDINNKKSVTDSIRDEYAFLQKKYPSLANRNGTKYLARTLN

SEQ ID NO: 16226 - protein, 61 aa, Artificial Sequence
  Synthetic polypeptide
FPHLIHSSSGKSSVLESLVGRDLLPRGTGIVTRRPLILQLVHVSQEDKRKTTGEENALHGF

SEQ ID NO: 16227 - protein, 57 aa, Artificial Sequence
  Synthetic polypeptide
GQAQWLTPVIPAVWEAEAGRSPEVRSSRPASTWRNPISTEKKNIQKISRAWCQRNSP

SEQ ID NO: 16228 - protein, 157 aa, Artificial Sequence
  Synthetic polypeptide
SQQFGRLRRADHLRSGVRDQPQHGETPSLLKKKIYKKLAGHGAKETLPDLVSIIPDTVPSTDLLIETTASACYTLNNIIQNSYQNARDLLNTGGIQKIMAISAGDAYASNKASKAASVLLYSLWAHTELHHAYKKAQFKKTDFVNSRTAKAYHSLKD

SEQ ID NO: 16229 - protein, 36 aa, Artificial Sequence
  Synthetic polypeptide
PGMVPKKLSLIWFPSFLTQSRVLTFSLKLQPLPVTH

SEQ ID NO: 16230 - protein, 225 aa, Artificial Sequence
  Synthetic polypeptide
LQLLLGKLCGCGLLGVGIWLSVSQGNFATFSPSFPSLSAANLVIAIGTIVMVTGFLGCLGAIKENKCLLLSFFIVLLVILLAELILLILFFVYMDKVNENAKKDLKEGLLLYHTENNVGLKNAWNIIQAEMRCCGVTDYTDWYPVLGENTVPDRCCMENSQGCGRNATTPLWRTGCYEKVKMWFDDNKHVLGTVGMCILIMQILGMAFSMTLFQHIHRTGKKYDA

SEQ ID NO: 16231 - protein, 52 aa, Artificial Sequence
  Synthetic polypeptide
LPGRIFDFSFSSVSSVAVGCWEWASGSPCPKATLPPSPPASLRCLQPTWSLP

SEQ ID NO: 16232 - protein, 257 aa, Artificial Sequence
  Synthetic polypeptide
LQLLLGKLCGCGLLGVGIWLSVSQGNFATFSPSFPSLSAANLVIAIGTIVMVTGFLGCLGAIKENKCLLLSFFIVLLVILLAELILLILFFVYMDKVNENAKKDLKEGLLLYHTENNVGLKNAWNIIQAEMRCCGVTDYTDWYPVLGENTVPDRCCMENSQGCGRNATTPLWRTGCYEKVKMWFDDNKHVLGTVGMCILIMQVRGASPAASPTLLASASEGRKHREVKAVLVHGGGSGIHHSYSSLAAVPATVSAEL

SEQ ID NO: 16233 - protein, 103 aa, Artificial Sequence
  Synthetic polypeptide
LQLLLGKLPFVVCSQPGHCHRHHCHGDGLPRLPGGHQGKQVPPPQLFHRPVGHPPSRADLTHPLLCLHGQGERERQEGPEGRPAAVPHREQRGAEERLEHHPG

SEQ ID NO: 16234 - protein, 206 aa, Artificial Sequence
  Synthetic polypeptide
LPGRIFDFSFSSVSFPSLSAANLVIAIGTIVMVTGFLGCLGAIKENKCLLLSFFIVLLVILLAELILLILFFVYMDKVNENAKKDLKEGLLLYHTENNVGLKNAWNIIQAEMRCCGVTDYTDWYPVLGENTVPDRCCMENSQGCGRNATTPLWRTGCYEKVKMWFDDNKHVLGTVGMCILIMQILGMAFSMTLFQHIHRTGKKYDA

SEQ ID NO: 16235 - protein, 238 aa, Artificial Sequence
  Synthetic polypeptide
LPGRIFDFSFSSVSFPSLSAANLVIAIGTIVMVTGFLGCLGAIKENKCLLLSFFIVLLVILLAELILLILFFVYMDKVNENAKKDLKEGLLLYHTENNVGLKNAWNIIQAEMRCCGVTDYTDWYPVLGENTVPDRCCMENSQGCGRNATTPLWRTGCYEKVKMWFDDNKHVLGTVGMCILIMQVRGASPAASPTLLASASEGRKHREVKAVLVHGGGSGIHHSYSSLAAVPATVSAEL

SEQ ID NO: 16236 - protein, 68 aa, Artificial Sequence
  Synthetic polypeptide
RNMGKTARALGMGELASRCHHFLCVQYRASSVAVGCWEWASGSPCPKATLPPSPPASLRCLQPTWSLP

SEQ ID NO: 16237 - protein, 141 aa, Artificial Sequence
  Synthetic polypeptide
GWVSLLLGVTTSCVYSTEQALWLWAAGSGHLALRVPRQLCHLLPQLPFVVCSQPGHCHRHHCHGDGLPRLPGGHQGKQVPPPQLFHRPVGHPPSRADLTHPLLCLHGQGERERQEGPEGRPAAVPHREQRGAEERLEHHPG

SEQ ID NO: 16238 - protein, 234 aa, Artificial Sequence
  Synthetic polypeptide
ACFSVSPLPVCTVQSKLCGCGLLGVGIWLSVSQGNFATFSPSFPSLSAANLVIAIGTIVMVTGFLGCLGAIKENKCLLLSFFIVLLVILLAELILLILFFVYMDKVNENAKKDLKEGLLLYHTENNVGLKNAWNIIQAEMRCCGVTDYTDWYPVLGENTVPDRCCMENSQGCGRNATTPLWRTGCYEKVKMWFDDNKHVLGTVGMCILIMQILGMAFSMTLFQHIHRTGKKYDA

SEQ ID NO: 16239 - protein, 266 aa, Artificial Sequence
  Synthetic polypeptide
ACFSVSPLPVCTVQSKLCGCGLLGVGIWLSVSQGNFATFSPSFPSLSAANLVIAIGTIVMVTGFLGCLGAIKENKCLLLSFFIVLLVILLAELILLILFFVYMDKVNENAKKDLKEGLLLYHTENNVGLKNAWNIIQAEMRCCGVTDYTDWYPVLGENTVPDRCCMENSQGCGRNATTPLWRTGCYEKVKMWFDDNKHVLGTVGMCILIMQVRGASPAASPTLLASASEGRKHREVKAVLVHGGGSGIHHSYSSLAAVPATVSAEL

SEQ ID NO: 16240 - protein, 194 aa, Artificial Sequence
  Synthetic polypeptide
AASGFLRLQKCNGNPQNPYCDGIEGVMEAYYRSLKSVQLYGPTNFAPVINHVARYASSVKDGSQYFVLLIVTDGVISDMAQTKESIVNASKLPMSIIIVGVGPAEFDAMVELDGDDVRVSSRGKYAERDIVQFVPFRDYIDRSGNHILSMARLAKDVLAEIPEQFLSYMRARGIKPSPAPPPYTPPTHVLQTQI

SEQ ID NO: 16241 - protein, 27 aa, Artificial Sequence
  Synthetic polypeptide
DFKNVMGILKTPTVMALRGSWRLITGV

SEQ ID NO: 16242 - protein, 187 aa, Artificial Sequence
  Synthetic polypeptide
DFKNNGNPQNPYCDGIEGVMEAYYRSLKSVQLYGPTNFAPVINHVARYASSVKDGSQYFVLLIVTDGVISDMAQTKESIVNASKLPMSIIIVGVGPAEFDAMVELDGDDVRVSSRGKYAERDIVQFVPFRDYIDRSGNHILSMARLAKDVLAEIPEQFLSYMRARGIKPSPAPPPYTPPTHVLQTQI

SEQ ID NO: 16243 - protein, 55 aa, Artificial Sequence
  Synthetic polypeptide
LQPRSASSMQPHERSCSGTTVLSCFWIPETSKIMGILKTPTVMALRGSWRLITGV

SEQ ID NO: 16244 - protein, 511 aa, Artificial Sequence
  Synthetic polypeptide
GGSWDSTPEFGRTEVIDNTLNPDFVRKFILDYFFEERENLRFDLYDVDSKSPNLSKHDFLGQVFCTLGEIVGSQGSRLEKPIVGIPGKKCGTIILTAEELNCCRDAVLMQFCANKLDKKDFFGKSDPFLVFYRSNEDGSFTICHKTEVVKNTLNPVWQAFKISVRALCNGDYDRTIKVEVYDWDRDGSHDFIGEFTTSYRELSRGQSQFNVYEVVNPKKKGKKKKYTNSGTVTLLSFLVETEVSFLDYIKGGTQINFTVAIDFTASNGNPAQPTSLHYMNPYQLNAYGMALKAVGEIVQDYDSDKMFPALGFGAKLPPDGRISHEFALNGNPQNPYCDGIEGVMEAYYRSLKSVQLYGPTNFAPVINHVARYASSVKDGSQYFVLLIVTDGVISDMAQTKESIVNASKLPMSIIIVGVGPAEFDAMVELDGDDVRVSSRGKYAERDIVQFVPFRDYIDRSGNHILSMARLAKDVLAEIPEQFLSYMRARGIKPSPAPPPYTPPTHVLQTQI

SEQ ID NO: 16245 - protein, 15 aa, Artificial Sequence
  Synthetic polypeptide
EVEVGTQLQSLEELK

SEQ ID NO: 16246 - protein, 13 aa, Artificial Sequence
  Synthetic polypeptide
RWKLGLNSRVWKN

SEQ ID NO: 16247 - protein, 614 aa, Artificial Sequence
  Synthetic polypeptide
HLSHWTGRGKPTLKLSGYNLISCPCGHNKSRQKNVRRLDWLSLWAYIFLLCLMLPALEHQTPSFSALGLLDLRPQTEGCTVGFPAFEVLGLGLASLLLSLQRAYCGISPCDCFGRTEVIDNTLNPDFVRKFILDYFFEERENLRFDLYDVDSKSPNLSKHDFLGQVFCTLGEIVGSQGSRLEKPIVGIPGKKCGTIILTAEELNCCRDAVLMQFCANKLDKKDFFGKSDPFLVFYRSNEDGSFTICHKTEVVKNTLNPVWQAFKISVRALCNGDYDRTIKVEVYDWDRDGSHDFIGEFTTSYRELSRGQSQFNVYEVVNPKKKGKKKKYTNSGTVTLLSFLVETEVSFLDYIKGGTQINFTVAIDFTASNGNPAQPTSLHYMNPYQLNAYGMALKAVGEIVQDYDSDKMFPALGFGAKLPPDGRISHEFALNGNPQNPYCDGIEGVMEAYYRSLKSVQLYGPTNFAPVINHVARYASSVKDGSQYFVLLIVTDGVISDMAQTKESIVNASKLPMSIIIVGVGPAEFDAMVELDGDDVRVSSRGKYAERDIVQFVPFRDYIDRSGNHILSMARLAKDVLAEIPEQFLSYMRARGIKPSPAPPPYTPPTHVLQTQI

SEQ ID NO: 16248 - protein, 65 aa, Artificial Sequence
  Synthetic polypeptide
CFLPLNIRLQVFQLWDSWTFDHRLKAALSASLLLRFWDSDWLPCSSACREPIVGSHHVIVLEELK

SEQ ID NO: 16249 - protein, 5 aa, Artificial Sequence
  Synthetic polypeptide
LFWKN

SEQ ID NO: 16250 - protein, 115 aa, Artificial Sequence
  Synthetic polypeptide
HLSHWTGRGKPTLKLSGYNLISCPCGHNKSRQKNVRRLDWLSLWAYIFLLCLMLPALEHQTPSFSALGLLDLRPQTEGCTVGFPAFEVLGLGLASLLLSLQRAYCGISPCDCKSS

SEQ ID NO: 16251 - protein, 591 aa, Artificial Sequence
  Synthetic polypeptide
CFLPLNIRLQVFQLWDSWTFDHRLKAALSASLLLRFWDSDWLPCSSACREPIVGSHHVIVNLLDRDTFSKSDPICVLYVQGVGNKEWREFGRTEVIDNTLNPDFVRKFILDYFFEERENLRFDLYDVDSKSPNLSKHDFLGQVFCTLGEIVGSQGSRLEKPIVGIPGKKCGTIILTAEELNCCRDAVLMQFCANKLDKKDFFGKSDPFLVFYRSNEDGSFTICHKTEVVKNTLNPVWQAFKISVRALCNGDYDRTIKVEVYDWDRDGSHDFIGEFTTSYRELSRGQSQFNVYEVVNPKKKGKKKKYTNSGTVTLLSFLVETEVSFLDYIKGGTQINFTVAIDFTASNGNPAQPTSLHYMNPYQLNAYGMALKAVGEIVQDYDSDKMFPALGFGAKLPPDGRISHEFALNGNPQNPYCDGIEGVMEAYYRSLKSVQLYGPTNFAPVINHVARYASSVKDGSQYFVLLIVTDGVISDMAQTKESIVNASKLPMSIIIVGVGPAEFDAMVELDGDDVRVSSRGKYAERDIVQFVPFRDYIDRSGNHILSMARLAKDVLAEIPEQFLSYMRARGIKPSPAPPPYTPPTHVLQTQI

SEQ ID NO: 16252 - protein, 3 aa, Artificial Sequence
  Synthetic polypeptide
PTW

SEQ ID NO: 16253 - protein, 15 aa, Artificial Sequence
  Synthetic polypeptide
GVRDQPSQHGRLGTM

SEQ ID NO: 16254 - protein, 79 aa, Artificial Sequence
  Synthetic polypeptide
GEEFETSLANMVDWVQCDGGCDEWFHQVCVGVSPEMAENEDYICINCAKKQGPVSPGPAPPPSFIMSYKLPMEDLKETS

SEQ ID NO: 16255 - protein, 20 aa, Artificial Sequence
  Synthetic polypeptide
GVRDQPSQHGSCICNGRREE

SEQ ID NO: 16256 - protein, 25 aa, Artificial Sequence
  Synthetic polypeptide
GEEFETSLANMGVVFVTEEEKNKKY

SEQ ID NO: 16257 - protein, 7 aa, Artificial Sequence
  Synthetic polypeptide
PTWELYL

SEQ ID NO: 16258 - protein, 14 aa, Artificial Sequence
  Synthetic polypeptide
SQHFGRPRWADHLR

SEQ ID NO: 16259 - protein, 91 aa, Artificial Sequence
  Synthetic polypeptide
PGKVWLTPVIPALWEAEVGGSPEVDWVQCDGGCDEWFHQVCVGVSPEMAENEDYICINCAKKQGPVSPGPAPPPSFIMSYKLPMEDLKETS

SEQ ID NO: 16260 - protein, 18 aa, Artificial Sequence
  Synthetic polypeptide
SQHFGRPRWADHLRELYL

SEQ ID NO: 16261 - protein, 37 aa, Artificial Sequence
  Synthetic polypeptide
PGKVWLTPVIPALWEAEVGGSPEGVVFVTEEEKNKKY

SEQ ID NO: 16262 - protein, 394 aa, Artificial Sequence
  Synthetic polypeptide
RIPRLQQGRYKRSLEHLMPEVAYRRDEMWSEGRYEYERIPRERAPPRSHPSDGYNRLVNIVPKKPPLLDRPGEGSYNRYYSHVDYRDYDEGRSFSHDRRSGPPHRGDESGYRWTRDDHSASRQPEYRDMRDGFRRKSFYSSHYARERSPYKRDNTFFRESPVGRKDSPHSRSGSSVSSRSYSPERSKSYSFHQSQHRKSVRPGASYKRQNEGNPERDKERPVQSLKTSRDTSPSSGSAVSSSKVLDKPSRLTEKELAEAASKWAAEKLEKSDESNLPEISEYEAGSTAPLFTDQPEEPESNTTHGIELFEDSQLTTRSKAIASKTKEIEQVYRQDCETFGMVVKMLIEKDPSLEKSIQFALRQNLHEIGERCVEELKHFIAEYDTSTQDFGEPF

SEQ ID NO: 16263 - protein, 63 aa, Artificial Sequence
  Synthetic polypeptide
RALWRNSGFQGYSRAGTRGAWNILCQKWLTEETKCGLRDDMNMKEFRENEHLLEVIPVMATID

SEQ ID NO: 16264 - protein, 36 aa, Artificial Sequence
  Synthetic polypeptide
GLFGEIADSKATAGQVQEELGTSYARSGLQKRRNVV

SEQ ID NO: 16265 - protein, 72 aa, Artificial Sequence
  Synthetic polypeptide
RIPRLQQGRYKRSLEHLMPEVAYRRDEMWSEGRYEYERIPRERAPPRSHPSDESGYRWTRDDHSASRQPEYR

SEQ ID NO: 16266 - protein, 79 aa, Artificial Sequence
  Synthetic polypeptide
RALWRNSGFQGYSRAGTRGAWNILCQKWLTEETKCGLRDDMNMKEFRENEHLLEVIPVMNLVIDGQETIILQAGNLNTD

SEQ ID NO: 16267 - protein, 339 aa, Artificial Sequence
  Synthetic polypeptide
RIPRLQQGRYKRSLEHLMPEVAYRRDEMWSEGRYEYERIPRERAPPRSHPSDESGYRWTRDDHSASRQPEYRDMRDGFRRKSFYSSHYARERSPYKRDNTFFRESPVGRKDSPHSRSGSSVSSRSYSPERSKSYSFHQSQHRKSVRPGASYKRQNEGNPERDKERPVQSLKTSRDTSPSSGSAVSSSKVLDKPSRLTEKELAEAASKWAAEKLEKSDESNLPEISEYEAGSTAPLFTDQPEEPESNTTHGIELFEDSQLTTRSKAIASKTKEIEQVYRQDCETFGMVVKMLIEKDPSLEKSIQFALRQNLHEIGERCVEELKHFIAEYDTSTQDFGEPF

SEQ ID NO: 16268 - protein, 80 aa, Artificial Sequence
  Synthetic polypeptide
RALWRNSGFQGYSRAGTRGAWNILCQKWLTEETKCGLRDDMNMKEFRENEHLLEVIPVMNLVIDGQETIILQAGNLNTGT

SEQ ID NO: 16269 - protein, 323 aa, Artificial Sequence
  Synthetic polypeptide
RIPRLQQGRYKRSLEHLMPEVAYRRDEMWSEGRYEYERIPRERAPPRSHPSDESGYRWTRDDHSASRQPEYRDMRDGFRRKSFYSSHYARERSPYKRDNTFFRESPVGRKDSPHSRSGSSVSSRSYSPERSKSYSFHQSQHRNKERPVQSLKTSRDTSPSSGSAVSSSKVLDKPSRLTEKELAEAASKWAAEKLEKSDESNLPEISEYEAGSTAPLFTDQPEEPESNTTHGIELFEDSQLTTRSKAIASKTKEIEQVYRQDCETFGMVVKMLIEKDPSLEKSIQFALRQNLHEIAGADTIQCLPGQRGFEGTSWPHNKMHSVS

SEQ ID NO: 16270 - protein, 181 aa, Artificial Sequence
  Synthetic polypeptide
RIPRLQQGRYKRSLEHLMPEVAYRRDEMWSEGRYEYERIPRERAPPRSHPSDGYNRLVNIVPKKPPLLDRPGEGSYNRYYSHVDYRDYDEGRSFSHDRRSGPPHRGDESGYRWTRDDHSASRQPEYRDMRDGFRRKSFYSSHYARERSPYKRDNTFFRESPVGRKDSPHSRSGSSVSSRSY

SEQ ID NO: 16271 - protein, 19 aa, Artificial Sequence
  Synthetic polypeptide
VLYDSWFVGLSLPLNWLPS

SEQ ID NO: 16272 - protein, 7 aa, Artificial Sequence
  Synthetic polypeptide
TGYHHER

SEQ ID NO: 16273 - protein, 190 aa, Artificial Sequence
  Synthetic polypeptide
LVCWSVSTTKLVTIMKDKDTRKSKGVAFILFLDKDSAQNCTRAINNKQLFGRVIKASIAIDNGRAAEFIRRRNYFDKSKCYECGESGHLSYACPKNMLGEREPPKKKEKKKKKKAPEPEEEIEEVEESEDEGEDPALDSLSQAIAFQQAKIEEEQKKWKPSSGVPSTSDDSRRPRIKKSTYFSDEEELSD

SEQ ID NO: 16274 - protein, 43 aa, Artificial Sequence
  Synthetic polypeptide
LYFLRPPSPAMWNWLALIQYNVYLAKEGSRGQAGLTIRCTVLA

SEQ ID NO: 16275 - protein, 12 aa, Artificial Sequence
  Synthetic polypeptide
GLPPQPCGIGWR

SEQ ID NO: 16276 - protein, 52 aa, Artificial Sequence
  Synthetic polypeptide
DVFASPSAMIVFPKASLPSHVELAGADTIQCLPGQRGFEGTSWPHNKMHSVS

SEQ ID NO: 16277 - protein, 258 aa, Artificial Sequence
  Synthetic polypeptide
RQEFETSLANMMKAIKLFLTPEDLDDPVNRAKKYFLQTEDAKGTLSLMPEFKVRERALLEALHRFGMTEEGCIQAWFSLPHSMRIFYVHAYTSKIWNEAVSYRLETYGARVVQGDLVCLDEDIDDENFPNSKIHLVTEEEGSANMYAIHQVVLPVLGYNIQYPKNKVGQWYHDILSRDGLQTCRFKVPTLKLNIPGCYRQILKHPCNLSYQLMEDHDIDVKTKGSHIDETALSLLISFDLDASCYATVCLKEIMKHDV

SEQ ID NO: 16278 - protein, 30 aa, Artificial Sequence
  Synthetic polypeptide
GRRIITSGVRDQPGQYDESHKIVSYTRRLG

SEQ ID NO: 16279 - protein, 30 aa, Artificial Sequence
  Synthetic polypeptide
RQEFETSLANMMKAIKLFLTPEDLDDPVNR

SEQ ID NO: 16280 - protein, 24 aa, Artificial Sequence
  Synthetic polypeptide
RQEFETSLANMMKAIKLFLTPEDL

SEQ ID NO: 16281 - protein, 29 aa, Artificial Sequence
  Synthetic polypeptide
GRRIITSGVRDQPGQYDESHKIVSYTRRL

SEQ ID NO: 16282 - protein, 398 aa, Artificial Sequence
  Synthetic polypeptide
FLHFHLRYRVHLTRECQTVGADIDECAEGRHYCRENTMCVNTPGSFMCICKTGYIRIDDYSCTEHDECITNQHNCDENALCFNTVGGHNCVCKPGYTGNGTTCKAFCKDGCRNGGACIAANVCACPQGFTGPSCETDIDECSDGFVQCDSRANCINLPGWYHCECRDGYHDNGMFSPSGESCEDIDECGTGRHSCANDTICFNLDGGYDCRCPHGKNCTGDCIHDGKVKHNGQIWVLENDRCSVCSCQNGFVMCRRMVCDCENPTVDLFCCPECDPRLSSQCLHQNGETLYNSGDTWVQNCQQCRCLQGEVDCWPLPCPDVECEFSILPENECCPRCVTDPCQADTIRNDITKTCLDEMNVVRFTGSSWIKHGTECTLCQCKNGHICCSVDPQCLQEL

SEQ ID NO: 16283 - protein, 352 aa, Artificial Sequence
  Synthetic polypeptide
GTGFISLGSARQWAQTSMSVLKGAITVVKIQCVSTPRVLLCASAKLDTSELMIIHVQNMMSVSQISTTVMKMLYASTLLEDTTVFASRAIQGMERHAKHFAKMAVGMEEPVLPLMCVPAHKASLDPAVKRTLMNALMVLFNVTVVLIALTCLDGTTVSAEMATMTMGCFHQVENRVKILMSVGPGGTAVPMIPFASIWMADMIVDVLMERIAQGTASMMEKLSTMVRFGCWKMTGALCAHVRMDSLCVDGWSVTVRIPQLIFFAALNVTQGLVVSASIKMGKLCITVVTPGSRIVNSAAACKGKLIVGPCLAQMWSVNSAFSQRMSAARAVSQTLARLTPSAMTSPRLAWTK

SEQ ID NO: 16284 - protein, 10 aa, Artificial Sequence
  Synthetic polypeptide
GVPDSGRRHR

SEQ ID NO: 16285 - protein, 351 aa, Artificial Sequence
  Synthetic polypeptide
FLHFHLRYRVHLTRECQTVGADIDECAEGRHYCRENTMCVNTPGSFMCICKTGYIRIDDYSCTEHDECITNQHNCDENALCFNTVGGHNCVCKPGYTGNGTTCKAFCKDGCRNGGACIAANVCACPQGFTGPSCETDIDECGTGRHSCANDTICFNLDGGYDCRCPHGKNCTGDCIHDGKVKHNGQIWVLENDRCSVCSCQNGFVMCRRMVCDCENPTVDLFCCPECDPRLSSQCLHQNGETLYNSGDTWVQNCQQCRCLQGEVDCWPLPCPDVECEFSILPENECCPRCVTDPCQADTIRNDITKTCLDEMNVVRFTGSSWIKHGTECTLCQCKNGHICCSVDPQCLQEL

SEQ ID NO: 16286 - protein, 305 aa, Artificial Sequence
  Synthetic polypeptide
GTGFISLGSARQWAQTSMSVLKGAITVVKIQCVSTPRVLLCASAKLDTSELMIIHVQNMMSVSQISTTVMKMLYASTLLEDTTVFASRAIQGMERHAKHFAKMAVGMEEPVLPLMCVPAHKASLDPAVKRILMSVGPGGTAVPMIPFASIWMADMIVDVLMERIAQGTASMMEKLSTMVRFGCWKMTGALCAHVRMDSLCVDGWSVTVRIPQLIFFAALNVTQGLVVSASIKMGKLCITVVTPGSRIVNSAAACKGKLIVGPCLAQMWSVNSAFSQRMSAARAVSQTLARLTPSAMTSPRLAWTK

SEQ ID NO: 16287 - protein, 83 aa, Artificial Sequence
  Synthetic polypeptide
FLHFHLRYRVHLTRECQTVGADIDECAEGRHYCRENTMCVNTPGSFMCICKTGYIRIDDYSCTEHDECITNQHNCDENALCFN

SEQ ID NO: 16288 - protein, 77 aa, Artificial Sequence
  Synthetic polypeptide
GTGFISLGSARQWAQTSMSVLKGAITVVKIQCVSTPRVLLCASAKLDTSELMIIHVQNMMSVSQISTTVMKMLYAST

SEQ ID NO: 16289 - protein, 9 aa, Artificial Sequence
  Synthetic polypeptide
FLHFHLRHR

SEQ ID NO: 16290 - protein, 369 aa, Artificial Sequence
  Synthetic polypeptide
GRSQDGRIGTAPVYSSQREGHRRRVISAFPPETSMSVLKGAITVVKIQCVSTPRVLLCASAKLDTSELMIIHVQNMMSVSQISTTVMKMLYASTLLEDTTVFASRAIQGMERHAKHFAKMAVGMEEPVLPLMCVPAHKASLDPAVKRTLMNALMVLFNVTVVLIALTCLDGTTVSAEMATMTMGCFHQVENRVKILMSVGPGGTAVPMIPFASIWMADMIVDVLMERIAQGTASMMEKLSTMVRFGCWKMTGALCAHVRMDSLCVDGWSVTVRIPQLIFFAALNVTQGLVVSASIKMGKLCITVVTPGSRIVNSAAACKGKLIVGPCLAQMWSVNSAFSQRMSAARAVSQTLARLTPSAMTSPRLAWTK

SEQ ID NO: 16291 - protein, 322 aa, Artificial Sequence
  Synthetic polypeptide
GRSQDGRIGTAPVYSSQREGHRRRVISAFPPETSMSVLKGAITVVKIQCVSTPRVLLCASAKLDTSELMIIHVQNMMSVSQISTTVMKMLYASTLLEDTTVFASRAIQGMERHAKHFAKMAVGMEEPVLPLMCVPAHKASLDPAVKRILMSVGPGGTAVPMIPFASIWMADMIVDVLMERIAQGTASMMEKLSTMVRFGCWKMTGALCAHVRMDSLCVDGWSVTVRIPQLIFFAALNVTQGLVVSASIKMGKLCITVVTPGSRIVNSAAACKGKLIVGPCLAQMWSVNSAFSQRMSAARAVSQTLARLTPSAMTSPRLAWTK

SEQ ID NO: 16292 - protein, 94 aa, Artificial Sequence
  Synthetic polypeptide
GRSQDGRIGTAPVYSSQREGHRRRVISAFPPETSMSVLKGAITVVKIQCVSTPRVLLCASAKLDTSELMIIHVQNMMSVSQISTTVMKMLYAST

SEQ ID NO: 16293 - protein, 12 aa, Artificial Sequence
  Synthetic polypeptide
DHDNYNCLNGRI

SEQ ID NO: 16294 - protein, 927 aa, Artificial Sequence
  Synthetic polypeptide
LYPPKKSECFLFSNSRTISLNVFSFCPAAKRLCASFHVKITTTTIVSMEEFNGKPDSLFFNDGQRRIDFVLVYEDESRKETNKKGTNEKQRRKRQAYESNLICHGLQLEATRSVLDDKLVFVKVHAPWEVLCTYAEIMHIKLPLKPNDLKNRSSAFGTLNWFTKVLSVDESIIKPEQEFFTAPFEKNRMNDFYIVDRDAFFNPATRSRIVYFILSRVKYQVINNVSKFGINRLVNSGIYKAAFPLHDCKFRRQSEDPSCPNERYLLYREWAHPRSIYKKQPLDLIRKYYGEKIGIYFAWLGYYTQMLLLAAVVGVACFLYGYLNQDNCTWSKEVCHPDIGGKIIMCPQCDRLCPFWKLNITCESSKKLCIFDSFGTLVFAVFMGVWVTLFLEFWKRRQAELEYEWDTVELQQEEQARPEYEARCTHVVINEITQEEERIPFTAWGKCIRITLCASAVFFWILLIIASVIGIIVYRLSVFIVFSAKLPKNINGTDPIQKYLTPQTATSITASIISFIIIMILNTIYEKVAIMITNFELPRTQTDYENSLTMKMFLFQFVNYYSSCFYIAFFKGKFVGYPGDPVYWLGKYRNEECDPGGCLLELTTQLTIIMGGKAIWNNIQEVLLPWIMNLIGRFHRVSGSEKITPRWEQDYHLQPMGKLGLFYEYLEMIIQFGFVTLFVASFPLAPLLALVNNILEIRVDAWKLTTQFRRLVPEKAQDIGAWQPIMQGIAILAVVTNAMIIAFTSDMIPRLVYYWSFSVPPYGDHTSYTMEGYINNTLSIFKVADFKNKSKGNPYSDLGNHTTCRYRDFRYPPGHPQEYKHNIYYWHVIAAKLAFIIVMEYLALLPRLGHSGMILAHCNLRLPVDCCMCYRFVDEIRLLEQLTSDFIDSLYYIFSISIISIFFSVTFFFLLLSLGPTPCFSVSNFLS

SEQ ID NO: 16295 - protein, 50 aa, Artificial Sequence
  Synthetic polypeptide
TYFPFALLPRGFVPVFMLRSRQLQLSQWKNLMENLTPSFLMMASEELTLF

SEQ ID NO: 16296 - protein, 908 aa, Artificial Sequence
  Synthetic polypeptide
LYPPKKSECFLFSNSRTISLNVFSFCPAAKRLCASFHVKITTTTIVSMEEFNGKPDSLFFNDGQRRIDFVLVYEDESRKETNKKGTNEKQRRKRQAYESNLICHGLQLEATRSVLDDKLVFVKVHAPWEVLCTYAEIMHIKLPLKPNDLKNRSSAFGTLNWFTKVLSVDESIIKPEQEFFTAPFEKNRMNDFYIVDRDAFFNPATRSRIVYFILSRVKYQVINNVSKFGINRLVNSGIYKAAFPLHDCKFRRQSEDPSCPNERYLLYREWAHPRSIYKKQPLDLIRKYYGEKIGIYFAWLGYYTQMLLLAAVVGVACFLYGYLNQDNCTWSKEVCHPDIGGKIIMCPQCDRLCPFWKLNITCESSKKLCIFDSFGTLVFAVFMGVWVTLFLEFWKRRQAELEYEWDTVELQQEEQARPEYEARCTHVVINEITQEEERIPFTAWGKCIRITLCASAVFFWILLIIASVIGIIVYRLSVFIVFSAKLPKNINGTDPIQKYLTPQTATSITASIISFIIIMILNTIYEKVAIMITNFELPRTQTDYENSLTMKMFLFQFVNYYSSCFYIAFFKGKFVGYPGDPVYWLGKYRNEECDPGGCLLELTTQLTIIMGGKAIWNNIQEVLLPWIMNLIGRFHRVSGSEKITPRWEQDYHLQPMGKLGLFYEYLEMIIQFGFVTLFVASFPLAPLLALVNNILEIRVDAWKLTTQFRRLVPEKAQDIGAWQPIMQGIAILAVVTNAMIIAFTSDMIPRLVYYWSFSVPPYGDHTSYTMEGYINNTLSIFKVADFKNKSKGNPYSDLGNHTTCRYRDFRYPPGHPQEYKHNIYYWHVIAAKLAFIIVMEHVIYSVKFFISYAIPDVSKRTKSKIQREKYLTQKLLHENHLKDMTKNMGVIAERMIEAVDNNLRPKSE

SEQ ID NO: 16297 - protein, 18 aa, Artificial Sequence
  Synthetic polypeptide
FYIMVVSDTLTGFLPCSN

SEQ ID NO: 16298 - protein, 209 aa, Artificial Sequence
  Synthetic polypeptide
LQEKKHRAPIDSTLWWFQTPSQVFYHAATEHGGKDVYPGQCLWEGCEPFQRQRFSFITHLQDKHCSKDALLAGLKQDEPGQAGSQKSSTKQPTVGGTSSTPRAQKAIVNHPSAALMALRRGSRNLVFRDFTDEKEGPITKHIRLTAALILKNIGKYSECGRRLLKRHENNLSVLAISNMEASSTLAKCLYELNFTVQSKEQEKDSEMLQ

SEQ ID NO: 16299 - protein, 90 aa, Artificial Sequence
  Synthetic polypeptide
CLMICHFSHHPQMGPSSCRKRSTGLPLILHYGGFRHPHRFSTMQQLNMEEKMYIQGSVFGKVVSLFSDSGFLLLPTCRISTVQRMPYLQD

SEQ ID NO: 16300 - protein, 162 aa, Artificial Sequence
  Synthetic polypeptide
LQEKKHRAPIDSTLWWFQTPSQVFYHAATEHGGKDVYPGQCLWEGCEPFQRQRFSFITHLQDKHCSKDALLAGLKQDEPGQAGSQKSSTKQPTVGGTSSTPRAQKAIVNHPSAALMALRRGSRNLVFRDFTDEKEGPITKHIRLTAALILKNIGKYSECGRR

SEQ ID NO: 16301 - protein, 167 aa, Artificial Sequence
  Synthetic polypeptide
LQEKKHRAPIDSTLWWFQTPSQVFYHAATEHGGKDVYPGQCLWEGCEPFQRQRFSFITHLQDKHCSKDALLAGLKQDEPGQAGSQKSSTKQPTVGGTSSTPRAQKAIVNHPSAALMALRRGSRNLVFRDFTDEKEGPITKHIRLTAALILKNIGKYSECGRRNMNED

SEQ ID NO: 16302 - protein, 114 aa, Artificial Sequence
  Synthetic polypeptide
THDVFEETLFQREMKKKTVCTLNMGDKKYEDMEGEENGDNTISTGLLYSEADRCPICLNCLLEKEVGFPESCNHVFCMTCILKWAETLASCPIDRKPFQAVFKFSALEGYVKVQ

SEQ ID NO: 16303 - protein, 52 aa, Artificial Sequence
  Synthetic polypeptide
CCCTLHGLQYNINIYTRKPKILCDLLYCNIVLLLRSGPRPMMSLRKPFSKEK

SEQ ID NO: 16304 - protein, 111 aa, Artificial Sequence
  Synthetic polypeptide
LLQETLFQREMKKKTVCTLNMGDKKYEDMEGEENGDNTISTGLLYSEADRCPICLNCLLEKEVGFPESCNHVFCMTCILKWAETLASCPIDRKPFQAVFKFSALEGYVKVQ

SEQ ID NO: 16305 - protein, 22 aa, Artificial Sequence
  Synthetic polypeptide
LLGIQNLCGGSNYYRKPFSKEK

SEQ ID NO: 16306 - protein, 32 aa, Artificial Sequence
  Synthetic polypeptide
GFKTCVEEVTITGNPFPKRNEEENCMYPKYGR

SEQ ID NO: 16307 - protein, 9 aa, Artificial Sequence
  Synthetic polypeptide
QRKPFSKEK

SEQ ID NO: 16308 - protein, 78 aa, Artificial Sequence
  Synthetic polypeptide
NSLVTDMKKVCLIWVEGQTSRNILLTQSLIQSASLTLFKPVKSERDKEAAEEKFEASRGNPFPKRNEEENCMYPKYGR

SEQ ID NO: 16309 - protein, 125 aa, Artificial Sequence
  Synthetic polypeptide
SLRGIRKLQKKSLKLAEETLFQREMKKKTVCTLNMGDKKYEDMEGEENGDNTISTGLLYSEADRCPICLNCLLEKEVGFPESCNHVFCMTCILKWAETLASCPIDRKPFQAVFKFSALEGYVKVQ

SEQ ID NO: 16310 - protein, 10 aa, Artificial Sequence
  Synthetic polypeptide
KKPDIQDGFR

SEQ ID NO: 16311 - protein, 238 aa, Artificial Sequence
  Synthetic polypeptide
LIYTAIWMNLGNIILSERSQIYRMALDDKLYQRDLEVALALSVKELPTVTTNVQNSQDKSIEKHGSSKIETMNKSPHISNCSVASDYLDLDKITVEDDVGGVQGKRKAASKAAAQQRKILLEGSDGDSANDTEPDFAPGEDSEDDSDFCESEDNDEDFSMRKSKVKEIKKKEVKVKSPVEKKEKKSKSKCNALAASGGSRSSSSPLVVVSVKSPNQSLRLGLSRLARVKPLHPNATST

SEQ ID NO: 16312 - protein, 10 aa, Artificial Sequence
  Synthetic polypeptide
VKEARYTGWL

SEQ ID NO: 16313 - protein, 288 aa, Artificial Sequence
  Synthetic polypeptide
LIYTAIWMNLGNIILSERSQIYRMALDDKLYQRDLEVALALSVKELPTVTTNVQNSQDKSIEKHGSSKIETMNKSPHISNCSVASDYLDLDKITVEDDVGGVQGKRKAASKAAAQQRKILLEGSDGDSANDTEPDFAPGEDSEDDSDFCESEDNDEDFSMRKSKVKEIKKKEVKVKSPVEKKEKKSKSKCNALVTSVDSAPAAVKSESQSLPKKVSLSSDTTRKPLEIRSPSAESKKPKWVPPAASGGSRSSSSPLVVVSVKSPNQSLRLGLSRLARVKPLHPNATST

SEQ ID NO: 16314 - protein, 188 aa, Artificial Sequence
  Synthetic polypeptide
LIYTAIWMNLGNIILSERSQIYRMALDDKLYQRDLEVALALSVKELPTVTTNVQNSQDKSIEKHGSSKIETMNKSPHISNCSVASDYLDLDKITVEDDVGGVQGKRKAASKAAAQQRKILLEGSDGDSANDTEPDFAPGEDSEDDSDFCESEDNDEDFSMRKSKVKEIKKKEVKRHLEVAEVAAAHWW

SEQ ID NO: 16315 - protein, 216 aa, Artificial Sequence
  Synthetic polypeptide
LIYTAIWMNLGNIILSERSQIYRMALDDKLYQRDLEVALALSVKELPTVTTNVQNSQDKSIEKHGSSKIETMNKSPHISNCSVASDYLDLDKITVEDDVGGVQGKRKAASKAAAQQRKILLEGSDGDSANDTEPDFAPGEDSEDDSDFCESEDNDEDFSMRKSKVKEIKKKEVKVKSPVEKKEKKSKSKCNALDTTRKPLEIRSPSAESKKPKWVP

SEQ ID NO: 16316 - protein, 81 aa, Artificial Sequence
  Synthetic polypeptide
FQDSQIGTALVCSSQQDRCRRWVISAFPTEVPGSSHWDWLDSGCSPWKAALFLGLGVLFSLVSIPLVIYDWACSSSSDEGH

SEQ ID NO: 16317 - protein, 58 aa, Artificial Sequence
  Synthetic polypeptide
FLHFQLRYLVHLTGTGWTVGAAHGRLPFSWAWGCCSPWSAFPWSSMTGPAHRVVTKAT

SEQ ID NO: 16318 - protein, 39 aa, Artificial Sequence
  Synthetic polypeptide
GTWFISLGLVGQWVQPMEGCPFLGPGGVVLLGQHSLGHL

SEQ ID NO: 16319 - protein, 494 aa, Artificial Sequence
  Synthetic polypeptide
PFVLFFRVKETFELFTACSNYVKYTPLNKIWSMFVSLYLISPESGNYLKFISDRESRRSLTNSHLEKKKCDEYIPGTTSLGMSVFNLSNAIMGSGILGLAFALANTGILLFLVLLTSVTLLSIYSINLLLICSKETGCMVYEKLGEQVFGTTGKFVIFGATSLQNTGAMLSYLFIVKNELPSAIKFLMGKEETFSAWYVDGRVLVVIVTFGIILPLCLLKNLGYLGYTSGFSLSCMVFFLIVVIYKKFQIPCIVPELNSTISANSTNADTCTPKYVTFNSKTVYALPTIAFAFVCHPSVLPIYSELKDRSQKKMQMVSNISFFAMFVMYFLTAIFGYLTFYDNVQSDLLHKYQSKDDILILTVRLAVIVAVILTVPVLFFTVRSSLFELAKKTKFNLCRHTVVTCILLVVINLLVIFIPSMKDIFGVVGVTSANMLIFILPSSLYLKITDQDGDKGTQRIWAALFLGLGVLFSLVSIPLVIYDWACSSSSDEGH

SEQ ID NO: 16320 - protein, 40 aa, Artificial Sequence
  Synthetic polypeptide
FPQNLETISSLFLIVKVEEVSQTAIWKKRSVMSIFQVQPP

SEQ ID NO: 16321 - protein, 33 aa, Artificial Sequence
  Synthetic polypeptide
QLCKVYSSEQNLEHVCFSLPDFPRIWKLSQVYF

SEQ ID NO: 16322 - protein, 510 aa, Artificial Sequence
  Synthetic polypeptide
PFVLFFRVKETFELFTACSNYVKYTPLNKIWSMFVSLYLISPESGNYLKFISDRESRRSLTNSHLEKKKCDEYIPGTTSLGMSVFNLSNAIMGSGILGLAFALANTGILLFLVLLTSVTLLSIYSINLLLICSKETGCMVYEKLGEQVFGTTGKFVIFGATSLQNTGAMLSYLFIVKNELPSAIKFLMGKEETFSAWYVDGRVLVVIVTFGIILPLCLLKNLGYLGYTSGFSLSCMVFFLIVVIYKKFQIPCIVPELNSTISANSTNADTCTPKYVTFNSKTVYALPTIAFAFVCHPSVLPIYSELKDRSQKKMQMVSNISFFAMFVMYFLTAIFGYLTFYDNVQSDLLHKYQSKDDILILTVRLAVIVAVILTVPVLFFTVRSSLFELAKKTKFNLCRHTVVTCILLVVINLLVIFIPSMKDIFGVVGVTSANMLIFILPSSLYLKITDQDGDKGTQRIWLFLFLQFPVQPCWLSECIILLPAALSLNMLKRKELIILCSLDSGFSNLY

SEQ ID NO: 16323 - protein, 85 aa, Artificial Sequence
  Synthetic polypeptide
PFVLFFRVKETFELFTACSNYVKYTPLNKIWSMFVSLYLISPESGNYLKFISDRESRRSLTNSHLEKKKCDEYIPGTTSLGMSVF

SEQ ID NO: 16324 - protein, 25 aa, Artificial Sequence
  Synthetic polypeptide
QIVVSERELFGSVGVIGGHSSFVAV

SEQ ID NO: 16325 - protein, 322 aa, Artificial Sequence
  Synthetic polypeptide
SRDRLWYLNGNYLVLLVSLVVILPLSLFRNLGYLGYTSGLSLLCMVFFLIVVICKKFQVPCPVEAALIINETINTTLTQPTALVPALSHNVTENDSCRPHYFIFNSQTVYAVPILIFSFVCHPAVLPIYEELKDRSRRRMMNVSKISFFAMFLMYLLAALFGYLTFYEHVESELLHTYSSILGTDILLLIVRLAVLMAVTLTVPVVIFPIRSSVTHLLCASKDFSWWRHSLITVSILAFTNLLVIFVPTIRDIFGFIGASAASMLIFILPSAFYIKLVKKEPMKSVQKIGALFFLLSGVLVMTGSMALIVLDWVHNAPGGGH

SEQ ID NO: 16326 - protein, 26 aa, Artificial Sequence
  Synthetic polypeptide
NPKLFECQHDTTSGKSTPDLVTDCGI

SEQ ID NO: 16327 - protein, 38 aa, Artificial Sequence
  Synthetic polypeptide
NGHCTMAKVLLDWLSANSPELRAPLFLRSTWKRQGGVS

SEQ ID NO: 16328 - protein, 27 aa, Artificial Sequence
  Synthetic polypeptide
RMDTAQWQRFYWTGSVPTPQNLGPHSF

SEQ ID NO: 16329 - protein, 48 aa, Artificial Sequence
  Synthetic polypeptide
TMVYYAAIKNDEFMSFVGTWMKLETIILSKLSQGQKTKHRMFSLTGWK

SEQ ID NO: 16330 - protein, 525 aa, Artificial Sequence
  Synthetic polypeptide
SWKPSFSANYHKDKKPNTACSHSQVGSKLSVQIQKPPSNIKNSRMTQVFHKNTSVTSLPFVDTKGKKNTVSFPHISKKVLLKSSLLYQENQAHNQMPASELKASEIPFHPSIKTQDPKAEEKSPKKQKVTLTAAEALKLFKNQLSPYEQSEILGYAELWFLGLEAKKLDTAPEKFSKTSFDDEHGFYLKVLHDHIAYRYEVLETIGKGSFGQVAKCLDHKNNELVALKIIRNKKRFHQQALMELKILEALRKKDKDNTYNVVHMKDFFYFRNHFCITFELLGINLYELMKNNNFQGFSLSIVRRFTLSVLKCLQMLSVEKIIHCDLKPENIVLYQKGQASVKVIDFGSSCYEHQKVYTYIQSRFYRSPEVILGHPYDVAIDMWSLGCITAELYTGYPLFPGENEVEQLACIMEVLGLPPAGFIQTASRRQTFFDSKGFPKNITNNRGKKRYPDSKDLTMVLKTYDTSFLDFLRRCLVWEPSLRMTPDQALKHAWIHQSRNLKPQPRPQTLRKSNSFFPSETRKDK

SEQ ID NO: 16331 - protein, 54 aa, Artificial Sequence
  Synthetic polypeptide
VHVLCRDMDEAGNHHSQQTITRTKNQTPHVLTHRLEVNFRFRSRSHLPISRTPE

SEQ ID NO: 16332 - protein, 1577 aa, Artificial Sequence
  Synthetic polypeptide
TMRTLGHRKIVASKGGFEMVTKEKKWSKVGSRLGYLPGKGTGSLLKSHYERILYPYELFQSGVSLMGVQMPNLDLKEKVEPEVLSTDTQTSPEPGTRMNILPKRTRRVKTQSESGDVSRNTELKKLQIFGAGPKVVGLAMGTKDKEDEVTRRRKVTNRSDAFNMQMRQRKGTLSVNFVDLYVCMFCGRGNNEDKLLLCDGCDDSYHTFCLIPPLPDVPKGDWRCPKCVAEECSKPREAFGFEQAVREYTLQSFGEMADNFKSDYFNMPVHMVPTELVEKEFWRLVSSIEEDVIVEYGADISSKDFGSGFPVKDGRRKILPEEEEYALSGWNLNNMPVLEQSVLAHINVDISGMKVPWLYVGMCFSSFCWHIEDHWSYSINYLHWGEPKTWYGVPSHAAEQLEEVMRELAPELFESQPDLLHQLVTIMNPNVLMEHGVPVYRTNQCAGEFVVTFPRAYHSGFNQGYNFAEAVNFCTADWLPIGRQCVNHYRRLRRHCVFSHEELIFKMAADPECLDVGLAAMVCKELTLMTEEETRLRESVVQMGVLMSEEEVFELVPDDERQCSACRTTCFLSALTCSCNPERLVCLYHPTDLCPCPMQKKCLRYRYPLEDLPSLLYGVKVRAQSYDTWVSRVTEALSANFNHKKDLIELRVMLEDAEDRKYPENDLFRKLRDAVKEAETCASVAQLLLSKKQKHRQSPDSGRTRTKLTVEELKAFVQQLFSLPCVISQARQVKNLLDDVEEFHERAQEAMMDETPDSSKLQMLIDMGSSLYVELPELPRLKQELQQARWLDEVRLTLSDPQQVTLDVMKKLIDSGVGLAPHHAVEKAMAELQELLTVSERWEEKAKVCLQARPRHSVASLESIVNEAKNIPAFLPNVLSLKEALQKAREWTAKVEAIQSGSNYAYLEQLESLSAKGRPIPVRLEALPQVESQVAAARAWRERTGRTFLKKNSSHTLLQVLSPRTDIGVYGSGKNRRKKVKELIEKEKEKDLDLEPLSDLEEGLEETRDTAMVVAVFKEREQKEIEAMHSLRAANLAKMTMVDRIEEVKFCICRKTASGFMLQCELCKDWFHNSCVPLPKSSSQKKGSSWQAKEVKFLCPLCMRSRRPRLETILSLLVSLQKLPVRLPEGEALQCLTERAMSWQDRARQALATDELSSALAKLSVLSQRMVEQAAREKTEKIISAELQKAAANPDLQGHLPSFQQSAFNRVVSSVSSSPRQTMDYDDEETDSDEDIRETYGYDMKDTASVKSSSSLEPNLFCDEEIPIKSEEVVTHMWTAPSFCAEHAYSSASKSCSQGSSTPRKQPRKSPLVPRSLEPPVLELSPGAKAQLEELMMVGDLLEVSLDETQHIWRILQATHPPSEDRFLHIMEDDSMEEKPLKVKGKDSSEKKRKRKLEKVEQLFGEGKQKSKELKKMDKPRKKKLKLGADKSKELNKLAKKLAKEEERKKKKEKAAAAKVELVKESTEKKREKKVLDIPSKYDWSGAEESDDENAVCAAQNCQRPCKDKVDWVQCDGGCDEWFHQVCVGVSPEMAENEDYICINCAKKQGPVSPGPAPPPSFIMSYKLPMEDLKETS

SEQ ID NO: 16333 - protein, 42 aa, Artificial Sequence
  Synthetic polypeptide
EHLDTGRLLPAKEVLKWSPKRRNGLKWVVAWDICQEKELGLF

SEQ ID NO: 16334 - protein, 54 aa, Artificial Sequence
  Synthetic polypeptide
DHALSRDMDEAGNHHSQQTVTRTENQTPHVLTDRWELNNENTWTQEDCCQQRRF

SEQ ID NO: 16335 - protein, 1523 aa, Artificial Sequence
  Synthetic polypeptide
TMRTLGHRKIVASKGGFEMVTKEKKWSKVGSRLGYLPGKGTGSLLKSHYERILYPYELFQSGVSLMGVQMPNLDLKEKVEPEVLSTDTQTSPEPGTRMNILPKRTRRVKTQSESGDVSRNTELKKLQIFGAGPKVVGLAMGTKDKEDEVTRRRKVTNRSDAFNMQMRQRKGTLSVNFVDLYVCMFCGRGNNEDKLLLCDGCDDSYHTFCLIPPLPDVPKGDWRCPKCVAEECSKPREAFGFEQAVREYTLQSFGEMADNFKSDYFNMPVHMVPTELVEKEFWRLVSSIEEDVIVEYGADISSKDFGSGFPVKDGRRKILPEEEEYALSGWNLNNMPVLEQSVLAHINVDISGMKVPWLYVGMCFSSFCWHIEDHWSYSINYLHWGEPKTWYGVPSHAAEQLEEVMRELAPELFESQPDLLHQLVTIMNPNVLMEHGVPVYRTNQCAGEFVVTFPRAYHSGFNQGYNFAEAVNFCTADWLPIGRQCVNHYRRLRRHCVFSHEELIFKMAADPECLDVGLAAMVCKELTLMTEEETRLRESVVQMGVLMSEEEVFELVPDDERQCSACRTTCFLSALTCSCNPERLVCLYHPTDLCPCPMQKKCLRYRYPLEDLPSLLYGVKVRAQSYDTWVSRVTEALSANFNHKKDLIELRVMLEDAEDRKYPENDLFRKLRDAVKEAETCASVAQLLLSKKQKHRQSPDSGRTRTKLTVEELKAFVQQLFSLPCVISQARQVKNLLDDVEEFHERAQEAMMDETPDSSKLQMLIDMGSSLYVELPELPRLKQELQQARWLDEVRLTLSDPQQVTLDVMKKLIDSGVGLAPHHAVEKAMAELQELLTVSERWEEKAKVCLQARPRHSVASLESIVNEAKNIPAFLPNVLSLKEALQKAREWTAKVEAIQSGSNYAYLEQLESLSAKGRPIPVRLEALPQVESQVAAARAWRERTGRTFLKKNSSHTLLQVLSPRTDIGVYGSGKNRRKKVKELIEKEKEKDLDLEPLSDLEEGLEETRDTAMVVAVFKEREQKEIEAMHSLRAANLAKMTMVDRIEEVKFCICRKTASGFMLQCELCKDWFHNSCVPLPKSSSQKKGSSWQAKEVKFLCPLCMRSRRPRLETILSLLVSLQKLPVRLPEGEALQCLTERAMSWQDRARQALATDELSSALAKLSVLSQRMVEQAAREKTEKIISAELQKAAANPDLQGHLPSFQQSAFNRVVSSVSSSPRQTMDYDDEETDSDEDIRETYGYDMKDTASVKSSSSLEPNLFCDEEIPIKSEEVVTHMWTAPSFCAEHAYSSASKSCSQGSSTPRKQPRKSPLVPRSLEPPVLELSPGAKAQLEELMMVGDLLEVSLDETQHIWRILQATHPPSEDRFLHIMEDDSMEEKPLKVKGKDSSEKKRKRKLEKVEQLFGEGKQKSKELKKMDKPRKKKLKLGADKSKELNKLAKKLAKEEERKKKKEKAAAAKVELVKESTEKKREKKVLDIPSKYDWSGAEESDDENAVCAAQNCQRPCKDKGVVFVTEEEKNKKY

SEQ ID NO: 16336 - protein, 54 aa, Artificial Sequence
  Synthetic polypeptide
TMRTLGHRKIVASKGGFEMVTKEKKWSKVGSRLGYLPGKGTGSLLKSHYERILY

SEQ ID NO: 16337 - protein, 28 aa, Artificial Sequence
  Synthetic polypeptide
TMRTLGHRKIVASKGGFEMVTKEKKWSK

SEQ ID NO: 16338 - protein, 26 aa, Artificial Sequence
  Synthetic polypeptide
EHLDTGRLLPAKEVLKWSPKRRNGLK

SEQ ID NO: 16339 - protein, 340 aa, Artificial Sequence
  Synthetic polypeptide
EHELWSLLLAFGTSPLAHHLCVLWQDAIGLQPDARGVATSLGLNERLFVVNPQEVHELIPHPDQLGPTVGSAEGLDLVSAKDLAGQLTDHDWSLFNSIHQVELIHYVLGPQHLRDVTTANLERFMRRFNELQYWVATELCLCPVPGPRAQLLRKFIKLAAHLKEQKNLNSFFAVMFGLSNSAISRLAHTWERLPHKVRKLYSALERLLDPSWNHRVYRLALAKLSPPVIPFMPLLLKDMTFIHEGNHTLVENLINFEKMRMMARAARMLHHCRSHNPVPLSPLRSRVSHLHEDSQVARISTCSEQSLSTRSPASTWAYVQQLKVIDNQRELSRLSRELEP

SEQ ID NO: 16340 - protein, 41 aa, Artificial Sequence
  Synthetic polypeptide
LTICVSSGRMPLACSQMPVVWPHLWGSMSVSLLSTHRKCMS

SEQ ID NO: 16341 - protein, 41 aa, Artificial Sequence
  Synthetic polypeptide
ALEPAACIRHQPFSSPSVCPLAGCHWPAARCPWCGHISGAQ

SEQ ID NO: 16342 - protein, 322 aa, Artificial Sequence
  Synthetic polypeptide
EHELWSLLLAFGTSPLAHHLCVLWQDAIGLQPDARGVATSLGLNERLFVVNPQEVHELIPHPDQLGPTVGSAEGLDLVSAKDLAGQLTDHDWSLFNSIHQVELIHYVLGPQHLRDVTTANLERFMRRFNELQYWVATELCLCPVPGPRAQLLRKFIKLAAHNSAISRLAHTWERLPHKVRKLYSALERLLDPSWNHRVYRLALAKLSPPVIPFMPLLLKDMTFIHEGNHTLVENLINFEKMRMMARAARMLHHCRSHNPVPLSPLRSRVSHLHEDSQVARISTCSEQSLSTRSPASTWAYVQQLKVIDNQRELSRLSRELEP

SEQ ID NO: 16343 - protein, 209 aa, Artificial Sequence
  Synthetic polypeptide
EHELWSLLLAFGTSPLAHHLCVLWQDAIGLQPDARGVATSLGLNERLFVVNPQEVHELIPHPDQLGPTVGSAEGLDLVSAKDLAGQLTDHDWSLFNSIHQVELIHYVLGPQHLRDVTTANLERFMRRFNELQYWVATELCLCPVPGPRAQLLRKFIKLAAHLKEQKNLNSFFAVMFGLSNSAISRLAHTWERLPHKVRKLYSALERLLC

SEQ ID NO: 16344 - protein, 853 aa, Artificial Sequence
  Synthetic polypeptide
LHKTPLTNSEESLDFSESLEQASTERVLRAGRQLHRHLLATCPNLIRDRKYHLRLYRQCCSGRELVDGILALGLGVHSRSQVVGICQVLLDEGALCHVKHDWAFQDRDAQFYRFPGPEPEPVRTHEMEEELAEAVALLSQRGPDALLTVALRKPPGQRTDEELDLIFEELLHIKAVAHLSNSVKRELAAVLLFEPHSKAGTVLFSQGDKGTSWYIIWKGSVNVVTHGKGLVTTLHEGDDFGQLALVNDAPRAATIILREDNCHFLRVDKQDFNRIIKDVEAKTMRLEEHGKVVLVLERASQGAGPSRPPTPGRNRYTVMSGTPEKILELLLEAMGPDSSAHDPTETFLSDFLLTHRVFMPSAQLCAALLHHFHVEPAGGSEQERSTYVCNKRQQILRLVSQWVALYGSMLHTDPVATSFLQKLSDLVGRDTRLSNLLREQWPERRRCHRLENGCGNASPQMKARNLPVWLPNQDEPLPGSSCAIQVGDKVPYDICRPDHSVLTLQLPVTASVREVMAALAQEDGWTKGQVLVKVNSAGDAIGLQPDARGVATSLGLNERLFVVNPQEVHELIPHPDQLGPTVGSAEGLDLVSAKDLAGQLTDHDWSLFNSIHQVELIHYVLGPQHLRDVTTANLERFMRRFNELQYWVATELCLCPVPGPRAQLLRKFIKLAAHLKEQKNLNSFFAVMFGLSNSAISRLAHTWERLPHKVRKLYSALERLLDPSWNHRVYRLALAKLSPPVIPFMPLLLKDMTFIHEGNHTLVENLINFEKMRMMARAARMLHHCRSHNPVPLSPLRSRVSHLHEDSQVARISTCSEQSLSTRSPASTWAYVQQLKVIDNQRELSRLSRELEP

SEQ ID NO: 16345 - protein, 97 aa, Artificial Sequence
  Synthetic polypeptide
YTRHHSPTARSPWISARAWSRPPQSGCSGLGGSCIGICWPPAQTSSETGSTTLGSIGSAALAGSWWMGSWPWDLGSIPGAKLWESARCCWMKVPSAM

SEQ ID NO: 16346 - protein, 52 aa, Artificial Sequence
  Synthetic polypeptide
TQDTTHQQRGVPGFQREPGAGLHRAGAQGWEAAASASAGHLPKPHPRPEVPP

SEQ ID NO: 16347 - protein, 786 aa, Artificial Sequence
  Synthetic polypeptide
LHKTPLTNSEESLDFSESLEQASTERVLRAGRQLHRHLLATCPNLIRDRKYHLRLYRQCCSGRELVDGILALGLGVHSRSQVVGICQVLLDEGALCHVKHDWAFQDRDAQFYRFPGPEPEPVRTHEMEEELAEAVALLSQRGPDALLTVALRKPPGQRTDEELDLIFEELLHIKAVAHLSNSVKRELAAVLLFEPHSKAGTVLFSQGDKGTSWYIIWKGSVNVVTHGKGLVTTLHEGDDFGQLALVNDAPRAATIILREDNCHFLRVDKQDFNRIIKDVEAKTMRLEEHGKVVLVLERASQGAGPSRPPTPGRNRYTVMSGTPEKILELLLEAMGPDSSAHDPTETFLSDFLLTHRVFMPSAQLCAALLHHFHVEPAGGSEQERSTYVCNKRQQILRLVSQWVALYGSMLHTDPVATSFLQKLSDLVGRDTRLSNLLREQWPERRRCHRLENGCGNASPQMKARNLPVWLPNQDEPLPGSSCAIQVGDKDAIGLQPDARGVATSLGLNERLFVVNPQEVHELIPHPDQLGPTVGSAEGLDLVSAKDLAGQLTDHDWSLFNSIHQVELIHYVLGPQHLRDVTTANLERFMRRFNELQYWVATELCLCPVPGPRAQLLRKFIKLAAHNSAISRLAHTWERLPHKVRKLYSALERLLDPSWNHRVYRLALAKLSPPVIPFMPLLLKDMTFIHEGNHTLVENLINFEKMRMMARAARMLHHCRSHNPVPLSPLRSRVSHLHEDSQVARISTCSEQSLSTRSPASTWAYVQQLKVIDNQRELSRLSRELEP

SEQ ID NO: 16348 - protein, 528 aa, Artificial Sequence
  Synthetic polypeptide
LHKTPLTNSEESLDFSESLEQASTERVLRAGRQLHRHLLATCPNLIRDRKYHLRLYRQCCSGRELVDGILALGLGVHSRSQVVGICQVLLDEGALCHVKHDWAFQDRDAQFYRFPGPEPEPVRTHEMEEELAEAVALLSQRGPDALLTVALRKPPGQRTDEELDLIFEELLHIKAVAHLSNSVKRELAAVLLFEPHSKAGTVLFSQGDKGTSWYIIWKGSVNVVTHGKGLVTTLHEGDDFGQLALVNDAPRAATIILREDNCHFLRVDKQDFNRIIKDVEAKTMRLEEHGKVVLVLERASQGAGPSRPPTPGRNRYTVMSGTPEKILELLLEAMGPDSSAHDPTETFLSDFLLTHRVFMPSAQLCAALLHHFHVEPAGGSEQERSTYVCNKRQQILRLVSQWVALYGSMLHTDPVATSFLQKLSDLVGRDTRLSNLLREQWPERRRCHRLENGCGNASPQMKVSAWPQFLSSAPPGLQAPPSPPDPEGLCGRGKLSSHRHTLGSLIGVHGALAACGALGQAVPGGAEA

SEQ ID NO: 16349 - protein, 194 aa, Artificial Sequence
  Synthetic polypeptide
LHKTPLTNSEESLDFSESLEQASTERVLRAGRQLHRHLLATCPNLIRDRKYHLRLYRQCCSGRELVDGILALGLGVHSRSQVVGICQVLLDEGALCHVKHDWAFQDRDAQFYRFPGPEPEPVRTHEMEEELAEAVALLSQRGPDALLTVALRKPPGQRTDEELDLIFEELLHIKAVAHLSNSVKRELAAVLLFE

SEQ ID NO: 16350 - protein, 113 aa, Artificial Sequence
  Synthetic polypeptide
LHKTPLTNSEESLDFSESLEQASTERVLRAGRQLHRHLLATCPNLIRDRKYHLRLYRQCCSGRELVDGILALGLGVHSRSQVVGICQVLLDEGALCHVKHDWAFQDRDAQFYR

SEQ ID NO: 16351 - protein, 9 aa, Artificial Sequence
  Synthetic polypeptide
LWDPGSLWV

SEQ ID NO: 16352 - protein, 477 aa, Artificial Sequence
  Synthetic polypeptide
GTTISLSSFGPRNHHLPSCGTLEAFGSEVSVRPHRRAPLGSTYLPPAPSGMEAMAASTSLPDPGDFDRNVPRICGVCGDRATGFHFNAMTCEGCKGFFRRSMKRKALFTCPFNGDCRITKDNRRHCQACRLKRCVDIGMMKEFILTDEEVQRKREMILKRKEEEALKDSLRPKLSEEQQRIIAILLDAHHKTYDPTYSDFCQFRPPVRVNDGGGSHPSRPNSRHTPSFSGDSSSSCSDHCITSSDMMDSSSFSNLDLSEEDSDDPSVTLELSQLSMLPHLADLVSYSIQKVIGFAKMIPGFRDLTSEDQIVLLKSSAIEVIMLRSNESFTMDDMSWTCGNQDYKYRVSDVTKAGHSLELIEPLIKFQVGLKKLNLHEEEHVLLMAICIVSPDRPGVQDAALIEAIQDRLSNTLQTYIRCRHPPPGSHLLYAKMIQKLADLRSLNEEHSKQYRCLSFQPECSMKLTPLVLEVFGNEIS

SEQ ID NO: 16353 - protein, 30 aa, Artificial Sequence
  Synthetic polypeptide
ALQSACPHLAPGTTTCLAVGPWKPLGLKCL

SEQ ID NO: 16354 - protein, 123 aa, Artificial Sequence
  Synthetic polypeptide
PEWIMTHEEHHAAKTLGIGKAIAVLTSGGDAQGMNAAVRAVVRVGIFTGARVFFVHEGYQGLVDGGDHIKEATWESVSMMLQLGGTVIGSARCKDFREREGRLRAAYNLVKRGITNLCVIGGD

SEQ ID NO: 16355 - protein, 15 aa, Artificial Sequence
  Synthetic polypeptide
NPVSTKNTKISQSGS

SEQ ID NO: 16356 - protein, 20 aa, Artificial Sequence
  Synthetic polypeptide
HGETLSLRKIQKLARVDHDP

SEQ ID NO: 16357 - protein, 79 aa, Artificial Sequence
  Synthetic polypeptide
PEWIMTHEEHHAAKTLGIGKAIAVLTSGGDAQGMNAAVRAVVRVGIFTGARVFFVHEGYQGLVDGGDHIKEATWESVSM

SEQ ID NO: 16358 - protein, 784 aa, Artificial Sequence
  Synthetic polypeptide
PEWIMTHEEHHAAKTLGIGKAIAVLTSGGDAQGMNAAVRAVVRVGIFTGARVFFVHEGYQGLVDGGDHIKEATWESVSMMLQLGGTVIGSARCKDFREREGRLRAAYNLVKRGITNLCVIGGDGSLTGADTFRSEWSDLLSDLQKAGKITDEEATKSSYLNIVGLVGSIDNDFCGTDMTIGTDSALHRIMEIVDAITTTAQSHQRTFVLEVMGRHCGYLALVTSLSCGADWVFIPECPPDDDWEEHLCRRLSETRTRGSRLNIIIVAEGAIDKNGKPITSEDIKNLVVKRLGYDTRVTVLGHVQRGGTPSAFDRILGSRMGVEAVMALLEGTPDTPACVVSLSGNQAVRLPLMECVQVTKDVTKAMDEKKFDEALKLRGRSFMNNWEVYKLLAHVRPPVSKSGSHTVAVMNVGAPAAGMNAAVRSTVRIGLIQGNRVLVVHDGFEGLAKGQIEEAGWSYVGGWTGQGGSKLGTKRTLPKKSFEQISANITKFNIQGLVIIGGFEAYTGGLELMEGRKQFDELCIPFVVIPATVSNNVPGSDFSVGADTALNTICTTCDRIKQSAAGTKRRVFIIETMGGYCGYLATMAGLAAGADAAYIFEEPFTIRDLQANVEHLVQKMKTTVKRGLVLRNEKCNENYTTDFIFNLYSEEGKGIFDSRKNVLGHMQQGGSPTPFDRNFATKMGAKAMNWMSGKIKESYRNGRIFANTPDSGCVLGMRKRALVFQPVAELKDQTDFEHRIPKEQWWLKLRPILKILAKYEIDLDTSDHAHLEHITRKRSGEAAV

SEQ ID NO: 16359 - protein, 77 aa, Artificial Sequence
  Synthetic polypeptide
PEWIMTHEEHHAAKTLGIGKAIAVLTSGGDAQEMGRDRPGAVAHTCNPRTLGGRGGQITRGWEFETSLTNMEKPRLY

SEQ ID NO: 16360 - protein, 26 aa, Artificial Sequence
  Synthetic polypeptide
PEWIMTHEEHHAAKTLGIGKAIAVLT

SEQ ID NO: 16361 - protein, 66 aa, Artificial Sequence
  Synthetic polypeptide
PEWIMTHEEHHAAKTLGIGKAIAVLTSGGDAQGMNAAVRAVVRVGIFTGARVFFVHEGYQGLVDGG

SEQ ID NO: 16362 - protein, 82 aa, Artificial Sequence
  Synthetic polypeptide
PEWIMTHEEHHAAKTLGIGKAIAVLTSGGDAQGMNAAVRAVVRVGIFTGARVFFVHEGYQGLVDGGDHIKEATWESVSMMLQ

SEQ ID NO: 16363 - protein, 74 aa, Artificial Sequence
  Synthetic polypeptide
PEWIMTHEEHHAAKTLGIGKAIAVLTSGGDAQGMNAAVRAVVRVGIFTGARVFFVHEGYQGLVDGGDHIKEATW

SEQ ID NO: 16364 - protein, 1597 aa, Artificial Sequence
  Synthetic polypeptide
QDGRIGTAPVYSSQRERRRRRVISAFPTEIVASKGGFEMVTKEKKWSKVGSRLGYLPGKGTGSLLKSHYERILYPYELFQSGVSLMGVQMPNLDLKEKVEPEVLSTDTQTSPEPGTRMNILPKRTRRVKTQSESGDVSRNTELKKLQIFGAGPKVVGLAMGTKDKEDEVTRRRKVTNRSDAFNMQMRQRKGTLSVNFVDLYVCMFCGRGNNEDKLLLCDGCDDSYHTFCLIPPLPDVPKGDWRCPKCVAEECSKPREAFGFEQAVREYTLQSFGEMADNFKSDYFNMPVHMVPTELVEKEFWRLVSSIEEDVIVEYGADISSKDFGSGFPVKDGRRKILPEEEEYALSGWNLNNMPVLEQSVLAHINVDISGMKVPWLYVGMCFSSFCWHIEDHWSYSINYLHWGEPKTWYGVPSHAAEQLEEVMRELAPELFESQPDLLHQLVTIMNPNVLMEHGVPVYRTNQCAGEFVVTFPRAYHSGFNQGYNFAEAVNFCTADWLPIGRQCVNHYRRLRRHCVFSHEELIFKMAADPECLDVGLAAMVCKELTLMTEEETRLRESVVQMGVLMSEEEVFELVPDDERQCSACRTTCFLSALTCSCNPERLVCLYHPTDLCPCPMQKKCLRYRYPLEDLPSLLYGVKVRAQSYDTWVSRVTEALSANFNHKKDLIELRVMLEDAEDRKYPENDLFRKLRDAVKEAETCASVAQLLLSKKQKHRQSPDSGRTRTKLTVEELKAFVQQLFSLPCVISQARQVKNLLDDVEEFHERAQEAMMDETPDSSKLQMLIDMGSSLYVELPELPRLKQELQQARWLDEVRLTLSDPQQVTLDVMKKLIDSGVGLAPHHAVEKAMAELQELLTVSERWEEKAKVCLQARPRHSVASLESIVNEAKNIPAFLPNVLSLKEALQKAREWTAKVEAIQSGSNYAYLEQLESLSAKGRPIPVRLEALPQVESQVAAARAWRERTGRTFLKKNSSHTLLQVLSPRTDIGVYGSGKNRRKKVKELIEKEKEKDLDLEPLSDLEEGLEETRDTAMVVAVFKEREQKEIEAMHSLRAANLAKMTMVDRIEEVKFCICRKTASGFMLQCELCKDWFHNSCVPLPKSSSQKKGSSWQAKEVKFLCPLCMRSRRPRLETILSLLVSLQKLPVRLPEGEALQCLTERAMSWQDRARQALATDELSSALAKLSVLSQRMVEQAAREKTEKIISAELQKAAANPDLQGHLPSFQQSAFNRVVSSVSSSPRQTMDYDDEETDSDEDIRETYGYDMKDTASVKSSSSLEPNLFCDEEIPIKSEEVVTHMWTAPSFCAEHAYSSASKSCSQGSSTPRKQPRKSPLVPRSLEPPVLELSPGAKAQLEELMMVGDLLEVSLDETQHIWRILQATHPPSEDRFLHIMEDDSMEEKPLKVKGKDSSEKKRKRKLEKVEQLFGEGKQKSKELKKMDKPRKKKLKLGADKSKELNKLAKKLAKEEERKKKKEKAAAAKVELVKESTEKKREKKVLDIPSKYDWSGAEESDDENAVCAAQNCQRPCKDKVDWVQCDGGCDEWFHQVCVGVSPEMAENEDYICINCAKKQGPVSPGPAPPPSFIMSYKLPMEDLKETS

SEQ ID NO: 16365 - protein, 42 aa, Artificial Sequence
  Synthetic polypeptide
FLHFQLRLLPAKEVLKWSPKRRNGLKWVVAWDICQEKELGLF

SEQ ID NO: 16366 - protein, 1543 aa, Artificial Sequence
  Synthetic polypeptide
QDGRIGTAPVYSSQRERRRRRVISAFPTEIVASKGGFEMVTKEKKWSKVGSRLGYLPGKGTGSLLKSHYERILYPYELFQSGVSLMGVQMPNLDLKEKVEPEVLSTDTQTSPEPGTRMNILPKRTRRVKTQSESGDVSRNTELKKLQIFGAGPKVVGLAMGTKDKEDEVTRRRKVTNRSDAFNMQMRQRKGTLSVNFVDLYVCMFCGRGNNEDKLLLCDGCDDSYHTFCLIPPLPDVPKGDWRCPKCVAEECSKPREAFGFEQAVREYTLQSFGEMADNFKSDYFNMPVHMVPTELVEKEFWRLVSSIEEDVIVEYGADISSKDFGSGFPVKDGRRKILPEEEEYALSGWNLNNMPVLEQSVLAHINVDISGMKVPWLYVGMCFSSFCWHIEDHWSYSINYLHWGEPKTWYGVPSHAAEQLEEVMRELAPELFESQPDLLHQLVTIMNPNVLMEHGVPVYRTNQCAGEFVVTFPRAYHSGFNQGYNFAEAVNFCTADWLPIGRQCVNHYRRLRRHCVFSHEELIFKMAADPECLDVGLAAMVCKELTLMTEEETRLRESVVQMGVLMSEEEVFELVPDDERQCSACRTTCFLSALTCSCNPERLVCLYHPTDLCPCPMQKKCLRYRYPLEDLPSLLYGVKVRAQSYDTWVSRVTEALSANFNHKKDLIELRVMLEDAEDRKYPENDLFRKLRDAVKEAETCASVAQLLLSKKQKHRQSPDSGRTRTKLTVEELKAFVQQLFSLPCVISQARQVKNLLDDVEEFHERAQEAMMDETPDSSKLQMLIDMGSSLYVELPELPRLKQELQQARWLDEVRLTLSDPQQVTLDVMKKLIDSGVGLAPHHAVEKAMAELQELLTVSERWEEKAKVCLQARPRHSVASLESIVNEAKNIPAFLPNVLSLKEALQKAREWTAKVEAIQSGSNYAYLEQLESLSAKGRPIPVRLEALPQVESQVAAARAWRERTGRTFLKKNSSHTLLQVLSPRTDIGVYGSGKNRRKKVKELIEKEKEKDLDLEPLSDLEEGLEETRDTAMVVAVFKEREQKEIEAMHSLRAANLAKMTMVDRIEEVKFCICRKTASGFMLQCELCKDWFHNSCVPLPKSSSQKKGSSWQAKEVKFLCPLCMRSRRPRLETILSLLVSLQKLPVRLPEGEALQCLTERAMSWQDRARQALATDELSSALAKLSVLSQRMVEQAAREKTEKIISAELQKAAANPDLQGHLPSFQQSAFNRVVSSVSSSPRQTMDYDDEETDSDEDIRETYGYDMKDTASVKSSSSLEPNLFCDEEIPIKSEEVVTHMWTAPSFCAEHAYSSASKSCSQGSSTPRKQPRKSPLVPRSLEPPVLELSPGAKAQLEELMMVGDLLEVSLDETQHIWRILQATHPPSEDRFLHIMEDDSMEEKPLKVKGKDSSEKKRKRKLEKVEQLFGEGKQKSKELKKMDKPRKKKLKLGADKSKELNKLAKKLAKEEERKKKKEKAAAAKVELVKESTEKKREKKVLDIPSKYDWSGAEESDDENAVCAAQNCQRPCKDKGVVFVTEEEKNKKY

SEQ ID NO: 16367 - protein, 74 aa, Artificial Sequence
  Synthetic polypeptide
QDGRIGTAPVYSSQRERRRRRVISAFPTEIVASKGGFEMVTKEKKWSKVGSRLGYLPGKGTGSLLKSHYERILY

SEQ ID NO: 16368 - protein, 48 aa, Artificial Sequence
  Synthetic polypeptide
QDGRIGTAPVYSSQRERRRRRVISAFPTEIVASKGGFEMVTKEKKWSK

SEQ ID NO: 16369 - protein, 26 aa, Artificial Sequence
  Synthetic polypeptide
FLHFQLRLLPAKEVLKWSPKRRNGLK

SEQ ID NO: 16370 - protein, 22 aa, Artificial Sequence
  Synthetic polypeptide
RRRMRMRRSMMKMLRGLRGGPG

SEQ ID NO: 16371 - protein, 92 aa, Artificial Sequence
  Synthetic polypeptide
RCSEGYVEGLDDEEEDEDEEEYDEDAQVVEDEEDEDEEEEGEEEDVSGEEEEDEEGYNDGEVDDEEDEEELGEEERGQKRKREPEDEGEDDD

SEQ ID NO: 16372 - protein, 38 aa, Artificial Sequence
  Synthetic polypeptide
EEDEDEEEYDEDAQRATWRAWMMRRRMRMRRSMMKMLR

SEQ ID NO: 16373 - protein, 20 aa, Artificial Sequence
  Synthetic polypeptide
RCSEGYVEGLDDEEEDEDGG

SEQ ID NO: 16374 - protein, 31 aa, Artificial Sequence
  Synthetic polypeptide
EEDEDEEEYDEDAQRATWRAWMMRRRMRMVG

SEQ ID NO: 16375 - protein, 130 aa, Artificial Sequence
  Synthetic polypeptide
GGGAKMAEWEQLWSTAPSMSDTEDSTSIEETMRPQEKQVTITETLWDQVLTVFKDIQKELQEDARIRGMSNCSMTPMTSAPRTGSIRPPDSLMTPKLRRLQFSSGEQPSGGRIHNLKTQLFSQSAYYPGP

SEQ ID NO: 16376 - protein, 8 aa, Artificial Sequence
  Synthetic polypeptide
AIQKTAHP

SEQ ID NO: 16377 - protein, 41 aa, Artificial Sequence
  Synthetic polypeptide
WRSQDGRMGTALVYSSQHERYRRQHIHRRDNETTGKTGNHH

SEQ ID NO: 16378 - protein, 104 aa, Artificial Sequence
  Synthetic polypeptide
GGGAKMAEWEQLWSTAPSMSDTEDSTSIEETMRPQEKQVTITETLWDQVLTVFKDIQKESTTDLSVQAAKARRCLTVPLRKCDNTNRKLYLLELVSARILYVVV

SEQ ID NO: 16379 - protein, 19 aa, Artificial Sequence
  Synthetic polypeptide
TPVLLHLSLDTLLDGRRAG

SEQ ID NO: 16380 - protein, 826 aa, Artificial Sequence
  Synthetic polypeptide
ALILFLMAGELADKKDRDASPSKEERKRSRTPDRERDRDRDRKSSPSKDRKRHRSRDRRRGGSRSRSRSRSKSAERERRHKERERDKERDRNKKDRDRDKDGHRRDKDRKRSSLSPGRGKDFKSRKDRDSKKDEEDEHGDKKPKAQPLSLEELLAKKKAEEEAEAKPKFLSKAEREAEALKRRQQEVEERQRMLEEERKKRKQFQDLGRKMLEDPQERERRERRERMERETNGNEDEEGRQKIREEKDKSKELHAIKERYLGGIKKRRRTRHLNDRKFVFEWDASEDTSIDYNPLYKERHQVQLLGRGFIAGIDLKQQKREQSRFYGDLMEKRRTLEEKEQEEARLRKLRKKEAKQRWDDRHWSQKKLDEMTDRDWRIFREDYSITTKGGKIPNPIRSWKDSSLPPHILEVIDKCGYKEPTPIQRQAIPIGLQNRDIIGVAETGSGKTAAFLIPLLVWITTLPKIDRIEESDQGPYAIILAPTRELAQQIEEETIKFGKPLGIRTVAVIGGISREDQGFRLRMGCEIVIATPGRLIDVLENRYLVLSRCTYVVLDEADRMIDMGFEPDVQKILEHMPVSNQKPDTDEAEDPEKMLANFESGKHKYRQTVMFTATMPPAVERLARSYLRRPAVVYIGSAGKPHERVEQKVFLMSESEKRKKLLAILEQGFDPPIIIFVNQKKGCDVLAKSLEKMGYNACTLHGGKGQEQREFALSNLKAGAKDILVATDVAGRGIDIQDVSMVVNYDMAKNIEDYIHRIGRTGRAGKSGVAITFLTKEDSAVFYELKQAILESPVSSCPPELANHPDAQHKPGTILTKKRREETIFA

SEQ ID NO: 16381 - protein, 114 aa, Artificial Sequence
  Synthetic polypeptide
ALILFLMAGELADKKDRDASPSKEERKRSRTPDRERDRDRDRKSSPSKDRKRHRSRDRRRGGSRSRSRSRSKSAERERRHKERERDKERDRNKKDRDRDKDGHRRDKDRKRSRH

SEQ ID NO: 16382 - protein, 188 aa, Artificial Sequence
  Synthetic polypeptide
ALILFLMAGELADKKDRDASPSKEERKRSRTPDRERDRDRDRKSSPSKDRKRHRSRDRRRGGSRSRSRSRSKSAERERRHKERERDKERDRNKKDRDRDKDGHRRDKDRKRSSLSPGRGKDFKSRKDRDSKKDEEDEHGDKKPKAQPLSLEELLAKKKAEEEAEAKPKFLSKAEREAEALKRRQQEVE

SEQ ID NO: 16383 - protein, 144 aa, Artificial Sequence
  Synthetic polypeptide
ALILFLMAGELADKKDRDASPSKEERKRSRTPDRERDRDRDRKSSPSKDRKRHRSRDRRRGGSRSRSRSRSKSAERERRHKERERDKERDRNKKDRDRDKDGHRRDKDRKRSSLSPGRGKDFKSRKDRDSKKDEEDEHGDKKPK

SEQ ID NO: 16384 - protein, 83 aa, Artificial Sequence
  Synthetic polypeptide
EDGHDLGSLQPPPPGFKQFSCLSLPSVHFYKPSSEPLGSPRSSKREPRSLSGTSLTDMSKLSVTGGNPEVLTTGFVEGSRVRS

SEQ ID NO: 16385 - protein, 91 aa, Artificial Sequence
  Synthetic polypeptide
GAPLPGRHPVWEVRSVSAQPPRLRSEETLRPAAAPSEKMGTISAHCNLRLPGSSNSPVSASPQCTFINRPQNPWEAQDRQKENQEVYPAPV

SEQ ID NO: 16386 - protein, 43 aa, Artificial Sequence
  Synthetic polypeptide
EVRRPSARQLPRLRRWARSRLTATSASRVQAILLSQPPLSALL

SEQ ID NO: 16387 - protein, 24 aa, Artificial Sequence
  Synthetic polypeptide
VIHQDSFLICSPIPYWPREELLRT

SEQ ID NO: 16388 - protein, 94 aa, Artificial Sequence
  Synthetic polypeptide
DSLGDSSGFIFDLQSNTVLAQGGAFENMKEKINAVRAIVPNKSNNEIILVLQHFDNCVDKTVQAFMEGSASEVLKEWTVTGKKKNKKKKNKPKP

SEQ ID NO: 16389 - protein, 62 aa, Artificial Sequence
  Synthetic polypeptide
DSLGDSSGFIFDLQSNTVLAQGGAFENMKEKINAVRAIVPNKSNNEIILVLQHFDNCVDKTV

SEQ ID NO: 16390 - protein, 30 aa, Artificial Sequence
  Synthetic polypeptide
DSLGDSSGFIFDLQSNTVLAQGGAFENMKE

SEQ ID NO: 16391 - protein, 291 aa, Artificial Sequence
  Synthetic polypeptide
DSLGDSSGFIFDLQSNTVLAQGGAFENMKEKINAVRAIVPNKSNNEIILVLQHFDNCVDKTVQAFMEGSASEVLKEWTVTGKKKNKKKKNKPKPAAEPSNGIPDSSKSVSIQEEQSAPSSEKGGMNGYHVNGAINDTESVDSLSEGLETLSIDARELEDPESAMLDTLDRTGSMLQNGVSDFETKSLTMHSIHNSQQPRNAAKSLSRPTTETQFSNMGMEDVPLATSKKLSSNIEKSVKDLQRCTVSLARYRVVVKEEMDASIKKMKQAFAELESWYSNAARVLGAKYCQV

SEQ ID NO: 16392 - protein, 63 aa, Artificial Sequence
  Synthetic polypeptide
DSLGDSSGFIFDLQSNTVLAQGGAFENMKEKINAVRAIVPNKSNNEIILVLQHFDNCVDKTVQ

SEQ ID NO: 16393 - protein, 32 aa, Artificial Sequence
  Synthetic polypeptide
DSLGDSSGFIFDLQSNTVLAQGGAFENMKEKV

SEQ ID NO: 16394 - protein, 541 aa, Artificial Sequence
  Synthetic polypeptide
DSLGDSSGFIFDLQSNTVLAQGGAFENMKEKINAVRAIVPNKSNNEIILVLQHFDNCVDKTVQAFMEGSASEVLKEWTVTGKKKNKKKKNKPKPAAEPSNGIPDSSKSVSIQEEQSAPSSEKGGMNGYHVNGAINDTESVDSLSEGLETLSIDARELEDPESAMLDTLDRTGSMLQNGVSDFETKSLTMHSIHNSQQPRNAAKSLSRPTTETQFSNMGMEDVPLATSKKLSSNIEKSVKDLQRCTVSLARYRVVVKEEMDASIKKMKQAFAELESCLMDREVALLAEMDKVKAEAMEILLSRQKKAELLKKMTHVAVQMSEQQLVELRADIKHFVSERKYDEDLGRVARFTCDVETLKKSIDSFGQVSHPKNSYSTRSRCSSVTSVSLSSPSDASAASSSTCASPPSLTSANKKNFAPGETPAAIANSSGQPYQPLREVLPGNRRGGQGYRPQGQKSNDPMNQGRHDSMGRYRNSSWYSSGSRYQSAPSQAPGNTIERGQTHSAGTNGTGVSMEPSPPTPSFKKGLPQRKPRTSQTEAVNS

SEQ ID NO: 16395 - protein, 70 aa, Artificial Sequence
  Synthetic polypeptide
DSLGDSSGFIFDLQSNTVLAQGGAFENMKEKINAVRAIVPNKSNNEIILVLQHFDNCVDKTVQAFMEGSA

SEQ ID NO: 16396 - protein, 29 aa, Artificial Sequence
  Synthetic polypeptide
DSLGDSSGFIFDLQSNTVLAQGGAFENMK

SEQ ID NO: 16397 - protein, 3 aa, Artificial Sequence
  Synthetic polypeptide
VIH

SEQ ID NO: 16398 - protein, 6 aa, Artificial Sequence
  Synthetic polypeptide
DSLGDS

SEQ ID NO: 16399 - protein, 59 aa, Artificial Sequence
  Synthetic polypeptide
DSLGDSSGFIFDLQSNTVLAQGGAFENMKEKAGVQWRDLSSLHTSASRVQVILLPQPPV

SEQ ID NO: 16400 - protein, 36 aa, Artificial Sequence
  Synthetic polypeptide
RGSISSKNSKEKISQCLIQRTAIRPDPDVAQLHLCP

SEQ ID NO: 16401 - protein, 53 aa, Artificial Sequence
  Synthetic polypeptide
SQQLERLRPEDHFSPGVQDQPGQHSEVPSLQKIQKKKLASVSSKEQLFDQIPM

SEQ ID NO: 16402 - protein, 176 aa, Artificial Sequence
  Synthetic polypeptide
PVSHPKNSYSTRSRCSSVTSVSLSSPSDASAASSSTCASPPSLTSANKKNFAPGETPAAIANSSGQPYQPLREVLPGNRRGGQGYRPQGQKSNDPMNQGRHDSMGRYRNSSWYSSGSRYQSAPSQAPGNTIERGQTHSAGTNGTGVSMEPSPPTPSFKKGLPQRKPRTSQTEAVNS

SEQ ID NO: 16403 - protein, 22 aa, Artificial Sequence
  Synthetic polypeptide
KELVCIMLFYTRVETAARTLEP

SEQ ID NO: 16404 - protein, 19 aa, Artificial Sequence
  Synthetic polypeptide
CYSIQEWRLLHGLWNHEHI

SEQ ID NO: 16405 - protein, 320 aa, Artificial Sequence
  Synthetic polypeptide
SMRKLITGLIFLKIWTCTVRTSTDLPQTEDCSQCIHQVTEVGQKVATVLLFYGYYRCTGTLKRTCLYNAILYKSGDCCTDSGTMNIFDRKINFDALLKFSHITPSTQQHLKKVYASFALCMFVAAAGAYVHMVTHFIQAGLLSALGSLILMIWLMATPHSHETEQKRLGLLAGFAFLTGVGLGPALEFCIAVNPSILPTAFMGTAMIFTCFTLSALYARRRSYLFLGGILMSALSLLLLSSLGNVFFGSIWLFQANLYVGLVVMCGFVLFDTQLIIEKAEHGDQDYIWHCIDLFLDFITVFRKLMMILAMNEKDKKKEKK

SEQ ID NO: 16406 - protein, 78 aa, Artificial Sequence
  Synthetic polypeptide
WFYKELFPLLLCTSCCCHVKDMFASPSAMIVSFLSPPQPCGTQSLEEDCVSILQLEKPRSRKDPQVVGRINLQQLLTI

SEQ ID NO: 16407 - protein, 35 aa, Artificial Sequence
  Synthetic polypeptide
VLPSHAELSPWRRIVCPFYSWRSRDPERTPKLWAE

SEQ ID NO: 16408 - protein, 74 aa, Artificial Sequence
  Synthetic polypeptide
GAFPPFALHFLLLPCEGHVCFPFCHDCKFPESSPAMRNSVPGGGLCVHFTAGEAEIQKGPPSCGQNKSTAAFNY

SEQ ID NO: 16409 - protein, 296 aa, Artificial Sequence
  Synthetic polypeptide
SVYGLVSPMKLFIAKPCALCIGIEDSGPYQAQPNAILEKVFISITKYPDKKRLEGLSKQLDWNVRKIQCWFRHRRNQDKPPTLTKFCESMWRFTFYLCIFCYGIRFLWSSPWFWDIRQCWHNYPFQPLSSGLYHYYIMELAFYWSLMFSQFTDIKRKDFLIMFVHHLVTIGLISFSYINNMVRVGTLIMCLHDVSDFLLEAAKLANYAKYQRLCDTLFVIFSAVFMVTRLGIYPFCFSVLFYSTFANRTQEPYCPAFTLACADLLWTLIGPLLPQTVFLARSDPDSEYPAWLASQD

SEQ ID NO: 16410 - protein, 150 aa, Artificial Sequence
  Synthetic polypeptide
NYLLPNPVHSVLASRTVVLIRPNPMPSLKRCSYLLPSILIRKGWRACQSSWIGMSEKSNAGFAIGGIRTSPQRLLNSVKACGDSHFIYVYSAMELDFSGRHLGSGTSDSAGITIHFSLFQVGFITIISWNWPSIGPLCFLSLQTLKERTS

SEQ ID NO: 16411 - protein, 36 aa, Artificial Sequence
  Synthetic polypeptide
CLWTCLPHETIYCQTLCTLYWHRGQWSLSGPTQCHP

SEQ ID NO: 16412 - protein, 140 aa, Artificial Sequence
  Synthetic polypeptide
SVYGLVSPMKLFIAKPCALCIGIEDSGPYQAQPNAILEKVFISITKYPDKKRLEGLSKQLDWNVRKIQCWFRHRRNQDKPPTLTKFCESIHLGSGTSDSAGITIHFSLFQVGFITIISWNWPSIGPLCFLSLQTLKERTS

SEQ ID NO: 16413 - protein, 92 aa, Artificial Sequence
  Synthetic polypeptide
NYLLPNPVHSVLASRTVVLIRPNPMPSLKRCSYLLPSILIRKGWRACQSSWIGMSEKSNAGFAIGGIRTSPQRLLNSVKAFTLVLGHPTVLA

SEQ ID NO: 16414 - protein, 337 aa, Artificial Sequence
  Synthetic polypeptide
SVYGLVSPMKLFIAKPCALCIGIEDSGPYQAQPNAILEKVFISITKYPDKKRLEGLSKQLDWNVRKIQCWFRHRRNQDKPPTLTKFCESMWRFTFYLCIFCYGIRFLWSSPWFWDIRQCWHNYPFQPLSSGLYHYYIMELAFYWSLMFSQFTDIKRKDFLIMFVHHLVTIGLISFSYINNMVRVGTLIMCLHDVSDFLLEAAKLANYAKYQRLCDTLFVIFSAVFMVTRLGIYPFWILNTTLFESWEIIGPYASWWLLNGLLLTLQLLHVIWSYLIARIALKALIRGKVSKDDRSDVESSSEEEDVTTCTKSPCDSSSSNGANRVNGHMGGSYWAEE

SEQ ID NO: 16415 - protein, 205 aa, Artificial Sequence
  Synthetic polypeptide
SVYGLVSPMKLFIAKPCALCIGIEDSGPYQAQPNAILEKVFISITKYPDKKRLEGLSKQLDWNVRKIQCWFRHRRNQDKPPTLTKFCESMWRFTFYLCIFCYGIRFLWSSPWFWDIRQCWHNYPFQDFLIMFVHHLVTIGLISFSYINNMVRVGTLIMCLHDVSDFLLEAAKLANYAKYQRLCDTLFVIFSAVFMVTRLGIYPFW

SEQ ID NO: 16416 - protein, 119 aa, Artificial Sequence
  Synthetic polypeptide
NYLLPNPVHSVLASRTVVLIRPNPMPSLKRCSYLLPSILIRKGWRACQSSWIGMSEKSNAGFAIGGIRTSPQRLLNSVKACGDSHFIYVYSAMELDFSGRHLGSGTSDSAGITIHFRTS

SEQ ID NO: 16417 - protein, 19 aa, Artificial Sequence
  Synthetic polypeptide
DRVPWLNTYNPSTWDGRLR

SEQ ID NO: 16418 - protein, 655 aa, Artificial Sequence
  Synthetic polypeptide
SQHLGWEAKVASKGTGLNPNAKVWQEIAPGNTDATPVTHGTESSWHEIAATSGAHPEGNAELSEDICKEYEVMYSSSCETTRNTTGIEESTDGMILGPEDLSYQIYDVSGESNSAVSTEDLKECLKKQLEFCFSRENLSKDLYLISQMDSDQFIPIWTVANMEEIKKLTTDPDLILEVLRSSPMVQVDEKGEKVRPSHKRCIVILREIPETTPIEEVKGLFKSENCPKVISCEFAHNSNWYITFQSDTDAQQAFKYLREEVKTFQGKPIMARIKAINTFFAKNGYRLMDSSIYSHPIQTQAQYASPVFMQPVYNPHQQYSVYSIVPQSWSPNPTPYFETPLAPFPNGSFVNGFNSPGSYKTNAAAMNMGRPFQKNRRTLFRGRRRREDDRISRPHPSTAESKAPTPKFDLLASNFPPLPGSSSRMPGELVLENRMSDVVKGVYKEKDNEELTISCPVPADEQTECTSAQQLNMSTSSPCAAELTALSTTQQEKDLIEDSSVQKDGLNQTTIPVSPPSTTKPSRASTASPCNNNINAATAVALQEPRKLSYAEVCQKPPKEPSSVLVQPLRELRSNVVSPTKNEDNGAPENSVEKPHEKPEARASKDYSGFRGNIIPRGAAGKIREQRRQFSHRAIPQGVTRRNGKEQYVPPRSPK

SEQ ID NO: 16419 - protein, 732 aa, Artificial Sequence
  Synthetic polypeptide
SQHLGWEAKVASKGTGLNPNAKVWQEIAPGNTDATPVTHGTESSWHEIAATSGAHPEVSVFNTGNAELSEDICKEYEVMYSSSCETTRNTTGIEESTDGMILGPEDLSYQIYDVSGESNSAVSTEDLKECLKKQLEFCFSRENLSKDLYLISQMDSDQFIPIWTVANMEEIKKLTTDPDLILEVLRSSPMVQVDEKGEKVRPSHKRCIVILREIPETTPIEEVKGLFKSENCPKVISCEFAHNSNWYITFQSDTDAQQAFKYLREEVKTFQGKPIMARIKAINTFFAKNGYRLMDSSIYSHPIQTQAQYASPVFMQPVYNPHQQYSVYSIVPQSWSPNPTPYFETPLAPFPNGSFVNGFNSPGSYKTNAAAMNMGRPFQKNRVKPQFRSSGGSEHSTEGSVSLGDGQLNRYSSRNFPAERHNPTVTGHQEQTYLQKETSTLQVEQNGDYGRGRRTLFRGRRRREDDRISRPHPSTAESKAPTPKFDLLASNFPPLPGSSSRMPGELVLENRMSDVVKGVYKEKDNEELTISCPVPADEQTECTSAQQLNMSTSSPCAAELTALSTTQQEKDLIEDSSVQKDGLNQTTIPVSPPSTTKPSRASTASPCNNNINAATAVALQEPRKLSYAEVCQKPPKEPSSVLVQPLRELRSNVVSPTKNEDNGAPENSVEKPHEKPEARASKDYSGFRGNIIPRGAAGKIREQRRQFSHRAIPQGVTRRNGKEQYVPPRSPK

SEQ ID NO: 16420 - protein, 109 aa, Artificial Sequence
  Synthetic polypeptide
SQHLGWEAKVASKGTGLNPNAKVWQEIAPGNTDATPVTHGTESSWHEIAATSGAHPEGNAELSEDICKEYEVMYSSSCETTRNTTGIEESTDGMILGPEDLSYQIYDVS

SEQ ID NO: 16421 - protein, 726 aa, Artificial Sequence
  Synthetic polypeptide
SQHLGWEAKVASKGTGLNPNAKVWQEIAPGNTDATPVTHGTESSWHEIAATSGAHPEGNAELSEDICKEYEVMYSSSCETTRNTTGIEESTDGMILGPEDLSYQIYDVSGESNSAVSTEDLKECLKKQLEFCFSRENLSKDLYLISQMDSDQFIPIWTVANMEEIKKLTTDPDLILEVLRSSPMVQVDEKGEKVRPSHKRCIVILREIPETTPIEEVKGLFKSENCPKVISCEFAHNSNWYITFQSDTDAQQAFKYLREEVKTFQGKPIMARIKAINTFFAKNGYRLMDSSIYSHPIQTQAQYASPVFMQPVYNPHQQYSVYSIVPQSWSPNPTPYFETPLAPFPNGSFVNGFNSPGSYKTNAAAMNMGRPFQKNRVKPQFRSSGGSEHSTEGSVSLGDGQLNRYSSRNFPAERHNPTVTGHQEQTYLQKETSTLQVEQNGDYGRGRRTLFRGRRRREDDRISRPHPSTAESKAPTPKFDLLASNFPPLPGSSSRMPGELVLENRMSDVVKGVYKEKDNEELTISCPVPADEQTECTSAQQLNMSTSSPCAAELTALSTTQQEKDLIEDSSVQKDGLNQTTIPVSPPSTTKPSRASTASPCNNNINAATAVALQEPRKLSYAEVCQKPPKEPSSVLVQPLRELRSNVVSPTKNEDNGAPENSVEKPHEKPEARASKDYSGFRGNIIPRGAAGKIREQRRQFSHRAIPQGVTRRNGKEQYVPPRSPK

SEQ ID NO: 16422 - protein, 447 aa, Artificial Sequence
  Synthetic polypeptide
SQHLGWEAKVASKGTGLNPNAKVWQEIAPGNTDATPVTHGTESSWHEIAATSGAHPEGNAELSEDICKEYEVMYSSSCETTRNTTGIEESTDGMILGPEDLSYQIYDVSGESNSAVSTEDLKECLKKQLEFCFSRENLSKDLYLISQMDSDQFIPIWTVANMEEIKKLTTDPDLILEVLRSSPMVQVDEKGEKVRPSHKRCIVILREIPETTPIEEVKGLFKSENCPKVISCEFAHNSNWYITFQSDTDAQQAFKYLREEVKTFQGKPIMARIKAINTFFAKNGYRLMDSSIYSHPIQTQAQYASPVFMQPVYNPHQQYSVYSIVPQSWSPNPTPYFETPLAPFPNGSFVNGFNSPGSYKTNAAAMNMGRPFQKNRVKPQFRSSGGSEHSTEGSVSLGDGQLNRYSSRNFPAERHNPTVTGHQEQTYLQKETSTLQVEQNGDYGRGR

SEQ ID NO: 16423 - protein, 171 aa, Artificial Sequence
  Synthetic polypeptide
SQHLGWEAKVASKGTGLNPNAKVWQEIAPGNTDATPVTHGTESSWHEIAATSGAHPEGNAELSEDICKEYEVMYSSSCETTRNTTGIEESTDGMILGPEDLSYQIYDVSESNSAVSTEDLKECLKKQLEFCFSRENLSKDLYLISQMDSDQFIPIWTVANMEEIKKLTTDP

SEQ ID NO: 16424 - protein, 655 aa, Artificial Sequence
  Synthetic polypeptide
SQHLGWEAKVASKGTGLNPNAKVWQEIAPGNTDATPVTHGTESSWHEIAATSGAHPEGNAELSEDICKEYEVMYSSSCETTRNTTGIEESTDGMILGPEDLSYQIYDVSGESNSAVSTEDLKECLKKQLEFCFSRENLSKDLYLISQMDSDQFIPIWTVANMEEIKKLTTDPDLILEVLRSSPMVQVDEKGEKVRPSHKRCIVILREIPETTPIEEVKGLFKSENCPKVISCEFAHNSNWYITFQSDTDAQQAFKYLREEVKTFQGKPIMAPFPNGSFVNGFNSPGSYKTNAAAMNMGRPFQKNRVKPQFRSSGGSEHSTEGSVSLGDGQLNRYSSRNFPAERHNPTVTGHQEQTYLQKETSTLQVEQNGDYGRGRRTLFRGRRRREDDRISRPHPSTAESKAPTPKFDLLASNFPPLPGSSSRMPGELVLENRMSDVVKGVYKEKDNEELTISCPVPADEQTECTSAQQLNMSTSSPCAAELTALSTTQQEKDLIEDSSVQKDGLNQTTIPVSPPSTTKPSRASTASPCNNNINAATAVALQEPRKLSYAEVCQKPPKEPSSVLVQPLRELRSNVVSPTKNEDNGAPENSVEKPHEKPEARASKDYSGFRGNIIPRGAAGKIREQRRQFSHRAIPQGVTRRNGKEQYVPPRSPK

SEQ ID NO: 16425 - protein, 194 aa, Artificial Sequence
  Synthetic polypeptide
SQHLGWEAKVASKGTGLNPNAKVWQEIAPGNTDATPVTHGTESSWHEIAATSGAHPEGNAELSEDICKEYEVMYSSSCETTRNTTGIEESTDGMILGPEDLSYQIYDVSESNSAVSTEDLKECLKKQLEFCFSRENLSKDLYLISQMDSDQFIPIWTVANMEEIKKLTTDPDLILEVLRSSPMVQVDEKGEKVR

SEQ ID NO: 16426 - protein, 34 aa, Artificial Sequence
  Synthetic polypeptide
KNTKISWAWWQAPVIPATWEPEENSLQRSKTTRR

SEQ ID NO: 16427 - protein, 287 aa, Artificial Sequence
  Synthetic polypeptide
SQLLGSLRRTLFRGRRRREDDRISRPHPSTAESKAPTPKFDLLASNFPPLPGSSSRMPGELVLENRMSDVVKGVYKEKDNEELTISCPVPADEQTECTSAQQLNMSTSSPCAAELTALSTTQQEKDLIEDSSVQKDGLNQTTIPVSPPSTTKPSRASTASPCNNNINAATAVALQEPRKLSYAEVCQKPPKEPSSVLVQPLRELRSNVVSPTKNEDNGAPENSVEKPHEKPEARASKDYSGFRGNIIPRGAAGKIREQRRQFSHRAIPQGVTRRNGKEQYVPPRSPK

SEQ ID NO: 16428 - protein, 267 aa, Artificial Sequence
  Synthetic polypeptide
SQLLGSLRRTLFRGRRRREDDRISRPHPSTAESKAPTPKFDLLASNFPPLPGSSSRMPGELVLENRMSDVVKGVYKEKDNEELTISCPVPADEQTECTSAQQLNMSTSSPCAAELTALSTTQQEKDLIEDSSVQKDGLNQTTIPVSPPSTTKPSREPRKLSYAEVCQKPPKEPSSVLVQPLRELRSNVVSPTKNEDNGAPENSVEKPHEKPEARASKDYSGFRGNIIPRGAAGKIREQRRQFSHRAIPQGVTRRNGKEQYVPPRSPK

SEQ ID NO: 16429 - protein, 1154 aa, Artificial Sequence
  Synthetic polypeptide
GQAQWLTPVIPALWEAEDAGGQQIGFLLGSCGIALALTSEVCLKGLPKTQNGEIVQFKGWPRLKWVVTDSKYLSKPPKDWQPHISPAGTEPAYIEYKTSKEGSVMGVTVSRLAMLSHCQALSQACNYSEGETIVNVLDFKKDAGLWHGMFANVMNKMHTISVPYSVMKTCPLSWVQRVHAHKAKVALVKCRDLHWAMMAHRDQRDVSLSSLRMLIVTDGANPWSVSSCDAFLSLFQSHGLKPEAICPCATSAEAMTVAIRRPGVPGAPLPGRAILSMNGLSYGVIRVNTEDKNSALTVQDVGHVMPGGMMCIVKPDGPPQLCKTDEIGEICVSSRTGGMMYFGLAGVTKNTFEVIPVNSAGSPVGDVPFIRSGLLGFVGPGSLVFVVGKMDGLLMVSGRRHNADDIVATGLAVESIKTVYRGRIAVFSVSVFYDERIVVVAEQRPDASEEDSFQWMSRVLQAIDSIHQVGVYCLALVPANTLPKTPLGGIHISQTKQLFLEGSLHPCNILMCPHTCVTNLPKPRQKQPGVGPASVMVGNLVAGKRIAQAAGRDLGQIEENDLVRKHQFLAEILQWRAQATPDHVLFMLLNAKGTTVCTASCLQLHKRAERIASVLGDKGHLNAGDNVVLLYPPGIELIAAFYGCLYAGCIPVTVRPPHAQNLTATLPTVRMIVDVSKAACILTSQTLMRLLRSREAAAAVDVKTWPTIIDTDDLPRKRLPQLYKPPTPEMLAYLDFSVSTTGMLTGVKMSHSAVNALCRAIKLQCELYSSRQIAICLDPYCGLGFALWCLCSVYSGHQSVLIPPMELENNLFLWLSTVNQYKIRDTFCSYSVMELCTKGLGNQVEVLKTRGINLSCVRTCVVVAEERPRVALQQSFSKLFKDIGLSPRAVSTTFGSRVNVAICLQGTSGPDPTTVYVDLKSLRHDRVRLVERGAPQSLLLSESGKILPGVKVVIVNPETKGPVGDSHLGEIWVNSPHTASGYYTIYDSETLQADHFNTRLSFGDAAQTLWARTGYLGFVRRTELTAATGERHDALYVVGALDETLELRGLRYHPIDIETSVSRIHRSIAECAVFTWTNLLVVVVELCGSEQEALDLVPLVTNVVLEEHYLIVGVVVVVDPGVIPINSRGEKQRMHLRDSFLADQLDPIYVAYNM

SEQ ID NO: 16430 - protein, 18 aa, Artificial Sequence
  Synthetic polypeptide
SQHFGRPRMLEVSRLASC

SEQ ID NO: 16431 - protein, 38 aa, Artificial Sequence
  Synthetic polypeptide
PGTMAHTCNPSTLGGRGCWRSADWLLARKLWYCLSSYQ

SEQ ID NO: 16432 - protein, 26 aa, Artificial Sequence
  Synthetic polypeptide
SNLGDRGCSEPRLHHCTPAWVTEGKQ

SEQ ID NO: 16433 - protein, 11 aa, Artificial Sequence
  Synthetic polypeptide
QRGNNSKCLRL

SEQ ID NO: 16434 - protein, 1038 aa, Artificial Sequence
  Synthetic polypeptide
AEIASLHSSLGDRGETIVNVLDFKKDAGLWHGMFANVMNKMHTISVPYSVMKTCPLSWVQRVHAHKAKVALVKCRDLHWAMMAHRDQRDVSLSSLRMLIVTDGANPWSVSSCDAFLSLFQSHGLKPEAICPCATSAEAMTVAIRRPGVPGAPLPGRAILSMNGLSYGVIRVNTEDKNSALTVQDVGHVMPGGMMCIVKPDGPPQLCKTDEIGEICVSSRTGGMMYFGLAGVTKNTFEVIPVNSAGSPVGDVPFIRSGLLGFVGPGSLVFVVGKMDGLLMVSGRRHNADDIVATGLAVESIKTVYRGRIAVFSVSVFYDERIVVVAEQRPDASEEDSFQWMSRVLQAIDSIHQVGVYCLALVPANTLPKTPLGGIHISQTKQLFLEGSLHPCNILMCPHTCVTNLPKPRQKQPGVGPASVMVGNLVAGKRIAQAAGRDLGQIEENDLVRKHQFLAEILQWRAQATPDHVLFMLLNAKGTTVCTASCLQLHKRAERIASVLGDKGHLNAGDNVVLLYPPGIELIAAFYGCLYAGCIPVTVRPPHAQNLTATLPTVRMIVDVSKAACILTSQTLMRLLRSREAAAAVDVKTWPTIIDTDDLPRKRLPQLYKPPTPEMLAYLDFSVSTTGMLTGVKMSHSAVNALCRAIKLQCELYSSRQIAICLDPYCGLGFALWCLCSVYSGHQSVLIPPMELENNLFLWLSTVNQYKIRDTFCSYSVMELCTKGLGNQVEVLKTRGINLSCVRTCVVVAEERPRVALQQSFSKLFKDIGLSPRAVSTTFGSRVNVAICLQGTSGPDPTTVYVDLKSLRHDRVRLVERGAPQSLLLSESGKILPGVKVVIVNPETKGPVGDSHLGEIWVNSPHTASGYYTIYDSETLQADHFNTRLSFGDAAQTLWARTGYLGFVRRTELTAATGERHDALYVVGALDETLELRGLRYHPIDIETSVSRIHRSIAECAVFTWTNLLVVVVELCGSEQEALDLVPLVTNVVLEEHYLIVGVVVVVDPGVIPINSRGEKQRMHLRDSFLADQLDPIYVAYNM

SEQ ID NO: 16435 - protein, 5 aa, Artificial Sequence
  Synthetic polypeptide
QRGNN

SEQ ID NO: 16436 - protein, 17 aa, Artificial Sequence
  Synthetic polypeptide
AEIASLHSSLGDRGETI

SEQ ID NO: 16437 - protein, 32 aa, Artificial Sequence
  Synthetic polypeptide
AMIIPWHSSLEDRLRPCLKNKRTDDHPNFTAH

SEQ ID NO: 16438 - protein, 92 aa, Artificial Sequence
  Synthetic polypeptide
GPVSKIKELMTTPILQPTEALSPEDGASTALIAVVITVVFLTLLSVVILIFFYLYKNKGSYVTYEPTEGEPSAIVQMESDLAKGSEKEEYFI

SEQ ID NO: 16439 - protein, 45 aa, Artificial Sequence
  Synthetic polypeptide
GPVSKIKELMTTPILQPTEALSPEDGASTALIAVVITVVFLTLLS

SEQ ID NO: 16440 - protein, 37 aa, Artificial Sequence
  Synthetic polypeptide
GPVSKIKELMTTPILQPTEALSPEDGASTALIAGNRL

SEQ ID NO: 16441 - protein, 43 aa, Artificial Sequence
  Synthetic polypeptide
GRVQWLTPIIPALWEAEAGRSPEVRSSRPAWPTWQKATSCTRT

SEQ ID NO: 16442 - protein, 38 aa, Artificial Sequence
  Synthetic polypeptide
SQHFGRPRRADHLRSGVRDQPGQHGRRPQAVQGPEELP

SEQ ID NO: 16443 - protein, 515 aa, Artificial Sequence
  Synthetic polypeptide
GQEFETSLANMAEGHKLYKDLKNFLSAVKVMHESSKRVSETLQEIYSSEWDGHEELKAIVWNNDLLWEDYEEKLADQAVRTMEIYVAQFSEIKERIAKRGRKLVDYDSARHHLEAVQNAKKKDEAKTAKAEEEFNKAQTVFEDLNQELLEELPILYNSRIGCYVTIFQNISNLRDVFYREMSKLNHNLYEVMSKLEKQHSNKVFVVKGLSSSSRRSLVISPPVRTATVSSPLTSPTSPSTLSLKSESESVSATEDLAPDAAQGEDNSEIKELLEEEEIEKEGSEASSSEEDEPLPACNGPAQAQPSPTTERAKSQEEVLPSSTTPSPGGALSPSGQPSSSATEVVLRTRTASEGSEQPKKRASIQRTSAPPSRPPPPRATASPRPSSGNIPSSPTASGGGSPTSPRASLGTGTASPRTSLEVSPNPEPPEKPVRTPEAKENENIHNQNPEELCTSPTLMTSQTSFKSPWYQKTTTSQHLNLKKRYPQVKIHNSEEKLPRLLLPQTSPEKLFNQRV

SEQ ID NO: 16444 - protein, 490 aa, Artificial Sequence
  Synthetic polypeptide
GQEFETSLANMAEGHKLYKDLKNFLSAVKVMHESSKRVSETLQEIYSSEWDGHEELKAIVWERIAKRGRKLVDYDSARHHLEAVQNAKKKDEAKTAKAEEEFNKAQTVFEDLNQELLEELPILYNSRIGCYVTIFQNISNLRDVFYREMSKLNHNLYEVMSKLEKQHSNKVFVVKGLSSSSRRSLVISPPVRTATVSSPLTSPTSPSTLSLKSESESVSATEDLAPDAAQGEDNSEIKELLEEEEIEKEGSEASSSEEDEPLPACNGPAQAQPSPTTERAKSQEEVLPSSTTPSPGGALSPSGQPSSSATEVVLRTRTASEGSEQPKKRASIQRTSAPPSRPPPPRATASPRPSSGNIPSSPTASGGGSPTSPRASLGTGTASPRTSLEVSPNPEPPEKPVRTPEAKENENIHNQNPEELCTSPTLMTSQVASEPGEAKKMEDKEKDNKLISANSSEGQDQLQVSMVPENNNLTAPEPQEEVSTSENPQL

SEQ ID NO: 16445 - protein, 522 aa, Artificial Sequence
  Synthetic polypeptide
GQEFETSLANMAEGHKLYKDLKNFLSAVKVMHESSKRVSETLQEIYSSEWDGHEELKAIVWNNDLLWEDYEEKLADQAVRTMEIYVAQFSEIKERIAKRGRKLVDYDSARHHLEAVQNAKKKDEAKTAKAEEEFNKAQTVFEDLNQELLEELPILYNSRIGCYVTIFQNISNLRDVFYREMSKLNHNLYEVMSKLEKQHSNKVFVVKGLSSSSRRSLVISPPVRTATVSSPLTSPTSPSTLSLKSESESVSATEDLAPDAAQGEDNSEIKELLEEEEIEKEGSEASSSEEDEPLPACNGPAQAQPSPTTERAKSQEEVLPSSTTPSPGGALSPSGQPSSSATEVVLRTRTASEGSEQPKKRASIQRTSAPPSRPPPPRATASPRPSSGNIPSSPTASGGGSPTSPRASLGTGTASPRTSLEVSPNPEPPEKPVRTPEAKENENIHNQNPEELCTSPTLMTSQVASEPGEAKKMEDKEKDNKLISANSSEGQDQLQVSMVPENNNLTAPEPQEEVSTSENPQL

SEQ ID NO: 16446 - protein, 23 aa, Artificial Sequence
  Synthetic polypeptide
GPVAHAYNSNTGRLRCCRNWGKL

SEQ ID NO: 16447 - protein, 513 aa, Artificial Sequence
  Synthetic polypeptide
FQHWEAEVLQKLGKAVETKDERFEQSASNFYQQQAEGHKLYKDLKNFLSAVKVMHESSKRVSETLQEIYSSEWDGHEELKAIVWERIAKRGRKLVDYDSARHHLEAVQNAKKKDEAKTAKAEEEFNKAQTVFEDLNQELLEELPILYNSRIGCYVTIFQNISNLRDVFYREMSKLNHNLYEVMSKLEKQHSNKVFVVKGLSSSSRRSLVISPPVRTATVSSPLTSPTSPSTLSLKSESESVSATEDLAPDAAQGEDNSEIKELLEEEEIEKEGSEASSSEEDEPLPACNGPAQAQPSPTTERAKSQEEVLPSSTTPSPGGALSPSGQPSSSATEVVLRTRTASEGSEQPKKRASIQRTSAPPSRPPPPRATASPRPSSGNIPSSPTASGGGSPTSPRASLGTGTASPRTSLEVSPNPEPPEKPVRTPEAKENENIHNQNPEELCTSPTLMTSQVASEPGEAKKMEDKEKDNKLISANSSEGQDQLQVSMVPENNNLTAPEPQEEVSTSENPQL

SEQ ID NO: 16448 - protein, 545 aa, Artificial Sequence
  Synthetic polypeptide
FQHWEAEVLQKLGKAVETKDERFEQSASNFYQQQAEGHKLYKDLKNFLSAVKVMHESSKRVSETLQEIYSSEWDGHEELKAIVWNNDLLWEDYEEKLADQAVRTMEIYVAQFSEIKERIAKRGRKLVDYDSARHHLEAVQNAKKKDEAKTAKAEEEFNKAQTVFEDLNQELLEELPILYNSRIGCYVTIFQNISNLRDVFYREMSKLNHNLYEVMSKLEKQHSNKVFVVKGLSSSSRRSLVISPPVRTATVSSPLTSPTSPSTLSLKSESESVSATEDLAPDAAQGEDNSEIKELLEEEEIEKEGSEASSSEEDEPLPACNGPAQAQPSPTTERAKSQEEVLPSSTTPSPGGALSPSGQPSSSATEVVLRTRTASEGSEQPKKRASIQRTSAPPSRPPPPRATASPRPSSGNIPSSPTASGGGSPTSPRASLGTGTASPRTSLEVSPNPEPPEKPVRTPEAKENENIHNQNPEELCTSPTLMTSQVASEPGEAKKMEDKEKDNKLISANSSEGQDQLQVSMVPENNNLTAPEPQEEVSTSENPQL

SEQ ID NO: 16449 - protein, 39 aa, Artificial Sequence
  Synthetic polypeptide
FQHWEAEVLQKLGKAVETKDERFEQSASNFYQQQFVCLF

SEQ ID NO: 16450 - protein, 510 aa, Artificial Sequence
  Synthetic polypeptide
FYIMVLQKLGKAVETKDERFEQSASNFYQQQAEGHKLYKDLKNFLSAVKVMHESSKRVSETLQEIYSSEWDGHEELKAIVWERIAKRGRKLVDYDSARHHLEAVQNAKKKDEAKTAKAEEEFNKAQTVFEDLNQELLEELPILYNSRIGCYVTIFQNISNLRDVFYREMSKLNHNLYEVMSKLEKQHSNKVFVVKGLSSSSRRSLVISPPVRTATVSSPLTSPTSPSTLSLKSESESVSATEDLAPDAAQGEDNSEIKELLEEEEIEKEGSEASSSEEDEPLPACNGPAQAQPSPTTERAKSQEEVLPSSTTPSPGGALSPSGQPSSSATEVVLRTRTASEGSEQPKKRASIQRTSAPPSRPPPPRATASPRPSSGNIPSSPTASGGGSPTSPRASLGTGTASPRTSLEVSPNPEPPEKPVRTPEAKENENIHNQNPEELCTSPTLMTSQVASEPGEAKKMEDKEKDNKLISANSSEGQDQLQVSMVPENNNLTAPEPQEEVSTSENPQL

SEQ ID NO: 16451 - protein, 23 aa, Artificial Sequence
  Synthetic polypeptide
LQENKLRDPTDSTLWCCRNWGKL

SEQ ID NO: 16452 - protein, 41 aa, Artificial Sequence
  Synthetic polypeptide
SVTVSHHPQTGPSSCRKTSSGIPLILHYGAAEIGESCRNQR

SEQ ID NO: 16453 - protein, 542 aa, Artificial Sequence
  Synthetic polypeptide
FYIMVLQKLGKAVETKDERFEQSASNFYQQQAEGHKLYKDLKNFLSAVKVMHESSKRVSETLQEIYSSEWDGHEELKAIVWNNDLLWEDYEEKLADQAVRTMEIYVAQFSEIKERIAKRGRKLVDYDSARHHLEAVQNAKKKDEAKTAKAEEEFNKAQTVFEDLNQELLEELPILYNSRIGCYVTIFQNISNLRDVFYREMSKLNHNLYEVMSKLEKQHSNKVFVVKGLSSSSRRSLVISPPVRTATVSSPLTSPTSPSTLSLKSESESVSATEDLAPDAAQGEDNSEIKELLEEEEIEKEGSEASSSEEDEPLPACNGPAQAQPSPTTERAKSQEEVLPSSTTPSPGGALSPSGQPSSSATEVVLRTRTASEGSEQPKKRASIQRTSAPPSRPPPPRATASPRPSSGNIPSSPTASGGGSPTSPRASLGTGTASPRTSLEVSPNPEPPEKPVRTPEAKENENIHNQNPEELCTSPTLMTSQVASEPGEAKKMEDKEKDNKLISANSSEGQDQLQVSMVPENNNLTAPEPQEEVSTSENPQL

SEQ ID NO: 16454 - protein, 36 aa, Artificial Sequence
  Synthetic polypeptide
FYIMVLQKLGKAVETKDERFEQSASNFYQQQFVCLF

SEQ ID NO: 16455 - protein, 189 aa, Artificial Sequence
  Synthetic polypeptide
GWVWWLTPVIPALREAEAGRSPKKSFGDISERLQLREQLHCHNFSWYLHNVYPEMFVPDLTPTFYGAIKNLGTNQCLDVGENNRGGKPLIMYSCHGLGGNQYFEYTTQRDLRHNIAKQLCLHVSKGALGLGSCHFTGKNSQVPKDEEWELAQDQLIRNSGSGTCLTSQDKKPAMAPCNPSDPHQLWLFV

SEQ ID NO: 16456 - protein, 25 aa, Artificial Sequence
  Synthetic polypeptide
SQHLGRPRRADHLRNPSVTFRNDCS

SEQ ID NO: 16457 - protein, 238 aa, Artificial Sequence
  Synthetic polypeptide
NIFMPQFPPLGLQQCQPGEDVWKTLSAQSSLQGIPQGMELKDLAAQVKDVSVTVGMDSRCHIDLSGIVEEVKAQYDAVAARSLEEAEAYSRSQLEEQAARSAEYGSSLQSSRSEIADLNVRIQKLRSQILSVKSHCLKLEENIKTAEEQGELAFQDAKTKLAQLEAALQQAKQDMARQLRKYQELMNVKLALDIEIATYRKLVEGEEGRMDSPSATVVSAVQSRCKTAPSLPYPLCSL

SEQ ID NO: 16458 - protein, 39 aa, Artificial Sequence
  Synthetic polypeptide
TSLCLSFLLWGCSSASLVRMCGKRSAHSPACREFLREWS

SEQ ID NO: 16459 - protein, 56 aa, Artificial Sequence
  Synthetic polypeptide
GCVENAQRTVQPAGNSSGNGAEGPGSTGEGCVGDRRHGQPLPHRPERHRGGGEGPV

SEQ ID NO: 16460 - protein, 268 aa, Artificial Sequence
  Synthetic polypeptide
NIFMPQFPPLGLQQCQPGEDVWKTLSAQSSLQGIPQGMELKDLAAQVKDVSVTVGMDSRCHIDLSGIVEEVKAQYDAVAARSLEEAEAYSRSQLEEQAARSAEYGSSLQSSRSEIADLNVRIQKLRSQILSVKSHCLKLEENIKTAEEQGELAFQDAKTKLAQLEAALQQAKQDMARQLRKYQELMNVKLALDIEIATYRKLVEGEEGRMDSPSATVVSAVQSRCKTAASRSGLSKAPSRKKKGSKGPVIKITEMSEKYFSQESEVSE

SEQ ID NO: 16461 - protein, 54 aa, Artificial Sequence
  Synthetic polypeptide
NIFMPQFPPLGLQQCQPGAEGPGSTGEGCVGDRRHGQPLPHRPERHRGGGEGPV

SEQ ID NO: 16462 - protein, 217 aa, Artificial Sequence
  Synthetic polypeptide
TSLCLSFLLWGCSSASLELKDLAAQVKDVSVTVGMDSRCHIDLSGIVEEVKAQYDAVAARSLEEAEAYSRSQLEEQAARSAEYGSSLQSSRSEIADLNVRIQKLRSQILSVKSHCLKLEENIKTAEEQGELAFQDAKTKLAQLEAALQQAKQDMARQLRKYQELMNVKLALDIEIATYRKLVEGEEGRMDSPSATVVSAVQSRCKTAPSLPYPLCSL

SEQ ID NO: 16463 - protein, 18 aa, Artificial Sequence
  Synthetic polypeptide
HLYASVSSSGAAAVPAWS

SEQ ID NO: 16464 - protein, 247 aa, Artificial Sequence
  Synthetic polypeptide
TSLCLSFLLWGCSSASLELKDLAAQVKDVSVTVGMDSRCHIDLSGIVEEVKAQYDAVAARSLEEAEAYSRSQLEEQAARSAEYGSSLQSSRSEIADLNVRIQKLRSQILSVKSHCLKLEENIKTAEEQGELAFQDAKTKLAQLEAALQQAKQDMARQLRKYQELMNVKLALDIEIATYRKLVEGEEGRMDSPSATVVSAVQSRCKTAASRSGLSKAPSRKKKGSKGPVIKITEMSEKYFSQESEVSE

SEQ ID NO: 16465 - protein, 10 aa, Artificial Sequence
  Synthetic polypeptide
CGCVMWMLPT

SEQ ID NO: 16466 - protein, 273 aa, Artificial Sequence
  Synthetic polypeptide
WVRDVDAAYMSKVELEAKVDALNDEINFLRTLNETELTELQSQISDTSVVLSMDNSRSLDLDGIIAEVKAQYEEMAKCSRAEAEAWYQTKFETLQAQAGKHGDDLRNTRNEISEMNRAIQRLQAEIDNIKNQRAKLEAAIAEAEERGELALKDARAKQEELEAALQRGKQDMARQLREYQELMSVKLALDIEIATYRKLLEGEESRLAGDGVGAVNISVMNSTGGSSSGGGIGLTLGGTMGSNALSFSSSAGPGLLKAYSIRTASASRRSARD

SEQ ID NO: 16467 - protein, 398 aa, Artificial Sequence
  Synthetic polypeptide
CGDSTCHCREGIQATLLHSTCSVRFLEQQNKVLETKWALLQEQGQNLGVTRNNLEPLFEAYLGSMRSTLDRLQSERGRLDSELRNVQDLVEDFKNKYEDEINKHTAAENEFVVLKKDVDAAYMGRMDLHGKVGTLTQEIDFLQQLYEMELSQVQTHVSNTNVVLSMDNNRNLDLDSIIAEVKAQYELIAQRSRAEAEAWYQTKYEELQVTAGKHGDNLRDTKNEIAELTRTIQRLQGEADAAKKQCQQLQTAIAEAEQRGELALKDAQKKLGDLDVALHQAKEDLTRLLRDYQELMNVKLALDVEIATYRKLLESEESRMSGECPSAVSISVTGNSTTVCGGGAASFGGGISLGGSGGATKGGFSTNVGYSTVKGGPVSAGTSILRKTTTVKTSSQRY

SEQ ID NO: 16468 - protein, 134 aa, Artificial Sequence
  Synthetic polypeptide
AETQHAIAGKASRPLCCIVRAQCGSWSNRIRCWRPSGHCCRSRARTWVSPGTTWSPSLRPTWVACGARWTDFRASGGGWTQSSGTCRTLWRTSRTSTRMKSTSTLLQRTSLWCSRRMWMQHTWAGWICMAKWAP

SEQ ID NO: 16469 - protein, 11 aa, Artificial Sequence
  Synthetic polypeptide
YVLSAVPGATE

SEQ ID NO: 16470 - protein, 427 aa, Artificial Sequence
  Synthetic polypeptide
CGDSTCHCREGIQATLLHSTCSIDPEIQRVRTQEREQIKTLNNKFASFIDKVRFLEQQNKVLETKWALLQEQGQNLGVTRNNLEPLFEAYLGSMRSTLDRLQSERGRLDSELRNVQDLVEDFKNKYEDEINKHTAAENEFVVLKKDVDAAYMGRMDLHGKVGTLTQEIDFLQQLYEMELSQVQTHVSNTNVVLSMDNNRNLDLDSIIAEVKAQYELIAQRSRAEAEAWYQTKYEELQVTAGKHGDNLRDTKNEIAELTRTIQRLQGEADAAKKQCQQLQTAIAEAEQRGELALKDAQKKLGDLDVALHQAKEDLTRLLRDYQELMNVKLALDVEIATYRKLLESEESRMSGECPSAVSISVTGNSTTVCGGGAASFGGGISLGGSGGATKGGFSTNVGYSTVKGGPVSAGTSILRKTTTVKTSSQRY

SEQ ID NO: 16471 - protein, 163 aa, Artificial Sequence
  Synthetic polypeptide
AETQHAIAGKASRPLCCIVRAQLTPRSSECALRSGSRSRPSTTSSPPSSTRCGSWSNRIRCWRPSGHCCRSRARTWVSPGTTWSPSLRPTWVACGARWTDFRASGGGWTQSSGTCRTLWRTSRTSTRMKSTSTLLQRTSLWCSRRMWMQHTWAGWICMAKWAP

SEQ ID NO: 16472 - protein, 4 aa, Artificial Sequence
  Synthetic polypeptide
YVLN

SEQ ID NO: 16473 - protein, 436 aa, Artificial Sequence
  Synthetic polypeptide
CGDSTCHCREGIQATLLHSTCSSLLTPLHVEIDPEIQRVRTQEREQIKTLNNKFASFIDKVRFLEQQNKVLETKWALLQEQGQNLGVTRNNLEPLFEAYLGSMRSTLDRLQSERGRLDSELRNVQDLVEDFKNKYEDEINKHTAAENEFVVLKKDVDAAYMGRMDLHGKVGTLTQEIDFLQQLYEMELSQVQTHVSNTNVVLSMDNNRNLDLDSIIAEVKAQYELIAQRSRAEAEAWYQTKYEELQVTAGKHGDNLRDTKNEIAELTRTIQRLQGEADAAKKQCQQLQTAIAEAEQRGELALKDAQKKLGDLDVALHQAKEDLTRLLRDYQELMNVKLALDVEIATYRKLLESEESRMSGECPSAVSISVTGNSTTVCGGGAASFGGGISLGGSGGATKGGFSTNVGYSTVKGGPVSAGTSILRKTTTVKTSSQRY

SEQ ID NO: 16474 - protein, 24 aa, Artificial Sequence
  Synthetic polypeptide
AETQHAIAGKASRPLCCIVRAQAC

SEQ ID NO: 16475 - protein, 13 aa, Artificial Sequence
  Synthetic polypeptide
YVLKPADPPPCGD

SEQ ID NO: 16476 - protein, 442 aa, Artificial Sequence
  Synthetic polypeptide
CGDSTCHCREGIQATLLHSTCSEVTVNQSLLTPLHVEIDPEIQRVRTQEREQIKTLNNKFASFIDKVRFLEQQNKVLETKWALLQEQGQNLGVTRNNLEPLFEAYLGSMRSTLDRLQSERGRLDSELRNVQDLVEDFKNKYEDEINKHTAAENEFVVLKKDVDAAYMGRMDLHGKVGTLTQEIDFLQQLYEMELSQVQTHVSNTNVVLSMDNNRNLDLDSIIAEVKAQYELIAQRSRAEAEAWYQTKYEELQVTAGKHGDNLRDTKNEIAELTRTIQRLQGEADAAKKQCQQLQTAIAEAEQRGELALKDAQKKLGDLDVALHQAKEDLTRLLRDYQELMNVKLALDVEIATYRKLLESEESRMSGECPSAVSISVTGNSTTVCGGGAASFGGGISLGGSGGATKGGFSTNVGYSTVKGGPVSAGTSILRKTTTVKTSSQRY

SEQ ID NO: 16477 - protein, 30 aa, Artificial Sequence
  Synthetic polypeptide
AETQHAIAGKASRPLCCIVRAQRSLSTRAC

SEQ ID NO: 16478 - protein, 19 aa, Artificial Sequence
  Synthetic polypeptide
YVLRGHCQPEPADPPPCGD

SEQ ID NO: 16479 - protein, 43 aa, Artificial Sequence
  Synthetic polypeptide
GDHLMRFARNSLCLCPGMRMRSISVQRWRTNLSSSRRMWMKLT

SEQ ID NO: 16480 - protein, 12 aa, Artificial Sequence
  Synthetic polypeptide
GLLGTVCVYAQV

SEQ ID NO: 16481 - protein, 320 aa, Artificial Sequence
  Synthetic polypeptide
PPDEVCSEQSVFMPRYEDEINKRTEMENEFVLIKKDVDEAYMNKVELESRLEGLTDEINFLRQLYEEEIRELQSQISDTSVVLSMDNSRSLDMDSIIAEVKAQYEDIANRSRAEAESMYQIKYEELQSLAGKHGDDLRRTKTEISEMNRNISRLQAEIEGLKGQRASLEAAIADAEQRGELAIKDANAKLSELEAALQRAKQDMARQLREYQELMNVKLALDIEIATYRKLLEGEESRLESGMQNMSIHTKTTSGYAGGLSSAYGGLTSPGLSYSLGSSFGSGAGSSSFSRTSSSRAVVVKKIETRDGKLVSESSDVLPK

SEQ ID NO: 16482 - protein, 110 aa, Artificial Sequence
  Synthetic polypeptide
PPDEVCSEQSVFMPRYEDEINKRTEMENEFVLIKKDVDEAYMNKVELESRLEGLTDEINFLRQLYEEEIRELQSQISDTSVVLSMDNSRSLDMDSIIAEVKAQYEDIANR

SEQ ID NO: 16483 - protein, 86 aa, Artificial Sequence
  Synthetic polypeptide
PPDEVCSEQSVFMPRYEDEINKRTEMENEFVLIKKDVDEAYMNKVELESRLEGLTDEINFLRQLYEEEIRELQSQISDTSVVLSMD

SEQ ID NO: 16484 - protein, 67 aa, Artificial Sequence
  Synthetic polypeptide
PPDEVCSEQSVFMPRYEDEINKRTEMENEFVLIKKDVDEAYMNKVELESRLEGLTDEINFLRQLYEE

SEQ ID NO: 16485 - protein, 311 aa, Artificial Sequence
  Synthetic polypeptide
GDHLMRYEDEINKRTEMENEFVLIKKDVDEAYMNKVELESRLEGLTDEINFLRQLYEEEIRELQSQISDTSVVLSMDNSRSLDMDSIIAEVKAQYEDIANRSRAEAESMYQIKYEELQSLAGKHGDDLRRTKTEISEMNRNISRLQAEIEGLKGQRASLEAAIADAEQRGELAIKDANAKLSELEAALQRAKQDMARQLREYQELMNVKLALDIEIATYRKLLEGEESRLESGMQNMSIHTKTTSGYAGGLSSAYGGLTSPGLSYSLGSSFGSGAGSSSFSRTSSSRAVVVKKIETRDGKLVSESSDVLPK

SEQ ID NO: 16486 - protein, 5 aa, Artificial Sequence
  Synthetic polypeptide
PPDEV

SEQ ID NO: 16487 - protein, 101 aa, Artificial Sequence
  Synthetic polypeptide
GDHLMRYEDEINKRTEMENEFVLIKKDVDEAYMNKVELESRLEGLTDEINFLRQLYEEEIRELQSQISDTSVVLSMDNSRSLDMDSIIAEVKAQYEDIANR

SEQ ID NO: 16488 - protein, 77 aa, Artificial Sequence
  Synthetic polypeptide
GDHLMRYEDEINKRTEMENEFVLIKKDVDEAYMNKVELESRLEGLTDEINFLRQLYEEEIRELQSQISDTSVVLSMD

SEQ ID NO: 16489 - protein, 58 aa, Artificial Sequence
  Synthetic polypeptide
GDHLMRYEDEINKRTEMENEFVLIKKDVDEAYMNKVELESRLEGLTDEINFLRQLYEE

SEQ ID NO: 16490 - protein, 19 aa, Artificial Sequence
  Synthetic polypeptide
TREAEVSQKRRIRRGRLSP

SEQ ID NO: 16491 - protein, 38 aa, Artificial Sequence
  Synthetic polypeptide
KYKISQVWWCMPVILATWEAEAGESLEPGRRRFRKKEE

SEQ ID NO: 16492 - protein, 627 aa, Artificial Sequence
  Synthetic polypeptide
SSLLGRLRQENRLNPGGGGFAKKKNKKGKTISLTDFLAEDGGTGGGSTYVSKPVSWADETDDLEGDVSTTWHSNDDDVYRAPPIDRSILPTAPRAAREPNIDRSRLPKSPPYTAFLGNLPYDVTEESIKEFFRGLNISAVRLPREPSNPERLKGFGYAEFEDLDSLLSALSLNEESLGNRRIRVDVADQAQDKDRDDRSFGRDRNRDSDKTDTDWRARPATDSFDDYPPRRGDDSFGDKYRDRYDSDRYRDGYRDGYRDGPRRDMDRYGGRDRYDDRGSRDYDRGYDSRIGSGRRAFGSGYRRDDDYRGGGDRYEDRYDRRDDRSWSSRDDYSRDDYRRDDRGPPQRPKLNLKPRSTPKEDDSSASTSQSTRAASIFGGAKPVDTAAREREVEERLQKEQEKLQRQLDEPKLERRPRERHPSWRSEETQERERSRTGSESSQTGTSTTSSRNARRRESEKSLENETLNKEEDCHSPTSKPPKPDQPLKVMPAPPPKENAWVKRSSNPPARSQSSDTEQQSPTSGGGKVAPAQPSEEGPGRKDENKVDGMNAPKGQTGNSSRGPGDGGNRDHWKESDRKDGKKDQDSRSAPEPKKPEENPASKFSSASKYAALSVDGEDENEGEDYAE

SEQ ID NO: 16493 - protein, 191 aa, Artificial Sequence
  Synthetic polypeptide
SSLLGRLRQENRLNPGGGGFAKKKNKKGKTISLTDFLAEDGGTGGGSTYVSKPVSWADETDDLEGDVSTTWHSNDDDVYRAPPIDRSILPTAPRAAREPNIDRSRLPKSPPYTAFLGNLPYDVTEESIKEFFRGLNISAVRLPREPSNPERLKGFGYAEFEDLDSLLSALSLNEECFCYAQTFKVTQGICA

SEQ ID NO: 16494 - protein, 632 aa, Artificial Sequence
  Synthetic polypeptide
SSLLGRLRQENRLNPGGGGFAKKKNKKGKTISLTDFLAEDGGTGGGSTYVSKPVSWADETDDLEGDVSTTWHSNDDDVYRAPPIDRSILPTAPRAAREPNIDRSRLPKSPPYTAFLGNLPYDVTEESIKEFFRGLNISAVRLPREPSNPERLKGFGYAEFEDLDSLLSALSLNEESLGNRRIRVDVADQAQDKDRDDRSFGRDRNRDSDKTDTDWRARPATDSFDDYPPRRGDDSFGDKYRDRYDSDRYRDGYRDGYRDGPRRDMDRYGGRDRYDDRGSRDYDRGYDSRIGSGRRAFGSGYRRDDDYRGGGDRYEDRYDRRDDRSWSSRDDYSRDDYRRDDRGPPQRPKLNLKPRSTPKEDDSSASTSQSTRAASIFGGAKPVDTAAREREVEERLQKEQEKLQRQLDEPKLERRPRERHPSWRSEETQERERSRTGSESSQTGTSTTSSRSKSDQDARRRESEKSLENETLNKEEDCHSPTSKPPKPDQPLKVMPAPPPKENAWVKRSSNPPARSQSSDTEQQSPTSGGGKVAPAQPSEEGPGRKDENKVDGMNAPKGQTGNSSRGPGDGGNRDHWKESDRKDGKKDQDSRSAPEPKKPEENPASKFSSASKYAALSVDGEDENEGEDYAE

SEQ ID NO: 16495 - protein, 588 aa, Artificial Sequence
  Synthetic polypeptide
SSLLGRLRQENRLNPGGGGFAKKKNKKGKTISLTDFLAEDGGTGGGSTYVSKPVSWADETDDLEGDVSTTWHSNDDDVYRAPPIDRSILPTAPRAAREPNIDRSRLPKSPPYTAFLGNLPYDVTEESIKEFFRGLNSLGNRRIRVDVADQAQDKDRDDRSFGRDRNRDSDKTDTDWRARPATDSFDDYPPRRGDDSFGDKYRDRYDSDRYRDGYRDGYRDGPRRDMDRYGGRDRYDDRGSRDYDRGYDSRIGSGRRAFGSGYRRDDDYRGGGDRYEDRYDRRDDRSWSSRDDYSRDDYRRDDRGPPQRPKLNLKPRSTPKEDDSSASTSQSTRAASIFGGAKPVDTAAREREVEERLQKEQEKLQRQLDEPKLERRPRERHPSWRSEETQERERSRTGSESSQTGTSTTSSRNARRRESEKSLENETLNKEEDCHSPTSKPPKPDQPLKVMPAPPPKENAWVKRSSNPPARSQSSDTEQQSPTSGGGKVAPAQPSEEGPGRKDENKVDGMNAPKGQTGNSSRGPGDGGNRDHWKESDRKDGKKDQDSRSAPEPKKPEENPASKFSSASKYAALSVDGEDENEGEDYAE

SEQ ID NO: 16496 - protein, 243 aa, Artificial Sequence
  Synthetic polypeptide
SSLLGRLRQENRLNPGGGGFAKKKNKKGKTISLTDFLAEDGGTGGGSTYVSKPVSWADETDDLEGDVSTTWHSNDDDVYRAPPIDRSILPTAPRAAREPNIDRSRLPKSPPYTAFLGNLPYDVTEESIKEFFRGLNISAVRLPREPSNPERLKGFGYAEFEDLDSLLSALSLNEESLGNRRIRVDVADQAQDKDRDDRSFGRDRNRDSDKTDTDWRARPATDSFDDYPPRRGDDSFGDRRNGS

SEQ ID NO: 16497 - protein, 376 aa, Artificial Sequence
  Synthetic polypeptide
SSLLGRLRQENRLNPGGGGFAKKKNKKGKTISLTDFLAEDGGTGGGSTYVSKPVSWADETDDLEGDVSTTWHSNDDDVYRAPPIDRSILPTAPRAAREPNIDRSRLPKSPPYTAFLGNLPYDVTEESIKEFFRGLNISAVRLPREPSNPERLKGFGYAEFEDLDSLLSALSLNEESLGNRRIRVDVADQAQDKEYRDRYDSDRYRDGYRDGYRDGPRRDMDRYGGRDRYDDRGSRDYDRGYDSRIGSGRRAFGSGYRRDDDYRGGGDRYEDRYDRRDDRSWSSRDDYSRDDYRRDDRGPPQRPKLNLKPRSTPKEDDSSASTSQSTRAASIFGGAKPVDTAAREREVEERLQKEQEKLQRQLDEPKLERRPRERHP

SEQ ID NO: 16498 - protein, 291 aa, Artificial Sequence
  Synthetic polypeptide
SSLLGRLRQENRLNPGGGGFAKKKNKKGKTISLTDFLAEDGGTGGGSTYVSKPVSWADETDDLEGDVSTTWHSNDDDVYRAPPIDRSILPTAPRAAREPNIDRSRLPKSPPYTAFLGNLPYDVTEESIKEFFRGLNISAVRLPREPSNPERLKGFGYAEFEDLDSLLSALSLNEESLGNRRIRVDVADQAQDKDRDDRSFGRDRNRDSDKTDTDWRARPATDSFDDYPPRRGDDSFGDSYDSRIGSGRRAFGSGYRRDDDYRGGGDRYEDRYDRRDDRSWSSRDDYSRDDY

SEQ ID NO: 16499 - protein, 201 aa, Artificial Sequence
  Synthetic polypeptide
SSLLGRLRQENRLNPGGGGFAKKKNKKGKTISLTDFLAEDGGTGGGSTYVSKPVSWADETDDLEGDVSTTWHSNDDDVYRAPPIDRSILPTAPRAAREPNIDRSRLPKSPPYTAFLGNLPYDVTEESIKEFFRGLNISAVRLPREPSNPERLKGFGYAEFEDLDSLLSALSLNEESLGNRRIRVDVADQAQDKGTPGPYRI

SEQ ID NO: 16500 - protein, 14 aa, Artificial Sequence
  Synthetic polypeptide
SQHFGRPSFDHLAQ

SEQ ID NO: 16501 - protein, 575 aa, Artificial Sequence
  Synthetic polypeptide
AMAYTCNPSTLGGRVSTTWHSNDDDVYRAPPIDRSILPTAPRAAREPNIDRSRLPKSPPYTAFLGNLPYDVTEESIKEFFRGLNISAVRLPREPSNPERLKGFGYAEFEDLDSLLSALSLNEESLGNRRIRVDVADQAQDKDRDDRSFGRDRNRDSDKTDTDWRARPATDSFDDYPPRRGDDSFGDKYRDRYDSDRYRDGYRDGYRDGPRRDMDRYGGRDRYDDRGSRDYDRGYDSRIGSGRRAFGSGYRRDDDYRGGGDRYEDRYDRRDDRSWSSRDDYSRDDYRRDDRGPPQRPKLNLKPRSTPKEDDSSASTSQSTRAASIFGGAKPVDTAAREREVEERLQKEQEKLQRQLDEPKLERRPRERHPSWRSEETQERERSRTGSESSQTGTSTTSSRNARRRESEKSLENETLNKEEDCHSPTSKPPKPDQPLKVMPAPPPKENAWVKRSSNPPARSQSSDTEQQSPTSGGGKVAPAQPSEEGPGRKDENKVDGMNAPKGQTGNSSRGPGDGGNRDHWKESDRKDGKKDQDSRSAPEPKKPEENPASKFSSASKYAALSVDGEDENEGEDYAE

SEQ ID NO: 16502 - protein, 63 aa, Artificial Sequence
  Synthetic polypeptide
RWLTPVIPALWEAEFRPLGTVTMTMCIGRLQLTVPSFPLLHGLLGNPISTGAVFPNRHPTLLF

SEQ ID NO: 16503 - protein, 139 aa, Artificial Sequence
  Synthetic polypeptide
AMAYTCNPSTLGGRVSTTWHSNDDDVYRAPPIDRSILPTAPRAAREPNIDRSRLPKSPPYTAFLGNLPYDVTEESIKEFFRGLNISAVRLPREPSNPERLKGFGYAEFEDLDSLLSALSLNEECFCYAQTFKVTQGICA

SEQ ID NO: 16504 - protein, 179 aa, Artificial Sequence
  Synthetic polypeptide
AMAYTCNPSTLGGRVSTTWHSNDDDVYRAPPIDRSILPTAPRAAREPNIDRSRLPKSPPYTAFLGNLPYDVTEESIKEFFRGLNISAVRLPREPSNPERLKGFGYAEFEDLDSLLSALSLNEESLGNRRIRVDVADQAQDKDRDDRSFGRDRNRDSDKTDTDWRARPATDSFDDYPPRR

SEQ ID NO: 16505 - protein, 580 aa, Artificial Sequence
  Synthetic polypeptide
AMAYTCNPSTLGGRVSTTWHSNDDDVYRAPPIDRSILPTAPRAAREPNIDRSRLPKSPPYTAFLGNLPYDVTEESIKEFFRGLNISAVRLPREPSNPERLKGFGYAEFEDLDSLLSALSLNEESLGNRRIRVDVADQAQDKDRDDRSFGRDRNRDSDKTDTDWRARPATDSFDDYPPRRGDDSFGDKYRDRYDSDRYRDGYRDGYRDGPRRDMDRYGGRDRYDDRGSRDYDRGYDSRIGSGRRAFGSGYRRDDDYRGGGDRYEDRYDRRDDRSWSSRDDYSRDDYRRDDRGPPQRPKLNLKPRSTPKEDDSSASTSQSTRAASIFGGAKPVDTAAREREVEERLQKEQEKLQRQLDEPKLERRPRERHPSWRSEETQERERSRTGSESSQTGTSTTSSRSKSDQDARRRESEKSLENETLNKEEDCHSPTSKPPKPDQPLKVMPAPPPKENAWVKRSSNPPARSQSSDTEQQSPTSGGGKVAPAQPSEEGPGRKDENKVDGMNAPKGQTGNSSRGPGDGGNRDHWKESDRKDGKKDQDSRSAPEPKKPEENPASKFSSASKYAALSVDGEDENEGEDYAE

SEQ ID NO: 16506 - protein, 536 aa, Artificial Sequence
  Synthetic polypeptide
AMAYTCNPSTLGGRVSTTWHSNDDDVYRAPPIDRSILPTAPRAAREPNIDRSRLPKSPPYTAFLGNLPYDVTEESIKEFFRGLNSLGNRRIRVDVADQAQDKDRDDRSFGRDRNRDSDKTDTDWRARPATDSFDDYPPRRGDDSFGDKYRDRYDSDRYRDGYRDGYRDGPRRDMDRYGGRDRYDDRGSRDYDRGYDSRIGSGRRAFGSGYRRDDDYRGGGDRYEDRYDRRDDRSWSSRDDYSRDDYRRDDRGPPQRPKLNLKPRSTPKEDDSSASTSQSTRAASIFGGAKPVDTAAREREVEERLQKEQEKLQRQLDEPKLERRPRERHPSWRSEETQERERSRTGSESSQTGTSTTSSRNARRRESEKSLENETLNKEEDCHSPTSKPPKPDQPLKVMPAPPPKENAWVKRSSNPPARSQSSDTEQQSPTSGGGKVAPAQPSEEGPGRKDENKVDGMNAPKGQTGNSSRGPGDGGNRDHWKESDRKDGKKDQDSRSAPEPKKPEENPASKFSSASKYAALSVDGEDENEGEDYAE

SEQ ID NO: 16507 - protein, 191 aa, Artificial Sequence
  Synthetic polypeptide
AMAYTCNPSTLGGRVSTTWHSNDDDVYRAPPIDRSILPTAPRAAREPNIDRSRLPKSPPYTAFLGNLPYDVTEESIKEFFRGLNISAVRLPREPSNPERLKGFGYAEFEDLDSLLSALSLNEESLGNRRIRVDVADQAQDKDRDDRSFGRDRNRDSDKTDTDWRARPATDSFDDYPPRRGDDSFGDRRNGS

SEQ ID NO: 16508 - protein, 324 aa, Artificial Sequence
  Synthetic polypeptide
AMAYTCNPSTLGGRVSTTWHSNDDDVYRAPPIDRSILPTAPRAAREPNIDRSRLPKSPPYTAFLGNLPYDVTEESIKEFFRGLNISAVRLPREPSNPERLKGFGYAEFEDLDSLLSALSLNEESLGNRRIRVDVADQAQDKEYRDRYDSDRYRDGYRDGYRDGPRRDMDRYGGRDRYDDRGSRDYDRGYDSRIGSGRRAFGSGYRRDDDYRGGGDRYEDRYDRRDDRSWSSRDDYSRDDYRRDDRGPPQRPKLNLKPRSTPKEDDSSASTSQSTRAASIFGGAKPVDTAAREREVEERLQKEQEKLQRQLDEPKLERRPRERHP

SEQ ID NO: 16509 - protein, 239 aa, Artificial Sequence
  Synthetic polypeptide
AMAYTCNPSTLGGRVSTTWHSNDDDVYRAPPIDRSILPTAPRAAREPNIDRSRLPKSPPYTAFLGNLPYDVTEESIKEFFRGLNISAVRLPREPSNPERLKGFGYAEFEDLDSLLSALSLNEESLGNRRIRVDVADQAQDKDRDDRSFGRDRNRDSDKTDTDWRARPATDSFDDYPPRRGDDSFGDSYDSRIGSGRRAFGSGYRRDDDYRGGGDRYEDRYDRRDDRSWSSRDDYSRDDY

SEQ ID NO: 16510 - protein, 149 aa, Artificial Sequence
  Synthetic polypeptide
AMAYTCNPSTLGGRVSTTWHSNDDDVYRAPPIDRSILPTAPRAAREPNIDRSRLPKSPPYTAFLGNLPYDVTEESIKEFFRGLNISAVRLPREPSNPERLKGFGYAEFEDLDSLLSALSLNEESLGNRRIRVDVADQAQDKGTPGPYRI

SEQ ID NO: 16511 - protein, 570 aa, Artificial Sequence
  Synthetic polypeptide
EVQDQPGQHVSTTWHSNDDDVYRAPPIDRSILPTAPRAAREPNIDRSRLPKSPPYTAFLGNLPYDVTEESIKEFFRGLNISAVRLPREPSNPERLKGFGYAEFEDLDSLLSALSLNEESLGNRRIRVDVADQAQDKDRDDRSFGRDRNRDSDKTDTDWRARPATDSFDDYPPRRGDDSFGDKYRDRYDSDRYRDGYRDGYRDGPRRDMDRYGGRDRYDDRGSRDYDRGYDSRIGSGRRAFGSGYRRDDDYRGGGDRYEDRYDRRDDRSWSSRDDYSRDDYRRDDRGPPQRPKLNLKPRSTPKEDDSSASTSQSTRAASIFGGAKPVDTAAREREVEERLQKEQEKLQRQLDEPKLERRPRERHPSWRSEETQERERSRTGSESSQTGTSTTSSRNARRRESEKSLENETLNKEEDCHSPTSKPPKPDQPLKVMPAPPPKENAWVKRSSNPPARSQSSDTEQQSPTSGGGKVAPAQPSEEGPGRKDENKVDGMNAPKGQTGNSSRGPGDGGNRDHWKESDRKDGKKDQDSRSAPEPKKPEENPASKFSSASKYAALSVDGEDENEGEDYAE

SEQ ID NO: 16512 - protein, 60 aa, Artificial Sequence
  Synthetic polypeptide
DEKFKTSLANMFRPLGTVTMTMCIGRLQLTVPSFPLLHGLLGNPISTGAVFPNRHPTLLF

SEQ ID NO: 16513 - protein, 37 aa, Artificial Sequence
  Synthetic polypeptide
RWLTPVIPALWEAEVGRSHEMRSSRPAWPTCFDHLAQ

SEQ ID NO: 16514 - protein, 134 aa, Artificial Sequence
  Synthetic polypeptide
EVQDQPGQHVSTTWHSNDDDVYRAPPIDRSILPTAPRAAREPNIDRSRLPKSPPYTAFLGNLPYDVTEESIKEFFRGLNISAVRLPREPSNPERLKGFGYAEFEDLDSLLSALSLNEECFCYAQTFKVTQGICA

SEQ ID NO: 16515 - protein, 174 aa, Artificial Sequence
  Synthetic polypeptide
EVQDQPGQHVSTTWHSNDDDVYRAPPIDRSILPTAPRAAREPNIDRSRLPKSPPYTAFLGNLPYDVTEESIKEFFRGLNISAVRLPREPSNPERLKGFGYAEFEDLDSLLSALSLNEESLGNRRIRVDVADQAQDKDRDDRSFGRDRNRDSDKTDTDWRARPATDSFDDYPPRR

SEQ ID NO: 16516 - protein, 575 aa, Artificial Sequence
  Synthetic polypeptide
EVQDQPGQHVSTTWHSNDDDVYRAPPIDRSILPTAPRAAREPNIDRSRLPKSPPYTAFLGNLPYDVTEESIKEFFRGLNISAVRLPREPSNPERLKGFGYAEFEDLDSLLSALSLNEESLGNRRIRVDVADQAQDKDRDDRSFGRDRNRDSDKTDTDWRARPATDSFDDYPPRRGDDSFGDKYRDRYDSDRYRDGYRDGYRDGPRRDMDRYGGRDRYDDRGSRDYDRGYDSRIGSGRRAFGSGYRRDDDYRGGGDRYEDRYDRRDDRSWSSRDDYSRDDYRRDDRGPPQRPKLNLKPRSTPKEDDSSASTSQSTRAASIFGGAKPVDTAAREREVEERLQKEQEKLQRQLDEPKLERRPRERHPSWRSEETQERERSRTGSESSQTGTSTTSSRSKSDQDARRRESEKSLENETLNKEEDCHSPTSKPPKPDQPLKVMPAPPPKENAWVKRSSNPPARSQSSDTEQQSPTSGGGKVAPAQPSEEGPGRKDENKVDGMNAPKGQTGNSSRGPGDGGNRDHWKESDRKDGKKDQDSRSAPEPKKPEENPASKFSSASKYAALSVDGEDENEGEDYAE

SEQ ID NO: 16517 - protein, 531 aa, Artificial Sequence
  Synthetic polypeptide
EVQDQPGQHVSTTWHSNDDDVYRAPPIDRSILPTAPRAAREPNIDRSRLPKSPPYTAFLGNLPYDVTEESIKEFFRGLNSLGNRRIRVDVADQAQDKDRDDRSFGRDRNRDSDKTDTDWRARPATDSFDDYPPRRGDDSFGDKYRDRYDSDRYRDGYRDGYRDGPRRDMDRYGGRDRYDDRGSRDYDRGYDSRIGSGRRAFGSGYRRDDDYRGGGDRYEDRYDRRDDRSWSSRDDYSRDDYRRDDRGPPQRPKLNLKPRSTPKEDDSSASTSQSTRAASIFGGAKPVDTAAREREVEERLQKEQEKLQRQLDEPKLERRPRERHPSWRSEETQERERSRTGSESSQTGTSTTSSRNARRRESEKSLENETLNKEEDCHSPTSKPPKPDQPLKVMPAPPPKENAWVKRSSNPPARSQSSDTEQQSPTSGGGKVAPAQPSEEGPGRKDENKVDGMNAPKGQTGNSSRGPGDGGNRDHWKESDRKDGKKDQDSRSAPEPKKPEENPASKFSSASKYAALSVDGEDENEGEDYAE

SEQ ID NO: 16518 - protein, 186 aa, Artificial Sequence
  Synthetic polypeptide
EVQDQPGQHVSTTWHSNDDDVYRAPPIDRSILPTAPRAAREPNIDRSRLPKSPPYTAFLGNLPYDVTEESIKEFFRGLNISAVRLPREPSNPERLKGFGYAEFEDLDSLLSALSLNEESLGNRRIRVDVADQAQDKDRDDRSFGRDRNRDSDKTDTDWRARPATDSFDDYPPRRGDDSFGDRRNGS

SEQ ID NO: 16519 - protein, 319 aa, Artificial Sequence
  Synthetic polypeptide
EVQDQPGQHVSTTWHSNDDDVYRAPPIDRSILPTAPRAAREPNIDRSRLPKSPPYTAFLGNLPYDVTEESIKEFFRGLNISAVRLPREPSNPERLKGFGYAEFEDLDSLLSALSLNEESLGNRRIRVDVADQAQDKEYRDRYDSDRYRDGYRDGYRDGPRRDMDRYGGRDRYDDRGSRDYDRGYDSRIGSGRRAFGSGYRRDDDYRGGGDRYEDRYDRRDDRSWSSRDDYSRDDYRRDDRGPPQRPKLNLKPRSTPKEDDSSASTSQSTRAASIFGGAKPVDTAAREREVEERLQKEQEKLQRQLDEPKLERRPRERHP

SEQ ID NO: 16520 - protein, 234 aa, Artificial Sequence
  Synthetic polypeptide
EVQDQPGQHVSTTWHSNDDDVYRAPPIDRSILPTAPRAAREPNIDRSRLPKSPPYTAFLGNLPYDVTEESIKEFFRGLNISAVRLPREPSNPERLKGFGYAEFEDLDSLLSALSLNEESLGNRRIRVDVADQAQDKDRDDRSFGRDRNRDSDKTDTDWRARPATDSFDDYPPRRGDDSFGDSYDSRIGSGRRAFGSGYRRDDDYRGGGDRYEDRYDRRDDRSWSSRDDYSRDDY

SEQ ID NO: 16521 - protein, 144 aa, Artificial Sequence
  Synthetic polypeptide
EVQDQPGQHVSTTWHSNDDDVYRAPPIDRSILPTAPRAAREPNIDRSRLPKSPPYTAFLGNLPYDVTEESIKEFFRGLNISAVRLPREPSNPERLKGFGYAEFEDLDSLLSALSLNEESLGNRRIRVDVADQAQDKGTPGPYRI

SEQ ID NO: 16522 - protein, 307 aa, Artificial Sequence
  Synthetic polypeptide
EAECHYSIQKGAAFLGLGTDSVRVVKADERGKMVPEDLERQIGMAEAEGAVPFLVSATSGTTVLGAFDPLEAIADVCQRHGLWLHVDAAWGGSVLLSQTHRHLLDGIQRADSVAWNPHKLLAAGLQCSALLLQDTSNLLKRCHGSQASYLFQQDKFYDVALDTGDKVVQCGRRVDCLKLWLMWKAQGDQGLERRIDQAFVLARYLVEEMKKREGFELVMEPEFVNVCFWFVPPSLRGKQESPDYHERLSKVAPVLKERMVKEGSMMIGYQPHGTRGNFFRVVVANSALTCADMDFLLNELERLGQDL

SEQ ID NO: 16523 - protein, 68 aa, Artificial Sequence
  Synthetic polypeptide
SQHFERLSVTTPSRRELRFWDLAPTVSEWSRLMREGKWSPRIWRGRLVWPRLRVLCRSWSVPPLAPLC

SEQ ID NO: 16524 - protein, 64 aa, Artificial Sequence
  Synthetic polypeptide
EAECHYSIQKGAAFLGLGTDSVRVVKADERGKMVPEDLERQIGMAEAEGAVPFLVSATSGTTVL

SEQ ID NO: 16525 - protein, 96 aa, Artificial Sequence
  Synthetic polypeptide
EAECHYSIQKGAAFLGLGTDSVRVVKADERGKMVPEDLERQIGMAEAEGAVPFLVSATSGTTVLGAFDPLEAIADVCQRHGLWLHVDAAWGGSVLL

SEQ ID NO: 16526 - protein, 27 aa, Artificial Sequence
  Synthetic polypeptide
EAECHYSIQKGAAFLGLGTDSVRVVKA

SEQ ID NO: 16527 - protein, 32 aa, Artificial Sequence
  Synthetic polypeptide
SQHFERLSVTTPSRRELRFWDLAPTVSEWSRL

SEQ ID NO: 16528 - protein, 542 aa, Artificial Sequence
  Synthetic polypeptide
KYKISRAWWHMPVIPATREAESGESLEPGRRELCYLCTLPPALLSREILMADSEALPSLAGDPVAVEALLRAVFGVVVDEAIQKGTSVSQKVCEWKEPEELKQLLDLELRSQGESQKQILERCRAVIRYSVKTGHPRFFNQLFSGLDPHALAGRIITESLNTSQYTYEIAPVFVLMEEEVLRKLRALVGWSSGDGIFCPGGSISNMYAVNLARYQRYPDCKQRGLRTLPPLALFTSKECHYSIQKGAAFLGLGTDSVRVVKADERGKMVPEDLERQIGMAEAEGAVPFLVSATSGTTVLGAFDPLEAIADVCQRHGLWLHVDAAWGGSVLLSQTHRHLLDGIQRADSVAWNPHKLLAAGLQCSALLLQDTSNLLKRCHGSQASYLFQQDKFYDVALDTGDKVVQCGRRVDCLKLWLMWKAQGDQGLERRIDQAFVLARYLVEEMKKREGFELVMEPEFVNVCFWFVPPSLRGKQESPDYHERLSKVAPVLKERMVKEGSMMIGYQPHGTRGNFFRVVVANSALTCADMDFLLNELERLGQDL

SEQ ID NO: 16529 - protein, 30 aa, Artificial Sequence
  Synthetic polypeptide
SQLLERLSQENHLNPGGGSCATCAPCLRLS

SEQ ID NO: 16530 - protein, 24 aa, Artificial Sequence
  Synthetic polypeptide
TREAGVVLPVHPASGSPEQRDPDG

SEQ ID NO: 16531 - protein, 543 aa, Artificial Sequence
  Synthetic polypeptide
KYKISRAWWHMPVIPATREAESGESLEPGRRELWSYLCTLPPALLSREILMADSEALPSLAGDPVAVEALLRAVFGVVVDEAIQKGTSVSQKVCEWKEPEELKQLLDLELRSQGESQKQILERCRAVIRYSVKTGHPRFFNQLFSGLDPHALAGRIITESLNTSQYTYEIAPVFVLMEEEVLRKLRALVGWSSGDGIFCPGGSISNMYAVNLARYQRYPDCKQRGLRTLPPLALFTSKECHYSIQKGAAFLGLGTDSVRVVKADERGKMVPEDLERQIGMAEAEGAVPFLVSATSGTTVLGAFDPLEAIADVCQRHGLWLHVDAAWGGSVLLSQTHRHLLDGIQRADSVAWNPHKLLAAGLQCSALLLQDTSNLLKRCHGSQASYLFQQDKFYDVALDTGDKVVQCGRRVDCLKLWLMWKAQGDQGLERRIDQAFVLARYLVEEMKKREGFELVMEPEFVNVCFWFVPPSLRGKQESPDYHERLSKVAPVLKERMVKEGSMMIGYQPHGTRGNFFRVVVANSALTCADMDFLLNELERLGQDL

SEQ ID NO: 16532 - protein, 31 aa, Artificial Sequence
  Synthetic polypeptide
SQLLERLSQENHLNPGGGSCGATCAPCLRLS

SEQ ID NO: 16533 - protein, 25 aa, Artificial Sequence
  Synthetic polypeptide
TREAGVVELPVHPASGSPEQRDPDG

SEQ ID NO: 16534 - protein, 27 aa, Artificial Sequence
  Synthetic polypeptide
PGRVAHTCNPSTLGSRGATCAPCLRLS

SEQ ID NO: 16535 - protein, 34 aa, Artificial Sequence
  Synthetic polypeptide
RAGWLTPVIPARWEAEELPVHPASGSPEQRDPDG

SEQ ID NO: 16536 - protein, 517 aa, Artificial Sequence
  Synthetic polypeptide
SQHVGKPRSYLCTLPPALLSREILMADSEALPSLAGDPVAVEALLRAVFGVVVDEAIQKGTSVSQKVCEWKEPEELKQLLDLELRSQGESQKQILERCRAVIRYSVKTGHPRFFNQLFSGLDPHALAGRIITESLNTSQYTYEIAPVFVLMEEEVLRKLRALVGWSSGDGIFCPGGSISNMYAVNLARYQRYPDCKQRGLRTLPPLALFTSKECHYSIQKGAAFLGLGTDSVRVVKADERGKMVPEDLERQIGMAEAEGAVPFLVSATSGTTVLGAFDPLEAIADVCQRHGLWLHVDAAWGGSVLLSQTHRHLLDGIQRADSVAWNPHKLLAAGLQCSALLLQDTSNLLKRCHGSQASYLFQQDKFYDVALDTGDKVVQCGRRVDCLKLWLMWKAQGDQGLERRIDQAFVLARYLVEEMKKREGFELVMEPEFVNVCFWFVPPSLRGKQESPDYHERLSKVAPVLKERMVKEGSMMIGYQPHGTRGNFFRVVVANSALTCADMDFLLNELERLGQDL

SEQ ID NO: 16537 - protein, 50 aa, Artificial Sequence
  Synthetic polypeptide
LQESFLSSVRKSSSSVKWGCDRSTYLLGFSQGLQEATSTGSGPQAPCATT

SEQ ID NO: 16538 - protein, 28 aa, Artificial Sequence
  Synthetic polypeptide
GFHKDYRRPHPLGLDHRLPVPLLDPVHQ

SEQ ID NO: 16539 - protein, 312 aa, Artificial Sequence
  Synthetic polypeptide
QEHLPSRVFTRITGGHIHWVWTTGSLCHYLTQYTSDWGSSLRMALSLAQGLAFLHEERWQNGQYKPGIAHRDLSSQNVLIREDGSCAIGDLGLALVLPGLTQPPAWTPTQPQGPAAIMEAGTQRYMAPELLDKTLDLQDWGMALRRADIYSLALLLWEILSRCPDLRPDSSPPPFQLAYEAELGNTPTSDELWALAVQERRRPYIPSTWRCFATDPDGLRELLEDCWDADPEARLTAECVQQRLAALAHPQESHPFPESCPRGCPPLCPEDCTSIPAPTILPCRPQRSACHFSVQQGPCSRNPQPACTLSPV

SEQ ID NO: 16540 - protein, 217 aa, Artificial Sequence
  Synthetic polypeptide
QEHLPSRVFTRITGGHIHWVWTTGSLCHYLTQYTSDWGSSLRMALSLAQGLAFLHEERWQNGQYKPGIAHRDLSSQNVLIREDGSCAIGDLGLALVLPGLTQPPAWTPTQPQGPAAIMEAGTQRYMAPELLDKTLDLQDWGMALRRADIYSLALLLWEILSRCPDLRPAVHHPSNWPMRQNWAIPLPLMSYGPWQCRRGGVPTSHPPGAALPQTLMG

SEQ ID NO: 16541 - protein, 217 aa, Artificial Sequence
  Synthetic polypeptide
QEHLPSRVFTRITGGHIHWVWTTGSLCHYLTQYTSDWGSSLRMALSLAQGLAFLHEERWQNGQYKPGIAHRDLSSQNVLIREDGSCAIGDLGLALVLPGLTQPPAWTPTQPQGPAAIMEDPDGLRELLEDCWDADPEARLTAECVQQRLAALAHPQESHPFPESCPRGCPPLCPEDCTSIPAPTILPCRPQRSACHFSVQQGPCSRNPQPACTLSPV

SEQ ID NO: 16542 - protein, 8 aa, Artificial Sequence
  Synthetic polypeptide
SQLFGRLS

SEQ ID NO: 16543 - protein, 109 aa, Artificial Sequence
  Synthetic polypeptide
AWKFETSLTTMEEPISTKNTKKAKSLAWCCISVIPAIWEAKLIGCIIGRQGAKINEIRQMSGAQIKIANPVEGSTDRQVTITGSAASISLAQYLINVRLSSETGGMGSS

SEQ ID NO: 16544 - protein, 213 aa, Artificial Sequence
  Synthetic polypeptide
AWKFETSLTTMEEPISTKNTKKAKSLAWCCISVIPAIWEAKLIGCIIGRQGAKINEIRQMSGAQIKIANPVEGSTDRQVTITGSAASISLAQYLINVSLENAKPSSQAASVTIPDHLSINLSQPSTPSSSSSSTTTPSLATAGTSDAPSSLPNPLPTAPCVSSLLGMKPIPLLALNVVSAAKGTGASATTTTTSAVPCVTNKLKGEKQRFSPY

SEQ ID NO: 16545 - protein, 28 aa, Artificial Sequence
  Synthetic polypeptide
AAWLLLGPLTCLCLPHQTSKSKKKSQWR

SEQ ID NO: 16546 - protein, 37 aa, Artificial Sequence
  Synthetic polypeptide
AWWFTPVIPVLREATQEDCWNSGARDQPEQHGCCWAP

SEQ ID NO: 16547 - protein, 399 aa, Artificial Sequence
  Synthetic polypeptide
SQCLGRPHRRIAGTQELETSLSSMAAAGPLDMSLPSTPDIKIKEEEPVEVDSSPPDSPASSPCSPPLKEKEVTPKPVLISTPTPTIVRPGSLPLHLGYDPLHPTLPSPTSVITQAPPSNRQMGSPTGSLPLVMHLANGQTMPVLPGPPVQMPSVISLARPVSMVPNIPGIPGPPVNSSGSISPSGHPIPSEAKMRLKATLTHQVSSINGGCGMVVGTASTMVTARPEQSQILIQHPDAPSPAQPQVSPAQPTPSTGGRRRRTVDEDPDERRQRFLERNRAAASRCRQKRKLWVSSLEKKAEELTSQNIQLSNEVTLLRNEVAQLKQLLLAHKDCPVTALQKKTQGYLGGRQRTPPTTGCPDLWVTVALPAPGNGETWPEPSLPVSAPEVWQKYPGILEE

SEQ ID NO: 16548 - protein, 419 aa, Artificial Sequence
  Synthetic polypeptide
SQCLGRPHRRIAGTQELETSLSSMAAAGPLDMSLPSTPDIKIKEEEPVEVDSSPPDSPASSPCSPPLKEKEVTPKPVLISTPTPTIVRPGSLPLHLGYDPLHPTLPSPTSVITQAPPSNRQMGSPTGSLPLVMHLANGQTMPVLPGPPVQMPSVISLARPVSMVPNIPGIPGPPVNSSGSISPSGHPIPSEAKMRLKATLTHQVSSINGGCGMVVGTASTMVTARPEQSQILIQHPDAPSPAQPQVSPAQPTPSTGGRRRRTVDEDPDERRQRFLERNRAAASRCRQKRKLWVSSLEKKAEELTSQNIQLSNEVTLLRNEVAQLKQLLLAHKDCPVTALQKKTQGYLESPKESSEPTGSPAPVIQHSSATAPSNGLSVRSAAEAVATSVLTQMASQRTELSMPIQSHVIMTPQSQSAGR

SEQ ID NO: 16549 - protein, 35 aa, Artificial Sequence
  Synthetic polypeptide
AAWLLLGPLTCLCLPHQTSKSKKKSQWRRLPQSLF

SEQ ID NO: 16550 - protein, 398 aa, Artificial Sequence
  Synthetic polypeptide
SQCLGRPHRRIAGTQELETSLSSMAAAGPLDMSLPSTPDIKIKEEEPVEEVTPKPVLISTPTPTIVRPGSLPLHLGYDPLHPTLPSPTSVITQAPPSNRQMGSPTGSLPLVMHLANGQTMPVLPGPPVQMPSVISLARPVSMVPNIPGIPGPPVNSSGSISPSGHPIPSEAKMRLKATLTHQVSSINGGCGMVVGTASTMVTARPEQSQILIQHPDAPSPAQPQVSPAQPTPSTGGRRRRTVDEDPDERRQRFLERNRAAASRCRQKRKLWVSSLEKKAEELTSQNIQLSNEVTLLRNEVAQLKQLLLAHKDCPVTALQKKTQGYLESPKESSEPTGSPAPVIQHSSATAPSNGLSVRSAAEAVATSVLTQMASQRTELSMPIQSHVIMTPQSQSAGR

SEQ ID NO: 16551 - protein, 88 aa, Artificial Sequence
  Synthetic polypeptide
SQCLGRPHRRIAGTQELETSLSSMAAAGPLDMSLPSTPDIKIKEEEPVEVDSSPPDSPASSPCSPPLKEKEVTPKPVLISTPTPTIVR

SEQ ID NO: 16552 - protein, 45 aa, Artificial Sequence
  Synthetic polypeptide
TLKAEVAEPFSEATALLLRHSGLCPLGGHGALLSDGSLSHPLCHV

SEQ ID NO: 16553 - protein, 42 aa, Artificial Sequence
  Synthetic polypeptide
RRRLQNPSLKQQLFSYAILGFALSEAMGLFCLMVAFLILFAM

SEQ ID NO: 16554 - protein, 24 aa, Artificial Sequence
  Synthetic polypeptide
SQLLRRLRQENHLNPEGGGCRTLL

SEQ ID NO: 16555 - protein, 113 aa, Artificial Sequence
  Synthetic polypeptide
IRISTLTQSLSDVTPGEIILMLQANWLLVPSMLATRFLELKLVIISQAVMTEVVLSKMLSTKPGALDKRLWLRALGSALLAMKTGIKICGSRPAPHLSGAQLTTLTTTALRAT

SEQ ID NO: 16556 - protein, 6 aa, Artificial Sequence
  Synthetic polypeptide
HLEKSS

SEQ ID NO: 16557 - protein, 142 aa, Artificial Sequence
  Synthetic polypeptide
CNTWRNHPDVASKLATCPFNARHQVPRAEISHHISSCDDRSCIEQDVVNQTRSLRQETLAESTWQCPPCDEDWDKDLWEQTSTPFVWGTTHYSDNNSPASNIVTEHKNNLASGMRVPKSLPYVLPWKNNSDSLDFSLCYCLS

SEQ ID NO: 16558 - protein, 133 aa, Artificial Sequence
  Synthetic polypeptide
CNTWRNHPDVASKLATCPFNARHQVPRAEISHHISSCDDRSCIEQDVVNQTRSLRQETLAESTWQCPPCDEDWDKDLWEQTSTPFVWGTTHYSDNNSPASNIVTEHKNNLASGMRVPKSLPYVLPWKNNGNAQ

SEQ ID NO: 16559 - protein, 15 aa, Artificial Sequence
  Synthetic polypeptide
FLHFHLRESDNSCSS

SEQ ID NO: 16560 - protein, 102 aa, Artificial Sequence
  Synthetic polypeptide
WSQDGRIGTAPVYSSQRERRRRRVISAFPSERIRQQLLQLTRIQLLVLLMMKPLMLKPLLLQPLQPLLLLPLQPPLLLPLLVKTFQFYPNGLGISRMVECVP

SEQ ID NO: 16561 - protein, 17 aa, Artificial Sequence
  Synthetic polypeptide
LPGVPEGGERLSLQRPA

SEQ ID NO: 16562 - protein, 57 aa, Artificial Sequence
  Synthetic polypeptide
WRKSAWESGVLGAAADFLASLKEARGYHCSDLPDRSFGGSPQCGCGPGLHEPEKAGP

SEQ ID NO: 16563 - protein, 71 aa, Artificial Sequence
  Synthetic polypeptide
NPVSTKNTKISQVWCLSAVGLLTTQIGRKSLPCRRTESPTPAALMLLWAVGLISTRRRSIRRAVWRRLGAG

SEQ ID NO: 16564 - protein, 21 aa, Artificial Sequence
  Synthetic polypeptide
PGQRGETLSLLKIQKLARCGV

SEQ ID NO: 16565 - protein, 100 aa, Artificial Sequence
  Synthetic polypeptide
PGVVFKCCGAANYTDWEKIPSMSKNRVPDSCCINVTVGCGINFNEKAIHKEGCVEKIGGWLRKNVLVVAAAALGIAFVEVLGIVFACCLVKSIRSGYEVM

SEQ ID NO: 16566 - protein, 98 aa, Artificial Sequence
  Synthetic polypeptide
PGVVFKCCGAANYTDWEKIPSMSKNRVPDSCCINVTVGCGINFNEKAIHKEGCVEKIGGWLRKNVLVVAAAALGIAFVLGIVFACCLVKSIRSGYEVM

SEQ ID NO: 16567 - protein, 79 aa, Artificial Sequence
  Synthetic polypeptide
PGVVFKCCGAANYTDWEKIPSMSKNRVPDSCCINVTVGCGINFNEKAIHKEGCVEKIGGWLRKNVLVVAAAALGIAFVE

SEQ ID NO: 16568 - protein, 77 aa, Artificial Sequence
  Synthetic polypeptide
PGVVFKCCGAANYTDWEKIPSMSKNRVPDSCCINVTVGCGINFNEKAIHKEGCVEKIGGWLRKNVLVVAAAALGIAF

SEQ ID NO: 16569 - protein, 108 aa, Artificial Sequence
  Synthetic polypeptide
NPVSTKNTKISQFKCCGAANYTDWEKIPSMSKNRVPDSCCINVTVGCGINFNEKAIHKEGCVEKIGGWLRKNVLVVAAAALGIAFVEVLGIVFACCLVKSIRSGYEVM

SEQ ID NO: 16570 - protein, 74 aa, Artificial Sequence
  Synthetic polypeptide
PGQRGETLSLLKIQKLASLSAVGLLTTQIGRKSLPCRRTESPTPAALMLLWAVGLISTRRRSIRRAVWRRLGAG

SEQ ID NO: 16571 - protein, 2 aa, Artificial Sequence
  Synthetic polypeptide
PV

SEQ ID NO: 16572 - protein, 106 aa, Artificial Sequence
  Synthetic polypeptide
NPVSTKNTKISQFKCCGAANYTDWEKIPSMSKNRVPDSCCINVTVGCGINFNEKAIHKEGCVEKIGGWLRKNVLVVAAAALGIAFVLGIVFACCLVKSIRSGYEVM

SEQ ID NO: 16573 - protein, 87 aa, Artificial Sequence
  Synthetic polypeptide
NPVSTKNTKISQFKCCGAANYTDWEKIPSMSKNRVPDSCCINVTVGCGINFNEKAIHKEGCVEKIGGWLRKNVLVVAAAALGIAFVE

SEQ ID NO: 16574 - protein, 85 aa, Artificial Sequence
  Synthetic polypeptide
NPVSTKNTKISQFKCCGAANYTDWEKIPSMSKNRVPDSCCINVTVGCGINFNEKAIHKEGCVEKIGGWLRKNVLVVAAAALGIAF

SEQ ID NO: 16575 - protein, 446 aa, Artificial Sequence
  Synthetic polypeptide
FRARHASASSTNLKDILADLIPKEQARIKTFRQQHGKTVVGQITVDMMYGGMRGMKGLVYETSVLDPDEGIRFRGFSIPECQKLLPKAKGGEEPLPEGLFWLLVTGHIPTEEQVSWLSKEWAKRAALPSHVVTMLDNFPTNLHPMSQLSAAVTALNSESNFARAYAQGISRTKYWELIYEDSMDLIAKLPCVAAKIYRNLYREGSGIGAIDSNLDWSHNFTNMLGYTDHQFTELTRLYLTIHSDHEGGNVSAHTSHLVGSALSDPYLSFAAAMNGLAGPLHGLANQEVLVWLTQLQKEVGKDVSDEKLRDYIWNTLNSGRVVPGYGHAVLRKTDPRYTCQREFALKHLPNDPMFKLVAQLYKIVPNVLLEQGKAKNPWPNVDAHSGVLLQYYGMTEMNYYTVLFGVSRALGVLAQLIWSRALGFPLERPKSMSTEGLMKFVDSKSG

SEQ ID NO: 16576 - protein, 17 aa, Artificial Sequence
  Synthetic polypeptide
KFRDDSEPGMPVLPPRI

SEQ ID NO: 16577 - protein, 43 aa, Artificial Sequence
  Synthetic polypeptide
HPEAKSPTVTPPGLGENLGGRSSGMIQSPACQCFLHEFERHIG

SEQ ID NO: 16578 - protein, 112 aa, Artificial Sequence
  Synthetic polypeptide
FRARHASASSTNLKDILADLIPKEQARIKTFRQQHGKTVVGQITVDMGIRFRGFSIPECQKLLPKAKGGEEPLPEGLFWLLVTGHIPTEEQVSWLSKEWAKRAALPSHVVTM

SEQ ID NO: 16579 - protein, 126 aa, Artificial Sequence
  Synthetic polypeptide
FRARHASASSTNLKDILADLIPKEQARIKTFRQQHGKTVVGQITVDMVSWLSKEWAKRAALPSHVVTMLDNFPTNLHPMSQLSAAVTALNSESNFARAYAQGISRTKYWELIYEDSMDLIAKLPCV

SEQ ID NO: 16580 - protein, 129 aa, Artificial Sequence
  Synthetic polypeptide
FRARHASASSTNLKDILADLIPKEQARIKTFRQQHGKTVVGQITVDMMYGGMRGMKGLVYETSVLDPDEGIRFRGFSIPECQKLLPKAKGGEEPLPEGLFWLLVTGHIPTEEQLIYEDSMDLIAKLPCV

SEQ ID NO: 16581 - protein, 137 aa, Artificial Sequence
  Synthetic polypeptide
FRARHASASSTMYGGMRGMKGLVYETSVLDPDEGIRFRGFSIPECQKLLPKAKGGEEPLPEGLFWLLVTGHIPTEEQVSWLSKEWAKRAALPSHVVTMLDNFPTNLHPMSQLSAAVTALNSESNFARAYAQGISRTK

SEQ ID NO: 16582 - protein, 20 aa, Artificial Sequence
  Synthetic polypeptide
KFRDDSEPGMPVLPPRCMVA

SEQ ID NO: 16583 - protein, 49 aa, Artificial Sequence
  Synthetic polypeptide
HPEAKSPTVTPPGLGENLGGRSSGMIQSPACQCFLHDVWWHERHEGIGL

SEQ ID NO: 16584 - protein, 158 aa, Artificial Sequence
  Synthetic polypeptide
FRARHASASSTNLKDILADLIPKEQARIKTFRQQHGKTVVGQITVDMMYGGMRGMKGLVYETSVLDPDEGIRFRGFSIPECQKLLPKAKGGEEPLPEGLFWLLVTGHIPTEEQVSWLSKEWAKRAALPSHVVTMLDNFPTNLHPMSQLSAAVTALNSE

SEQ ID NO: 16585 - protein, 122 aa, Artificial Sequence
  Synthetic polypeptide
FRARHASASSTNLKDILADLIPKEQARIKTFRQQHGKTVVGQITVDMMYGGMRGMKGLVYETSVLDPDEGLFWLLVTGHIPTEEQVSWLSKEWAKRAALPSHVVTMLDNFPTNLHPMSQLSA

SEQ ID NO: 16586 - protein, 55 aa, Artificial Sequence
  Synthetic polypeptide
FRARHASASSTNLKDILADLIPKEQARIKTFRQQHGKTVVGQITVDMACCSGSCL

SEQ ID NO: 16587 - protein, 47 aa, Artificial Sequence
  Synthetic polypeptide
FRARHASASSTNLKDILADLIPKEQARIKTFRQQHGKTVVGQITVDM

SEQ ID NO: 16588 - protein, 31 aa, Artificial Sequence
  Synthetic polypeptide
FRARHASASSTNLKDILADLIPKEQARIKTF

SEQ ID NO: 16589 - protein, 45 aa, Artificial Sequence
  Synthetic polypeptide
DQPRQYNPGDRPPWLYLLRPPGSWEPRMHLVLFLQPGMPVLPPRI

SEQ ID NO: 16590 - protein, 79 aa, Artificial Sequence
  Synthetic polypeptide
PNAVARAHNPNTLGGQGGRIMITRVQEFETSLGNIIPEIARHGFTYCGRPALGNQECILSCSCSPACQCFLHEFERHIG

SEQ ID NO: 16591 - protein, 21 aa, Artificial Sequence
  Synthetic polypeptide
DQPRQYNPGDRPPWLYLLRPP

SEQ ID NO: 16592 - protein, 49 aa, Artificial Sequence
  Synthetic polypeptide
PNAVARAHNPNTLGGQGGRIMITRVQEFETSLGNIIPEIARHGFTYCGR

SEQ ID NO: 16593 - protein, 31 aa, Artificial Sequence
  Synthetic polypeptide
AVIETLHSSLEQTKEEKEEEEEGPRPGHCFW

SEQ ID NO: 16594 - protein, 690 aa, Artificial Sequence
  Synthetic polypeptide
LRHCTPVWNKQKKRRKKKKKVLDQAIVSGNVPSSPEEVEAVWPALAEQLQCCAQNSELSMDSVVPFDAASEVPVEEQRAEAMVRIQDCLLAGQAPQALTLLRSAREVWPEGDVFGSQDISPEEEIQLLKQILSAPLPRQQGPEERGAEEEEEEEEEEEEELQVVQVSEKEFNFLDYLKRFACSTVVRAYVLLLRSYQQNSAHTNHCIVKMLHRLAHDLKMEALLFQLSVFCLFNRLLSDPAAGAYKELVTFAKYILGKFFALAAVNQKAFVELLFWKNTAVVREMTEGYGSLDDRSSSRRAPTWSPEEEAHLRELYLANKDVEGQDVVEAILAHLNTVPRTRKQIIHHLVQMGLADSVKDFQRKGTHIVLWTGDQELELQRLFEEFRDSDDVLGHIMKNITAKRSRARIVDKLLALGLVAERRELYKKRQKKLASSILPNGAESLKDFCQEDLEEEENLPEEDSEEEEEGGSEAEQVQGSLVLSNENLGQSLHQEGFSIPLLWLQNCLIRAADDREEDGCSQAVPLVPLTEENEEAMENEQFQQLLRKLGVRPPASGQETFWRIPAKLSPTQLRRAAASLSQPEEEQKLQPELQPKVPGEQGSDEEHCKEHRAQALRALLLAHKKKAGLASPEEEDAVGKEPLKAAPKKRQLLDSDEEQEEDEGRNRAPELGAPGIQKKKRYQIEDDEDD

SEQ ID NO: 16595 - protein, 20 aa, Artificial Sequence
  Synthetic polypeptide
DIALQSGTNKRREGRRRRRS

SEQ ID NO: 16596 - protein, 387 aa, Artificial Sequence
  Synthetic polypeptide
GQPYVSLAQQMAPPSPSNSTPNSSSGSNGNDQLSKTNLYIRGLQPGTTDQDLVKLCQPYGKIVSTKAILDKTTNKCKGYGFVDFDSPSAAQKAVTALKASGVQAQMAKQQEQDPTNLYISNLPLSMDEQELEGMLKPFGQVISTRILRDTSGTSRGVGFARMESTEKCEAIITHFNGKYIKTPPGVPAPSDPLLCKFADGGPKKRQNQGKFVQNGRAWPRNADMGVMALTYDPTTALQNGFYPAPYNITPNRMLAQSALSPYLSSPVSSYQRVTQTSPLQVPNPSWMHHHSYLMQPSGSVLTPGMDHPISLQPASMMGPLTQQLGHLSLSSTGTYMPTAAAMQGAYISQYTPVPSSSVSVEESSGQQNQVAVDAPSEHGVYSFQFNK

SEQ ID NO: 16597 - protein, 32 aa, Artificial Sequence
  Synthetic polypeptide
ASHMCHWLSRWHHLAQATVHLTAVVEAMEMTS

SEQ ID NO: 16598 - protein, 13 aa, Artificial Sequence
  Synthetic polypeptide
PAICVIGSADGTT

SEQ ID NO: 16599 - protein, 324 aa, Artificial Sequence
  Synthetic polypeptide
GQPYVSLAQQMAPPSPSNSTPNSSSGSNGNDQLSKTNLYIRGLQPGTTDQDLVKLCQPYGKIVSTKAILDKTTNKCKGYGFVDFDSPSAAQKAVTALKASGVQAQMAKQQEQDPTNLYISNLPLSMDEQELEGMLKPFGQVISTRILRDTSGTSRGVGFARMESTEKCEAIITHFNGKYIKTPPGVPAPSDPLLCKFADGGPKKRQNQGKFVQNGRAWPRNADMGVMALTYDPTTALQNGFYPAPYNITPNRMLAQSALSPYLSSPVSSYQYMPTAAAMQGAYISQYTPVPSSSVSVEESSGQQNQVAVDAPSEHGVYSFQFNK

SEQ ID NO: 16600 - protein, 14 aa, Artificial Sequence
  Synthetic polypeptide
GQPYVSLAQQMAPP

SEQ ID NO: 16601 - protein, 14 aa, Artificial Sequence
  Synthetic polypeptide
ASHMCHWLSRWHHL

SEQ ID NO: 16602 - protein, 64 aa, Artificial Sequence
  Synthetic polypeptide
GQPYVSLAQQMAPPSPSNSTPNSSSGSNGNDQLSKTNLYIRGLQPGTTDQDLVKLCQPLWLCRF

SEQ ID NO: 16603 - protein, 53 aa, Artificial Sequence
  Synthetic polypeptide
NPISTENTAISQAWWLMPVIPATWELRLECNGVISTHYNLCLPGSSDSLTSAS

SEQ ID NO: 16604 - protein, 275 aa, Artificial Sequence
  Synthetic polypeptide
PGVVAHACNPSYLGAEAGVQWRDLDSLQPLPPRFKRFSHLCLLSSWDYRMESTEKCEAIITHFNGKYIKTPPGVPAPSDPLLCKFADGGPKKRQNQGKFVQNGRAWPRNADMGVMALTYDPTTALQNGFYPAPYNITPNRMLAQSALSPYLSSPVSSYQRVTQTSPLQVPNPSWMHHHSYLMQPSGSVLTPGMDHPISLQPASMMGPLTQQLGHLSLSSTGTYMPTAAAMQGAYISQYTPVPSSSVSVEESSGQQNQVAVDAPSEHGVYSFQFNK

SEQ ID NO: 16605 - protein, 269 aa, Artificial Sequence
  Synthetic polypeptide
NPISTENTAISQAWWLMPVIPATWELRFKRFSHLCLLSSWDYRMESTEKCEAIITHFNGKYIKTPPGVPAPSDPLLCKFADGGPKKRQNQGKFVQNGRAWPRNADMGVMALTYDPTTALQNGFYPAPYNITPNRMLAQSALSPYLSSPVSSYQRVTQTSPLQVPNPSWMHHHSYLMQPSGSVLTPGMDHPISLQPASMMGPLTQQLGHLSLSSTGTYMPTAAAMQGAYISQYTPVPSSSVSVEESSGQQNQVAVDAPSEHGVYSFQFNK

SEQ ID NO: 16606 - protein, 27 aa, Artificial Sequence
  Synthetic polypeptide
PGVVAHACNPSYLGAEVQAILSPLPPE

SEQ ID NO: 16607 - protein, 432 aa, Artificial Sequence
  Synthetic polypeptide
PPPRLGGESTVRTIAMDGTEGLVRGQKVLDSGAPIKIPVGPETLGRIMNVIGEPIDERGPIKTKQFAPIHAEAPEFMEMSVEQEILVTGIKVVDLLAPYAKGGKIGLFGGAGVGKTVLIMELINNVAKAHGGYSVFAGVGERTREGNDLYHEMIESGVINLKDATSKVALVYGQMNEPPGARARVALTGLTVAEYFRDQEGQDVLLFIDNIFRFTQAGSEVSALLGRIPSAVGYQPTLATDMGTMQERITTTKKGSITSVQAIYVPADDLTDPAPATTFAHLDATTVLSRAIAELGIYPAVDPLDSTSRIMDPNIVGSEHYDVARGVQKILQDYKSLQDIIAILGMDELSEEDKLTVSRARKIQRFLSQPFQVAEVFTGHMGKLVPLKETIKGFQQILAGEYDHLPEQAFYMVGPIEEAVAKADKLAEEHSS

SEQ ID NO: 16608 - protein, 16 aa, Artificial Sequence
  Synthetic polypeptide
GVSLPDRHPVWEVRAQ

SEQ ID NO: 16609 - protein, 51 aa, Artificial Sequence
  Synthetic polypeptide
RASLPGRPSSEMWGAPLPRRPVWDVRSASARPRPRLGTEECLCLTATPSGR

SEQ ID NO: 16610 - protein, 421 aa, Artificial Sequence
  Synthetic polypeptide
PPPRLGGESTVRTIAMDGTEGLVRGQKVLDSGAPIKIPVGPETLGRIMNVIGEPIDERGPIKTKQFAPIHAEAPEFMEMSVEQEILVTGIKVVDLLAPYAKGGKIGLFGGAGVGKTVLIMELINNVAKAHGGYSVFAGVGERTREGNDLYHEMIESGVINLKDATSKVALVYGQMNEPPGARARVALTGLTVAEYFRDQEGQDVLLFIDVSALLGRIPSAVGYQPTLATDMGTMQERITTTKKGSITSVQAIYVPADDLTDPAPATTFAHLDATTVLSRAIAELGIYPAVDPLDSTSRIMDPNIVGSEHYDVARGVQKILQDYKSLQDIIAILGMDELSEEDKLTVSRARKIQRFLSQPFQVAEVFTGHMGKLVPLKETIKGFQQILAGEYDHLPEQAFYMVGPIEEAVAKADKLAEEHSS

SEQ ID NO: 16611 - protein, 248 aa, Artificial Sequence
  Synthetic polypeptide
PPPRLGGESTVRTIAMDGTEGLVRGQKVLDSGAPIKIPVGPETLGRIMNVIGEPIDERGPIKTKQFAPIHAEAPEFMEMSVEQEILVTGIKVVDLLAPYAKGGKIGLFGGAGVGKTVLIMELINNVAKAHGGYSVFAGVGERTREGNDLYHEMIESGVINLKDATSKVSALLGRIPSAVGYQPTLATDMGTMQERITTTKKGSITSVQDYKSLQDIIAILGMDELSEEDKLTVSRARKIQRFLSQPFQ

SEQ ID NO: 16612 - protein, 328 aa, Artificial Sequence
  Synthetic polypeptide
PPPRLGGESTVRTIAMDGTEGLVRGQKVLDSGAPIKIPVGPETLGRIMNVIGEPIDERGPIKTKQFAPIHAEAPEFMEMSVEQEILVTGIKVVDLLAPYAKGGKIGLFGGAGVGKTVLIMELINNVAKAHGGYSVFAGVGERTREGNDLYHEMIESGVINLKDATSKVALVYGQMNEPPGARARVALTGLTVAEYFRDQEGQDVLLFIDNIFRFTQAGSEVSALLGRIPSAVGYQPTLATDMGTMQERITTTKKGSITSVQAIYVPADDLTDPAPATTFAHLDATTVLSRAIAELGIYPAVDPLDSTSRIMDPNIVGSEHYDVARGVQ

SEQ ID NO: 16613 - protein, 188 aa, Artificial Sequence
  Synthetic polypeptide
LTPVIPALWEAGVDASPEFRSLRPAWATRQPASAKWYDRRDYVFIEFCVEDSKDVNVNFEKSKLTFSCLGGSDNFKHLNEIDLFHCIDPNDSKHKRTDRSILCCLRKGESGQSWPRLTKERAKLNWLSVDFNNWKDWEDDSDEDMSNFDRFSEMMNNMGGDEDVDLPEVDGADDDSQDSDDEKMPDLE

SEQ ID NO: 16614 - protein, 34 aa, Artificial Sequence
  Synthetic polypeptide
DQPGQQGSLLLQSGTIEGTMSSLNFVLKTVRMLM

SEQ ID NO: 16615 - protein, 27 aa, Artificial Sequence
  Synthetic polypeptide
VQKFETSLGNKAACFCKVVRSKGLCLH

SEQ ID NO: 16616 - protein, 158 aa, Artificial Sequence
  Synthetic polypeptide
LTPVIPALWEAGVDASPEFRSLRPAWATRQPASAKWYDRRDYVFIEFCVEDSKDVNVNFEKSKLTFSCLGGSDNFKHLNEIDLFHCIDPNDSKHKRTDRSILCCLRKGESGQSWPRLTKERAKMMNNMGGDEDVDLPEVDGADDDSQDSDDEKMPDLE

SEQ ID NO: 16617 - protein, 155 aa, Artificial Sequence
  Synthetic polypeptide
LTPVIPALWEAGVDASPEFRSLRPAWATRQPASAKWYDRRDYVFIEFCVEDSKDVNVNFEKSKLTFSCLGGSDNFKHLNEIDLFHCIDPNLNWLSVDFNNWKDWEDDSDEDMSNFDRFSEMMNNMGGDEDVDLPEVDGADDDSQDSDDEKMPDLE

SEQ ID NO: 16618 - protein, 167 aa, Artificial Sequence
  Synthetic polypeptide
LTPVIPALWEAGVDASPEFRSLRPAWATRQPASAKWYDRRDYVFIEFCVEDSKDVNVNFEKSKLTFSCLGGSDNFKHLNEIDLFHCIDPNDSKHKRTDRSILCCLRKGESGQSWPRLTKERAKLNWLSVDFNNWKDWEDDSDEDMSNFDRFSEDSQDSDDEKMPDLE

SEQ ID NO: 16619 - protein, 152 aa, Artificial Sequence
  Synthetic polypeptide
LTPVIPALWEAGVDASPEFRSLRPAWATRQPASAKWYDRRDYVFIEFCVEDSKDVNVNFEKSKLTFSCLRKGESGQSWPRLTKERAKLNWLSVDFNNWKDWEDDSDEDMSNFDRFSEMMNNMGGDEDVDLPEVDGADDDSQDSDDEKMPDLE

SEQ ID NO: 16620 - protein, 120 aa, Artificial Sequence
  Synthetic polypeptide
GQVQWLTPVIPALWEAEAGGSPEGLEQNLTVMNQYQSLKNRIPPRQPHNKPSWRQQLKLMKNQSVKQNRVGVKRRHGRLCPNWVFGRLQELLESLSGNLRISSLSSQNQMSTRALLQILT

SEQ ID NO: 16621 - protein, 19 aa, Artificial Sequence
  Synthetic polypeptide
SQHFGRPRQADHLRVWNRI

SEQ ID NO: 16622 - protein, 43 aa, Artificial Sequence
  Synthetic polypeptide
GQVQWLTPVIPALWEAEAGGSPEGLEQNLTVMNQYQSLKNRSY

SEQ ID NO: 16623 - protein, 29 aa, Artificial Sequence
  Synthetic polypeptide
GQVQWLTPVIPALWEAEAGGSPEGLEQNL

SEQ ID NO: 16624 - protein, 42 aa, Artificial Sequence
  Synthetic polypeptide
GRVPWLTPIIPALWKAEEDGLPEVRNSRPAWPTCDKELLSTP

SEQ ID NO: 16625 - protein, 175 aa, Artificial Sequence
  Synthetic polypeptide
SQHFGKPRRTDYLRSGIRDQPGQHVIKNYFQHREFSFTLKDDIYIRYQSFNNQSDLEKEMQKMNPYKIDIGAVYSHRPNQHNTVKLGAFQAQEKELVFDIDMTDYDDVRRCCSSADICPKCWTLMTMAIRIIDRALKGKTLDLSIVSGYILEGEVFIVGSVMNQLENCLLQYVLG

SEQ ID NO: 16626 - protein, 410 aa, Artificial Sequence
  Synthetic polypeptide
SQHFGKPRRTDYLRSGIRDQPGQHVIKNYFQHREFSFTLKDDIYIRYQSFNNQSDLEKEMQKMNPYKIDIGAVYSHRPNQHNTVKLGAFQAQEKELVFDIDMTDYDDVRRCCSSADICPKCWTLMTMAIRIIDRALKEDFGFKHRLWVYSGRRGVHCWVCDESVRKLSSAVRSGIVEYLSLVKGGQDVKKKVHLSEKIHPFIRKSINIIKKYFEEYALVNQDILENKESWDKILALVPETIHDELQQSFQKSHNSLQRWEHLKKVASRYQNNIKNDKYGPWLEWEIMLQYCFPRLDINVSKGINHLLKSPFSVHPKTGRISVPIDLQKVDQFDPFTVPTISFICRELDAISTNEEEKEENEAESDVKHRTRDYKKTSLAPYVKVFEHFLENLDKSRKGELLKKSDLQKDF

SEQ ID NO: 16627 - protein, 314 aa, Artificial Sequence
  Synthetic polypeptide
SQHFGKPRRTDYLRSGIRDQPGQHVIKNYFQHREFSFTLKDDIYIRYQSFNNQSDLEKEMQKMNPYKIDIGAVYSHRPNQHNTVKLGAFQAQEKELVFDIDMTDYDDVRRCCSSADICPKCWTLMTMAIRIIDRALKEDFGFKHRLWVYSGRRGVHCWVCDESVRKLSSAVRSGIVEYLSLVKGGQDVKKKVHLSEKIHPFIRKSINIIKKYFEEYALVNQDILENKESWDKILALVPETIHDELQQSFQKSHNSLQRWEHLKKVASRYQNNIKNDKYGPWLEWEIMLQYCFPRLDINVSKGINHLLKSPFSVH

SEQ ID NO: 16628 - protein, 22 aa, Artificial Sequence
  Synthetic polypeptide
SQHFGKPRRTDYLSDKELLSTP

SEQ ID NO: 16629 - protein, 13 aa, Artificial Sequence
  Synthetic polypeptide
SLAEVKFSTTLLG

SEQ ID NO: 16630 - protein, 27 aa, Artificial Sequence
  Synthetic polypeptide
QKSNFLLLYWDDCGNCGLSANHHFYTI

SEQ ID NO: 16631 - protein, 267 aa, Artificial Sequence
  Synthetic polypeptide
MIFSRSQIFYYSTGMTVGIVASLLIIIFILSKFMPKKSPIYVILVGGWSFSLYLIQLVFKNLQEIWRCYWQYLLSYVLTVGFMSFAVCYKYGPLENERSINLLTWTLQLMGLCFMYSGIQIPHIALAIIIIALCTKNLEHPIQWLYITCRKVCKGAEKPVPPRLLTEEEYRIQGEVETRKALEELREFCNSPDCSAWKTVSRIQSPKRFADFVEGSSHLTPNEVSVHEQEYGLGSIIAQDEIYEEASSEEEDSYSRCPAITQNNFLT

SEQ ID NO: 16632 - protein, 36 aa, Artificial Sequence
  Synthetic polypeptide
LSTLGGQGPVSAPGGHRPWQPRQQCQSHYPVGQCLL

SEQ ID NO: 16633 - protein, 450 aa, Artificial Sequence
  Synthetic polypeptide
SALWEAKALSLPLVVIVHGNQDNNAKATILWDNAFSEMDRVPFVVAERVPWEKMCETLNLKFMAEVGTNRGLLPEHFLFLAQKIFNDNSLSMEAFQHRSVSWSQFNKEILLGRGFTFWQWFDGVLDLTKRCLRSYWSDRLIIGFISKQYVTSLLLNEPDGTFLLRFSDSEIGGITIAHVIRGQDGSPQIENIQPFSAKDLSIRSLGDRIRDLAQLKNLYPKKPKDEAFRSHYKPEQMGKDGRGYVPATIKMTVERDQPLPTPELQMPTMVPSYDLGMAPDSSMSMQLGPDMVPQVYPPHSHSIPPYQGLSPEESVNVLSAFQEPHLQMPPSLGQMSLPFDQPHPQGLLPCQPQEHAVSSPDPLLCSDVTMVEDSCLSQPVTAFPQGTWIGEDIFPPLLPPTEQDLTKLLLEGQGESGGGSLGAQPLLQPSHYGQSGISMSHMDLRANPSW

SEQ ID NO: 16634 - protein, 57 aa, Artificial Sequence
  Synthetic polypeptide
QHFGRPRPCLCPWWSSSMATKTTMPKPLSCGTMPSLRWTACPLWWLSGCPGRRCVKL

SEQ ID NO: 16635 - protein, 192 aa, Artificial Sequence
  Synthetic polypeptide
SALWEAKALSLPLVVIVHGNQDNNAKATILWDNAFSEMDRVPFVVAERVPWEKMCETLNLKFMAEVGTNRGLLPEHFLFLAQKIFNDNSLSMEAFQHRSVSWSQFNKMRNLMLRGLCSLFKFPKQEILLGRGFTFWQWFDGVLDLTKRCLRSYWSDRLIIGFISKQYVTSLLLNEPDGTFLLRFSDSEIGGI

SEQ ID NO: 16636 - protein, 460 aa, Artificial Sequence
  Synthetic polypeptide
GWAWWLKPVIPALWEAEALSLPLVVIVHGNQDNNAKATILWDNAFSEMDRVPFVVAERVPWEKMCETLNLKFMAEVGTNRGLLPEHFLFLAQKIFNDNSLSMEAFQHRSVSWSQFNKEILLGRGFTFWQWFDGVLDLTKRCLRSYWSDRLIIGFISKQYVTSLLLNEPDGTFLLRFSDSEIGGITIAHVIRGQDGSPQIENIQPFSAKDLSIRSLGDRIRDLAQLKNLYPKKPKDEAFRSHYKPEQMGKDGRGYVPATIKMTVERDQPLPTPELQMPTMVPSYDLGMAPDSSMSMQLGPDMVPQVYPPHSHSIPPYQGLSPEESVNVLSAFQEPHLQMPPSLGQMSLPFDQPHPQGLLPCQPQEHAVSSPDPLLCSDVTMVEDSCLSQPVTAFPQGTWIGEDIFPPLLPPTEQDLTKLLLEGQGESGGGSLGAQPLLQPSHYGQSGISMSHMDLRANPSW

SEQ ID NO: 16637 - protein, 58 aa, Artificial Sequence
  Synthetic polypeptide
SQHFGRPRPCLCPWWSSSMATKTTMPKPLSCGTMPSLRWTACPLWWLSGCPGRRCVKL

SEQ ID NO: 16638 - protein, 45 aa, Artificial Sequence
  Synthetic polypeptide
MGMVAQACNPSTLGGRGPVSAPGGHRPWQPRQQCQSHYPVGQCLL

SEQ ID NO: 16639 - protein, 202 aa, Artificial Sequence
  Synthetic polypeptide
GWAWWLKPVIPALWEAEALSLPLVVIVHGNQDNNAKATILWDNAFSEMDRVPFVVAERVPWEKMCETLNLKFMAEVGTNRGLLPEHFLFLAQKIFNDNSLSMEAFQHRSVSWSQFNKMRNLMLRGLCSLFKFPKQEILLGRGFTFWQWFDGVLDLTKRCLRSYWSDRLIIGFISKQYVTSLLLNEPDGTFLLRFSDSEIGGI

SEQ ID NO: 16640 - protein, 63 aa, Artificial Sequence
  Synthetic polypeptide
GQVQWLMPIISALWEAKPAPAPPTSSPVPVAAASPSPGRVIWMTTVGTALMSLLRVPIPPASP

SEQ ID NO: 16641 - protein, 30 aa, Artificial Sequence
  Synthetic polypeptide
SQHFGRPSPHLPPQPVLLCQWPLHPHLLDV

SEQ ID NO: 16642 - protein, 3628 aa, Artificial Sequence
  Synthetic polypeptide
PGSVAHAYNLSTLGGQARTCPPNQFSCASGRCIPISWTCDLDDDCGDRSDESASCAYPTCFPLTQFTCNNGRCININWRCDNDNDCGDNSDEAGCSHSCSSTQFKCNSGRCIPEHWTCDGDNDCGDYSDETHANCTNQATRPPGGCHTDEFQCRLDGLCIPLRWRCDGDTDCMDSSDEKSCEGVTHVCDPSVKFGCKDSARCISKAWVCDGDNDCEDNSDEENCESLACRPPSHPCANNTSVCLPPDKLCDGNDDCGDGSDEGELCDQCSLNNGGCSHNCSVAPGEGIVCSCPLGMELGPDNHTCQIQSYCAKHLKCSQKCDQNKFSVKCSCYEGWVLEPDGESCRSLDPFKPFIIFSNRHEIRRIDLHKGDYSVLVPGLRNTIALDFHLSQSALYWTDVVEDKIYRGKLLDNGALTSFEVVIQYGLATPEGLAVDWIAGNIYWVESNLDQIEVAKLDGTLRTTLLAGDIEHPRAIALDPRDGILFWTDWDASLPRIEAASMSGAGRRTVHRETGSGGWPNGLTVDYLEKRILWIDARSDAIYSARYDGSGHMEVLRGHEFLSHPFAVTLYGGEVYWTDWRTNTLAKANKWTGHNVTVVQRTNTQPFDLQVYHPSRQPMAPNPCEANGGQGPCSHLCLINYNRTVSCACPHLMKLHKDNTTCYEFKKFLLYARQMEIRGVDLDAPYYNYIISFTVPDIDNVTVLDYDAREQRVYWSDVRTQAIKRAFINGTGVETVVSADLPNAHGLAVDWVSRNLFWTSYDTNKKQINVARLDGSFKNAVVQGLEQPHGLVVHPLRGKLYWTDGDNISMANMDGSNRTLLFSGQKGPVGLAIDFPESKLYWISSGNHTINRCNLDGSGLEVIDAMRSQLGKATALAIMGDKLWWADQVSEKMGTCSKADGSGSVVLRNSTTLVMHMKVYDESIQLDHKGTNPCSVNNGDCSQLCLPTSETTRSCMCTAGYSLRSGQQACEGVGSFLLYSVHEGIRGIPLDPNDKSDALVPVSGTSLAVGIDFHAENDTIYWVDMGLSTISRAKRDQTWREDVVTNGIGRVEGIAVDWIAGNIYWTDQGFDVIEVARLNGSFRYVVISQGLDKPRAITVHPEKGYLFWTEWGQYPRIERSRLDGTERVVLVNVSISWPNGISVDYQDGKLYWCDARTDKIERIDLETGENREVVLSSNNMDMFSVSVFEDFIYWSDRTHANGSIKRGSKDNATDSVPLRTGIGVQLKDIKVFNRDRQKGTNVCAVANGGCQQLCLYRGRGQRACACAHGMLAEDGASCREYAGYLLYSERTILKSIHLSDERNLNAPVQPFEDPEHMKNVIALAFDYRAGTSPGTPNRIFFSDIHFGNIQQINDDGSRRITIVENVGSVEGLAYHRGWDTLYWTSYTTSTITRHTVDQTRPGAFERETVITMSGDDHPRAFVLDECQNLMFWTNWNEQHPSIMRAALSGANVLTLIEKDIRTPNGLAIDHRAEKLYFSDATLDKIERCEYDGSHRYVILKSEPVHPFGLAVYGEHIFWTDWVRRAVQRANKHVGSNMKLLRVDIPQQPMGIIAVANDTNSCELSPCRINNGGCQDLCLLTHQGHVNCSCRGGRILQDDLTCRAVNSSCRAQDEFECANGECINFSLTCDGVPHCKDKSDEKPSYCNSRRCKKTFRQCSNGRCVSNMLWCNGADDCGDGSDEIPCNKTACGVGEFRCRDGTCIGNSSRCNQFVDCEDASDEMNCSATDCSSYFRLGVKGVLFQPCERTSLCYAPSWVCDGANDCGDYSDERDCPGVKRPRCPLNYFACPSGRCIPMSWTCDKEDDCEHGEDETHCNKFCSEAQFECQNHRCISKQWLCDGSDDCGDGSDEAAHCEGKTCGPSSFSCPGTHVCVPERWLCDGDKDCADGADESIAAGCLYNSTCDDREFMCQNRQCIPKHFVCDHDRDCADGSDESPECEYPTCGPSEFRCANGRCLSSRQWECDGENDCHDQSDEAPKNPHCTSQEHKCNASSQFLCSSGRCVAEALLCNGQDDCGDSSDERGCHINECLSRKLSGCSQDCEDLKIGFKCRCRPGFRLKDDGRTCADVDECSTTFPCSQRCINTHGSYKCLCVEGYAPRGGDPHSCKAVTDEEPFLIFANRYYLRKLNLDGSNYTLLKQGLNNAVALDFDYREQMIYWTDVTTQGSMIRRMHLNGSNVQVLHRTGLSNPDGLAVDWVGGNLYWCDKGRDTIEVSKLNGAYRTVLVSSGLREPRALVVDVQNGYLYWTDWGDHSLIGRIGMDGSSRSVIVDTKITWPNGLTLDYVTERIYWADAREDYIEFASLDGSNRHVVLSQDIPHIFALTLFEDYVYWTDWETKSINRAHKTTGTNKTLLISTLHRPMDLHVFHALRQPDVPNHPCKVNNGGCSNLCLLSPGGGHKCACPTNFYLGSDGRTCVSNCTASQFVCKNDKCIPFWWKCDTEDDCGDHSDEPPDCPEFKCRPGQFQCSTGICTNPAFICDGDNDCQDNSDEANCDIHVCLPSQFKCTNTNRCIPGIFRCNGQDNCGDGEDERDCPEVTCAPNQFQCSITKRCIPRVWVCDRDNDCVDGSDEPANCTQMTCGVDEFRCKDSGRCIPARWKCDGEDDCGDGSDEPKEECDERTCEPYQFRCKNNRCVPGRWQCDYDNDCGDNSDEESCTPRPCSESEFSCANGRCIAGRWKCDGDHDCADGSDEKDCTPRCDMDQFQCKSGHCIPLRWRCDADADCMDGSDEEACGTGVRTCPLDEFQCNNTLCKPLAWKCDGEDDCGDNSDENPEECARFVCPPNRPFRCKNDRVCLWIGRQCDGTDNCGDGTDEEDCEPPTAHTTHCKDKKEFLCRNQRCLSSSLRCNMFDDCGDGSDEEDCSIDPKLTSCATNASICGDEARCVRTEKAAYCACRSGFHTVPGQPGCQDINECLRFGTCSQLCNNTKGGHLCSCARNFMKTHNTCKAEGSEYQVLYIADDNEIRSLFPGHPHSAYEQAFQGDESVRIDAMDVHVKAGRVYWTNWHTGTISYRSLPPAAPPTTSNRHRRQIDRGVTHLNISGLKMPRGIAIDWVAGNVYWTDSGRDVIEVAQMKGENRKTLISGMIDEPHAIVVDPLRGTMYWSDWGNHPKIETAAMDGTLRETLVQDNIQWPTGLAVDYHNERLYWADAKLSVIGSIRLNGTDPIVAADSKRGLSHPFSIDVFEDYIYGVTYINNRVFKIHKFGHSPLVNLTGGLSHASDVVLYHQHKQPEVTNPCDRKKCEWLCLLSPSGPVCTCPNGKRLDNGTCVPVPSPTPPPDAPRPGTCNLQCFNGGSCFLNARRQPKCRCQPRYTGDKCELDQCWEHCRNGGTCAASPSGMPTCRCPTGFTGPKCTQQVCAGYCANNSTCTVNQGNQPQCRCLPGFLGDRCQYRQCSGYCENFGTCQMAADGSRQCRCTAYFEGSRCEVNKCSRCLEGACVVNKQSGDVTCNCTDGRVAPSCLTCVGHCSNGGSCTMNSKMMPECQCPPHMTGPRCEEHVFSQQQPGHIASILIPLLLLLLLVLVAGVVFWYKRRVQGAKGFQHQRMTNGAMNVEIGNPTYKMYEGGEPDDVGGLLDADFALDPDKPTNFTNPVYATLYMGGHGSRHSLASTDEKRELLGRGPEDEIGDPLA

SEQ ID NO: 16643 - protein, 36 aa, Artificial Sequence
  Synthetic polypeptide
GRARWLTPVIPALCGEAVAGRSLEAHSFLLPGVQSS

SEQ ID NO: 16644 - protein, 107 aa, Artificial Sequence
  Synthetic polypeptide
SQHFVGKPWQEDRLRPTLFFSPECSQVDQEAGTVHLTSVGCQPGPADGYPHLTQLPRSFHQLAMHISRRLLRSSLHWHHEPISGIPSPDESPKRALAFLWGPALWSP

SEQ ID NO: 16645 - protein, 79 aa, Artificial Sequence
  Synthetic polypeptide
SQHFVGKPWQEDRLRPTLFFSPECSQVDQEAGTVHLTSVGCQPGPADGYPHLTQLPRSFHQLAMHISRRLLRSSLHWHH

SEQ ID NO: 16646 - protein, 127 aa, Artificial Sequence
  Synthetic polypeptide
GRARWLTPVIPALCGEAVAGRSLEVGNSRPARPTWPTLFFSPECSQVDQEAGTVHLTSVGCQPGPADGYPHLTQLPRSFHQLAMHISRRLLRSSLHWHHEPISGIPSPDESPKRALAFLWGPALWSP

SEQ ID NO: 16647 - protein, 1067 aa, Artificial Sequence
  Synthetic polypeptide
SQHFVGKPWQEDRLRSGIQDQPGQHGPLFSSPRSAVKLTKKRALSISPLSDASLDLQTVIRTSPSSLVAFINSRCTSPGGSYGHLSIGTMSPSLGFPAQMNHQKGPSPSFGVQPCGPHDSARGGMIPHPQSRGPFPTCQLKSELDMLVGKCREEPLEGDMSSPNSTGIQDPLLGMLDGREDLEREEKREPESVYETDCRWDGCSQEFDSQEQLVHHINSEHIHGERKEFVCHWGGCSRELRPFKAQYMLVVHMRRHTGEKPHKCTFEGCRKSYSRLENLKTHLRSHTGEKPYMCEHEGCSKAFSNASDRAKHQNRTHSNEKPYVCKLPGCTKRYTDPSSLRKHVKTVHGPDAHVTKRHRGDGPLPRAPSISTVEPKREREGGPIREESRLTVPEGAMKPQPSPGAQSSCSSDHSPAGSAANTDSGVEMTGNAGGSTEDLSSLDEGPCIAGTGLSTLRRLENLRLDQLHQLRPIGTRGLKLPSLSHTGTTVSRRVGPPVSLERRSSSSSSISSAYTVSRRSSLASPFPPGSPPENGASSLPGLMPAQHYLLRARYASARGGGTSPTAASSLDRIGGLPMPPWRSRAEYPGYNPNAGVTRRASDPAQAADRPAPARVQRFKSLGCVHTPPTVAGGGQNFDPYLPTSVYSPQPPSITENAAMDARGLQEEPEVGTSMVGSGLNPYMDFPPTDTLGYGGPEGAAAEPYGARGPGSLPLGPGPPTNYGPNPCPQQASYPDPTQETWGEFPSHSGLYPGPKALGGTYSQCPRLEHYGQVQVKPEQGCPVGSDSTGLAPCLNAHPSEGPPHPQPLFSHYPQPSPPQYLQSGPYTQPPPDYLPSEPRPCLDFDSPTHSTGQLKAQLVCNYVQSQQELLWEGGGREDAPAQEPSYQSPKFLGGSQVSPSRAKAPVNTYGPGFGPNLPNHKSGSYPTPSPCHENFVVGANRASHRAAAPPRLLPPLPTCYGPLKVGGTNPSCGHPEVGRLGGGPALYPPPEGQVCNPLDSLDLDNTQLDFVAILDEPQGLSPPPSHDQRGSSGHTPPPSGPPNMAVGNMSVLLRSLPGETEFLNSSA

SEQ ID NO: 16648 - protein, 23 aa, Artificial Sequence
  Synthetic polypeptide
GREFKTSQANMAHSFLLPGVQSS

SEQ ID NO: 16649 - protein, 99 aa, Artificial Sequence
  Synthetic polypeptide
GRARWLTPVIPALCGEAVAGRSLEVGNSRPARPTWPTLFFSPECSQVDQEAGTVHLTSVGCQPGPADGYPHLTQLPRSFHQLAMHISRRLLRSSLHWHH

SEQ ID NO: 16650 - protein, 90 aa, Artificial Sequence
  Synthetic polypeptide
SQHFVGKPWQEDRLRSGIQDQPGQHGPLFSSPRSAVKLTKKRALSISPLSDASLDLQTVIRTSPSSLVAFINSRCTSPGGSYGHLSIGTM

SEQ ID NO: 16651 - protein, 34 aa, Artificial Sequence
  Synthetic polypeptide
ATLKNCPPLRIWTFSTRTRKYILVKRRRKYFWRS

SEQ ID NO: 16652 - protein, 23 aa, Artificial Sequence
  Synthetic polypeptide
SQHFRRPRQDCLSPGVPDQPEQR

SEQ ID NO: 16653 - protein, 198 aa, Artificial Sequence
  Synthetic polypeptide
AQEFQTSLSNVKELPTLKDMDFLNKNQKVYIGEEEKKIFLEKLKRDVEFLVQLKIMDYSLLLGIHDIIRGSEPEEEAPVREDESEVDGDCSLTGPPALVGSYGTSPEGIGGYIHSHRPLGPGEFESFIDVYAIRSAEGAPQKEVYFMGLIDILTQYDAKKKAAHAAKTVKHGAGAEISTVHPEQYAKRFLDFITNIFA

SEQ ID NO: 16654 - protein, 103 aa, Artificial Sequence
  Synthetic polypeptide
AQEFQTSLSNVKELPTLKDMDFLNKNQKVYIGEEEKKIFLEKLKRDVEFLVQLKIMDYSLLLGIHDIIRGSEPEEEAPVREDESEVDGDCSLTGPPALVGSYG

SEQ ID NO: 16655 - protein, 104 aa, Artificial Sequence
  Synthetic polypeptide
MEWLVRRPEPGRVSSNHQVRAVGGRRLRLHGADAAGEACGRAGADAAGPGGGRGARDLRLCHHLSAAAERGARRPRPRELPPAKARLPPRARRLPRLRGHRRRG

SEQ ID NO: 16656 - protein, 201 aa, Artificial Sequence
  Synthetic polypeptide
WNGWFAGRNLAVSQVTTKYVLWVDDDFVFTARTRLERLVDVLERTPLDLVGGAVREISGFATTYRQLLSVEPGAPGLGNCLRQRRGFHHELVGFPGCVVTDGVVNFFLARTDKVREVGFDPRLSRVAHLEFFLDGLGSLRVGSCSDVVVDHASKLKLPWTSRDAGAETYARYRYPGSLDESQMAKHRLLFFKHRLQCMTSQ

SEQ ID NO: 16657 - protein, 14 aa, Artificial Sequence
  Synthetic polypeptide
GMAGSQAGTWPCLK

SEQ ID NO: 16658 - protein, 115 aa, Artificial Sequence
  Synthetic polypeptide
MEWLVRRPEPGRVSSNHQVRAVGGRRLRLHGADAAGEACGRAGADAAGPGPPGGNLPLPAGGGRGARDLRLCHHLSAAAERGARRPRPRELPPAKARLPPRARRLPRLRGHRRRG

SEQ ID NO: 16659 - protein, 147 aa, Artificial Sequence
  Synthetic polypeptide
WNGWFAGRNLAVSQVTTKYVLWVDDDFVFTARTRLERLVDVLERTPLDLARLEATSLSLQVGGAVREISGFATTYRQLLSVEPGAPGLGNCLRQRRGFHHELVGFPGCVVTDGVVNFFLARTDKVREVGFDPRLSRVAHLEFFLDGL

SEQ ID NO: 16660 - protein, 119 aa, Artificial Sequence
  Synthetic polypeptide
NFLCCFFSYPLECKFHKGLVRRPEPGRVSSNHQVRAVGGRRLRLHGADAAGEACGRAGADAAGPGGGRGARDLRLCHHLSAAAERGARRPRPRELPPAKARLPPRARRLPRLRGHRRRG

SEQ ID NO: 16661 - protein, 205 aa, Artificial Sequence
  Synthetic polypeptide
NVSSIKGWFAGRNLAVSQVTTKYVLWVDDDFVFTARTRLERLVDVLERTPLDLVGGAVREISGFATTYRQLLSVEPGAPGLGNCLRQRRGFHHELVGFPGCVVTDGVVNFFLARTDKVREVGFDPRLSRVAHLEFFLDGLGSLRVGSCSDVVVDHASKLKLPWTSRDAGAETYARYRYPGSLDESQMAKHRLLFFKHRLQCMTSQ

SEQ ID NO: 16662 - protein, 130 aa, Artificial Sequence
  Synthetic polypeptide
NFLCCFFSYPLECKFHKGLVRRPEPGRVSSNHQVRAVGGRRLRLHGADAAGEACGRAGADAAGPGPPGGNLPLPAGGGRGARDLRLCHHLSAAAERGARRPRPRELPPAKARLPPRARRLPRLRGHRRRG

SEQ ID NO: 16663 - protein, 151 aa, Artificial Sequence
  Synthetic polypeptide
NVSSIKGWFAGRNLAVSQVTTKYVLWVDDDFVFTARTRLERLVDVLERTPLDLARLEATSLSLQVGGAVREISGFATTYRQLLSVEPGAPGLGNCLRQRRGFHHELVGFPGCVVTDGVVNFFLARTDKVREVGFDPRLSRVAHLEFFLDGL

SEQ ID NO: 16664 - protein, 22 aa, Artificial Sequence
  Synthetic polypeptide
CLSCFLMYPQLLEQCFTQIVPL

SEQ ID NO: 16665 - protein, 67 aa, Artificial Sequence
  Synthetic polypeptide
NYCICLILSSLTKISSGKAGMMSILFSYVSTAPGTVLHSNSSSVTRVQVSLGTTSIAWTSPCPALMC

SEQ ID NO: 16666 - protein, 36 aa, Artificial Sequence
  Synthetic polypeptide
GQVQWLTPVNLALWEAEAGGSLEVRSSRPAWPTWVS

SEQ ID NO: 16667 - protein, 28 aa, Artificial Sequence
  Synthetic polypeptide
HFGRLKQVDHLRSGVQDQRGQHGFLEFL

SEQ ID NO: 16668 - protein, 175 aa, Artificial Sequence
  Synthetic polypeptide
GQEFKTSVANMGFLNSSELSGLPAGPDREGSLKDQLALAIGKLGENMILKRAAWVKVPSGFYVGSYVHGAMQSPSLHKLVLGKYGALVICETSEQKTNLEDVGRRLGQHVVGMAPLSVGSLDDEPGGEAETKMLSQPYLLDPSITLGQYVQPQGVSVVDFVRFECGEGEEAAETE

SEQ ID NO: 16669 - protein, 65 aa, Artificial Sequence
  Synthetic polypeptide
GQEFKTSVANMGFLNSSELSGLPAGPDREGSLKDQLALAIGLPFQIGAVSELQLPESNFLQNTSS

SEQ ID NO: 16670 - protein, 80 aa, Artificial Sequence
  Synthetic polypeptide
GQEFKTSVANMGFLNSSELSGLPAGPDREGSLKDQLALAIGSQARNQPVKMGGSNPCLMIRIGVSGSRPLGSAFPNWSCL

SEQ ID NO: 16671 - protein, 50 aa, Artificial Sequence
  Synthetic polypeptide
GQEFKTSVANMGFLNSSELSGLPAGPDREGSLKDQLALAIVLRTHHICMI

SEQ ID NO: 16672 - protein, 40 aa, Artificial Sequence
  Synthetic polypeptide
GQEFKTSVANMGFLNSSELSGLPAGPDREGSLKDQLALAI

SEQ ID NO: 16673 - protein, 68 aa, Artificial Sequence
  Synthetic polypeptide
GQEFKTSVANMGFLNSSELSGLPAGPDREGSLKDQLALAIGKLGENMILKRAAWVKVPSGFYVGSYVH

SEQ ID NO: 16674 - protein, 26 aa, Artificial Sequence
  Synthetic polypeptide
PCLTLTMLKRELVRWWHSTDAVIRTR

SEQ ID NO: 16675 - protein, 139 aa, Artificial Sequence
  Synthetic polypeptide
VSGISPAGTHSVLVLPPCEEGACFSFALGHDFKFPEAFLTMLNSHHVKTGTCEVVALHRCCNKNKIEERSQTVKCSCFPGQVAGTTRAAPSCVDASIVEQKWWCHMQPCLEGEECKVLPDRKGWSCSSGNKVKTTRVTH

SEQ ID NO: 16676 - protein, 139 aa, Artificial Sequence
  Synthetic polypeptide
VSGISPAGTHSVLVLPPCEEGACFSFALGHDFKFPEAFLTMLNSHHVKTGTCEVVALHRCCNKNKIEERSQTVKCSCFPGQVAGTTRAAPSCVDASIVEQKWWCHMQPCLEGEECKVLPDRKGWSCSSGNKVKTTRANV

SEQ ID NO: 16677 - protein, 117 aa, Artificial Sequence
  Synthetic polypeptide
VSGISPAGTHSVLVLPPCEEGACFSFALGHDFKFPEAFLTMLNSHHVKTGTCEVVALHRCCNKNKIEERSQTVKCSCFPGQVAGTTRAAPSCVDASIVEQKWWCHMQPCLEGEECKV

SEQ ID NO: 16678 - protein, 102 aa, Artificial Sequence
  Synthetic polypeptide
VSGISPAGTHSVLVLPPCEEGACFSFALGHDFKFPEAFLTMLNSHHVKTGTCEVVALHRCCNKNKIEERSQTVKCSCFPGQVAGTTRAAPSCVDASIVEQKW

SEQ ID NO: 16679 - protein, 94 aa, Artificial Sequence
  Synthetic polypeptide
VSGISPAGTHSVLVLPPCEEGACFSFALGHDFKFPEAFLTMLNSHHVKTGTCEVVALHRCCNKNKIEERSQTVKCSCFPGQVAGTTRAAPSCVD

SEQ ID NO: 16680 - protein, 35 aa, Artificial Sequence
  Synthetic polypeptide
GLAGWFTPVTQHFGRPRREDHLNSGVPDQPGHHGT

SEQ ID NO: 16681 - protein, 15 aa, Artificial Sequence
  Synthetic polypeptide
TQEFQTSLGTMVPSR

SEQ ID NO: 16682 - protein, 955 aa, Artificial Sequence
  Synthetic polypeptide
PGRVVHACNPALWEAEEGGSLELRSSRPAWAPWYLVDSRWFKQWKKYVGFDSWDKYQMGDQNVYPGPIDNSGLLKDGDAQSLKEHLIDELDYILLPTEGWNKLVSWYTLMEGQEPIARKVVEQGMFVKHCKVEVYLTELKLCENGNMNNVVTRRFSKADTIDTIEKEIRKIFSIPDEKETRLWNKYMSNTFEPLNKPDSTIQDAGLYQGQVLVIEQKNEDGTWPRGPSTPNVKNSNYCLPSYTAYKNYDYSEPGRNNEQPGLCGLSNLGNTCFMNSAIQCLSNTPPLTEYFLNDKYQEELNFDNPLGMRGEIAKSYAELIKQMWSGKFSYVTPRAFKTQVGRFAPQFSGYQQQDCQELLAFLLDGLHEDLNRIRKKPYIQLKDADGRPDKVVAEEAWENHLKRNDSIIVDIFHGLFKSTLVCPECAKISVTFDPFCYLTLPLPMKKERTLEVYLVRMDPLTKPMQYKVVVPKIGNILDLCTALSALSGIPADKMIVTDIYNHRFHRIFAMDENLSSIMERDDIYVFEININRTEDTEHVIIPVCLREKFRHSSYTHHTGSSLFGQPFLMAVPRNNTEDKLYNLLLLRMCRYVKISTETEETEGSLHCCKDQNINGNGPNGIHEEGSPSEMETDEPDDESSQDQELPSENENSQSEDSVGGDNDSENGLCTEDTCKGQLTGHKKRLFTFQFNNLGNTDINYIKDDTRHIRFDDRQLRLDERSFLALDWDPDLKKRYFDENAAEDFEKHESVEYKPPKKPFVKLKDCIELFTTKEKLGAEDPWYCPNCKEHQQATKKLDLWSLPPVLVVHLKRFSYSRYMRDKLDTLVDFPINDLDMSEFLINPNAGPCRYNLIAVSNHYGGMGGGHYTAFAKNKDDGKWYYFDDSSVSTASEDQIVSKAAYVLFYQRQDTFSGTGFFPLDRETKGASAATGIPLESDEDSNDNDNDIENENCMHTN

SEQ ID NO: 16683 - protein, 178 aa, Artificial Sequence
  Synthetic polypeptide
PGRVVHACNPALWEAEEGGSLELRSSRPAWAPWYLVDSRWFKQWKKYVGFDSWDKYQMGDQNVYPGPIDNSGLLKDGDAQSLKEHLIDELDYILLPTEGWNKLVSWYTLMEGQEPIARKGGSILGMKVVEQGMFVKHCKVEVYLTELKLCENGNMNNVVTRRFSKADTIDTIEKEIRK

SEQ ID NO: 16684 - protein, 984 aa, Artificial Sequence
  Synthetic polypeptide
PGRVVHACNPALWEAEEGGSLELRSSRPAWAPWYLVDSRWFKQWKKYVGFDSWDKYQMGDQNVYPGPIDNSGLLKDGDAQSLKEHLIDELDYILLPTEGWNKLVSWYTLMEGQEPIARKVVEQGMFVKHCKVEVYLTELKLCENGNMNNVVTRRFSKADTIDTIEKEIRKIFSIPDEKETRLWNKYMSNTFEPLNKPDSTIQDAGLYQGQVLVIEQKNEDGTWPRGPSTPKSPGASNFSTLPKISPSSLSNNYNNMNNRNVKNSNYCLPSYTAYKNYDYSEPGRNNEQPGLCGLSNLGNTCFMNSAIQCLSNTPPLTEYFLNDKYQEELNFDNPLGMRGEIAKSYAELIKQMWSGKFSYVTPRAFKTQVGRFAPQFSGYQQQDCQELLAFLLDGLHEDLNRIRKKPYIQLKDADGRPDKVVAEEAWENHLKRNDSIIVDIFHGLFKSTLVCPECAKISVTFDPFCYLTLPLPMKKERTLEVYLVRMDPLTKPMQYKVVVPKIGNILDLCTALSALSGIPADKMIVTDIYNHRFHRIFAMDENLSSIMERDDIYVFEININRTEDTEHVIIPVCLREKFRHSSYTHHTGSSLFGQPFLMAVPRNNTEDKLYNLLLLRMCRYVKISTETEETEGSLHCCKDQNINGNGPNGIHEEGSPSEMETDEPDDESSQDQELPSENENSQSEDSVGGDNDSENGLCTEDTCKGQLTGHKKRLFTFQFNNLGNTDINYIKDDTRHIRFDDRQLRLDERSFLALDWDPDLKKRYFDENAAEDFEKHESVEYKPPKKPFVKLKDCIELFTTKEKLGAEDPWYCPNCKEHQQATKKLDLWSLPPVLVVHLKRFSYSRYMRDKLDTLVDFPINDLDMSEFLINPNAGPCRYNLIAVSNHYGGMGGGHYTAFAKNKDDGKWYYFDDSSVSTASEDQIVSKAAYVLFYQRQDTFSGTGFFPLDRETKGASAATGIPLESDEDSNDNDNDIENENCMHTN

SEQ ID NO: 16685 - protein, 238 aa, Artificial Sequence
  Synthetic polypeptide
PGRVVHACNPALWEAEEGGSLELRSSRPAWAPWYLVDSRWFKQWKKYVGFDSWDKYQMGDQNVYPGPIDNSGLLKDGDAQSLKEHLIDELDYILLPTEGWNKLVSWYTLMEGQEPIARKVVEQGMFVKHCKVEVYLTELKLCENGNMNNVVTRRFSKADTIDTIEKEIRKIFSIPDEKETRLWNKYMSNTFEPLNKPDSTIQDAGLYQGQVLVIEQKNEDGTWPRGPSTPKKPLEQSC

SEQ ID NO: 16686 - protein, 959 aa, Artificial Sequence
  Synthetic polypeptide
PGRVVHACNPALWEAEEGGSLELRSSRPAWAPWYLVDSRWFKQWKKYVGFDSWDKYQMGDQNVYPGPIDNSGLLKDGDAQSLKEHLIDELDYILLPTEGWNKLVSWYTLMEGQEPIARKVVEQGMFVKHCKVEVYLTELKLCENGNMNNVVTRRFSKADTIDTIEKEIRKIFSIPDEKETRLWNKYMSNTFEPLNKPDSTIQDAGLYQGQVLFIVLVIEQKNEDGTWPRGPSTPNVKNSNYCLPSYTAYKNYDYSEPGRNNEQPGLCGLSNLGNTCFMNSAIQCLSNTPPLTEYFLNDKYQEELNFDNPLGMRGEIAKSYAELIKQMWSGKFSYVTPRAFKTQVGRFAPQFSGYQQQDCQELLAFLLDGLHEDLNRIRKKPYIQLKDADGRPDKVVAEEAWENHLKRNDSIIVDIFHGLFKSTLVCPECAKISVTFDPFCYLTLPLPMKKERTLEVYLVRMDPLTKPMQYKVVVPKIGNILDLCTALSALSGIPADKMIVTDIYNHRFHRIFAMDENLSSIMERDDIYVFEININRTEDTEHVIIPVCLREKFRHSSYTHHTGSSLFGQPFLMAVPRNNTEDKLYNLLLLRMCRYVKISTETEETEGSLHCCKDQNINGNGPNGIHEEGSPSEMETDEPDDESSQDQELPSENENSQSEDSVGGDNDSENGLCTEDTCKGQLTGHKKRLFTFQFNNLGNTDINYIKDDTRHIRFDDRQLRLDERSFLALDWDPDLKKRYFDENAAEDFEKHESVEYKPPKKPFVKLKDCIELFTTKEKLGAEDPWYCPNCKEHQQATKKLDLWSLPPVLVVHLKRFSYSRYMRDKLDTLVDFPINDLDMSEFLINPNAGPCRYNLIAVSNHYGGMGGGHYTAFAKNKDDGKWYYFDDSSVSTASEDQIVSKAAYVLFYQRQDTFSGTGFFPLDRETKGASAATGIPLESDEDSNDNDNDIENENCMHTN

SEQ ID NO: 16687 - protein, 247 aa, Artificial Sequence
  Synthetic polypeptide
PGRVVHACNPALWEAEEGGSLELRSSRPAWAPWYLVDSRWFKQWKKYVGFDSWDKYQMGDQNVYPGPIDNSGLLKDGDAQSLKEHLIDELDYILLPTEGWNKLVSWYTLMEGQEPIARKVVEQGMFVKHCKVEVYLTELKLCENGNMNNVVTRRFSKADTIDTIEKEIRKIFSIPDEKETRLWNKYMSNTFEPLNKPDSTIQDAGLYQGQVLVIEQKNEDGTWPRGPSTPNTISFLFIPTTLVLGFV

SEQ ID NO: 16688 - protein, 35 aa, Artificial Sequence
  Synthetic polypeptide
DVLASPSPSTMIVSFLRPPSHASCTAHGTIQLKRK

SEQ ID NO: 16689 - protein, 15 aa, Artificial Sequence
  Synthetic polypeptide
GLLAMLLVQPMELYN

SEQ ID NO: 16690 - protein, 803 aa, Artificial Sequence
  Synthetic polypeptide
PCFLYSPWNYTIEKEIRKIFSIPDEKETRLWNKYMSNTFEPLNKPDSTIQDAGLYQGQVLVIEQKNEDGTWPRGPSTPNVKNSNYCLPSYTAYKNYDYSEPGRNNEQPGLCGLSNLGNTCFMNSAIQCLSNTPPLTEYFLNDKYQEELNFDNPLGMRGEIAKSYAELIKQMWSGKFSYVTPRAFKTQVGRFAPQFSGYQQQDCQELLAFLLDGLHEDLNRIRKKPYIQLKDADGRPDKVVAEEAWENHLKRNDSIIVDIFHGLFKSTLVCPECAKISVTFDPFCYLTLPLPMKKERTLEVYLVRMDPLTKPMQYKVVVPKIGNILDLCTALSALSGIPADKMIVTDIYNHRFHRIFAMDENLSSIMERDDIYVFEININRTEDTEHVIIPVCLREKFRHSSYTHHTGSSLFGQPFLMAVPRNNTEDKLYNLLLLRMCRYVKISTETEETEGSLHCCKDQNINGNGPNGIHEEGSPSEMETDEPDDESSQDQELPSENENSQSEDSVGGDNDSENGLCTEDTCKGQLTGHKKRLFTFQFNNLGNTDINYIKDDTRHIRFDDRQLRLDERSFLALDWDPDLKKRYFDENAAEDFEKHESVEYKPPKKPFVKLKDCIELFTTKEKLGAEDPWYCPNCKEHQQATKKLDLWSLPPVLVVHLKRFSYSRYMRDKLDTLVDFPINDLDMSEFLINPNAGPCRYNLIAVSNHYGGMGGGHYTAFAKNKDDGKWYYFDDSSVSTASEDQIVSKAAYVLFYQRQDTFSGTGFFPLDRETKGASAATGIPLESDEDSNDNDNDIENENCMHTN

SEQ ID NO: 16691 - protein, 18 aa, Artificial Sequence
  Synthetic polypeptide
PCFLYSPWNYTIEKEIRK

SEQ ID NO: 16692 - protein, 832 aa, Artificial Sequence
  Synthetic polypeptide
PCFLYSPWNYTIEKEIRKIFSIPDEKETRLWNKYMSNTFEPLNKPDSTIQDAGLYQGQVLVIEQKNEDGTWPRGPSTPKSPGASNFSTLPKISPSSLSNNYNNMNNRNVKNSNYCLPSYTAYKNYDYSEPGRNNEQPGLCGLSNLGNTCFMNSAIQCLSNTPPLTEYFLNDKYQEELNFDNPLGMRGEIAKSYAELIKQMWSGKFSYVTPRAFKTQVGRFAPQFSGYQQQDCQELLAFLLDGLHEDLNRIRKKPYIQLKDADGRPDKVVAEEAWENHLKRNDSIIVDIFHGLFKSTLVCPECAKISVTFDPFCYLTLPLPMKKERTLEVYLVRMDPLTKPMQYKVVVPKIGNILDLCTALSALSGIPADKMIVTDIYNHRFHRIFAMDENLSSIMERDDIYVFEININRTEDTEHVIIPVCLREKFRHSSYTHHTGSSLFGQPFLMAVPRNNTEDKLYNLLLLRMCRYVKISTETEETEGSLHCCKDQNINGNGPNGIHEEGSPSEMETDEPDDESSQDQELPSENENSQSEDSVGGDNDSENGLCTEDTCKGQLTGHKKRLFTFQFNNLGNTDINYIKDDTRHIRFDDRQLRLDERSFLALDWDPDLKKRYFDENAAEDFEKHESVEYKPPKKPFVKLKDCIELFTTKEKLGAEDPWYCPNCKEHQQATKKLDLWSLPPVLVVHLKRFSYSRYMRDKLDTLVDFPINDLDMSEFLINPNAGPCRYNLIAVSNHYGGMGGGHYTAFAKNKDDGKWYYFDDSSVSTASEDQIVSKAAYVLFYQRQDTFSGTGFFPLDRETKGASAATGIPLESDEDSNDNDNDIENENCMHTN

SEQ ID NO: 16693 - protein, 86 aa, Artificial Sequence
  Synthetic polypeptide
PCFLYSPWNYTIEKEIRKIFSIPDEKETRLWNKYMSNTFEPLNKPDSTIQDAGLYQGQVLVIEQKNEDGTWPRGPSTPKKPLEQSC

SEQ ID NO: 16694 - protein, 807 aa, Artificial Sequence
  Synthetic polypeptide
PCFLYSPWNYTIEKEIRKIFSIPDEKETRLWNKYMSNTFEPLNKPDSTIQDAGLYQGQVLFIVLVIEQKNEDGTWPRGPSTPNVKNSNYCLPSYTAYKNYDYSEPGRNNEQPGLCGLSNLGNTCFMNSAIQCLSNTPPLTEYFLNDKYQEELNFDNPLGMRGEIAKSYAELIKQMWSGKFSYVTPRAFKTQVGRFAPQFSGYQQQDCQELLAFLLDGLHEDLNRIRKKPYIQLKDADGRPDKVVAEEAWENHLKRNDSIIVDIFHGLFKSTLVCPECAKISVTFDPFCYLTLPLPMKKERTLEVYLVRMDPLTKPMQYKVVVPKIGNILDLCTALSALSGIPADKMIVTDIYNHRFHRIFAMDENLSSIMERDDIYVFEININRTEDTEHVIIPVCLREKFRHSSYTHHTGSSLFGQPFLMAVPRNNTEDKLYNLLLLRMCRYVKISTETEETEGSLHCCKDQNINGNGPNGIHEEGSPSEMETDEPDDESSQDQELPSENENSQSEDSVGGDNDSENGLCTEDTCKGQLTGHKKRLFTFQFNNLGNTDINYIKDDTRHIRFDDRQLRLDERSFLALDWDPDLKKRYFDENAAEDFEKHESVEYKPPKKPFVKLKDCIELFTTKEKLGAEDPWYCPNCKEHQQATKKLDLWSLPPVLVVHLKRFSYSRYMRDKLDTLVDFPINDLDMSEFLINPNAGPCRYNLIAVSNHYGGMGGGHYTAFAKNKDDGKWYYFDDSSVSTASEDQIVSKAAYVLFYQRQDTFSGTGFFPLDRETKGASAATGIPLESDEDSNDNDNDIENENCMHTN

SEQ ID NO: 16695 - protein, 95 aa, Artificial Sequence
  Synthetic polypeptide
PCFLYSPWNYTIEKEIRKIFSIPDEKETRLWNKYMSNTFEPLNKPDSTIQDAGLYQGQVLVIEQKNEDGTWPRGPSTPNTISFLFIPTTLVLGFV

SEQ ID NO: 16696 - protein, 44 aa, Artificial Sequence
  Synthetic polypeptide
PCFLYSPWNYTIEKEIRKIFSIPDEKETRLWNKYMSNTFEPLNK

SEQ ID NO: 16697 - protein, 78 aa, Artificial Sequence
  Synthetic polypeptide
PCFLYSPWNYTIEKEIRKIFSIPDEKETRLWNKYMSNTFEPLNKPDSTIQDAGLYQGQVLVIEQKNEDGTWPRGPSTP

SEQ ID NO: 16698 - protein, 95 aa, Artificial Sequence
  Synthetic polypeptide
PCFLYSPWNYTIEKEIRKIFSIPDEKETRLWNKYMSNTFEPLNKPDSTIQDAGLYQGQVLVIEQKNEDGTWPRGPSTPNFVGHMVSVITITADVV

SEQ ID NO: 16699 - protein, 178 aa, Artificial Sequence
  Synthetic polypeptide
MLRIAPGIIPPDNLSIQEFQRNENIDVEVVQLISNEILPYANFIPKEFVGQIMTMLNKGSIHSQSSSFTEAEIDIRLREEFSKMCFETLLQFSFSNKVTTPQEGYISRMALSVLLKRSQDVLHRYIEDERLSGKCPLPRQQVTEIIFVLKAVSTLIDSLKKTQPENACISLFGIPPYF

SEQ ID NO: 16700 - protein, 24 aa, Artificial Sequence
  Synthetic polypeptide
HLASYLQIISLFKSFKEMKILMSR

SEQ ID NO: 16701 - protein, 9 aa, Artificial Sequence
  Synthetic polypeptide
NSTWHHTSR

SEQ ID NO: 16702 - protein, 220 aa, Artificial Sequence [sequence omitted]

SEQ ID NO: 16703 - protein, 103 aa, Artificial Sequence
  Synthetic polypeptide
QFFKVRIYDLSKYDHGSDDVLILATDGLWDVLSNEEVAEAITQFLPNCDPDDPHRYTLAAQDLVMRARGVLKDRGWRISNDRLGSGDDISVYVIPLIHGNKLS

SEQ ID NO: 16704 - protein, 4 aa, Artificial Sequence
  Synthetic polypeptide
SFSR

SEQ ID NO: 16705 - protein, 12 aa, Artificial Sequence
  Synthetic polypeptide
VFQGKNLRSFKI

SEQ ID NO: 16706 - protein, 35 aa, Artificial Sequence
  Synthetic polypeptide
LDCRLPEASPAMWNWLSMPGRAHTMKTKPAVRCSL

SEQ ID NO: 16707 - protein, 50 aa, Artificial Sequence
  Synthetic polypeptide
GTFPPLLCTPPSHHHVKKDVFASPSDSIVGFLRPPQPCGTGYQCREEHTQ

SEQ ID NO: 16708 - protein, 440 aa, Artificial Sequence
  Synthetic polypeptide
GLPSHVELVINAGKSTHNEDQASCEVLTVKKKAGAVTSTPNRNSSKRRSSLPNGEGLQLKENSESEGVSCHYWSLFDGHAGSGAAVVASRLLQHHITEQLQDIVDILKNSAVLPPTCLGEEPENTPANSRTLTRAASLRGGVGAPGSPSTPPTRFFTEKKIPHECLVIGALESAFKEMDLQIERERSSYNISGGCTALIVICLLGKLYVANAGDSRAIIIRNGEIIPMSSEFTPETERQRLQYLAFMQPHLLGNEFTHLEFPRRVQRKELGKKMLYRDFNMTGWAYKTIEDEDLKFPLIYGEGKKARVMATIGVTRGLGDHDLKVHDSNIYIKPFLSSAPEVRIYDLSKYDHGSDDVLILATDGLWDVLSNEEVAEAITQFLPNCDPDDPHRYTLAAQDLVMRARGVLKDRGWRISNDRLGSGDDISVYVIPLIHGNKLS

SEQ ID NO: 16709 - protein, 31 aa, Artificial Sequence
  Synthetic polypeptide
CWTFSLQNCEGLSMPGRAHTMKTKPAVRCSL

SEQ ID NO: 16710 - protein, 23 aa, Artificial Sequence
  Synthetic polypeptide
HLDVGLLASRTVKGYQCREEHTQ

SEQ ID NO: 16711 - protein, 55 aa, Artificial Sequence
  Synthetic polypeptide
NPVSTKDTKIGCKWQHTPVIPATWEAEAKESLNLGVRGCSELHHWSSCNTRVLLR

SEQ ID NO: 16712 - protein, 309 aa, Artificial Sequence
  Synthetic polypeptide
TWESEDAVSFITGPAVIPGYFSVDVNNVVLILNGREKAKIFYATQWLLYAQNLVQIQKLQHLAVVLLGNEHCDNEWINPFLKRNGGFVELLFIIYDSPWINDVDVFQWPLGVATYRNFPVVEASWSMLHDERPYLCNFLGTIYENSSRQALMNILKKDGNDKLCWVSAREHWQPQETNESLKNYQDALLQSDLTLCPVGVNTECYRIYEACSYGSIPVVEDVMTAGNCGNTSVHHGAPLQLLKSMGAPFIFIKNWKELPAVLEKEKTIILQEKIERRKMLLQWYQHFKTELKMKFTNILESSFLMNNKS

SEQ ID NO: 16713 - protein, 63 aa, Artificial Sequence
  Synthetic polypeptide
KCVAPPPLPSSSFSGHIRHACFPFTFHHDCDENIPYVSCREHQCREQAERGRKTRGKANWEIW

SEQ ID NO: 16714 - protein, 934 aa, Artificial Sequence
  Synthetic polypeptide
DMPASPSPSTMIVMKTYHMYHAESISAESKLKEAEKQEEKQIGRSGDPVFHIRLEERHQRRSSVKKIEKMKEKRQAKYSENKLKSIKARNEYLLTLEATNASVFKYYIHDLSDLIDCCDLGYHASLNRALRTYLSAEYNLETSRHEGLDIIENAVDNLEPRSDKQRFMEMYPAAFCPPMKFEFQSHMGDEVCQVSAQQPVQAELMLRYQQLQSRLATLKIENEEVKKTTEATLQTIQDMVTIEDYDVSECFQHSRSTESVKSTVSETYLSKPSIAKRRANQQETEQFYFMKLREYLEGSNLITKLQAKHDLLQRTLGEGHRAEYMTTRPPNVPPKPQKHRKSRPRSQYNTKLFNGDLETFVKDSGQVIPLIVESCIRFINLYGLQHQGIFRVSGSQVEVNDIKNSFERGENPLADDQSNHDINSVAGVLKLYFRGLENPLFPKERFNDLISCIRIDNLYERALHIRKLLLTLPRSVLIVMRYLFAFLNHLSQYSDENMMDPYNLAICFGPTLMPVPEIQDQVSCQAHVNEIIKTIIIHHETIFPDAKELDGPVYEKCMAGDDYCDSPYSEHGTLEEVDQDAGTEPHTSEDECEPIEAIAKFDYVGRSARELSFKKGASLLLYHRASEDWWEGRHNGIDGLVPHQYIVVQDMDDTFSDTLSQKADSEASSGPVTEDKSSSKDMNSPTDRHPDGYLARQRKRGEPPPPVRRPGRTSDGHCPLHPPHALSNSSVDLGSPSLASHPRGLLQNRGLNNDSPERRRRPGHGSLTNISRHDSLKKIDSPPIRRSTSSGQYTGFNDHKPLDPETIAQDIEETMNTALNELRELERQSTAKHAPDVVLDTLEQVKNSPTPATSTESLSPLHNVALRSSEPQIRRSTSSSSDTMSTFKPMVAPRMGVQLKPPALRPKPAVLPKTNPTIGPAPPPQGPTDKSCTM

SEQ ID NO: 16715 - protein, 911 aa, Artificial Sequence
  Synthetic polypeptide
DMPASPSPSTMIVMKTYHMYHAESISAESKLKEAEKQEEKQIGRSGDPVFHIRLEERHQRRSSVKKIEKMKEKRQAKYSENKLKSIKARNEYLLTLEATNASVFKYYIHDLSDLIDCCDLGYHASLNRALRTYLSAEYNLETSRHEGLDIIENAVDNLEPRSDKQRFMEMYPAAFCPPMKFEFQSHMGDEVCQVSAQQPVQAELMLRYQQLQSRLATLKIENEEVKKTTEATLQTIQDMVTIEDYDVSECFQHSRSTESVKSTVSETYLSKPSIAKRRANQQETEQFYFMKLREYLEGSNLITKLQAKHDLLQRTLGEGHRAEYMTTSRGRRNSHTRHQDSGQVIPLIVESCIRFINLYGLQHQGIFRVSGSQVEVNDIKNSFERGENPLADDQSNHDINSVAGVLKLYFRGLENPLFPKERFNDLISCIRIDNLYERALHIRKLLLTLPRSVLIVMRYLFAFLNHLSQYSDENMMDPYNLAICFGPTLMPVPEIQDQVSCQAHVNEIIKTIIIHHETIFPDAKELDGPVYEKCMAGDDYCDSPYSEHGTLEEVDQDAGTEPHTSEDECEPIEAIAKFDYVGRSARELSFKKGASLLLYHRASEDWWEGRHNGIDGLVPHQYIVVQDMDDTFSDTLSQKADSEASSGPVTEDKSSSKDMNSPTDRHPDGYLARQRKRGEPPPPVRRPGRTSDGHCPLHPPHALSNSSVDLGSPSLASHPRGLLQNRGLNNDSPERRRRPGHGSLTNISRHDSLKKIDSPPIRRSTSSGQYTGFNDHKPLDPETIAQDIEETMNTALNELRELERQSTAKHAPDVVLDTLEQVKNSPTPATSTESLSPLHNVALRSSEPQIRRSTSSSSDTMSTFKPMVAPRMGVQLKPPALRPKPAVLPKTNPTIGPAPPPQGPTDKSCTM

SEQ ID NO: 16716 - protein, 14 aa, Artificial Sequence
  Synthetic polypeptide
VVVHVCNPRILKKR

SEQ ID NO: 16717 - protein, 10 aa, Artificial Sequence
  Synthetic polypeptide
WWCMSAIPGY

SEQ ID NO: 16718 - protein, 133 aa, Artificial Sequence
  Synthetic polypeptide
GGACLQSQDIEETMNTALNELRELERQSTAKHAPDVVLDTLEQVKNSPTPATSTESLSPLHNVALRSSEPQIRRSTSSSSDTMSTFKPMVAPRMGVQLKPPALRPKPAVLPKTNPTIGPAPPPQGPTDKSCTM

SEQ ID NO: 16719 - protein, 49 aa, Artificial Sequence
  Synthetic polypeptide
SQLLRRLMQENGMGLPDAIATEQLHRQQQEKWSGQSQHLLQGAELQNQF

SEQ ID NO: 16720 - protein, 174 aa, Artificial Sequence
  Synthetic polypeptide
CRRMEWVFQMLSRQNNYTVNNKRNGVAKVNIFFKELNYKTNSESPSVTMVTLLSNLGSQWSLWFGSSVLSVVEMAELVFDLLVIMFLMLLRRFRSRYWSPGRGGRGAQEVASTLASSPPSHFCPHPMSLSLSQPGPAPSPALTAPPPAYATLGPRPSPGGSAGASSSTCPLGGP

SEQ ID NO: 16721 - protein, 65 aa, Artificial Sequence
  Synthetic polypeptide
HRETPSLLKIRKISRAWWRAPVVPATPEADAGEWNGSSRCYRDRTITPSTTREMEWPKSTSSSRS

SEQ ID NO: 16722 - protein, 43 aa, Artificial Sequence
  Synthetic polypeptide
SQLLRRLMQENGMGLPDAIATEQLHRQQQEKWSGQSQHLLQGA

SEQ ID NO: 16723 - protein, 36 aa, Artificial Sequence
  Synthetic polypeptide
CRRMEWVFQMLSRQNNYTVNNKRNGVAKVNIFFKEL

SEQ ID NO: 16724 - protein, 176 aa, Artificial Sequence
  Synthetic polypeptide
GRSQDGQIGTAPVYSSQRERRRRRVISAFPSELQKLILEYTNTATALLYEILLVFQQGNLGLGSTKFAISWIMSFLQSCPPIITFVASIVKQVVRGLSASFQLLSPCQAVLLYQQFYILKSCLRHSRTLAEYIRNNYREEFRYFIHMPALQKRLPLCYPITQPTIQLFHEVLKLVE

SEQ ID NO: 16725 - protein, 46 aa, Artificial Sequence
  Synthetic polypeptide
FLHFHLSYRSLFWSIQILLQHFYMRYFWSFSREISDWDPQSLLLAG

SEQ ID NO: 16726 - protein, 35 aa, Artificial Sequence
  Synthetic polypeptide
GRSQDGQIGTAPVYSSQRERRRRRVISAFPSEGMH

SEQ ID NO: 16727 - protein, 222 aa, Artificial Sequence
  Synthetic polypeptide
FLHFHLRACIEIIQTLVLMFRETETESSRLNTLAAKKGALFNLLVILISEPQIPKSCPVFDIQLVADSALVRMSFDAELQKLILEYTNTATALLYEILLVFQQGNLGLGSTKFAISWIMSFLQSCPPIITFVASIVKQVVRGLSASFQLLSPCQAVLLYQQFYILKSCLRHSRTLAEYIRNNYREEFRYFIHMPALQKRLPLCYPITQPTIQLFHEVLKLVE

SEQ ID NO: 16728 - protein, 11 aa, Artificial Sequence
  Synthetic polypeptide
FLHFHLSKQTS

SEQ ID NO: 16729 - protein, 709 aa, Artificial Sequence
  Synthetic polypeptide
SQHFRRPRQKTGDLFAIKVFNNISFLRPVDVQMREFEVLKKLNHKNIVKLFAIEEETTTRHKVLIMEFCPCGSLYTVLEEPSNAYGLPESEFLIVLRDVVGGMNHLRENGIVHRDIKPGNIMRVIGEDGQSVYKLTDFGAARELEDDEQFVSLYGTEEYLHPDMYERAVLRKDHQKKYGATVDLWSIGVTFYHAATGSLPFRPFEGPRRNKEVMYKIITGKPSGAISGVQKAENGPIDWSGDMPVSCSLSRGLQVLLTPVLANILEADQEKCWGFDQFFAETSDILHRMVIHVFSLQQMTAHKIYIHSYNTATIFHELVYKQTKIISSNQELIYEGRRLVLEPGRLAQHFPKTTEENPIFVVSREPLNTIGLIYEKISLPKVHPRYDLDGDASMAKAITGVVCYACRIASTLLLYQELMRKGIRWLIELIKDDYNETVHKKTEVVITLDFCIRNIEKTVKVYEKLMKINLEAAELGEISDIHTKLLRLSSSQGTIETSLQDIDSRLSPGGSLADAWAHQEGTHPKDRNVEKLQVLLNCMTEIYYQFKKDKAERRLAYNEEQIHKFDKQKLYYHATKAMTHFTDECVKKYEAFLNKSEEWIRKMLHLRKQLLSLTNQCFDIEEEVSKYQEYTNELQETLPQKMFTASSGIKHTMTPIYPSSNTLVEMTLGMKKLKEEMEGVVKELAENNHILERFGSLTMDGGLRNVDCL

SEQ ID NO: 16730 - protein, 31 aa, Artificial Sequence
  Synthetic polypeptide
SSMVAHACNPSTFGGQGRKLVIYLLSKYLIT

SEQ ID NO: 16731 - protein, 20 aa, Artificial Sequence
  Synthetic polypeptide
RAWWLTPVIPALSEAKAENW

SEQ ID NO: 16732 - protein, 83 aa, Artificial Sequence
  Synthetic polypeptide
SQHFRRPRQKTGDLFAIKVFNNISFLRPVDVQMREFEVLKKLNHKNIVKLFAIEEETTTRHKVLIMEFCPCGSLYTVLEEPSN

SEQ ID NO: 16733 - protein, 78 aa, Artificial Sequence
  Synthetic polypeptide
SQHFRRPRQKTGDLFAIKVFNNISFLRPVDVQMREFEVLKKLNHKNIVKLFAIEEETTTRHKVLIMEFCPCGSLYTVL

SEQ ID NO: 16734 - protein, 636 aa, Artificial Sequence
  Synthetic polypeptide
HQKHKYQKYINWISSALNIFGPQRTSVGGMNHLRENGIVHRDIKPGNIMRVIGEDGQSVYKLTDFGAARELEDDEQFVSLYGTEEYLHPDMYERAVLRKDHQKKYGATVDLWSIGVTFYHAATGSLPFRPFEGPRRNKEVMYKIITGKPSGAISGVQKAENGPIDWSGDMPVSCSLSRGLQVLLTPVLANILEADQEKCWGFDQFFAETSDILHRMVIHVFSLQQMTAHKIYIHSYNTATIFHELVYKQTKIISSNQELIYEGRRLVLEPGRLAQHFPKTTEENPIFVVSREPLNTIGLIYEKISLPKVHPRYDLDGDASMAKAITGVVCYACRIASTLLLYQELMRKGIRWLIELIKDDYNETVHKKTEVVITLDFCIRNIEKTVKVYEKLMKINLEAAELGEISDIHTKLLRLSSSQGTIETSLQDIDSRLSPGGSLADAWAHQEGTHPKDRNVEKLQVLLNCMTEIYYQFKKDKAERRLAYNEEQIHKFDKQKLYYHATKAMTHFTDECVKKYEAFLNKSEEWIRKMLHLRKQLLSLTNQCFDIEEEVSKYQEYTNELQETLPQKMFTASSGIKHTMTPIYPSSNTLVEMTLGMKKLKEEMEGVVKELAENNHILERFGSLTMDGGLRNVDCL

SEQ ID NO: 16735 - protein, 12 aa, Artificial Sequence
  Synthetic polypeptide
TFLGLRGHQWVE

SEQ ID NO: 16736 - protein, 50 aa, Artificial Sequence
  Synthetic polypeptide
PLCNASLDMTPKAQIPEIHKLDFISIKHFWASEDISGWNESSTREWYSAP

SEQ ID NO: 16737 - protein, 204 aa, Artificial Sequence
  Synthetic polypeptide
QSKDVEKEKETHSYLSKEEIKEKVHKYNLAVTDKLKMTLNSNGIYTGFIKVQMELCKPPQTSPNSGKLSPSSNGCMNTLHISSTNTVGEVIEALLKKFLVTESPAKFALYKRCHREDQVYACKLSDREHPLYLRLVAGPRTDTLSFVLREHEIGEWEAFSLPELQNFLRILDKEEDEQLQNLKRRYTAYRQKLEEALREVWKPD

SEQ ID NO: 16738 - protein, 28 aa, Artificial Sequence
  Synthetic polypeptide
SLKMLRKRRKPTVTSAKRRSKRKFINTT

SEQ ID NO: 16739 - protein, 56 aa, Artificial Sequence
  Synthetic polypeptide
QSKDVEKEKETHSYLSKEEIKEKVHKYNLAVTDKLKMTLSTPASSQTGNIHSTCVW

SEQ ID NO: 16740 - protein, 49 aa, Artificial Sequence
  Synthetic polypeptide
GKSPSAGGIGFRSWPHSNGSRSREMLRKRRKPTVTSAKRRSKRKFINTT

SEQ ID NO: 16741 - protein, 25 aa, Artificial Sequence
  Synthetic polypeptide
ERALVLEALGSDPGLTQMVAVAVRC

SEQ ID NO: 16742 - protein, 474 aa, Artificial Sequence
  Synthetic polypeptide
STNMIQYVPSALCCPSRASILTGKYPHNHHVVNNTLEGNCSSKSWQKIQEPNTFPAILRSMCGYQTFFAGKYLNEYGAPDAGGLEHVPLGWSYWYALEKNSKYYNYTLSINGKARKHGENYSVDYLTDVLANVSLDFLDYKSNFEPFFMMIATPAPHSPWTAAPQYQKAFQNVFAPRNKNFNIHGTNKHWLIRQAKTPMTNSSIQFLDNAFRKRWQTLLSVDDLVEKLVKRLEFTGELNNTYIFYTSDNGYHTGQFSLPIDKRQLYEFDIKVPLLVRGPGIKPNQTSKMLVANIDLGPTILDIAGYDLNKTQMDGMSLLPILRGASNLTWRSDVLVEYQGEGRNVTDPTCPSLSPGVSQCFPDCVCEDAYNNTYACVRTMSALWNLQYCEFDDQEVFVEVYNLTADPDQITNIAKTIDPELLGKMNYRLMMLQSCSGPTCRTPGVFDPGYRFDPRLMFSNRGSVRTRRFSKHLL

SEQ ID NO: 16743 - protein, 16 aa, Artificial Sequence
  Synthetic polypeptide
YNMCQVLSAAPAEPVS

SEQ ID NO: 16744 - protein, 26 aa, Artificial Sequence
  Synthetic polypeptide
YQHDTICAKCSLLPQQSQYPDRKVPT

SEQ ID NO: 16745 - protein, 245 aa, Artificial Sequence
  Synthetic polypeptide
STNMIQYVPSALCCPSRASILTGKYPHNHHVVNNTLEGNCSSKSWQKIQEPNTFPAILRSMCGYQTFFAGKYLNEYGAPDAGGLEHVPLGWSYWYALEKNSKYYNYTLSINGKARKHGENYSVDYLTDVLANVSLDFLDYKSNFEPFFMMIATPAPHSPWTAAPQYQKAFQNVFAPRNKNFNIHGTNKHWLIRQAKTPMTNSSIQFLDNAFRKRWQTLLSVDDLVEKLVKRLEFTGELNNTYIFY

SEQ ID NO: 16746 - protein, 29 aa, Artificial Sequence
  Synthetic polypeptide
NILYERMHINLERVQRNIGHREIEIGFRS

SEQ ID NO: 16747 - protein, 3 aa, Artificial Sequence
  Synthetic polypeptide
DRI

SEQ ID NO: 16748 - protein, 64 aa, Artificial Sequence
  Synthetic polypeptide
VFQEFPLLPLPHFLLPPPCKKCLSPTTMILRPPQPCGTPQQVVQKKPAQEETEETSSQESAEED

SEQ ID NO: 16749 - protein, 34 aa, Artificial Sequence
  Synthetic polypeptide
GLPSHVELHNKLFRRSLLRRKLKRHPHKSLPKRT

SEQ ID NO: 16750 - protein, 32 aa, Artificial Sequence
  Synthetic polypeptide
EVSFAYHHDSEASPAMWNSTTSCSEEACSGGN

SEQ ID NO: 16751 - protein, 54 aa, Artificial Sequence
  Synthetic polypeptide
VFQEFPLLPLPHFLLPPPCKKCLSPTTMILRPPQPCGTPQQVVQKKPAQVRHSH

SEQ ID NO: 16752 - protein, 19 aa, Artificial Sequence
  Synthetic polypeptide
GLPSHVELHNKLFRRSLLR

SEQ ID NO: 16753 - protein, 32 aa, Artificial Sequence
  Synthetic polypeptide
EVSFAYHHDSEASPAMWNSTTSCSEEACSGKT

SEQ ID NO: 16754 - protein, 73 aa, Artificial Sequence
  Synthetic polypeptide
VFQEFPLLPLPHFLLPPPCKKCLSPTTMILRPPQPCGTPQQVVQKKPAQVNVALPGKDHPGNLIYLLFSKNAT

SEQ ID NO: 16755 - protein, 43 aa, Artificial Sequence
  Synthetic polypeptide
GLPSHVELHNKLFRRSLLRSMLPCLGRTTRAILYIYCSLKMPL

SEQ ID NO: 16756 - protein, 49 aa, Artificial Sequence
  Synthetic polypeptide
EVSFAYHHDSEASPAMWNSTTSCSEEACSGQCCLAWEGPPGQSYISTVL

SEQ ID NO: 16757 - protein, 27 aa, Artificial Sequence
  Synthetic polypeptide
NKELQYEPAIPLPATTSCSEEACSGGN

SEQ ID NO: 16758 - protein, 119 aa, Artificial Sequence
  Synthetic polypeptide
MANKHMKRCSTSLVVREVQIETAMMFNFTSTWMSTSKKTGNNKHWHVYGAIGTPDSLLVGRTAKWYSCFRKLSGSSSKSETKNYNMNQRFHSQPQQVVQKKPAQEETEETSSQESAEED

SEQ ID NO: 16759 - protein, 33 aa, Artificial Sequence
  Synthetic polypeptide
TSDSTPSHNKLFRRSLLRRKLKRHPHKSLPKRT

SEQ ID NO: 16760 - protein, 27 aa, Artificial Sequence
  Synthetic polypeptide
NKELQYEPAIPLPATTSCSEEACSGKT

SEQ ID NO: 16761 - protein, 109 aa, Artificial Sequence
  Synthetic polypeptide
MANKHMKRCSTSLVVREVQIETAMMFNFTSTWMSTSKKTGNNKHWHVYGAIGTPDSLLVGRTAKWYSCFRKLSGSSSKSETKNYNMNQRFHSQPQQVVQKKPAQVRHSH

SEQ ID NO: 16762 - protein, 18 aa, Artificial Sequence
  Synthetic polypeptide
TSDSTPSHNKLFRRSLLR

SEQ ID NO: 16763 - protein, 44 aa, Artificial Sequence
  Synthetic polypeptide
NKELQYEPAIPLPATTSCSEEACSGQCCLAWEGPPGQSYISTVL

SEQ ID NO: 16764 - protein, 128 aa, Artificial Sequence
  Synthetic polypeptide
MANKHMKRCSTSLVVREVQIETAMMFNFTSTWMSTSKKTGNNKHWHVYGAIGTPDSLLVGRTAKWYSCFRKLSGSSSKSETKNYNMNQRFHSQPQQVVQKKPAQVNVALPGKDHPGNLIYLLFSKNAT

SEQ ID NO: 16765 - protein, 42 aa, Artificial Sequence
  Synthetic polypeptide
TSDSTPSHNKLFRRSLLRSMLPCLGRTTRAILYIYCSLKMPL

SEQ ID NO: 16766 - protein, 19 aa, Artificial Sequence
  Synthetic polypeptide
YRAGTENWKPGDPVSNSRF

SEQ ID NO: 16767 - protein, 22 aa, Artificial Sequence
  Synthetic polypeptide
IVQGQRIGSPEIRCQTAGFKYS

SEQ ID NO: 16768 - protein, 175 aa, Artificial Sequence
  Synthetic polypeptide
SCRDRELEARRSGVKQQVLNTLESTQASLYFAEDPPTSLKSFRCPSPLFLENVPSIPVEDDESQNNNLLPSDEGLRIDRMTQKTPFECSQSEVMFLSLDKKPESKRNEEACNMPSSSCEESWFPKYIVPSQDLRPYKVNIDPSSEAPGHSCRSRPVESSCSSKFSWDEYEQYKKE

SEQ ID NO: 16769 - protein, 30 aa, Artificial Sequence
  Synthetic polypeptide
KIQKRGPRSKQLSMWWGRRAASTGSMSTPP

SEQ ID NO: 16770 - protein, 62 aa, Artificial Sequence
  Synthetic polypeptide
NPISTKKYKKGVRGANSCLCGGEGGPPALAACLHRRDQGPLPSVCDCRGVSAPECHYEKQFS

SEQ ID NO: 16771 - protein, 242 aa, Artificial Sequence
  Synthetic polypeptide
SGVVAHACNPSTLGGRGRWITCSQEFKTNPGQHGKTPSLLKNTKKGSEEQTVVYVVGKAGRQHWQHVYTAVTRGRCRVYVIAEESQLRNAIMKNSFPRKTRLKHFLQSKLSSSGAPPADFPSPRKSSGDSGGPSTPSASPLPVVTDHAMTNDVTWSEASSPDERTLTFAERWQLSSPDGVDTDDDLPKSRASKRTCGVNDDESPSKIFMVGESPQVSSRLQNLRLNNLIPRQLFKPTDNQET

SEQ ID NO: 16772 - protein, 1076 aa, Artificial Sequence
  Synthetic polypeptide
EMPFTSHHNSEASPAKWNYESPYTKSASQTKPPDGALAVRRQSIPEEFKGSTVVELMKKEGTTLGLTVSGGIDKDGKPRVSNLRQGGIAARSDQLDVGDYIKAVNGINLAKFRHDEIISLLKNVGERVVLEVEYELPPVSVQGSSVIFRTVEVTLHKEGNTFGFVIRGGAHDDRNKSRPVVITCVRPGGPADREGTIKPGDRLLSVDGIRLLGTTHAEAMSILKQCGQEAALLIEYDVSVMDSVATASGPLLVEVAKTPGASLGVALTTSMCCNKQVIVIDKIKSASIADRCGALHVGDHILSIDGTSMEYCTLAEATQFLANTTDQVKLEILPHHQTRLALKGPDHAALVSSSFSPTSMSAYSLSSLNMGTLPRSLYSTSPRGTMMRRRLKKKDFKSSLSLASSTVGLAGQVVHTETTEVVLTADPVTGFGIQLQGSVFATETLSSPPLISYIEADSPAERCGVLQIGDRVMAINGIPTEDSTFEEASQLLRDSSITSKVTLEIEFDVAESVIPSSGTFHVKLPKKHNVELGITISSPSSRKPGDPLVISDIKKGSVAHRTGTLELGDKLLAIDNIRLDNCSMEDAVQILQQCEDLVKLKIRKDEDNSDEQESSGAIIYTVELKRYGGPLGITISGTEEPFDPIIISSLTKGGLAERTGAIHIGDRILAINSSSLKGKPLSEAIHLLQMAGETVTLKIKKQTDAQSASSPKKFPISSHLSDLGDVEEDSSPAQKPGKLSDMYPSTVPSVDSAVDSWDGSAIDTSYGTQGTSFQASGYNFNTYDWRSPKQRGSLSPVTKPRSQTYPDVGLSYEDWDRSTASGFAGAADSAETEQEENFWSQALEDLETCGQSGILRELEEKADRRVSLRNMTLLATIMSGSTMSLNHEAPTPRSQLGRQASFQERSSSRPHYSQTTRSNTLPSDVGRKSVTLRKMKQEIKEIMSPTPVELHKVTLYKDSDMEDFGFSVADGLLEKGVYVKNIRPAGPGDLGGLKPYDRLLQVNHVRTRDFDCCLVVPLIAESGNKLDLVISRNPLASQKSIDQQSLPGDWSEQNSAFFQQPSHGGNLETREPTNTL

SEQ ID NO: 16773 - protein, 66 aa, Artificial Sequence
  Synthetic polypeptide
ISLTRSDGFIRSFCFCLFLIFLLLLPCKKCLLPPTIILRPPQPSGTMRVPTLNPPARQSRLMERWL

SEQ ID NO: 16774 - protein, 8 aa, Artificial Sequence
  Synthetic polypeptide
GLPSQVEL

SEQ ID NO: 16775 - protein, 1113 aa, Artificial Sequence
  Synthetic polypeptide
EMPFTSHHNSEASPAKWNYESPYTKSASQTKPPDGALAVRRQSIPEEFKGSTVVELMKKEGTTLGLTVSGGIDKDGKPRVSNLRQGGIAARSDQLDVGDYIKAVNGINLAKFRHDEIISLLKNVGERVVLEVEYELPPVSVQGSSVIFRTVEVTLHKEGNTFGFVIRGGAHDDRNKSRPVVITCVRPGGPADREGTIKPGDRLLSVDGIRLLGTTHAEAMSILKQCGQEAALLIEYDVSVMDSVATASGPLLVEVAKTPGASLGVALTTSMCCNKQVIVIDKIKSASIADRCGALHVGDHILSIDGTSMEYCTLAEATQFLANTTDQVKLEILPHHQTRLALKGPDHVKIQRSDRQLTWDSWASNHSSLHTNHHYNTYHPDHCRVPALTFPKAPPPNSPPALVSSSFSPTSMSAYSLSSLNMGTLPRSLYSTSPRGTMMRRRLKKKDFKSSLSLASSTVGLAGQVVHTETTEVVLTADPVTGFGIQLQGSVFATETLSSPPLISYIEADSPAERCGVLQIGDRVMAINGIPTEDSTFEEASQLLRDSSITSKVTLEIEFDVAESVIPSSGTFHVKLPKKHNVELGITISSPSSRKPGDPLVISDIKKGSVAHRTGTLELGDKLLAIDNIRLDNCSMEDAVQILQQCEDLVKLKIRKDEDNSDEQESSGAIIYTVELKRYGGPLGITISGTEEPFDPIIISSLTKGGLAERTGAIHIGDRILAINSSSLKGKPLSEAIHLLQMAGETVTLKIKKQTDAQSASSPKKFPISSHLSDLGDVEEDSSPAQKPGKLSDMYPSTVPSVDSAVDSWDGSAIDTSYGTQGTSFQASGYNFNTYDWRSPKQRGSLSPVTKPRSQTYPDVGLSYEDWDRSTASGFAGAADSAETEQEENFWSQALEDLETCGQSGILRELEATIMSGSTMSLNHEAPTPRSQLGRQASFQERSSSRPHYSQTTRSNTLPSDVGRKSVTLRKMKQEIKEIMSPTPVELHKVTLYKDSDMEDFGFSVADGLLEKGVYVKNIRPAGPGDLGGLKPYDRLLQVNHVRTRDFDCCLVVPLIAESGNKLDLVISRNPLASQKSIDQQSLPGDWSEQNSAFFQQPSHGGNLETREPTNTL

SEQ ID NO: 16776 - protein, 1128 aa, Artificial Sequence
  Synthetic polypeptide
EMPFTSHHNSEASPAKWNYESPYTKSASQTKPPDGALAVRRQSIPEEFKGSTVVELMKKEGTTLGLTVSGGIDKDGKPRVSNLRQGGIAARSDQLDVGDYIKAVNGINLAKFRHDEIISLLKNVGERVVLEVEYELPPVSVQGSSVIFRTVEVTLHKEGNTFGFVIRGGAHDDRNKSRPVVITCVRPGGPADREGTIKPGDRLLSVDGIRLLGTTHAEAMSILKQCGQEAALLIEYDVSVMDSVATASGPLLVEVAKTPGASLGVALTTSMCCNKQVIVIDKIKSASIADRCGALHVGDHILSIDGTSMEYCTLAEATQFLANTTDQVKLEILPHHQTRLALKGPDHVKIQRSDRQLTWDSWASNHSSLHTNHHYNTYHPDHCRVPALTFPKAPPPNSPPALVSSSFSPTSMSAYSLSSLNMGTLPRSLYSTSPRGTMMRRRLKKKDFKSSLSLASSTVGLAGQVVHTETTEVVLTADPVTGFGIQLQGSVFATETLSSPPLISYIEADSPAERCGVLQIGDRVMAINGIPTEDSTFEEASQLLRDSSITSKVTLEIEFDVAESVIPSSGTFHVKLPKKHNVELGITISSPSSRKPGDPLVISDIKKGSVAHRTGTLELGDKLLAIDNIRLDNCSMEDAVQILQQCEDLVKLKIRKDEDNSDEQESSGAIIYTVELKRYGGPLGITISGTEEPFDPIIISSLTKGGLAERTGAIHIGDRILAINSSSLKGKPLSEAIHLLQMAGETVTLKIKKQTDAQSASSPKKFPISSHLSDLGDVEEDSSPAQKPGKLSDMYPSTVPSVDSAVDSWDGSAIDTSYGTQGTSFQASGYNFNTYDWRSPKQRGSLSPVTKPRSQTYPDVGLSYEDWDRSTASGFAGAADSAETEQEENFWSQALEDLETCGQSGILRELEEKADRRVSLRNMTLLATIMSGSTMSLNHEAPTPRSQLGRQASFQERSSSRPHYSQTTRSNTLPSDVGRKSVTLRKMKQEIKEIMSPTPVELHKVTLYKDSDMEDFGFSVADGLLEKGVYVKNIRPAGPGDLGGLKPYDRLLQVNHVRTRDFDCCLVVPLIAESGNKLDLVISRNPLASQKSIDQQSLPGDWSEQNSAFFQQPSHGGNLETREPTNTL

SEQ ID NO: 16777 - protein, 1056 aa, Artificial Sequence
  Synthetic polypeptide
EMPFTSHHNSEASPAKWNYESPYTKSASQTKPPDGALAVRRQSIPEEFKGSTVVELMKKEGTTLGLTVSGGIDKDGKPRVSNLRQGGIAARSDQLDVGDYIKAVNGINLAKFRHDEIISLLKNVGERVVLEVEYELPPVSVQGSSVIFRTVEVTLHKEGNTFGFVIRGGAHDDRNKSRPVVITCVRPGGPADREGTIKPGDRLLSVDGIRLLGTTHAEAMSILKQCGQEAALLIEYDVSVMDSVATASGPLLVEVAKTPGASLGVALTTSMCCNKQVIVIDKIKSASIADRCGALHVGDHILSIDGTSMEYCTLAEATQFLANTTDQVKLEILPHHQTRLALKGPDHAALVSSSFSPTSMSAYSLSSLNMGTLPRSLYSTSPRGTMMRRRLKKKDFKSSLSLASSTVGLAGQVVHTETTEVVLTADPVTGFGIQLQGSVFATETLSSPPLISYIEADSPAERCGVLQIGDRVMAINGIPTEDSTFEEASQLLRDSSITSKVTLEIEFDVAESVIPSSGTFHVKLPKKHNVELGITISSPSSRKPGDPLVISDIKKGSVAHRTGTLELGDKLLAIDNIRLDNCSMEDAVQILQQCEDLVKLKIRKDEDNSDEQESSGAIIYTVELKRYGGPLGITISGTEEPFDPIIISSLTKGGLAERTGAIHIGDRILAINSSSLKGKPLSEAIHLLQMAGETVTLKIKKQTDAQSASSPKKFPISSHLSDLGDVEEDSSPAQKPGKLSDMYPSTVPSVDSAVDSWDGSAIDTSYGTQGTSFQASGYNFNTYDWRSPKQRGSLSPVTKPRSQTYPDVGLSYEDWDRSTASGFAGAADSAETEQEENFWSQALEDLETCGQSGILRELEATIMSGSTMSLNHEAPTPRSQLGRQASFQERSSSRPHYSQTTRSNTLPSDVGRKSVTLRKMKQEIKEIMSPTPVELHKVTLYKDSDMEDFGFSVADGLLEKGVYVKNIRPAGPGDLGGLKPYDRLLQVNHVRTRDFDCCLVVPLIAESGNKLDLVISRNPLASQKSIDQQSLPGDWSEQNSAFFQQPSHGGNLETRE

SEQ ID NO: 16778 - protein, 162 aa, Artificial Sequence
  Synthetic polypeptide
EMPFTSHHNSEASPAKWNYESPYTKSASQTKPPDGALAVRRQSIPEEFKGSTVVELMKKEGTTLGLTVSGGIDKDGKPRVSNLRQGGIAARSDQLDVGDYIKAVNGINLAKFRHDEIISLLKNVGERVVLEVEYELPPVSVQGSSVIFRTVEVTLHKEGNTF

SEQ ID NO: 16779 - protein, 758 aa, Artificial Sequence
  Synthetic polypeptide
TYYCHMIQQTHSLIFTQVNILSKIVSRATPGLQKFSKTASMLWLLQQEMVTWRLLASLYRDRIQSALEEESVFAVTAVNASEKTVVEALFQRDSLVRQSQLVVDWLESIAKDEIGEFSDNIEFYAKSVYWENTLHTLKQRQLTSYVGSVRPLVTELDPDAPIRQKMPLDDLDREDEVRLLKYLFTLIRAGMTEEAQRLCKRCGQAWRAATLEGWKLYHDPNVNGGTELEPVEGNPYRRIWKISCWRMAEDELFNRYERAIYAALSGNLKQLLPVCDTWEDTVWAYFRVMVDSLVEQEIQTSVATLDETEELPREYLGANWTLEKVFEELQATDKKRVLEENQEHYHIVQKFLILGDIDGLMDEFSKWLSKSRNNLPGHLLRFMTHLILFFRTLGLQTKEEVSIEVLKTYIQLLIREKHTNLIAFYTCHLPQDLAVAQYALFLESVTEFEQRHHCLELAKEADLDVATITKTVVENIRKKDNGEFSHHDLAPALDTGTTEEDRLKIDVIDWLVFDPAQRAEALKQGNAIMRKFLASKKHEAAKEVFVKIPQDSIAEIYNQCEEQGMESPLPAEDDNAIREHLCIRAYLEAHETFNEWFKHMNSVPQKPALIPQPTFTEKVAHEHKEKKYEMDFGIWKGHLDALTADVKEKMYNVLLFVDGGWMVDVREDAKEDHERTHQMVLLRKLCLPMLCFLLHTILHSTGQYQECLQLADMVSSERHKLYLVFSKEELRKLLQKLRESSLMLLDQGLDPLGYEIQL

SEQ ID NO: 16780 - protein, 4 aa, Artificial Sequence
  Synthetic polypeptide
YLPR

SEQ ID NO: 16781 - protein, 64 aa, Artificial Sequence
  Synthetic polypeptide
RSKRHHQMLERMWSNRNYHSLLVEMQTTIATLEDSLQFHTKLNILLSYDPANSFLDIYPGEYTE

SEQ ID NO: 16782 - protein, 670 aa, Artificial Sequence
  Synthetic polypeptide
TYYCHMIQQTHSLIFTQVNILSKIVSRATPGLQKFSKTASMLWLLQQEMVTWRLLASLYRDRIQSALEEESVFAVTAVNASEKTVVEALFQRDSLVRQSQLVVDWLESIAKDEIGEFSDNIEFYAKSVYWENTLHTLKQRQLTSYVGSVRPLVTELDPDAPIRQKMPLDDLDREDEVRLLKYLFTLIRAGMTEEAQRLCKRCGQAWRAATLEGWKLYHDPNVNGGTELEPVEGNPYRRIWKISCWRMAEDELFNRYERAIYAALSGNLKQLLPVCDTWEDTVWAYFRVMVDSLVEQEIQTSVATLDETEELPREYLGANWTLEKVFEELQATDKKRVLEENQEHYHIVQKFLILGDIDGLMDEFSKWLSKSRNNLPGHLLRFMTHLILFFRTLGLQTKEEVSIEVLKTYIQEDRLKIDVIDWLVFDPAQRAEALKQGNAIMRKFLASKKHEAAKEVFVKIPQDSIAEIYNQCEEQGMESPLPAEDDNAIREHLCIRAYLEAHETFNEWFKHMNSVPQKPALIPQPTFTEKVAHEHKEKKYEMDFGIWKGHLDALTADVKEKMYNVLLFVDGGWMVDVREDAKEDHERTHQMVLLRKLCLPMLCFLLHTILHSTGQYQECLQLADMVSSERHKLYLVFSKEELRKLLQKLRESSLMLLDQGLDPLGYEIQL

SEQ ID NO: 16783 - protein, 49 aa, Artificial Sequence
  Synthetic polypeptide
FIVAKSGSNPNVHELMDTFLLMLYIYNGKLFTHKSLPLLVLDLKHLQKS

SEQ ID NO: 16784 - protein, 21 aa, Artificial Sequence
  Synthetic polypeptide
CCIFIMENYSPIKVCPCWCWI

SEQ ID NO: 16785 - protein, 31 aa, Artificial Sequence
  Synthetic polypeptide
GPRPVVPWPHVWRAGRDAAAGQGRALDVSCA

SEQ ID NO: 16786 - protein, 490 aa, Artificial Sequence
  Synthetic polypeptide
ALGQWYHGHMSGGQAETLLQAKGEPWTFLVRESLSQPGDFVLSVLSDQPKAGPGSPLRVTHIKVMCEGGRYTVGGLETFDSLTDLVEHFKKTGIEEASGAFVYLRQPYYATRVNAADIENRVLELNKKQESEDTAKAGFWEEFESLQKQEVKNLHQRLEGQRPENKGKNRYKNILPFDHSRVILQGRDSNIPGSDYINANYIKNQLLGPDENAKTYIASQGCLEATVNDFWQMAWQENSRVIVMTTREVEKGRNKCVPYWPEVGMQRAYGPYSVTNCGEHDTTEYKLRTLQVSPLDNGDLIREIWHYQYLSWPDHGVPSEPGGVLSFLDQINQRQESLPHAGPIIVHCSAGIGRTGTIIVIDMLMENISTKGLDCDIDIQKTIQMVRAQRSGMVQTEAQYKFIYVAIAQFIETTKKKLEVLQSQKGQESEYGNITYPPAMKNAHAKASRTSSKHKEDVYENLHTKNKREEKVKKQRSADKEKSKGSLKRK

SEQ ID NO: 16787 - protein, 110 aa, Artificial Sequence
  Synthetic polypeptide
ASGTMATCLAGRQRRCCRPRASPGRFLCVRASASLETSCFLCSVTSPRLAQAPRSGSPTSRSCARVDATQWVVWRPSTASRTWWSISRRRGLRRPQAPLSTCGSRTMPRG

SEQ ID NO: 16788 - protein, 60 aa, Artificial Sequence
  Synthetic polypeptide
ALGQWYHGHMSGGQAETLLQAKGEPWTFLVRESLSQPGDFVLSVLSDQPKAGPGSPLRVT

SEQ ID NO: 16789 - protein, 57 aa, Artificial Sequence
  Synthetic polypeptide
ASGTMATCLAGRQRRCCRPRASPGRFLCVRASASLETSCFLCSVTSPRLAQAPRSGS

SEQ ID NO: 16790 - protein, 519 aa, Artificial Sequence
  Synthetic polypeptide
ALGQWYHGHMSGGQAETLLQAKGEPWTFLVRESLSQPGDFVLSVLSDQPKAGPGSPLRVTHIKVMCEGGRYTVGGLETFDSLTDLVEHFKKTGIEEASGAFVYLRQPYYATRVNAADIENRVLELNKKQESEDTAKAGFWEEFESLQKQEVKNLHQRLEGQRPENKGKNRYKNILPFDHSRVILQGRDSNIPGSDYINANYIKNQLLGPDENAKTYIASQGCLEATVNDFWQMAWQENSRVIVMTTREVEKGRNKCVPYWPEVGMQRAYGPYSVTNCGEHDTTEYKLRTLQVSPLDNGDLIREIWHYQYLSWPDHGVPSEPGGVLSFLDQINQRQESLPHAGPIIVHCSAGIGRTGTIIVIDMLMENISTKGLDCDIDIQKTIQMVRAQRSGMVQTEAQYKFIYVAIAQFIETTKKKLEVLQSQKGQESEYGNITYPPAMKNAHAKASRTSSKSLESSAGTVAASPVRRGGQRGLPVPGPPVLSPDLHQLPVLAPLHPAADTRRMCMRTCTLRTRGRRK

SEQ ID NO: 16791 - protein, 46 aa, Artificial Sequence
  Synthetic polypeptide
GPRPVVPWPHVWRAGRDAAAGSPLRVTHIKVMCEGGRYTVGGLETF

SEQ ID NO: 16792 - protein, 45 aa, Artificial Sequence
  Synthetic polypeptide
ALGQWYHGHMSGGQAETLLQAPRSGSPTSRSCARVDATQWVVWRP

SEQ ID NO: 16793 - protein, 43 aa, Artificial Sequence
  Synthetic polypeptide
ASGTMATCLAGRQRRCCRLPAQGHPHQGHVRGWTLHSGWFGDL

SEQ ID NO: 16794 - protein, 80 aa, Artificial Sequence
  Synthetic polypeptide
ALGQWYHGHMSGGQAETLLQAKGEPWTFLVRESLSQPGDFVLSVLSDQPKAGPGSPLRVTHIKVMCEGGRYTVGGLETFD

SEQ ID NO: 16795 - protein, 77 aa, Artificial Sequence
  Synthetic polypeptide
ASGTMATCLAGRQRRCCRPRASPGRFLCVRASASLETSCFLCSVTSPRLAQAPRSGSPTSRSCARVDATQWVVWRPS

SEQ ID NO: 16796 - protein, 124 aa, Artificial Sequence
  Synthetic polypeptide
MRWWIWKHVAQCLAHSGTMATCLAGRQRRCCRPRASPGRFLCVRASASLETSCFLCSVTSPRLAQAPRSGSPTSRSCARVDATQWVVWRPSTASRTWWSISRRRGLRRPQAPLSTCGSRTMPRG

SEQ ID NO: 16797 - protein, 33 aa, Artificial Sequence
  Synthetic polypeptide
RSAWHTVVPWPHVWRAGRDAAAGQGRALDVSCA

SEQ ID NO: 16798 - protein, 528 aa, Artificial Sequence
  Synthetic polypeptide
QLSVSFLIYKMGVISYLALSMFVRDLNEVVDLEACSAVPGTQWYHGHMSGGQAETLLQAKGEPWTFLVRESLSQPGDFVLSVLSDQPKAGPGSPLRVTHIKVMCEGGRYTVGGLETFDSLTDLVEHFKKTGIEEASGAFVYLRQPYYATRVNAADIENRVLELNKKQESEDTAKAGFWEEFESLQKQEVKNLHQRLEGQRPENKGKNRYKNILPFDHSRVILQGRDSNIPGSDYINANYIKNQLLGPDENAKTYIASQGCLEATVNDFWQMAWQENSRVIVMTTREVEKGRNKCVPYWPEVGMQRAYGPYSVTNCGEHDTTEYKLRTLQVSPLDNGDLIREIWHYQYLSWPDHGVPSEPGGVLSFLDQINQRQESLPHAGPIIVHCSAGIGRTGTIIVIDMLMENISTKGLDCDIDIQKTIQMVRAQRSGMVQTEAQYKFIYVAIAQFIETTKKKLEVLQSQKGQESEYGNITYPPAMKNAHAKASRTSSKHKEDVYENLHTKNKREEKVKKQRSADKEKSKGSLKRK

SEQ ID NO: 16799 - protein, 71 aa, Artificial Sequence
  Synthetic polypeptide
MRWWIWKHVAQCLAHSGTMATCLAGRQRRCCRPRASPGRFLCVRASASLETSCFLCSVTSPRLAQAPRSGS

SEQ ID NO: 16800 - protein, 98 aa, Artificial Sequence
  Synthetic polypeptide
QLSVSFLIYKMGVISYLALSMFVRDLNEVVDLEACSAVPGTQWYHGHMSGGQAETLLQAKGEPWTFLVRESLSQPGDFVLSVLSDQPKAGPGSPLRVT

SEQ ID NO: 16801 - protein, 557 aa, Artificial Sequence
  Synthetic polypeptide
QLSVSFLIYKMGVISYLALSMFVRDLNEVVDLEACSAVPGTQWYHGHMSGGQAETLLQAKGEPWTFLVRESLSQPGDFVLSVLSDQPKAGPGSPLRVTHIKVMCEGGRYTVGGLETFDSLTDLVEHFKKTGIEEASGAFVYLRQPYYATRVNAADIENRVLELNKKQESEDTAKAGFWEEFESLQKQEVKNLHQRLEGQRPENKGKNRYKNILPFDHSRVILQGRDSNIPGSDYINANYIKNQLLGPDENAKTYIASQGCLEATVNDFWQMAWQENSRVIVMTTREVEKGRNKCVPYWPEVGMQRAYGPYSVTNCGEHDTTEYKLRTLQVSPLDNGDLIREIWHYQYLSWPDHGVPSEPGGVLSFLDQINQRQESLPHAGPIIVHCSAGIGRTGTIIVIDMLMENISTKGLDCDIDIQKTIQMVRAQRSGMVQTEAQYKFIYVAIAQFIETTKKKLEVLQSQKGQESEYGNITYPPAMKNAHAKASRTSSKSLESSAGTVAASPVRRGGQRGLPVPGPPVLSPDLHQLPVLAPLHPAADTRRMCMRTCTLRTRGRRK

SEQ ID NO: 16802 - protein, 57 aa, Artificial Sequence
  Synthetic polypeptide
MRWWIWKHVAQCLAHSGTMATCLAGRQRRCCRLPAQGHPHQGHVRGWTLHSGWFGDL

SEQ ID NO: 16803 - protein, 48 aa, Artificial Sequence
  Synthetic polypeptide
RSAWHTVVPWPHVWRAGRDAAAGSPLRVTHIKVMCEGGRYTVGGLETF

SEQ ID NO: 16804 - protein, 83 aa, Artificial Sequence
  Synthetic polypeptide
QLSVSFLIYKMGVISYLALSMFVRDLNEVVDLEACSAVPGTQWYHGHMSGGQAETLLQAPRSGSPTSRSCARVDATQWVVWRP

SEQ ID NO: 16805 - protein, 91 aa, Artificial Sequence
  Synthetic polypeptide
MRWWIWKHVAQCLAHSGTMATCLAGRQRRCCRPRASPGRFLCVRASASLETSCFLCSVTSPRLAQAPRSGSPTSRSCARVDATQWVVWRPS

SEQ ID NO: 16806 - protein, 118 aa, Artificial Sequence
  Synthetic polypeptide
QLSVSFLIYKMGVISYLALSMFVRDLNEVVDLEACSAVPGTQWYHGHMSGGQAETLLQAKGEPWTFLVRESLSQPGDFVLSVLSDQPKAGPGSPLRVTHIKVMCEGGRYTVGGLETFD

SEQ ID NO: 16807 - protein, 503 aa, Artificial Sequence
  Synthetic polypeptide
MRWWIWKHVAQCLAHSRWYHGHMSGGQAETLLQAKGEPWTFLVRESLSQPGDFVLSVLSDQPKAGPGSPLRVTHIKVMCEGGRYTVGGLETFDSLTDLVEHFKKTGIEEASGAFVYLRQPYYATRVNAADIENRVLELNKKQESEDTAKAGFWEEFESLQKQEVKNLHQRLEGQRPENKGKNRYKNILPFDHSRVILQGRDSNIPGSDYINANYIKNQLLGPDENAKTYIASQGCLEATVNDFWQMAWQENSRVIVMTTREVEKGRNKCVPYWPEVGMQRAYGPYSVTNCGEHDTTEYKLRTLQVSPLDNGDLIREIWHYQYLSWPDHGVPSEPGGVLSFLDQINQRQESLPHAGPIIVHCSAGIGRTGTIIVIDMLMENISTKGLDCDIDIQKTIQMVRAQRSGMVQTEAQYKFIYVAIAQFIETTKKKLEVLQSQKGQESEYGNITYPPAMKNAHAKASRTSSKHKEDVYENLHTKNKREEKVKKQRSADKEKSKGSLKRK

SEQ ID NO: 16808 - protein, 116 aa, Artificial Sequence
  Synthetic polypeptide
RSAWHTVGGTMATCLAGRQRRCCRPRASPGRFLCVRASASLETSCFLCSVTSPRLAQAPRSGSPTSRSCARVDATQWVVWRPSTASRTWWSISRRRGLRRPQAPLSTCGSRTMPRG

SEQ ID NO: 16809 - protein, 73 aa, Artificial Sequence
  Synthetic polypeptide
MRWWIWKHVAQCLAHSRWYHGHMSGGQAETLLQAKGEPWTFLVRESLSQPGDFVLSVLSDQPKAGPGSPLRVT

SEQ ID NO: 16810 - protein, 63 aa, Artificial Sequence
  Synthetic polypeptide
RSAWHTVGGTMATCLAGRQRRCCRPRASPGRFLCVRASASLETSCFLCSVTSPRLAQAPRSGS

SEQ ID NO: 16811 - protein, 532 aa, Artificial Sequence
  Synthetic polypeptide
MRWWIWKHVAQCLAHSRWYHGHMSGGQAETLLQAKGEPWTFLVRESLSQPGDFVLSVLSDQPKAGPGSPLRVTHIKVMCEGGRYTVGGLETFDSLTDLVEHFKKTGIEEASGAFVYLRQPYYATRVNAADIENRVLELNKKQESEDTAKAGFWEEFESLQKQEVKNLHQRLEGQRPENKGKNRYKNILPFDHSRVILQGRDSNIPGSDYINANYIKNQLLGPDENAKTYIASQGCLEATVNDFWQMAWQENSRVIVMTTREVEKGRNKCVPYWPEVGMQRAYGPYSVTNCGEHDTTEYKLRTLQVSPLDNGDLIREIWHYQYLSWPDHGVPSEPGGVLSFLDQINQRQESLPHAGPIIVHCSAGIGRTGTIIVIDMLMENISTKGLDCDIDIQKTIQMVRAQRSGMVQTEAQYKFIYVAIAQFIETTKKKLEVLQSQKGQESEYGNITYPPAMKNAHAKASRTSSKSLESSAGTVAASPVRRGGQRGLPVPGPPVLSPDLHQLPVLAPLHPAADTRRMCMRTCTLRTRGRRK

SEQ ID NO: 16812 - protein, 58 aa, Artificial Sequence
  Synthetic polypeptide
MRWWIWKHVAQCLAHSRWYHGHMSGGQAETLLQAPRSGSPTSRSCARVDATQWVVWRP

SEQ ID NO: 16813 - protein, 49 aa, Artificial Sequence
  Synthetic polypeptide
RSAWHTVGGTMATCLAGRQRRCCRLPAQGHPHQGHVRGWTLHSGWFGDL

SEQ ID NO: 16814 - protein, 93 aa, Artificial Sequence
  Synthetic polypeptide
MRWWIWKHVAQCLAHSRWYHGHMSGGQAETLLQAKGEPWTFLVRESLSQPGDFVLSVLSDQPKAGPGSPLRVTHIKVMCEGGRYTVGGLETFD

SEQ ID NO: 16815 - protein, 83 aa, Artificial Sequence
  Synthetic polypeptide
RSAWHTVGGTMATCLAGRQRRCCRPRASPGRFLCVRASASLETSCFLCSVTSPRLAQAPRSGSPTSRSCARVDATQWVVWRPS

SEQ ID NO: 16816 - protein, 43 aa, Artificial Sequence
  Synthetic polypeptide
ISDVVSLCHPGWTAVASSWLTATSASQVQVILLPRPPSSWDYR

SEQ ID NO: 16817 - protein, 31 aa, Artificial Sequence
  Synthetic polypeptide
YRYLTWSHSVTQAGLQWRHLGSLQPPPPKFK

SEQ ID NO: 16818 - protein, 16 aa, Artificial Sequence
  Synthetic polypeptide
YNMDELQKYVLLYPSL

SEQ ID NO: 16819 - protein, 110 aa, Artificial Sequence
  Synthetic polypeptide
SVNTIWMNFKNMCSYIPPCKRENQKNLESVMNWQQYWKDEIGSQPFTCYFNQHQRPDDVLLHRTHDEIVLLHCFLWPLVTFVVGVLIVVLTICAKSLAVKAEAMKKRKFS

SEQ ID NO: 16820 - protein, 23 aa, Artificial Sequence
  Synthetic polypeptide
TSKICAPISLPVREKIRRIWKVS

SEQ ID NO: 16821 - protein, 227 aa, Artificial Sequence
  Synthetic polypeptide
LQAYLLAGYYYTATGNYDIKWTMPHCVLTLKLIGLAVDYFDGGKDQNSLSSEQQKYAIRGVPSLLEVAGFSYFYGAFLVGPQFSMNHYMKLVQGELIDIPGKIPNSIIPALKRLSLGLFYLVGYTLLSPHITEDYLLTEDYDNHPFWFRCMYMLIWGKFVLYKYVTCWLVTEGVCILTGLGFNGFEEKGKAKWDACANMKVWLFETNPRFTGTIASFNINTNAWVAR

SEQ ID NO: 16822 - protein, 30 aa, Artificial Sequence
  Synthetic polypeptide
QYDFRPTFWLDTITLPPATTISSGQCHIVF

SEQ ID NO: 16823 - protein, 48 aa, Artificial Sequence
  Synthetic polypeptide
FLTPLPALSSMTSGLPSGWILLHCHRQLRYQVDNATLCSDFEADWFGC

SEQ ID NO: 16824 - protein, 367 aa, Artificial Sequence
  Synthetic polypeptide
LQAYLLAGYYYTATGNYDIKWTMPHCVLTLKLIGLAVDYFDGGKDQNSLSSEQQKYAIRGVPSLLEVAGFSYFYGAFLVGPQFSMNHYMKLVQGELIDIPGKIPNSIIPALKRLSLGLFYLVGYTLLSPHITEDYLLTEDYDNHPFWFRCMYMLIWGKFVLYKYVTCWLVTEGVCILTGLGFNGFEEKGKAKWDACANMKVWLFETNPRFTGTIASFNINTNAWVARYIFKRLKFLGNKELSQGLSLLFLALWHGLHSGYLVCFQMEFLIVIVERQAARLIQESPTLSKLAAITVLQPFYYLVQQTIHWLFMGYSMTAFCLFTWDKWLKVYKSIYFLGHIFFLSLLFILPYIHKAMVPRKEKLKKME

SEQ ID NO: 16825 - protein, 37 aa, Artificial Sequence
  Synthetic polypeptide
LQAYLLAGYYYTATGNYDIKWTMPHCVLTLKLIGLAV

SEQ ID NO: 16826 - protein, 38 aa, Artificial Sequence
  Synthetic polypeptide
LQAYLLAGYYYTATGNYDIKWTMPHCVLTLKLIEFLVL

SEQ ID NO: 16827 - protein, 44 aa, Artificial Sequence
  Synthetic polypeptide
FLTPLPALSSMTSGLPSGWILLHCHRQLRYQVDNATLCSDFEAD

SEQ ID NO: 16828 - protein, 78 aa, Artificial Sequence
  Synthetic polypeptide
LQAYLLAGYYYTATGNYDIKWTMPHCVLTLKLIGLAVDYFDGGKDQHHSCSQAPESGPFLPSGLHTAQPPHHRRLSPH

SEQ ID NO: 16829 - protein, 44 aa, Artificial Sequence
  Synthetic polypeptide
HSETLPQKEKEKKKVEWCKPVSSMNLCTMLCACMRADFQQRLSS

SEQ ID NO: 16830 - protein, 31 aa, Artificial Sequence
  Synthetic polypeptide
GCSEPRSSQDDTVRPCPKKKKKKKRWNGANQ

SEQ ID NO: 16831 - protein, 41 aa, Artificial Sequence
  Synthetic polypeptide
DPAPKRKRKKKGGMVQTSEQYEFVHHALCLYESRLSAETVQ

SEQ ID NO: 16832 - protein, 71 aa, Artificial Sequence
  Synthetic polypeptide
LVSNSVLAPSVHSPKAARVIRSCASPAQNPSGASIPGWLPLCFVLSALPFLQGDLPHPPLPYLYRPLNCLF

SEQ ID NO: 16833 - protein, 315 aa, Artificial Sequence
  Synthetic polypeptide
SDPVPLLLRTLQGLPYLAGYPFALFYRHYLFYKETYLIHLFHTFTGLSIAYFNFGNQLYHSLLCIVLQFLILRLMGRTITAVLTTFCFQMAYLLAGYYYTATGNYDIKWTMPHCVLTLKLIGLAVDYFDGGKDQNSLSSEQQKYAIRGVPSLLEVAGFSYFYGAFLVGPQFSMNHYMKLVQGELIDIPGKIPNSIIPALKRLSLGLFYLVGYTLLSPHITEDYLLTEDYDNHPFWFRCMYMLIWGKFVLYKYVTCWLVTEGVCILTGLGFNGFEEKGKAKWDACANMKVWLFETNPRFTGTIASFNINTNAWVAR

SEQ ID NO: 16834 - protein, 89 aa, Artificial Sequence
  Synthetic polypeptide
FCSCPLSPLSKSSQSDPILCLSCSEPFRGFHTWLVTPLLCFIGITFSTRRPTSSTSSIPLQASQLLILTLETSSTTPCCVLCFSSSSFD

SEQ ID NO: 16835 - protein, 455 aa, Artificial Sequence
  Synthetic polypeptide
SDPVPLLLRTLQGLPYLAGYPFALFYRHYLFYKETYLIHLFHTFTGLSIAYFNFGNQLYHSLLCIVLQFLILRLMGRTITAVLTTFCFQMAYLLAGYYYTATGNYDIKWTMPHCVLTLKLIGLAVDYFDGGKDQNSLSSEQQKYAIRGVPSLLEVAGFSYFYGAFLVGPQFSMNHYMKLVQGELIDIPGKIPNSIIPALKRLSLGLFYLVGYTLLSPHITEDYLLTEDYDNHPFWFRCMYMLIWGKFVLYKYVTCWLVTEGVCILTGLGFNGFEEKGKAKWDACANMKVWLFETNPRFTGTIASFNINTNAWVARYIFKRLKFLGNKELSQGLSLLFLALWHGLHSGYLVCFQMEFLIVIVERQAARLIQESPTLSKLAAITVLQPFYYLVQQTIHWLFMGYSMTAFCLFTWDKWLKVYKSIYFLGHIFFLSLLFILPYIHKAMVPRKEKLKKME

SEQ ID NO: 16836 - protein, 126 aa, Artificial Sequence
  Synthetic polypeptide
SDPVPLLLRTLQGLPYLAGYPFALFYRHYLFYKETYLIHLFHTFTGLSIAYFNFGNQLYHSLLCIVLQFLILRLMGRTITAVLTTFCFQMAYLLAGYYYTATGNYDIKWTMPHCVLTLKLIEFLVL

SEQ ID NO: 16837 - protein, 166 aa, Artificial Sequence
  Synthetic polypeptide
SDPVPLLLRTLQGLPYLAGYPFALFYRHYLFYKETYLIHLFHTFTGLSIAYFNFGNQLYHSLLCIVLQFLILRLMGRTITAVLTTFCFQMAYLLAGYYYTATGNYDIKWTMPHCVLTLKLIGLAVDYFDGGKDQHHSCSQAPESGPFLPSGLHTAQPPHHRRLSPH

SEQ ID NO: 16838 - protein, 14 aa, Artificial Sequence
  Synthetic polypeptide
GLPSHAELVLFRKQ

SEQ ID NO: 16839 - protein, 702 aa, Artificial Sequence
  Synthetic polypeptide
IMGRLPLSCSCGSKLVLTRSDGFIRDFPPSLGTHSLTCCHVKRDVFASPSADCKFSEAFPATRNWCFSGNNDHFLAINQKKSGKPVFIYKHSQDIEKSLDIAPQKIYRHSYHSSSEAQVSKRHQIVNSAFPRPAYDPSLNLLAMDGQDLEVENLPIPAANVIVVTLQMDVNKLNITLLRIFRQGVAAALGLLPQQVHINRLIGKKNSIELFVSPINRKTGISDALPSEEVLRSLNINVLHQSLSQFGITEVSPEKNVLQGQHEADKIWSKEGFYAVVIFLSIFVIIVTCLMILYRLKERFQLSLRQDKEKNQEIHLSPITLQPALSEAKTVHSMVQPEQAPKVLNVVVDPQGRGAPEIKATTATSVCPSPFKMKPIGLQERRGSNVSLTLDMSSLGNIEPFVSIPTPREKVAMEYLQSASRILTRSQLRDVVASSHLLQSEFMEIPMNFVDPKEIDIPRHGTKNRYKTILPNPLSRVCLRPKNVTDSLSTYINANYIRGYSGKEKAFIATQGPMINTVDDFWQMVWQEDSPVIVMITKLKEKNEKCVLYWPEKRGIYGKVEVLVISVNECDNYTIRNLVLKQGSHTQHVKHYWYTSWPDHKTPDSAQPLLQLMLDVEEDRLASQGRGPVVVHCSAGIGRTGCFIATSIGCQQLKEEGVVDALSIVCQLRMDRGGMVQTSEQYEFVHHALCLYESRLSAETVQ

SEQ ID NO: 16840 - protein, 59 aa, Artificial Sequence
  Synthetic polypeptide
RGMCLLPLLPIVSFLRPSQPRGTGAFQETMIIFWQLIRRRVGSRYSFISIHKTLRRAWI

SEQ ID NO: 16841 - protein, 24 aa, Artificial Sequence
  Synthetic polypeptide
LSGHICQAMWYLDPSISNMGTSKQ

SEQ ID NO: 16842 - protein, 223 aa, Artificial Sequence
  Synthetic polypeptide
VGTFVKLCGILILALAIWVRVSNDSQAIFGSEDVGSSSYVAVDILIAVGAIIMILGFLGCCGAIKESRCMLLLFFIGLLLILLLQVATGILGAVFKSKSDRIVNETLYENTKLLSATGESEKQFQEAIIVFQEEFKCCGLVNGAADWGNNFQHYPELCACLDKQRPCQSYNGKQVYKETCISFIKDFLAKNLIIVIGISFGLAVIEILGLVFSMVLYCQIGNK

SEQ ID NO: 16843 - protein, 23 aa, Artificial Sequence
  Synthetic polypeptide
ENSKSNLFLQVIKWAHLSSYVVS

SEQ ID NO: 16844 - protein, 289 aa, Artificial Sequence
  Synthetic polypeptide
LCSSFAFGHDCEASPAMWNCEPVEPLFFINYPVSGLVVGFILTIANFSFFTSLLMFFLSSSKLTKWKGEVKKRLDSEYKEGGQRNWVQVFCNGAVPTELALLYMIENGPGEIPVDFSKQYSASWMCLSLLAALACSAGDTWASEVGPVLSKSSPRLITTWEKVPVGTNGGVTVVGLVSSLLGGTFVGIAYFLTQLIFVNDLDISAPQWPIIAFGGLAGLLGSIVDSYLGATMQYTGLDESTGMVVNSPTNKARHIAGKPILDNNAVNLFSSVLIALLLPTAAWGFWPRG

SEQ ID NO: 16845 - protein, 6 aa, Artificial Sequence
  Synthetic polypeptide
ITQFQG

SEQ ID NO: 16846 - protein, 40 aa, Artificial Sequence
  Synthetic polypeptide
TSFLYKLPSFRASRWIYPNHCKFQLFYLFADVFLVFFETH

SEQ ID NO: 16847 - protein, 123 aa, Artificial Sequence
  Synthetic polypeptide
LCSSFAFGHDCEASPAMWNCEPVEPLFFINYPVSGLVVGFILTIANFSFFTSLLMFFLSSSKLTKWKGEVKKRLDSEYKEGGQRNWVQVFCNGAVPTELALLYMIENGPGEIPVDFSKQYSAS

SEQ ID NO: 16848 - protein, 251 aa, Artificial Sequence
  Synthetic polypeptide
LCSSFAFGHDCEASPAMWNCEPVEPLFFINYPVSGLVVGFILTIANFSFFTSLLMFFLSSSKLTKWKGEVKKRLDSEYKEGGQRNWVQVFCNGAVPTELALLYMIENGPGEIPVDFSKQYSASWMCLSLLAALACSAGDTWASEVGPVLSKSSPRLITTWEKVPVGTNGGVTVVGLVSSLLGGTFVGIAYFLTQLIFVNDLDISAPQWPIIAFGGLAGLLGSIVDSYLGATMQYTGKNIPSFLQLIGMLKK

SEQ ID NO: 16849 - protein, 37 aa, Artificial Sequence
  Synthetic polypeptide
GLAQWLMPIIPALWEAEAGGSLEVRSLRPAWPTWHHS

SEQ ID NO: 16850 - protein, 52 aa, Artificial Sequence
  Synthetic polypeptide
DQPGPHGIILNKEVKYWWEKSKPCHMGYGRSREIPCIGSNLLQRFKWSDFSL

SEQ ID NO: 16851 - protein, 183 aa, Artificial Sequence
  Synthetic polypeptide
GQEFETSLAHMASFLTKKLNIGGKRVNLAIWDTAGQERFHALGPIYYRDSNGAILVYDITDEDSFQKVKNWVKELRKMLGNEICLCIVGNKIDLEKERHVSIQEAESYAESVGAKHYHTSAKQNKGIEELFLDLCKRMIETAQVDERAKGNGSSQPGTARRGVQIIDDEPQAQTSGGGCCSSG

SEQ ID NO: 16852 - protein, 51 aa, Artificial Sequence
  Synthetic polypeptide
GWVRRLTPVIPALQEVKAGGSPEDRSSRPAWPTCGCLLVLCLLHGPNASEF

SEQ ID NO: 16853 - protein, 245 aa, Artificial Sequence
  Synthetic polypeptide
SQHFRKSRQVDHLRTGVQDQPGQHVDAFWCFASYMDQMHQNFEEQMQGMKTQLIQLSTLLRLLDSGFCSYLESQDSGYLYFCFRWLLIRFKREFSFLDILRLWEVMWTELPCTNFHLLLCCAILESEKQQIMEKHYGFNEILKHINELSMKIDVEDILCKAEAISLQMVKCKELPQAVCEILGLQGSEVTTPDSDVGEDENVVMTPCPTSAFQSNALPTLSASGARNDSPTQIPVSSDVCRLTPA

SEQ ID NO: 16854 - protein, 35 aa, Artificial Sequence
  Synthetic polypeptide
GQEFKTSLANMWMPFGALPLTWTKCIRILKNKCKA

SEQ ID NO: 16855 - protein, 22 aa, Artificial Sequence
  Synthetic polypeptide
LQENKLRAPTDSTLRQQAQAMD

SEQ ID NO: 16856 - protein, 132 aa, Artificial Sequence
  Synthetic polypeptide
MGPSSCKKTSSGLPLILHYANKHKPWIEAEYQGIVMENDNTVLLNPPLFALDKDAPLRYAGEICGFRLHGSGVPFEAVILDKATGEGLIRAKEPVDCEAQKEHTFTIQAYDCGEGPDGANTKKSHKATVHVR

SEQ ID NO: 16857 - protein, 28 aa, Artificial Sequence
  Synthetic polypeptide
FYITPTSTSHGLRQSTRASSWRMTTRSY

SEQ ID NO: 16858 - protein, 954 aa, Artificial Sequence
  Synthetic polypeptide
MGPSSCKKTSSGLPLILHYANKHKPWIEAEYQGIVMENDNTVLLNPPLFALDKDAPLRYAGEICGFRLHGSGVPFEAVILDKATGEGLIRAKEPVDCEAQKEHTFTIQAYDCGEGPDGANTKKSHKATVHVRVNDVNEFAPVFVERLYRAAVTEGKLYDRILRVEAIDGDCSPQYSQICYYEILTPNTPFLIDNDGNIENTEKLQYSGERLYKFTVTAYDCGKKRAADDAEVEIQVKPTCKPSWQGWNKRIEYAPGAGSLALFPGIRLETCDEPLWNIQATIELQTSHVAKGCDRDNYSERALRKLCGAATGEVDLLPMPGPNANWTAGLSVHYSQDSSLIYWFNGTQAVQVPLGGPSGLGSGPQDSLSDHFTLSFWMKHGVTPNKGKKEEETIVCNTVQNEDGFSHYSLTVHGCRIAFLYWPLLESARPVKFLWKLEQVCDDEWHHYALNLEFPTVTLYTDGISFDPALIHDNGLIHPPRREPALMIGACWTEEKNKEKEKGDNSTDTTQGDPLSIHHYFHGYLAGFSVRSGRLESREVIECLYACREGLDYRDFESLGKGMKVHVNPSQSLLTLEGDDVETFNHALQHVAYMNTLRFATPGVRPLRLTTAVKCFSEESCVSIPEVEGYVVVLQPDAPQILLSGTAHFARPAVDFEGTNGVPLFPDLQITCSISHQVEAKKDESWQGTVTDTRMSDEIVHNLDGCEISLVGDDLDPERESLLLDTTSLQQRGLELTNTSAYLTIAGVESITVYEEILRQARYRLRHGAALYTRKFRLSCSEMNGRYSSNEFIVEVNVLHSMNRVAHPSHVLSSQQFLHRGHQPPPEMAGHSLASSHRNSMIPSAATLIIVVCVGFLVLMVVLGLVRIHSLHRRVSGAGGPPGASSDPKDPDLFWDDSALTIIVNPMESYQNRQSCVTGAVGGQQEDEDSSDSEVADSPSSDERRIIETPPHRY

SEQ ID NO: 16859 - protein, 191 aa, Artificial Sequence
  Synthetic polypeptide
MGPSSCKKTSSGLPLILHYANKHKPWIEAEYQGIVMENDNTVLLNPPLFALDKDAPLRYAGEICGFRLHGSGVPFEAVILDKATGEGLIRAKEPVDCEAQKEHTFTIQAYDCGEGPDGANTKKSHKATVHVRVNDVNEFAPVFVERLYRAAVTEGKLYDRILRVEAIDGDCSPQYSQICYYEILTPNTPFL

SEQ ID NO: 16860 - protein, 547 aa, Artificial Sequence
  Synthetic polypeptide
PLPILQEKQRFLTDVLHEVMLLDGLASSHPVSQEVLQATDIDRVFDWIAYKKGAALIRMLANFMGHSVFQRGLQDYLTIHKYGNAARNDLWNTLSEALKRNGKYVNIQEVMDQWTLQMGYPVITILGNTTAENRIIITQQHFIYDISAKTKALKLQNNSYLWQIPLTIVVGNRSHVSSEAIIWVSNKSEHHRITYLDKGSWLLGNINQTGYFRVNYDLRNWRLLIDQLIRNHEVLSVSNRAGLIDDAFSLARAGYLPQNIPLEIIRYLSEEKDFLPWHAASRALYPLDKLLDRMENYNIFNEYILKQVATTYIKLGWPKNNFNGSLVQASYQHEELRREVIMLACSFGNKHCHQQASTLISDWISSNRNRIPLNVRDIVYCTGVSLLDEDVWEFIWMKFHSTTAVSEKKILLEALTCSDDRNLLNRLLNLSLNSEVVLDQDAIDVIIHVARNPHGRDLAWKFFRDKWKILNTRYGEALFMNSKLISGVTEFLNTEGELKELKNFMKNYDGVAAASFSRAVETVEANVRWKMLYQDELFQWLGKALRH

SEQ ID NO: 16861 - protein, 50 aa, Artificial Sequence
  Synthetic polypeptide
AEVALQPLGTSGLLHTRAVTPLAPQLRDIRGLCHTRAVDPSPFYRKSRGF

SEQ ID NO: 16862 - protein, 29 aa, Artificial Sequence
  Synthetic polypeptide
GTSGASATPEQLTPPHSTGKAEVSDRCSA

SEQ ID NO: 16863 - protein, 21 aa, Artificial Sequence
  Synthetic polypeptide
KMKSTYYSLMEDAKYCSWVCL

SEQ ID NO: 16864 - protein, 12 aa, Artificial Sequence
  Synthetic polypeptide
WRMQSIVPGCVC

SEQ ID NO: 16865 - protein, 21 aa, Artificial Sequence
  Synthetic polypeptide
DEINLLLLNGGCKVLFLGVSV

SEQ ID NO: 16866 - protein, 60 aa, Artificial Sequence
  Synthetic polypeptide
VPDKRVSSAPFFCTCACTLFLCELLPSDDTASRPSPDASSSTLDFLASRTDAKYCSWVCL

SEQ ID NO: 16867 - protein, 14 aa, Artificial Sequence
  Synthetic polypeptide
PPELMQSIVPGCVC

SEQ ID NO: 16868 - protein, 25 aa, Artificial Sequence
  Synthetic polypeptide
FKVCRRMCIAKNSLNLIKIWMMLKK

SEQ ID NO: 16869 - protein, 393 aa, Artificial Sequence
  Synthetic polypeptide
SMQEDVHSKEQSELDQDLDDVEEVEEEETGEETKLKARQLTVQMMQNPQILAALQERLDGLVETPTGYIESLPRVVKRRVNALKNLQVKCAQIEAKFYEEVHDLERKYAVLYQPLFDKRFEIINAIYEPTEEECEWKPDEEDEISEELKEKAKIEDEKKDEEKEDPKGIPEFWLTVFKNVDLLSDMVQEHDEPILKHLKDIKVKFSDAGQPMSFVLEFHFEPNEYFTNEVLTKTYRMRSEPDDSDPFSFDGPEIMGCTGCQIDWKKGKNVTLKTIKKKQKHKGRGTVRTVTKTVSNDSFFNFFAPPEVPESGDLDDDAEAILAADFEIGHFLRERIIPRSVLYFTGEAIEDDDDDYDEEGEEADEEGEEEGDEENDPDYDPKKDQNPAECKQQ

SEQ ID NO: 16870 - protein, 385 aa, Artificial Sequence
  Synthetic polypeptide
SMQEDVHSKEQSELDQDLDDVEEVEEEETGEETKLKARQLTVQMMQNPQILAALQERLDGLVETPTGYIESLPRVVKRRVNALKNLQVKCAQIEAKFYEEVHDLERKYAVLYQPLFDKRFEIINAIYEPTEEECEWKPDEEDEISEELKEKAKIEDEKKDEEKEDPKGIPEFWLTVFKNVDLLSDMVQEHDEPILKHLKDIKVKFSDAGQPMSFVLEFHFEPNEYFTNEVLTKTYRMRSEPDDSDPFSFDGPEIMGCTGCQIDWKKGKNVTLKTIKKKQKHKGRGTVRTVTKTVSNDSFFNFFAPPEVPESGDLDDDAEAILAADFEIGHFLRERIIPRSVLYFTGEAIEDDDDDYDEEGEEADEGYQLFEEVKSCSKLFQRWLQ

SEQ ID NO: 16871 - protein, 370 aa, Artificial Sequence
  Synthetic polypeptide
SMQEDVHSKEQSELDQDLDDVEEVEEEETGEETKLKARQLTVQMMQNPQILAALQERLDGLVETPTGYIESLPRVVKRRVNALKNLQVKCAQIEAKFYEEVHDLERKYAVLYQPLFDKRFEIINAIYEPTEEECEWKPDEEDEISEELKEKAKIEDEKKDEEKEDPKGIPEFWLTVFKNVDLLSDMVQEHDEPILKHLKDIKVKFSDAGQPMSFVLEFHFEPNEYFTNEVLTKTYRMRSEPDDSDPFSFDGPEIMGCTGCQIDWKKGKNVTLKTIKKKQKHKGRGTVRTVTKTVSNDSFFNFFAPPEVPESGDLDDDAEAILAADFEIGHFLRERIIPRSVLYFTGEAIEDDDDDYDEEGEEADEVMFTK

SEQ ID NO: 16872 - protein, 381 aa, Artificial Sequence
  Synthetic polypeptide
SMQEDVHSKEQSELDQDLDDVEEVEEEETGEETKLKARQLTVQMMQNPQILAALQERLDGLVETPTGYIESLPRVVKRRVNALKNLQVKCAQIEAKFYEEVHDLERKYAVLYQPLFDKRFEIINAIYEPTEEECEWKPDEEDEISIPASCLGEFSTEELKEKAKIEDEKKDEEKEDPKGIPEFWLTVFKNVDLLSDMVQEHDEPILKHLKDIKVKFSDAGQPMSFVLEFHFEPNEYFTNEVLTKTYRMRSEPDDSDPFSFDGPEIMGCTGCQIDWKKGKNVTLKTIKKKQKHKGRGTVRTVTKTVSNDSFFNFFAPPEVPESGDLDDDAEAILAADFEIGHFLRERIIPRSVLYFTGEAIEDDDDDYDEEGEEADEVMFTK

SEQ ID NO: 16873 - protein, 239 aa, Artificial Sequence
  Synthetic polypeptide
SMQEDVHSKEQSELDQDLDDVEEVEEEETGEETKLKARQLTVQMMQNPQILAALQERLDGLVETPTGYIESLPRVVKRRVNALKNLQVKCAQIEAKFYEEVHDLERKYAVLYQPLFDKEELKEKAKIEDEKKDEEKEDPKGIPEFWLTVFKNVDLLSDMVQEHDEPILKHLKDIKVKFSDAGQPMSFVLEFHFEPNEYFTNEVLTKTYRMRSEPDDSDPFSFDGPEIMGCTGCQIDWKK

SEQ ID NO: 16874 - protein, 266 aa, Artificial Sequence
  Synthetic polypeptide
SMQEDVHSKEQSELDQDLDDVEEVEEEETGEETKLKARQLTVQMMQNPQILAALQERLDGLVETPTGYIESLPRVVKRRVNALKNLQVKCAQIEAKFYEEVHDLERKYAVLYQPLFDKRFEIINAIYEPTEEECEWKPDEEDEISEELKEKAKIEDEKKDEEKEDPKGIPEFWLTVFKNVDLLSDMVQEHDEPILKHLKDIKVKFSDAGQPMSFVLEFHFEPNEYFTNEVLTKTYRMRSEPDDSDPFSFDGPEIMGCTGCQIDWKK

SEQ ID NO: 16875 - protein, 217 aa, Artificial Sequence
  Synthetic polypeptide
SMQEDVHSKEQSELDQDLDDVEEVEEEETGEETKLKARQLTVQMMQNPQILAALQERLDGLVETPTGYIESLPRVVKRRVNALKNLQVKCAQIEAKFYEEVHDLERKYAVLYQPLFDKAEDCCHFQVKTWRLLSDLPTMNNGRAVTHIQCCEELKEKAKIEDEKKDEEKEDPKGIPEFWLTVFKNVDLLSDMVQEHDEPILKHLKDIKVKFSDAGQP

SEQ ID NO: 16876 - protein, 209 aa, Artificial Sequence
  Synthetic polypeptide
SMQEDVHSKEQSELDQDLDDVEEVEEEETGEETKLKARQLTVQMMQNPQILAALQERLDGLVETPTGYIESLPRVVKRRVNALKNLQVKCAQIEAKFYEEVHDLERKYAVLYQPLFDKRFEIINAIYEPTEEECEWKPDEEDEISVSTNFILEELKEKAKIEDEKKDEEKEDPKGIPEFWLTVFKNVDLLSDMVQEHDEPILKHLKDIK

SEQ ID NO: 16877 - protein, 163 aa, Artificial Sequence
  Synthetic polypeptide
SMQEDVHSKEQSELDQDLDDVEEVEEEETGEETKLKARQLTVQMMQNPQILAALQERLDGLVETPTGYIERVSFCQPGWSAVVVQSCSIQPRHPRLSLPRVVKRRVNALKNLQVKCAQIEAKFYEEVHDLERKYAVLYQPLFDKRFEIINAIYEPTEEECEWK

SEQ ID NO: 16878 - protein, 397 aa, Artificial Sequence
  Synthetic polypeptide
QHNTTIYITFICKEQSELDQDLDDVEEVEEEETGEETKLKARQLTVQMMQNPQILAALQERLDGLVETPTGYIESLPRVVKRRVNALKNLQVKCAQIEAKFYEEVHDLERKYAVLYQPLFDKRFEIINAIYEPTEEECEWKPDEEDEISEELKEKAKIEDEKKDEEKEDPKGIPEFWLTVFKNVDLLSDMVQEHDEPILKHLKDIKVKFSDAGQPMSFVLEFHFEPNEYFTNEVLTKTYRMRSEPDDSDPFSFDGPEIMGCTGCQIDWKKGKNVTLKTIKKKQKHKGRGTVRTVTKTVSNDSFFNFFAPPEVPESGDLDDDAEAILAADFEIGHFLRERIIPRSVLYFTGEAIEDDDDDYDEEGEEADEEGEEEGDEENDPDYDPKKDQNPAECKQQ

SEQ ID NO: 16879 - protein, 19 aa, Artificial Sequence
  Synthetic polypeptide
RLYAKNSLNLIKIWMMLKK

SEQ ID NO: 16880 - protein, 13 aa, Artificial Sequence
  Synthetic polypeptide
YNYLHNVYMQRTV

SEQ ID NO: 16881 - protein, 389 aa, Artificial Sequence
  Synthetic polypeptide
QHNTTIYITFICKEQSELDQDLDDVEEVEEEETGEETKLKARQLTVQMMQNPQILAALQERLDGLVETPTGYIESLPRVVKRRVNALKNLQVKCAQIEAKFYEEVHDLERKYAVLYQPLFDKRFEIINAIYEPTEEECEWKPDEEDEISEELKEKAKIEDEKKDEEKEDPKGIPEFWLTVFKNVDLLSDMVQEHDEPILKHLKDIKVKFSDAGQPMSFVLEFHFEPNEYFTNEVLTKTYRMRSEPDDSDPFSFDGPEIMGCTGCQIDWKKGKNVTLKTIKKKQKHKGRGTVRTVTKTVSNDSFFNFFAPPEVPESGDLDDDAEAILAADFEIGHFLRERIIPRSVLYFTGEAIEDDDDDYDEEGEEADEGYQLFEEVKSCSKLFQRWLQ

SEQ ID NO: 16882 - protein, 374 aa, Artificial Sequence
  Synthetic polypeptide
QHNTTIYITFICKEQSELDQDLDDVEEVEEEETGEETKLKARQLTVQMMQNPQILAALQERLDGLVETPTGYIESLPRVVKRRVNALKNLQVKCAQIEAKFYEEVHDLERKYAVLYQPLFDKRFEIINAIYEPTEEECEWKPDEEDEISEELKEKAKIEDEKKDEEKEDPKGIPEFWLTVFKNVDLLSDMVQEHDEPILKHLKDIKVKFSDAGQPMSFVLEFHFEPNEYFTNEVLTKTYRMRSEPDDSDPFSFDGPEIMGCTGCQIDWKKGKNVTLKTIKKKQKHKGRGTVRTVTKTVSNDSFFNFFAPPEVPESGDLDDDAEAILAADFEIGHFLRERIIPRSVLYFTGEAIEDDDDDYDEEGEEADEVMFTK

SEQ ID NO: 16883 - protein, 385 aa, Artificial Sequence
  Synthetic polypeptide
QHNTTIYITFICKEQSELDQDLDDVEEVEEEETGEETKLKARQLTVQMMQNPQILAALQERLDGLVETPTGYIESLPRVVKRRVNALKNLQVKCAQIEAKFYEEVHDLERKYAVLYQPLFDKRFEIINAIYEPTEEECEWKPDEEDEISIPASCLGEFSTEELKEKAKIEDEKKDEEKEDPKGIPEFWLTVFKNVDLLSDMVQEHDEPILKHLKDIKVKFSDAGQPMSFVLEFHFEPNEYFTNEVLTKTYRMRSEPDDSDPFSFDGPEIMGCTGCQIDWKKGKNVTLKTIKKKQKHKGRGTVRTVTKTVSNDSFFNFFAPPEVPESGDLDDDAEAILAADFEIGHFLRERIIPRSVLYFTGEAIEDDDDDYDEEGEEADEVMFTK

SEQ ID NO: 16884 - protein, 243 aa, Artificial Sequence
  Synthetic polypeptide
QHNTTIYITFICKEQSELDQDLDDVEEVEEEETGEETKLKARQLTVQMMQNPQILAALQERLDGLVETPTGYIESLPRVVKRRVNALKNLQVKCAQIEAKFYEEVHDLERKYAVLYQPLFDKEELKEKAKIEDEKKDEEKEDPKGIPEFWLTVFKNVDLLSDMVQEHDEPILKHLKDIKVKFSDAGQPMSFVLEFHFEPNEYFTNEVLTKTYRMRSEPDDSDPFSFDGPEIMGCTGCQIDWKK

SEQ ID NO: 16885 - protein, 270 aa, Artificial Sequence
  Synthetic polypeptide
QHNTTIYITFICKEQSELDQDLDDVEEVEEEETGEETKLKARQLTVQMMQNPQILAALQERLDGLVETPTGYIESLPRVVKRRVNALKNLQVKCAQIEAKFYEEVHDLERKYAVLYQPLFDKRFEIINAIYEPTEEECEWKPDEEDEISEELKEKAKIEDEKKDEEKEDPKGIPEFWLTVFKNVDLLSDMVQEHDEPILKHLKDIKVKFSDAGQPMSFVLEFHFEPNEYFTNEVLTKTYRMRSEPDDSDPFSFDGPEIMGCTGCQIDWKK

SEQ ID NO: 16886 - protein, 221 aa, Artificial Sequence
  Synthetic polypeptide
QHNTTIYITFICKEQSELDQDLDDVEEVEEEETGEETKLKARQLTVQMMQNPQILAALQERLDGLVETPTGYIESLPRVVKRRVNALKNLQVKCAQIEAKFYEEVHDLERKYAVLYQPLFDKAEDCCHFQVKTWRLLSDLPTMNNGRAVTHIQCCEELKEKAKIEDEKKDEEKEDPKGIPEFWLTVFKNVDLLSDMVQEHDEPILKHLKDIKVKFSDAGQP

SEQ ID NO: 16887 - protein, 213 aa, Artificial Sequence
  Synthetic polypeptide
QHNTTIYITFICKEQSELDQDLDDVEEVEEEETGEETKLKARQLTVQMMQNPQILAALQERLDGLVETPTGYIESLPRVVKRRVNALKNLQVKCAQIEAKFYEEVHDLERKYAVLYQPLFDKRFEIINAIYEPTEEECEWKPDEEDEISVSTNFILEELKEKAKIEDEKKDEEKEDPKGIPEFWLTVFKNVDLLSDMVQEHDEPILKHLKDIK

SEQ ID NO: 16888 - protein, 167 aa, Artificial Sequence
  Synthetic polypeptide
QHNTTIYITFICKEQSELDQDLDDVEEVEEEETGEETKLKARQLTVQMMQNPQILAALQERLDGLVETPTGYIERVSFCQPGWSAVVVQSCSIQPRHPRLSLPRVVKRRVNALKNLQVKCAQIEAKFYEEVHDLERKYAVLYQPLFDKRFEIINAIYEPTEEECEWK

SEQ ID NO: 16889 - protein, 31 aa, Artificial Sequence
  Synthetic polypeptide
EDCSSPGVGDLPGQHNTIFRKVLLWINLEGT

SEQ ID NO: 16890 - protein, 79 aa, Artificial Sequence
  Synthetic polypeptide
QGAAAHSCNPSTLGVQSRRIVQVQELETCLGNIILYFERCYCGSTWRGPEFNSIALGHKTRPSIHGCATNEIWCRSFIN

SEQ ID NO: 16891 - protein, 76 aa, Artificial Sequence
  Synthetic polypeptide
QGAAAHSCNPSTLGVQSRRIVQVQELETCLGNIILYFERCYCGSTWRGPEFNSIALGHKTRPSIHGCATNEIWCRS

SEQ ID NO: 16892 - protein, 35 aa, Artificial Sequence
  Synthetic polypeptide
GQALWLTPVISALWEAEEGGSREVRSSRPAWPTWT

SEQ ID NO: 16893 - protein, 27 aa, Artificial Sequence
  Synthetic polypeptide
SQHFGRPRRADHVKSGVRDQPGQHGPR

SEQ ID NO: 16894 - protein, 39 aa, Artificial Sequence
  Synthetic polypeptide
SQEFETSLANMDLDDIEDENEQLKQENKTLLKVVGQLTR

SEQ ID NO: 16895 - protein, 40 aa, Artificial Sequence
  Synthetic polypeptide
SQEFETSLANMDLDDIEDENEQLKQENKTLLKVVGQLTSS

SEQ ID NO: 16896 - protein, 7 aa, Artificial Sequence
  Synthetic polypeptide
DQHNQCL

SEQ ID NO: 16897 - protein, 122 aa, Artificial Sequence
  Synthetic polypeptide
EGFSMADKISTTSVSEEDVSSRYSRTDRSGFPRYNRDANVSGTLVSSSTLEKKIEDLEKEVVRERQENLRLVRLMQDKEEMIGKLKEEIDLLNRDLDDIEDENEQLKQENKTLLKVVGQLTR

SEQ ID NO: 16898 - protein, 60 aa, Artificial Sequence
  Synthetic polypeptide
KAFQWQIRSAQPVSLKKMSQVDILEQIEVGSLDITGMQMFQVLWFQVAHWKRKLKILKRK

SEQ ID NO: 16899 - protein, 52 aa, Artificial Sequence
  Synthetic polypeptide
PAQPVSLKKMSQVDILEQIEVGSLDITGMQMFQVLWFQVAHWKRKLKILKRK

SEQ ID NO: 16900 - protein, 29 aa, Artificial Sequence
  Synthetic polypeptide
QEFETSLVNIVTRLYKKKKKKISQHNQCL

SEQ ID NO: 16901 - protein, 125 aa, Artificial Sequence
  Synthetic polypeptide
HVSTKKKKKKLASTTSVSEEDVSSRYSRTDRSGFPRYNRDANVSGTLVSSSTLEKKIEDLEKEVVRERQENLRLVRLMQDKEEMIGKLKEEIDLLNRDLDDIEDENEQLKQENKTLLKVVGQLTR

SEQ ID NO: 16902 - protein, 7 aa, Artificial Sequence
  Synthetic polypeptide
EHLDTGA

SEQ ID NO: 16903 - protein, 38 aa, Artificial Sequence
  Synthetic polypeptide
ARNHHSEQTITRTENQSLHILTRRWELNNENTWTQVLR

SEQ ID NO: 16904 - protein, 176 aa, Artificial Sequence
  Synthetic polypeptide
TMRTLGHRCLDEYEDDEAGQKERKREDAITQQNTIQNEAVNLLDPGSSYLLQEPPRTVSGRYKSTTSVSEEDVSSRYSRTDRSGFPRYNRDANVSGTLVSSSTLEKKIEDLEKEVVRERQENLRLVRLMQDKEEMIGKLKEEIDLLNRDLDDIEDENEQLKQENKTLLKVVGQLTR

SEQ ID NO: 16905 - protein, 84 aa, Artificial Sequence
  Synthetic polypeptide
TMRTLGHRCLDEYEDDEAGQKERKREDAITQQNTIQNEAVNLLDPGSSYLLQEPPRTVSGRYKRKRDKPYTEQGAVTRSGSVGG

SEQ ID NO: 16906 - protein, 40 aa, Artificial Sequence
  Synthetic polypeptide
SQLLRRLRCSITQQESSRMQVFKSPSMPPSARVWLILSSL

SEQ ID NO: 16907 - protein, 226 aa, Artificial Sequence
  Synthetic polypeptide
RAWWRCASVVPATQEAEVFYYSTGIFKDAGVQEPIYATIGAGVVNTIFTVVSLFLVERAGRRTLHMIGLGGMAFCSTLMTVSLLLKDNYNGMSFVCIGAILVFVAFFEIGPGPIPWFIVAELFSQGPRPAAMAVAGCSNWTSNFLVGLLFPSAAHYLGAYVFIIFTGFLITFLAFTFFKVPETRGRTFEDITRAFEGQAHGADRSGKDGVMEMNSIEPAKETTTNV

SEQ ID NO: 16908 - protein, 42 aa, Artificial Sequence
  Synthetic polypeptide
RQDGRIGTAPVYSSQRERRRRRVISAFPSEFQGQCLIYNLQR

SEQ ID NO: 16909 - protein, 12 aa, Artificial Sequence
  Synthetic polypeptide
FLHFHLSSRGSV

SEQ ID NO: 16910 - protein, 1337 aa, Artificial Sequence
  Synthetic polypeptide
GRVWWLTPVIPALWEAEAGGSRGQEIETILANKNFTLHEVTNDFDNMTVSTIIDKLTIFSYYTFWLTASTSVGNGNKSSDIIEVYTDQDIPEGFVGNLTYESISSTAINVSWVPPAQPNGLVFYYVSLILQQTPRHVRPPLVTYERSIYFDNLEKYTDYILKITPSTEKGFSDTYTAQLYIKTEEDVPETSPIINTFKNLSSTSVLLSWDPPVKPNGAIISYDLTLQGPNENYSFITSDNYIILEELSPFTLYSFFAAARTRKGLGPSSILFFYTDESVPLAPPQNLTLINCTSDFVWLKWSPSPLPGGIVKVYSFKIHEHETDTIYYKNISGFKTEAKLVGLEPVSTYSIRVSAFTKVGNGNQFSNVVKFTTQESVPDVVQNMQCMATSWQSVLVKWDPPKKANGIITQYMVTVERNSTKVSPQDHMYTFIKLLANTSYVFKVRASTSAGEGDESTCHVSTLPETVPSVPTNIAFSDVQSTSATLTWIRPDTILGYFQNYKITTQLRAQKCKEWESEECVEYQKIQYLYEAHLTEETVYGLKKFRWYRFQVAASTNAGYGNASNWISTKTLPGPPDGPPENVHVVATSPFSISISWSEPAVITGPTCYLIDVKSVDNDEFNISFIKSNEENKTIEIKDLEIFTRYSVVITAFTGNISAAYVEGKSSAEMIVTTLESAPKDPPNNMTFQKIPDEVTKFQLTFLPPSQPNGNIQVYQALVYREDDPTAVQIHNLSIIQKTNTFVIAMLEGLKGGHTYNISVYAVNSAGAGPKVPMRITMDIKAPARPKTKPTPIYDATGKLLVTSTTITIRMPICYYSDDHGPIKNVQVLVTETGAQHDGNVTKWYDAYFNKARPYFTNEGFPNPPCTEGKTKFSGNEEIYIIGADNACMIPGNEDKICNGPLKPKKQYLFKFRATNIMGQFTDSDYSDPVKTLGEGLSERTVEIILSVTLCILSIILLGTAIFAFARIRQKQKEGGTYSPQDAEIIDTKLKLDQLITVADLELKDERLTRLLSYRKSIKPISKKSFLQHVEELCTNNNLKFQEEFSELPKFLQDLSSTDADLPWNRAKNRFPNIKPYNNNRVKLIADASVPGSDYINASYISGYLCPNEFIATQGPLPGTVGDFWRMVWETRAKTLVMLTQCFEKGRIRCHQYWPEDNKPVTVFGDIVITKLMEDVQIDWTIRDLKIERHGDCMTVRQCNFTAWPEHGVPENSAPLIHFVKLVRASRAHDTTPMIVHCSAGVGRTGVFIALDHLTQHINDHDFVDIYGLVAELRSERMCMVQNLAQYIFLHQCILDLLSNKGSNQPICFVNYSALQKMDSLDAMEGDVELEWEETTM

SEQ ID NO: 16911 - protein, 30 aa, Artificial Sequence
  Synthetic polypeptide
SQHFGRLKQVDHEVRRSRPSWLTRILHSMK

SEQ ID NO: 16912 - protein, 6 aa, Artificial Sequence
  Synthetic polypeptide
QEFYTP

SEQ ID NO: 16913 - protein, 53 aa, Artificial Sequence
  Synthetic polypeptide
FICRYYTILYKEFERLLILFSVEGLGASTLWIQKFPVFPQILLFLMFSQLVQH

SEQ ID NO: 16914 - protein, 27 aa, Artificial Sequence
  Synthetic polypeptide
FCSPWKVWEPVPCGYKSSQCSHKYCFF

SEQ ID NO: 16915 - protein, 891 aa, Artificial Sequence
  Synthetic polypeptide
TSSDFVLRGRSGSQYPVDTKVPSVPTNIAFSDVQSTSATLTWIRPDTILGYFQNYKITTQLRAQKCKEWESEECVEYQKIQYLYEAHLTEETVYGLKKFRWYRFQVAASTNAGYGNASNWISTKTLPGPPDGPPENVHVVATSPFSISISWSEPAVITGPTCYLIDVKSVDNDEFNISFIKSNEENKTIEIKDLEIFTRYSVVITAFTGNISAAYVEGKSSAEMIVTTLESAPKDPPNNMTFQKIPDEVTKFQLTFLPPSQPNGNIQVYQALVYREDDPTAVQIHNLSIIQKTNTFVIAMLEGLKGGHTYNISVYAVNSAGAGPKVPMRITMDIKAPARPKTKPTPIYDATGKLLVTSTTITIRMPICYYSDDHGPIKNVQVLVTETGAQHDGNVTKWYDAYFNKARPYFTNEGFPNPPCTEGKTKFSGNEEIYIIGADNACMIPGNEDKICNGPLKPKKQYLFKFRATNIMGQFTDSDYSDPVKTLGEGLSERTVEIILSVTLCILSIILLGTAIFAFARIRQKQKEGGTYSPQDAEIIDTKLKLDQLITVADLELKDERLTRLLSYRKSIKPISKKSFLQHVEELCTNNNLKFQEEFSELPKFLQDLSSTDADLPWNRAKNRFPNIKPYNNNRVKLIADASVPGSDYINASYISGYLCPNEFIATQGPLPGTVGDFWRMVWETRAKTLVMLTQCFEKGRIRCHQYWPEDNKPVTVFGDIVITKLMEDVQIDWTIRDLKIERHGDCMTVRQCNFTAWPEHGVPENSAPLIHFVKLVRASRAHDTTPMIVHCSAGVGRTGVFIALDHLTQHINDHDFVDIYGLVAELRSERMCMVQNLAQYIFLHQCILDLLSNKGSNQPICFVNYSALQKMDSLDAMEGDVELEWEETTM

SEQ ID NO: 16916 - protein, 14 aa, Artificial Sequence
  Synthetic polypeptide
LRSPKEELVAFPKH

SEQ ID NO: 16917 - protein, 626 aa, Artificial Sequence
  Synthetic polypeptide
ITNSYEAQRKNLSLFLSISLLIFWGSSLLGARLYWMGNKPPSFSNSDNPAADSDSLLTRTLTFFYLPTKNLWLLLCPDTLSFDWSMDAVPLLKTVCDWRNLHTVAFYTGLLLLAYYGLKSPSVDRECNGKTVTNGKQNANGHSCLSDVEYQNSETKSSFASKVENGIKNDVSQRTQLPSTENIVVLSLSLLIIPFVPATNLFFYVGFVIAERVLYIPSMGFCLLITVGARALYVKVQKRFLKSLIFYATATLIVFYGLKTAIRNGDWQNEEMLYRSGIKVNPAKAWGNLGNVLKSQSKISEAESAYRNALYYRSNMADMLYNLGLLLQENSRFAEALHYYKLAIGSRPTLASAYLNTGIILMNQGRTEEARRTFLKCSEIPDENLKDPHAHKSSVTSCLYNLGKLYHEQGHYEEALSVYKEAIQKMPRQFAPQSLYNMMGEAYMRLSKLPEAEHWYMESLRSKTDHIPAHLTYGKLLALTGRKSEAEKLFLKAIELDPTKGNCYMHYGQFLLEEARLIEAAEMAKKAAELDSTEFDVVFNAAHMLRQASLNEAAEKYYDLAARLRPNYPAALMNLGAILHLNGRLQKAEANYLRALQLKPDDVITQSNLRKLWNIMEKQGLKTSKT

SEQ ID NO: 16918 - protein, 22 aa, Artificial Sequence
  Synthetic polypeptide
SAWFCSELLIVTKPKGRTCRFS

SEQ ID NO: 16919 - protein, 427 aa, Artificial Sequence
  Synthetic polypeptide
ITNSYEAQRKNLSLFLSISLLIFWGSSLLGARLYWMGNKPPSFSNSDNPAADSDSLLTRTLTFFYLPTKNLWLLLCPDTLSFDWSMDAVPLLKTVCDWRNLHTVAFYTGLLLLAYYGLKSPSVDRECNGKTVTNGKQNANGHSCLSDVEYQNSETKSSFASKVENGIKNDVSQRTQLPSTENIVVLSLSLLIIPFVPATNLFFYVGFVIAERVLYIPSMGFCLLITVGARALYVKVQKRFLKSLIFYATATLIVFYGLKTAIRNGDWQNEEMLYRSGIKVNPAKAWGNLGNVLKSQSKISEAESAYRNALYYRSNMADMLYNLGLLLQENSRFAEALHYYKLAIGSRPTLASAYLNTGIILMNQGRTEEARRTFLKCSEIPDENLKDPHAHKSSVTSCLYNLGKLYHEQGHYEVWPMPLCPFPSPLF

SEQ ID NO: 16920 - protein, 12 aa, Artificial Sequence
  Synthetic polypeptide
LRSPKEELVAFP

SEQ ID NO: 16921 - protein, 16 aa, Artificial Sequence
  Synthetic polypeptide
ITNSYEAQRKNLSLFL

SEQ ID NO: 16922 - protein, 69 aa, Artificial Sequence
  Synthetic polypeptide
VEIVPLYSSLGNRFMEDLKDMLGFAPSRYYYYMWKYISPLMLLSLLIASVVNMGLSPPGYNAWIEDKHL

SEQ ID NO: 16923 - protein, 21 aa, Artificial Sequence
  Synthetic polypeptide
GCSESRLCHCTPAWATGLWKT

SEQ ID NO: 16924 - protein, 56 aa, Artificial Sequence
  Synthetic polypeptide
TWEDEVAVSRDCATVLQPGQQVYGRPKRYAGLCSQQILLLYVEIYFSSNAIIIANS

SEQ ID NO: 16925 - protein, 191 aa, Artificial Sequence
  Synthetic polypeptide
VEIVPLYSSLGNRFMEDLKDMLGFAPSRYYYYMWKYISPLMLLSLLIASVVNMGLSPPGYNAWIEDKASEEFLSYPTWGLVVCVSLVVFAILPVPVVFIVRRFNLIDDSSGNLASVTYKRGRVLKEPVNLEGDDTSLIHGKIPSEMPSPNFGKNIYRKQSGSPTLDTAPNGRYGIGYLMADIMPDMPESDL

SEQ ID NO: 16926 - protein, 53 aa, Artificial Sequence
  Synthetic polypeptide
PQSGCENKISAWYNVNVLTLIGINFGLLTSEVFQVSLTVCFFKNIKNIIHAEM

SEQ ID NO: 16927 - protein, 63 aa, Artificial Sequence
  Synthetic polypeptide
VIPLSSVFMMQMLPTLSHLVVIFIVRSTVEVSQCLCSRTLNLLNDDPKVVVKIKSVHGIMLMC

SEQ ID NO: 16928 - protein, 25 aa, Artificial Sequence
  Synthetic polypeptide
DRLLRYHSACVQEPLIYLMMTPKWL

SEQ ID NO: 16929 - protein, 80 aa, Artificial Sequence
  Synthetic polypeptide
VIPLSSVFMMQMLPTLSHLVVIFIVRSTVEGCENKISAWYNVNVLTLIGINFGLLTSEVFQVSLTVCFFKNIKNIIHAEM

SEQ ID NO: 16930 - protein, 19 aa, Artificial Sequence
  Synthetic polypeptide
DRLLRVVKIKSVHGIMLMC

SEQ ID NO: 16931 - protein, 35 aa, Artificial Sequence
  Synthetic polypeptide
RDFPLRELSLAYHHVRCPLLFCHDCEASPAMWNSS

SEQ ID NO: 16932 - protein, 36 aa, Artificial Sequence
  Synthetic polypeptide
DVPCSSAMIVRPPQPCGTPLDEPEEVSLPIQKCPLG

SEQ ID NO: 16933 - protein, 203 aa, Artificial Sequence
  Synthetic polypeptide
GLPSHVELLLMNRRKFLYQFKNVRWAKGRRETYLCYVVKRRDSATSFSLDFGYLRNKNGCHVELLFLRYISDWDLDPGRCYRVTWFTSWSPCYDCARHVADFLRGNPNLSLRIFTARLYFCEDRKAEPEGLRRLHRAGVQIAIMTFKDYFYCWNTFVENHERTFKAWEGLHENSVRLSRQLRRILLPLYEVDDLRDAFRTLGL

SEQ ID NO: 16934 - protein, 150 aa, Artificial Sequence
  Synthetic polypeptide
GLPSHVELLLMNRRKFLYQFKNVRWAKGRRETYLCYVVKRRDSATSFSLDFGYLRNKNGCHVELLFLRYISDWDLDPGRCYRVTWFTSWSPCYDCARHVADFLRGNPNLSLRIFTARLYFCEDRKAEPEGLRRLHRAGVQIAIMTFKAPV

SEQ ID NO: 16935 - protein, 74 aa, Artificial Sequence
  Synthetic polypeptide
GLPSHVELLLMNRRKFLYQFKNVRWAKGRRETYLCYVVKRRDSATSFSLDFGYLRNKPLYEVDDLRDAFRTLGL

SEQ ID NO: 16936 - protein, 193 aa, Artificial Sequence
  Synthetic polypeptide
GLPSHVELLLMNRRKFLYQFKNVRWAKGRRETYLCYVVKRRDSATSFSLDFGYLRNKNGCHVELLFLRYISDWDLDPGRCYRVTWFTSWSPCYDCARHVADFLRGNPNLSLRIFTARLYFCEDRKAEPEGLRRLHRAGVQIAIMTFKENHERTFKAWEGLHENSVRLSRQLRRILLPLYEVDDLRDAFRTLGL

SEQ ID NO: 16937 - protein, 20 aa, Artificial Sequence
  Synthetic polypeptide
ISQAWWYAPVIPATWEAETM

SEQ ID NO: 16938 - protein, 22 aa, Artificial Sequence
  Synthetic polypeptide
SQLLGKLRRCDSSDSRNIHRRS

SEQ ID NO: 16939 - protein, 38 aa, Artificial Sequence
  Synthetic polypeptide
NPYFTSAFVILHKLLHLSDFMKKDKWPGIKEKLTWNAN

SEQ ID NO: 16940 - protein, 11 aa, Artificial Sequence
  Synthetic polypeptide
SYTSYFTSLIS

SEQ ID NO: 16941 - protein, 27 aa, Artificial Sequence
  Synthetic polypeptide
LPPTCKLHKAKSLLDKRDGSTIVRQLD

SEQ ID NO: 16942 - protein, 218 aa, Artificial Sequence
  Synthetic polypeptide
FHQPVNFTKPSHCWISEMVVQLSDSLTDLLDKFSNISEGLSNYSIIDKLVNIVDDLVECVKENSSKDLKKSFKSPEPRLFTPEEFFRIFNRSIDAFKDFVVASETSDCVVSSTLSPEKDSRVSVTKPFMLPPVAASSLRNDSSSSNRKAKNPPGDSSLHWAAMALPALFSLIIGFAFGALYWKKRQPSLTRAVENIQINEEDNEISMLQEKEREFQEV

SEQ ID NO: 16943 - protein, 9 aa, Artificial Sequence
  Synthetic polypeptide
TSQSQVIVG

SEQ ID NO: 16944 - protein, 190 aa, Artificial Sequence
  Synthetic polypeptide
FHQPVNFTKPSHCWISEMVVQLSDSLTDLLDKFSNISEGLSNYSIIDKLVNIVDDLVECVKENSSKDLKKSFKSPEPRLFTPEEFFRIFNRSIDAFKDFVVASETSDCVVSSTLSPEKGKAKNPPGDSSLHWAAMALPALFSLIIGFAFGALYWKKRQPSLTRAVENIQINEEDNEISMLQEKEREFQEV

SEQ ID NO: 16945 - protein, 21 aa, Artificial Sequence
  Synthetic polypeptide
LPPTCKLHKAKSLLDKRDGST

SEQ ID NO: 16946 - protein, 20 aa, Artificial Sequence
  Synthetic polypeptide
FHQPVNFTKPSHCWISEMVV

SEQ ID NO: 16947 - protein, 255 aa, Artificial Sequence
  Synthetic polypeptide
DHPGQHGLRINGELITAYPQVVVVRVPTPWVQSDSDITVLRHLEKMGCRLMNRPQAILNCVNKFWTFQELAGHGVPLPDTFSYGGHENFAKMIDEAEVLEFPMVVKNTRGHRGKAVFLARDKHHLADLSHLIRHEAPYLFQKYVKESHGRDVRVIVVGGRVVGTMLRCSTDGRMQSNCSLGGVGMMCSLSEQGKQLAIQVSNILGMDVCGIDLLMKDDGSFCVCEANANPFQEPKKQIQTNKKIPREKTFLLPPS

SEQ ID NO: 16948 - protein, 29 aa, Artificial Sequence
  Synthetic polypeptide
AFWEAEAGRSQCQKFKTILANMVCGSMES

SEQ ID NO: 16949 - protein, 57 aa, Artificial Sequence
  Synthetic polypeptide
AAVVAHACKHFGRPRQADHNVRSLRPSWPTWSADQWRANHCLPTSGGSQSTNPLGAK

SEQ ID NO: 16950 - protein, 62 aa, Artificial Sequence
  Synthetic polypeptide
DHPGQHGLRINGELITAYPQVVVVRVPTPWVQSDSDITVLRHLEKMGCRLMNRPQAILNCVN

SEQ ID NO: 16951 - protein, 43 aa, Artificial Sequence
  Synthetic polypeptide
DHPGQHGLRINGELITAYPQVVVVRVPTPWVQSDSDITVLRHL

SEQ ID NO: 16952 - protein, 57 aa, Artificial Sequence
  Synthetic polypeptide
DHPGQHGLRINGELITAYPQVVVVRVPTPWVQSDSDITVLRHLEKMGCRLMNRPQAI

SEQ ID NO: 16953 - protein, 334 aa, Artificial Sequence
  Synthetic polypeptide
DHPGQHGLRINGELITAYPQVVVVRVPTPWVQSDSDITVLRHLEKMGCRLMNRPQAILNCVNKFWTFQELAGHGVPLPDTFSYGGHENFAKMIDEAEVLEFPMVVKNTRGHRGKAVFLARDKHHLADLSHLIRHEAPYLFQKYVKESHGRDVRVIVVGGRVVGTMLRCSTDGRMQSNCSLGGVGMMCSLSEQGKQLAIQVSNILGMDVCGIDLLMKDDGSFCVCEANANVGFIAFDKACNLDVAGIIADYAASLLPSGRLTRRMSLLSVVSTASETSEPELGPPASTAVDNMSASSSSVDSDPESTERELLTKLPGGLFNMNQLLANEIKLLVD

SEQ ID NO: 16954 - protein, 1902 aa, Artificial Sequence
  Synthetic polypeptide
DMTCSSLPSATILRPPQPHRTDRKLTKSERQRFKEEAEMLKGLQHPNIVRFYDSWESTVKGKKCIVLVTELMTSGTLKTYLKRFKVMKIKVLRSWCRQILKGLQFLHTRTPPIIHRDLKCDNIFITGPTGSVKIGDLGLATLKRASFAKSVIGTPEFMAPEMYEEKYDESVDVYAFGMCMLEMATSEYPYSECQNAAQIYRRVTSGVKPASFDKVAIPEVKEIIEGCIRQNKDERYSIKDLLNHAFFQEETGVRVELAEEDDGEKIAIKLWLRIEDIKKLKGKYKDNEAIEFSFDLERDVPEDVAQEMVESGYVCEGDHKTMAKAIKDRVSLIKRKREQRQLVREEQEKKKQEESSLKQQVEQSSASQTGIKQLPSASTGIPTASTTSASVSTQVEPEEPEADQHQQLQYQQPSISVLSDGTVDSGQGSSVFTESRVSSQQTVSYGSQHEQAHSTGTVPGHIPSTVQAQSQPHGVYPPSSVAQGQSQGQPSSSSLTGVSSSQPIQHPQQQGIQQTAPPQQTVQYSLSQTSTSSEATTAQPVSQPQAPQVLPQVSAGKQSTQGVSQVAPAEPVAVAQTQATQPTTLASSVDSAHSDVASGMSDGNENVPSSSGRHEGRTTKRHYRKSVRSRSRHEKTSRPKLRILNVSNKGDRVVECQLETHNRKMVTFKFDLDGDNPEEIATIMVNNDFILAIERESFVDQVREIIEKADEMLSEDVSVEPEGDQGLESLQGKDDYGFSGSQKLEGEFKQPIPASSMPQQIGIPTSSLTQVVHSAGRRFIVSPVPESRLRESKVFPSEITDTVAASTAQSPGMNLSHSASSLSLQQAFSELRRAQMTEGPNTAPPNFSHTGPTFPVVPPFLSSIAGVPTTAAATAPVPATSSPPNDISTSVIQSEVTVPTEEGIAGVATSTGVVTSGGLPIPPVSESPVLSSVVSSITIPAVVSISTTSPSLQVPTSTSEIVVSSTALYPSVTVSATSASAGGSTATPGPKPPAVVSQQAAGSTTVGATLTSVSTTTSFPSTASQLCIQLSSSTSTPTLAETVVVSAHSLDKTSHSSTTGLAFSLSAPSSSSSPGAGVSSYISQPGGLHPLVIPSVIASTPILPQAAGPTSTPLLPQVPSIPPLVQPVANVPAVQQTLIHSQPQPALLPNQPHTHCPEVDSDTQPKAPGIDDIKTLEEKLRSLFSEHSSSGAQHASVSLETSLVIESTVTPGIPTTAVAPSKLLTSTTSTCLPPTNLPLGTVALPVTPVVTPGQVSTPVSTTTSGVKPGTAPSKPPLTKAPVLPVGTELPAGTLPSEQLPPFPGPSLTQSQQPLEDLDAQLRRTLSPEMITVTSAVGPVSMAAPTAITEAGTQPQKVSQVKEGPVLATSSGAGVFKMGRFQVSVAADGAQKEGKNKSEDAKSVHFESSTSESSVLSSSSPESTLVKPEPNGITIPGISSDVPESAHKTTASEAKSDTGQPTKVGRFQVTTTANKVGRFSVSKTEDKITDTKKEGPVASPPFMDLEQAVLPAVIPKKEKPELSEPSHLNGPSSDPEAAFLSRDVDDGSGSPHSPHQLSSKSLPSQNLSQSLSNSFNSSYMSSDNESDIEDEDLKLELRRLRDKHLKEIQDLQSRQKHEIESLYTKLGKVPPAVIIPPAAPLSGRRRRPTKSKGSKSSRSSSLGNKSPQLSGNLSGQSAASVLHPQQTLHPPGNIPESGQNQLLQPLKPSPSSDNLYSAFTSDGAISVPSLSAPGQGTSSTNTVGATVNSQAAQAQPPAMTSSRKGTFTDDLHKLVDNWARDAMNLSGRRGSKGHMNYEGPGMARKFSAPGQLCISMTSNLGGSAPISAASATSLGHFTKSMCPPQQYGFPATPFGAQWSGTGGPAPQPLGQFQPVGTASLQNFNISNLQKSISNPPGSNLRTT

SEQ ID NO: 16955 - protein, 11 aa, Artificial Sequence
  Synthetic polypeptide
GLPSHIELIEN

SEQ ID NO: 16956 - protein, 2150 aa, Artificial Sequence
  Synthetic polypeptide
DMTCSSLPSATILRPPQPHRTDRKLTKSERQRFKEEAEMLKGLQHPNIVRFYDSWESTVKGKKCIVLVTELMTSGTLKTYLKRFKVMKIKVLRSWCRQILKGLQFLHTRTPPIIHRDLKCDNIFITGPTGSVKIGDLGLATLKRASFAKSVIGTPEFMAPEMYEEKYDESVDVYAFGMCMLEMATSEYPYSECQNAAQIYRRVTSGVKPASFDKVAIPEVKEIIEGCIRQNKDERYSIKDLLNHAFFQEETGVRVELAEEDDGEKIAIKLWLRIEDIKKLKGKYKDNEAIEFSFDLERDVPEDVAQEMVESGYVCEGDHKTMAKAIKDRVSLIKRKREQRQLVREEQEKKKQEESSLKQQVEQSSASQTGIKQLPSASTGIPTASTTSASVSTQVEPEEPEADQHQQLQYQQPSISVLSDGTVDSGQGSSVFTESRVSSQQTVSYGSQHEQAHSTGTVPGHIPSTVQAQSQPHGVYPPSSVAQGQSQGQPSSSSLTGVSSSQPIQHPQQQQGIQQTAPPQQTVQYSLSQTSTSSEATTAQPVSQPQAPQVLPQVSAGKQLPVSQPVPTIQGEPQIPVATQPSVVPVHSGAHFLPVGQPLPTPLLPQYPVSQIPISTPHVSTAQTGFSSLPITMAAGITQPLLTLASSATTAAIPGVSTVVPSQLPTLLQPVTQLPSQVHPQLLQPAVQSMGIPANLGQAAEVPLSSGDVLYQGFPPRLPPQYPGDSNIAPSSNVASVCIHSTVLSPPMPTEVLATPGYFPTVVQPYVESNLLVPMGGVGGQVQVSQPGGSLAQAPTTSSQQAVLESTQGVSQVAPAEPVAVAQTQATQPTTLASSVDSAHSDVASGMSDGNENVPSSSGRHEGRTTKRHYRKSVRSRSRHEKTSRPKLRILNVSNKGDRVVECQLETHNRKMVTFKFDLDGDNPEEIATIMVNNDFILAIERESFVDQVREIIEKADEMLSEDVSVEPEGDQGLESLQGKDDYGFSGSQKLEGEFKQPIPASSMPQQIGIPTSSLTQVVHSAGRRFIVSPVPESRLRESKVFPSEITDTVAASTAQSPGMNLSHSASSLSLQQAFSELRRAQMTEGPNTAPPNFSHTGPTFPVVPPFLSSIAGVPTTAAATAPVPATSSPPNDISTSVIQSEVTVPTEEGIAGVATSTGVVTSGGLPIPPVSESPVLSSVVSSITIPAVVSISTTSPSLQVPTSTSEIVVSSTALYPSVTVSATSASAGGSTATPGPKPPAVVSQQAAGSTTVGATLTSVSTTTSFPSTASQLCIQLSSSTSTPTLAETVVVSAHSLDKTSHSSTTGLAFSLSAPSSSSSPGAGVSSYISQPGGLHPLVIPSVIASTPILPQAAGPTSTPLLPQVPSIPPLVQPVANVPAVQQTLIHSQPQPALLPNQPHTHCPEVDSDTQPKAPGIDDIKTLEEKLRSLFSEHSSSGAQHASVSLETSLVIESTVTPGIPTTAVAPSKLLTSTTSTCLPPTNLPLGTVALPVTPVVTPGQVSTPVSTTTSGVKPGTAPSKPPLTKAPVLPVGTELPAGTLPSEQLPPFPGPSLTQSQQPLEDLDAQLRRTLSPEMITVTSAVGPVSMAAPTAITEAGTQPQKGVSQVKEGPVLATSSGAGVFKMGRFQVSVAADGAQKEGKNKSEDAKSVHFESSTSESSVLSSSSPESTLVKPEPNGITIPGISSDVPESAHKTTASEAKSDTGQPTKVGRFQVTTTANKVGRFSVSKTEDKITDTKKEGPVASPPFMDLEQAVLPAVIPKKEKPELSEPSHLNGPSSDPEAAFLSRDVDDGSGSPHSPHQLSSKSLPSQNLSQSLSNSFNSSYMSSDNESDIEDEDLKLELRRLRDKHLKEIQDLQSRQKHEIESLYTKLGKVPPAVIIPPAAPLSGRRRRPTKSKGSKSSRSSSLGNKSPQLSGNLSGQSAASVLHPQQTLHPPGNIPESGQNQLLQPLKPSPSSDNLYSAFTSDGAISVPSLSAPGQGTSSTNTVGATVNSQAAQAQPPAMTSSRKGTFTDDLHKLVDNWARDAMNLSGRRGSKGHMNYEGPGMARKFSAPGQLCISMTSNLGGSAPISAASATSLGHFTKSMCPPQQYGFPATPFGAQWSGTGGPAPQPLGQFQPVGTASLQNFNISNLQKSISNPPGSNLRTT

SEQ ID NO: 16957 - protein, 2410 aa, Artificial Sequence
  Synthetic polypeptide
DMTCSSLPSATILRPPQPHRTDRKLTKSERQRFKEEAEMLKGLQHPNIVRFYDSWESTVKGKKCIVLVTELMTSGTLKTYLKRFKVMKIKVLRSWCRQILKGLQFLHTRTPPIIHRDLKCDNIFITGPTGSVKIGDLGLATLKRASFAKSVIGTPEFMAPEMYEEKYDESVDVYAFGMCMLEMATSEYPYSECQNAAQIYRRVTSGVKPASFDKVAIPEVKEIIEGCIRQNKDERYSIKDLLNHAFFQEETGVRVELAEEDDGEKIAIKLWLRIEDIKKLKGKYKDNEAIEFSFDLERDVPEDVAQEMVESGYVCEGDHKTMAKAIKDRVSLIKRKREQRQLVREEQEKKKQEESSLKQQVEQSSASQTGIKQLPSASTGIPTASTTSASVSTQVEPEEPEADQHQQLQYQQPSISVLSDGTVDSGQGSSVFTESRVSSQQTVSYGSQHEQAHSTGTVPGHIPSTVQAQSQPHGVYPPSSVPQSMAHPCGGTPTYPESQIFFPTIHERPVSFSPPPTCPPKVAISQRRKSTSFLEAQTHHFQPLLRTVGQSLLPPGGSPTNWTPEAVVMLGTTASRVTGESCEIQVHPMFEPSQVYSDYRPGLVLPEEAHYFIPQEAVYVAGVHYQARVAEQYEGIPYNSSVLSSPMKQIPEQKPVQGGPTSSSVFEFPSGQAFLVGHLQNLRLDSGLGPGSPLSSISAPISTDATRLKFHPVFVPHSAPAVLTHNNESRSNCVFEFHVHTPSSSSGEGGGILPQRVYRNRQVAVDLNQEELPPQSVGLHGYLQPVTEEKHNYHAPELTVSVVEPIGQNWPIGSPEYSSDSSQITSSDPSDFQSPPPTGGAAAPFGSDVSMPFIHLPQTVLQESPLFFCFPQGTTSQQVLTASFSSGGSALHPQAQGQSQGQPSSSSLTGVSSSQPIQHPQQQQGIQQTAPPQQTVQYSLSQTSTSSEATTAQPVSQPQAPQVLPQVSAGKQGFPPRLPPQYPGDSNIAPSSNVASVCIHSTVLSPPMPTEVLATPGYFPTVVQPYVESNLLVPMGGVGGQVQVSQPGGSLAQAPTTSSQQAVLESTQGVSQVAPAEPVAVAQTQATQPTTLASSVDSAHSDVASGMSDGNENVPSSSGRHEGRTTKRHYRKSVRSRSRHEKTSRPKLRILNVSNKGDRVVECQLETHNRKMVTFKFDLDGDNPEEIATIMVNNDFILAIERESFVDQVREIIEKADEMLSEDVSVEPEGDQGLESLQGKDDYGFSGSQKLEGEFKQPIPASSMPQQIGIPTSSLTQVVHSAGRRFIVSPVPESRLRESKVFPSEITDTVAASTAQSPGMNLSHSASSLSLQQAFSELRRAQMTEGPNTAPPNFSHTGPTFPVVPPFLSSIAGVPTTAAATAPVPATSSPPNDISTSVIQSEVTVPTEEGIAGVATSTGVVTSGGLPIPPVSESPVLSSVVSSITIPAVVSISTTSPSLQVPTSTSEIVVSSTALYPSVTVSATSASAGGSTATPGPKPPAVVSQQAAGSTTVGATLTSVSTTTSFPSTASQLCIQLSSSTSTPTLAETVVVSAHSLDKTSHSSTTGLAFSLSAPSSSSSPGAGVSSYISQPGGLHPLVIPSVIASTPILPQAAGPTSTPLLPQVPSIPPLVQPVANVPAVQQTLIHSQPQPALLPNQPHTHCPEVDSDTQPKAPGIDDIKTLEEKLRSLFSEHSSSGAQHASVSLETSLVIESTVTPGIPTTAVAPSKLLTSTTSTCLPPTNLPLGTVALPVTPVVTPGQVSTPVSTTTSGVKPGTAPSKPPLTKAPVLPVGTELPAGTLPSEQLPPFPGPSLTQSQQPLEDLDAQLRRTLSPEMITVTSAVGPVSMAAPTAITEAGTQPQKGVSQVKEGPVLATSSGAGVFKMGRFQVSVAADGAQKEGKNKSEDAKSVHFESSTSESSVLSSSSPESTLVKPEPNGITIPGISSDVPESAHKTTASEAKSDTGQPTKVGRFQVTTTANKVGRFSVSKTEDKITDTKKEGPVASPPFMDLEQAVLPAVIPKKEKPELSEPSHLNGPSSDPEAAFLSRDVDDGSGSPHSPHQLSSKSLPSQNLSQSLSNSFNSSYMSSDNESDIEDEDLKLELRRLRDKHLKEIQDLQSRQKHEIESLYTKLGKVPPAVIIPPAAPLSGRRRRPTKSKGSKSSRSSSLGNKSPQLSGNLSGQSAASVLHPQQTLHPPGNIPESGQNQLLQPLKPSPSSDNLYSAFTSDGAISVPSLSAPGQGTSSTNTVGATVNSQAAQAQPPAMTSSRKGTFTDDLHKLVDNWARDAMNLSGRRGSKGHMNYEGPGMARKFSAPGQLCISMTSNLGGSAPISAASATSLGHFTKSMCPPQQYGFPATPFGAQWSGTGGPAPQPLGQFQPVGTASLQNFNISNLQKSISNPPGSNLRTT

SEQ ID NO: 16958 - protein, 161 aa, Artificial Sequence
  Synthetic polypeptide
DMTCSSLPSATILRPPQPHRTDRKLTKSERQRFKEEAEMLKGLQHPNIVRFYDSWESTVKGKKCIVLVTELMTSGTLKTYLKRFKVMKIKVLRSWCRQILKGLQFLHTRTPPIIHRDLKCDNIFITGPTGSVKIGDLGLATLKRASFAKSVIGMFQVYLGA

SEQ ID NO: 16959 - protein, 2648 aa, Artificial Sequence
  Synthetic polypeptide
DMTCSSLPSATILRPPQPHRTDRKLTKSERQRFKEEAEMLKGLQHPNIVRFYDSWESTVKGKKCIVLVTELMTSGTLKTYLKRFKVMKIKVLRSWCRQILKGLQFLHTRTPPIIHRDLKCDNIFITGPTGSVKIGDLGLATLKRASFAKSVIGTPEFMAPEMYEEKYDESVDVYAFGMCMLEMATSEYPYSECQNAAQIYRRVTSGVKPASFDKVAIPEVKEIIEGCIRQNKDERYSIKDLLNHAFFQEETGVRVELAEEDDGEKIAIKLWLRIEDIKKLKGKYKDNEAIEFSFDLERDVPEDVAQEMVESGYVCEGDHKTMAKAIKDRVSLIKRKREQRQLVREEQEKKKQEESSLKQQVEQSSASQTGIKQLPSASTGIPTASTTSASVSTQVEPEEPEADQHQQLQYQQPSISVLSDGTVDSGQGSSVFTESRVSSQQTVSYGSQHEQAHSTGTVPGHIPSTVQAQSQPHGVYPPSSVPRRGRSMSVCVPIFLLLPLCPASLPVLFHPTASTVCTSFSFPPPDCPEETFAEKLSKALESVLPMHSASQRKHRRSSLPSLFVSTPQSMAHPCGGTPTYPESQIFFPTIHERPVSFSPPPTCPPKVAISQRRKSTSFLEAQTHHFQPLLRTVGQSLLPPGGSPTNWTPEAVVMLGTTASRVTGESCEIQVHPMFEPSQVYSDYRPGLVLPEEAHYFIPQEAVYVAGVHYQARVAEQYEGIPYNSSVLSSPMKQIPEQKPVQGGPTSSSVFEFPSGQAFLVGHLQNLRLDSGLGPGSPLSSISAPISTDATRLKFHPVFVPHSAPAVLTHNNESRSNCVFEFHVHTPSSSSGEGGGILPQRVYRNRQVAVDLNQEELPPQSVGLHGYLQPVTEEKHNYHAPELTVSVVEPIGQNWPIGSPEYSSDSSQITSSDPSDFQSPPPTGGAAAPFGSDVSMPFIHLPQTVLQESPLFFCFPQGTTSQQVLTASFSSGGSALHPQAQGQSQGQPSSSSLTGVSSSQPIQHPQQQQGIQQTAPPQQTVQYSLSQTSTSSEATTAQPVSQPQAPQVLPQVSAGKQLPVSQPVPTIQGEPQIPVATQPSVVPVHSGAHFLPVGQPLPTPLLPQYPVSQIPISTPHVSTAQTGFSSLPITMAAGITQPLLTLASSATTAAIPGVSTVVPSQLPTLLQPVTQLPSQVHPQLLQPAVQSMGIPANLGQAAEVPLSSGDVLYQGFPPRLPPQYPGDSNIAPSSNVASVCIHSTVLSPPMPTEVLATPGYFPTVVQPYVESNLLVPMGGVGGQVQVSQPGGSLAQAPTTSSQQAVLESTQGVSQVAPAEPVAVAQTQATQPTTLASSVDSAHSDVASGMSDGNENVPSSSGRHEGRTTKRHYRKSVRSRSRHEKTSRPKLRILNVSNKGDRVVECQLETHNRKMVTFKFDLDGDNPEEIATIMVNNDFILAIERESFVDQVREIIEKADEMLSEDVSVEPEGDQGLESLQGKDDYGFSGSQKLEGEFKQPIPASSMPQQIGIPTSSLTQVVHSAGRRFIVSPVPESRLRESKVFPSEITDTVAASTAQSPGMNLSHSASSLSLQQAFSELRRAQMTEGPNTAPPNFSHTGPTFPVVPPFLSSIAGVPTTAAATAPVPATSSPPNDISTSVIQSEVTVPTEEGIAGVATSTGVVTSGGLPIPPVSESPVLSSVVSSITIPAVVSISTTSPSLQVPTSTSEIVVSSTALYPSVTVSATSASAGGSTATPGPKPPAVVSQQAAGSTTVGATLTSVSTTTSFPSTASQLCIQLSSSTSTPTLAETVVVSAHSLDKTSHSSTTGLAFSLSAPSSSSSPGAGVSSYISQPGGLHPLVIPSVIASTPILPQAAGPTSTPLLPQVPSIPPLVQPVANVPAVQQTLIHSQPQPALLPNQPHTHCPEVDSDTQPKAPGIDDIKTLEEKLRSLFSEHSSSGAQHASVSLETSLVIESTVTPGIPTTAVAPSKLLTSTTSTCLPPTNLPLGTVALPVTPVVTPGQVSTPVSTTTSGVKPGTAPSKPPLTKAPVLPVGTELPAGTLPSEQLPPFPGPSLTQSQQPLEDLDAQLRRTLSPEMITVTSAVGPVSMAAPTAITEAGTQPQKGVSQVKEGPVLATSSGAGVFKMGRFQVSVAADGAQKEGKNKSEDAKSVHFESSTSESSVLSSSSPESTLVKPEPNGITIPGISSDVPESAHKTTASEAKSDTGQPTKVGRFQVTTTANKVGRFSVSKTEDKITDTKKEGPVASPPFMDLEQAVLPAVIPKKEKPELSEPSHLNGPSSDPEAAFLSRDVDDGSGSPHSPHQLSSKSLPSQNLSQSLSNSFNSSYMSSDNESDIEDEDLKLELRRLRDKHLKEIQDLQSRQKHEIESLYTKLGKVPPAVIIPPAAPLSGRRRRPTKSKGSKSSRSSSLGNKSPQLSGNLSGQSAASVLHPQQTLHPPGNIPESGQNQLLQPLKPSPSSDNLYSAFTSDGAISVPSLSAPGQGTSSTNTVGATVNSQAAQAQPPAMTSSRKGTFTDDLHKLVDNWARDAMNLSGRRGSKGHMNYEGPGMARKFSAPGQLCISMTSNLGGSAPISAASATSLGHFTKSMCPPQQYGFPATPFGAQWSGTGGPAPQPLGQFQPVGTASLQNFNISNLQKSISNPPGSNLRTT

SEQ ID NO: 16960 - protein, 15 aa, Artificial Sequence
  Synthetic polypeptide
SLPRHVTQKSLETFI

SEQ ID NO: 16961 - protein, 105 aa, Artificial Sequence
  Synthetic polypeptide
HKKVWKPSSRKWSSKVWSMDEFDLQTACYWFMTRCQKEAGKFGTHRGKPMCFVRSLLRVQLLPRTFPANSFVISFFPSLIYPLQVYQLHFESSDKQRAMQFVTEG

SEQ ID NO: 16962 - protein, 103 aa, Artificial Sequence
  Synthetic polypeptide
IPMCCGRYPVGGNLIMGAGLSCAVLVIVISLMRSDDFIKGSFPAQPLLLCLLPCELCLSPSTMIVKPSQTCDTKKFGNLHLESGLAKCGPWMSLICKLLVIGS

SEQ ID NO: 16963 - protein, 86 aa, Artificial Sequence
  Synthetic polypeptide
HKKVWKPSSRKWSSKVWSMDEFDLQTACYWFMTRSTNCILRAQISREQCNLSQKDDYVYALSCLFPCLTQRRHKEKVSSAWINWRL

SEQ ID NO: 16964 - protein, 75 aa, Artificial Sequence
  Synthetic polypeptide
HKKVWKPSSRKWSSKVWSMDEFDLQTACYWFMTRSTNCILRAQISREQCNLSQKDDYVYALSCVCMCMYIRYFHA

SEQ ID NO: 16965 - protein, 76 aa, Artificial Sequence
  Synthetic polypeptide
KVCGTFPFSFSCSGHVRHTSFLFAFHHDCIFPETSPAMLPVQPILYRQCSLVSPRLVLPMALHLGPHCLVEMKWPC

SEQ ID NO: 16966 - protein, 34 aa, Artificial Sequence
  Synthetic polypeptide
DIPPSSLPSTMIVYFLRPLQPCFPYSLFSTDSAA

SEQ ID NO: 16967 - protein, 94 aa, Artificial Sequence
  Synthetic polypeptide
DLSSHASRTAYSLQTVQPSISQTCTSYGPALGAPLPGRNEVALLTSLPPNYEISEGKPRAISAYVRAGKGNVTRRRKKTHLGNDDGKKEAQEKM

SEQ ID NO: 16968 - protein, 144 aa, Artificial Sequence
  Synthetic polypeptide
KVCGTFPFSFSCSGHVRHTSFLFAFHHDCIFPETSPAMLPVQPMNKLGHNELKECLKTATDSLQTVQPSISQTCTSYGPALGAPLPGRNEVALLTSLPPNYEISEGKPRAISAYVRAGKGNVTRRRKKTHLGNDDGKKEAQEKM

SEQ ID NO: 16969 - protein, 27 aa, Artificial Sequence
  Synthetic polypeptide
DIPPSSLPSTMIVYFLRPLQPCFPYSL

SEQ ID NO: 16970 - protein, 19 aa, Artificial Sequence
  Synthetic polypeptide
DLSSHASRTAYEQIGAQRT

SEQ ID NO: 16971 - protein, 1376 aa, Artificial Sequence
  Synthetic polypeptide
DVQLGFICPQCMKSLGSADELFKHYEAVHDAGNDSGHGGESNLALKRDDVTLLRQEVQDLQASLKEEKWYSEELKKELEKYQGLQQQEAKPDGLVTDSSAELQSLEQQLEEAQTENFNIKQMKDLFEQKAAQLATEIADIKSKYDEERSLREAAEQKVTRLTEELNKEATVIQDLKTELLQRPGIEDVAVLKKELVQVQTLMDNMTLERERESEKLKDECKKLQSQYASSEATISQLRSELAKGPQEVAVYVQELQKLKSSVNELTQKNQTLTENLLKKEQDYTKLEEKHNEESVSKKNIQATLHQKDLDCQQLQSRLSASETSLHRIHVELSEKGEATQKLKEELSEVETKYQHLKAEFKQLQQQREEKEQHGLQLQSEINQLHSKLLETERQLGEAHGRLKEQRQLSSEKLMDKEQQVADLQLKLSRLEEQLKEKVTNSTELQHQLDKTKQQHQEQQALQQSTTAKLREAQNDLEQVLRQIGDKDQKIQNLEALLQKSKENISLLEKEREDLYAKIQAGEGETAVLNQLQEKNHTLQEQVTQLTEKLKNQSESHKQAQENLHDQVQEQKAHLRAAQDRVLSLETSVNELNSQLNESKEKVSQLDIQIKAKTELLLSAEAAKTAQRADLQNHLDTAQNALQDKQQELNKITTQLDQVTAKLQDKQEHCSQLESHLKEYKEKYLSLEQKTEELEGQIKKLEADSLEVKASKEQALQDLQQQRQLNTDLELRATELSKQLEMEKEIVSSTRLDLQKKSEALESIKQKLTKQEEEKKILKQDFETLSQETKIQHEELNNRIQTTVTELQKVKMEKEALMTELSTVKDKLSKVSDSLKNSKSEFEKENQKGKAAILDLEKTCKELKHQLQVQMENTLKEQKELKKSLEKEKEASHQLKLELNSMQEQLIQAQNTLKQNEKEEQQLQGNINELKQSSEQKKKQIEALQGELKIAVLQKTELENKLQQQLTQAAQELAAEKEKISVLQNNYEKSQETFKQLQSDFYGRESELLATRQDLKSVEEKLSLAQEDLISNRNQIGNQNKLIQELKTAKATLEQDSAKKEQQLQERCKALQDIQKEKSLKEKELVNEKSKLAEIEEIKCRQEKEITKLNEELKSHKLESIKEITNLKDAKQLLIQQKLELQGKADSLKAAVEQEKRNQQILKDQVKKEEEELKKEFIEKEAKLHSEIKEKEVGMKKHEENEAKLTMQITALNENLGTVKKEWQSSQRRVSELEKQTDDLRGEIAVLEATVQNNQDERRALLERCLKGEGEIEKLQTKVLELQRKLDNTTAAVQELGRENQSLQIKHTQALNRKWAEDNEVQNCMACGKGFSVTVRRHHCRQCGNIFCAECSAKNALTPSSKKPVRVCDACFNDLQG

SEQ ID NO: 16972 - protein, 47 aa, Artificial Sequence
  Synthetic polypeptide
RWSIPNLKIQNPKCCKIPNLSAEMMFISDFGFFWIRMSNWVSYVPSV

SEQ ID NO: 16973 - protein, 29 aa, Artificial Sequence
  Synthetic polypeptide
CSFQILDFFGLGCPTGFHMSPVYEISWIC

SEQ ID NO: 16974 - protein, 197 aa, Artificial Sequence
  Synthetic polypeptide
SPHCHHTDHNSSCSSAVLGELSTQSFCISCFRCLECFYFIVYSLSLRSFSLFVILCGLPWLLHLKLYLCSCTPCCPLIYFSQQHLSFLAYWMFSGYLPSLKCKLDEDRALCVFFPCLVFSTWNNALNLPIPRPDPVHNNEETHDQVLKTRLEEKVEHLEEGPMIEQLSKMFFTTKHRWYPHGRYHRCRKNLNPPKDR

SEQ ID NO: 16975 - protein, 20 aa, Artificial Sequence
  Synthetic polypeptide
TCLSLGQILCIIMKKHMIKC

SEQ ID NO: 16976 - protein, 13 aa, Artificial Sequence
  Synthetic polypeptide
RFELAYPSARSCA

SEQ ID NO: 16977 - protein, 194 aa, Artificial Sequence
  Synthetic polypeptide
SPHCHHTDHNSSCSSAVLGELSTQSFCISCFRCLECFYFIVYSLSLRSFSLFVILCGLPWLLHLKLYLCSCTPCCPLIYFSQQHLSFLAYWMFSGYLPSLKCKLDEDRALCVFFPCLVFSTWNNALNLPIPRPDPVHNNEETHDQVLKTRLEEKVEHLEEGPMIEQLSKMFFTTKHRWYPHGRCRKNLNPPKDR

SEQ ID NO: 16978 - protein, 210 aa, Artificial Sequence
  Synthetic polypeptide
SPHCHHTDHNSSCSSAVLGELSTQSFCISCFRCLECFYFIVYSLSLRSFSLFVILCGLPWLLHLKLYLCSCTPCCPLIYFSQQHLSFLAYWMFSGYLPSLKCKLDEDRALCVFFPCLVFSTWNNALNLPIPRPDPVHNNEETHDQVLKTRLEEKVEHLEEGPMIEQLSKMFFTTKHRWYPHGRGKVSLTVLRRLILNSWTQVILLPQLGL

SEQ ID NO: 16979 - protein, 183 aa, Artificial Sequence
  Synthetic polypeptide
SPHCHHTDHNSSCSSAVLGELSTQSFCISCFRCLECFYFIVYSLSLRSFSLFVILCGLPWLLHLKLYLCSCTPCCPLIYFSQQHLSFLAYWMFSGYLPSLKCKLDEDRALCVFFPCLVFSTWNNALNLPIPRPDPVHNNEETHDQVLKTRLEEKVEHLEEGPMIEQLSKMFFTTKHRWYPHGR

SEQ ID NO: 16980 - protein, 22 aa, Artificial Sequence
  Synthetic polypeptide
GVPFTFCHDCEASPPHGTGVGH

SEQ ID NO: 16981 - protein, 38 aa, Artificial Sequence
  Synthetic polypeptide
GGVSLHKLSSGLLPCEVCLSPSAMIVKPPHHMERVLAM

SEQ ID NO: 16982 - protein, 11 aa, Artificial Sequence
  Synthetic polypeptide
SLPTTWNGCWP

SEQ ID NO: 16983 - protein, 60 aa, Artificial Sequence
  Synthetic polypeptide
KKSRDYGSHEHCLKKKKKKKNLPVMKLTQMTQIRRTDPGVEKPQMKNSNNSNNNKTLVTD

SEQ ID NO: 16984 - protein, 12 aa, Artificial Sequence
  Synthetic polypeptide
RTVTTATTTKHW

SEQ ID NO: 16985 - protein, 108 aa, Artificial Sequence
  Synthetic polypeptide
QQQQQQNTGDRLTGIPSHILNSSPSDRQINQLAQRLGPEWEPMVLSLGLSQTDIYRCKANHPHNVQSQVVEAFIRWRQRFGKQATFQSLHNGLRAVEVDPSLLLHMLE

SEQ ID NO: 16986 - protein, 24 aa, Artificial Sequence
  Synthetic polypeptide
EAEMRKLRPKDSVTCLASQLTWRF

SEQ ID NO: 16987 - protein, 3 aa, Artificial Sequence
  Synthetic polypeptide
RQR

SEQ ID NO: 16988 - protein, 24 aa, Artificial Sequence
  Synthetic polypeptide
GRDEETEAKGFCYLPGFTAHLEIL

SEQ ID NO: 16989 - protein, 47 aa, Artificial Sequence
  Synthetic polypeptide
FAYLLCLFSVLPPLEWKLHERRNLYLFCSLLYSKFLEQILVYRGRKV

SEQ ID NO: 16990 - protein, 568 aa, Artificial Sequence
  Synthetic polypeptide
NRFWYTEVEKYRAVYNKLRYEHTFLKSEFEHQKEEYARILDEGKIKYESEIARLEEDKEELRNQLLNVDLTKDSKRVEQLAREKVYLCQKLKGLEAEVAELKAEKENSEAQVENAQRIQVRQLAEMQATVRSLEAEKQSANLRAERLEKELQSSSEQNTFLINKLHKAEREINTLSSKVKELKHSNKLEITDIKLETARAKSELERERNKIQSELDGLQSDNEILKAAVEHHKVLLVEKDRELIRKVQAAKEEGYQKLVVLQDEKLELENRLADLEKMKVEHDVWRQSEKDQYEEKLRASQMAEEITRKELQSVRLKLQQQIVTIENAEKEKNENSDLKQQISSLQIQVTSLAQSENDLLNSNQMLKEMVERLKQECRNFRSQAEKAQLEAEKTLEEKQIQWLEEKHKLHERITDREEKYNQAKEKLQRAAIAQKKRKSLHENKLKRLQEKVEVLEAKKEELETENQVLNRQNVPFEDYTRLQKRLKDIQRRHNEFRSLILVPNMPPTASINPVSFQSSAMVPSMELPFPPHMQEEQHQRELSLLRKRLEELETTQRKQLEELGSSGE

SEQ ID NO: 16991 - protein, 24 aa, Artificial Sequence
  Synthetic polypeptide
EEEPLPVLFIVIFQVPRTDFGIQR

SEQ ID NO: 16992 - protein, 468 aa, Artificial Sequence
  Synthetic polypeptide
NRFWYTEVEKYRAVYNKLRYEHTFLKSEFEHQKEEYARILDEGKIKYESEIARLEEDKEELRNQLLNVDLTKDSKRVEQLAREKVYLCQKLKGLEAEVAELKAEKENSEAQVENAQRIQVRQLAEMQATVRSLEAEKQSANLRAERLEKELQSSSEQNTFLINKLHKAEREINTLSSKVKELKHSNKLEITDIKLETARAKSELERERNKIQSELDGLQSDNEILKAAVEHHKVLLVEKDRELIRKVQAAKEEGYQKLVVLQDEKLELENRLADLEKMKVEHDVWRQSEKDQYEEKLRASQMAEEITRKELQSVRLKLQQQIVTIENAEKEKNENSDLKQQISSLQIQVTSLAQSENDLLNSNQMLKEMVERLKQECRNFRSQAEKAQLEAEKTLEEKQIQWLEEKHKLHERITDREEKYNQAKEKLQRAAIAQKKLEQDLELGCPSVTDTYRESVFPPPPLKRDLLK

SEQ ID NO: 16993 - protein, 219 aa, Artificial Sequence
  Synthetic polypeptide
NRFWYTEVEKYRAVYNKLRYEHTFLKSEFEHQKEEYARILDEGKIKYESEIARLEEDKEELRNQLLNVDLTKDSKRVEQLAREKVYLCQKLKGLEAEVAELKAEKENSEAQVENAQRIQVRQLAEMQATVRSLEAEKQSANLRAERLEKELQSSSEQNTFLINKLHKAEREINTLSSKVKELKHSNKLEITDIKLETARAKSELERERNKIQSELDGNM

SEQ ID NO: 16994 - protein, 584 aa, Artificial Sequence
  Synthetic polypeptide
NWHISFALNTLPPDTSWQTSSLEVEKYRAVYNKLRYEHTFLKSEFEHQKEEYARILDEGKIKYESEIARLEEDKEELRNQLLNVDLTKDSKRVEQLAREKVYLCQKLKGLEAEVAELKAEKENSEAQVENAQRIQVRQLAEMQATVRSLEAEKQSANLRAERLEKELQSSSEQNTFLINKLHKAEREINTLSSKVKELKHSNKLEITDIKLETARAKSELERERNKIQSELDGLQSDNEILKAAVEHHKVLLVEKDRELIRKVQAAKEEGYQKLVVLQDEKLELENRLADLEKMKVEHDVWRQSEKDQYEEKLRASQMAEEITRKELQSVRLKLQQQIVTIENAEKEKNENSDLKQQISSLQIQVTSLAQSENDLLNSNQMLKEMVERLKQECRNFRSQAEKAQLEAEKTLEEKQIQWLEEKHKLHERITDREEKYNQAKEKLQRAAIAQKKRKSLHENKLKRLQEKVEVLEAKKEELETENQVLNRQNVPFEDYTRLQKRLKDIQRRHNEFRSLILVPNMPPTASINPVSFQSSAMVPSMELPFPPHMQEEQHQRELSLLRKRLEELETTQRKQLEELGSSGE

SEQ ID NO: 16995 - protein, 15 aa, Artificial Sequence
  Synthetic polypeptide
ILSLQIRRGKLHLLR

SEQ ID NO: 16996 - protein, 484 aa, Artificial Sequence
  Synthetic polypeptide
NWHISFALNTLPPDTSWQTSSLEVEKYRAVYNKLRYEHTFLKSEFEHQKEEYARILDEGKIKYESEIARLEEDKEELRNQLLNVDLTKDSKRVEQLAREKVYLCQKLKGLEAEVAELKAEKENSEAQVENAQRIQVRQLAEMQATVRSLEAEKQSANLRAERLEKELQSSSEQNTFLINKLHKAEREINTLSSKVKELKHSNKLEITDIKLETARAKSELERERNKIQSELDGLQSDNEILKAAVEHHKVLLVEKDRELIRKVQAAKEEGYQKLVVLQDEKLELENRLADLEKMKVEHDVWRQSEKDQYEEKLRASQMAEEITRKELQSVRLKLQQQIVTIENAEKEKNENSDLKQQISSLQIQVTSLAQSENDLLNSNQMLKEMVERLKQECRNFRSQAEKAQLEAEKTLEEKQIQWLEEKHKLHERITDREEKYNQAKEKLQRAAIAQKKLEQDLELGCPSVTDTYRESVFPPPPLKRDLLK

SEQ ID NO: 16997 - protein, 235 aa, Artificial Sequence
  Synthetic polypeptide
NWHISFALNTLPPDTSWQTSSLEVEKYRAVYNKLRYEHTFLKSEFEHQKEEYARILDEGKIKYESEIARLEEDKEELRNQLLNVDLTKDSKRVEQLAREKVYLCQKLKGLEAEVAELKAEKENSEAQVENAQRIQVRQLAEMQATVRSLEAEKQSANLRAERLEKELQSSSEQNTFLINKLHKAEREINTLSSKVKELKHSNKLEITDIKLETARAKSELERERNKIQSELDGNM

SEQ ID NO: 16998 - protein, 37 aa, Artificial Sequence
  Synthetic polypeptide
WYMLVFPAAQEDINSTKIGIAKSPNTTRIRNSNERTF

SEQ ID NO: 16999 - protein, 644 aa, Artificial Sequence
  Synthetic polypeptide
SQIFGRPSCVDHLRSGVRDQPGQHGETLSPLKIQILAGCSGTCLSSQLLRRILTPQKLELLRAQIQQELETPMRERFRNLDEEVEKYRAVYNKLRYEHTFLKSEFEHQKEEYARILDEGKIKYESEIARLEEDKEELRNQLLNVDLTKDSKRVEQLAREKVYLCQKLKGLEAEVAELKAEKENSEAQVENAQRIQVRQLAEMQATVRSLEAEKQSANLRAERLEKELQSSSEQNTFLINKLHKAEREINTLSSKVKELKHSNKLEITDIKLETARAKSELERERNKIQSELDGLQSDNEILKAAVEHHKVLLVEKDRELIRKVQAAKEEGYQKLVVLQDEKLELENRLADLEKMKVEHDVWRQSEKDQYEEKLRASQMAEEITRKELQSVRLKLQQQIVTIENAEKEKNENSDLKQQISSLQIQVTSLAQSENDLLNSNQMLKEMVERLKQECRNFRSQAEKAQLEAEKTLEEKQIQWLEEKHKLHERITDREEKYNQAKEKLQRAAIAQKKRKSLHENKLKRLQEKVEVLEAKKEELETENQVLNRQNVPFEDYTRLQKRLKDIQRRHNEFRSLILVPNMPPTASINPVSFQSSAMVPSMELPFPPHMQEEQHQRELSLLRKRLEELETTQRKQLEELGSSGE

SEQ ID NO: 17000 - protein, 16 aa, Artificial Sequence
  Synthetic polypeptide
LGVVVHACLPSCSGGY

SEQ ID NO: 17001 - protein, 544 aa, Artificial Sequence
  Synthetic polypeptide
SQIFGRPSCVDHLRSGVRDQPGQHGETLSPLKIQILAGCSGTCLSSQLLRRILTPQKLELLRAQIQQELETPMRERFRNLDEEVEKYRAVYNKLRYEHTFLKSEFEHQKEEYARILDEGKIKYESEIARLEEDKEELRNQLLNVDLTKDSKRVEQLAREKVYLCQKLKGLEAEVAELKAEKENSEAQVENAQRIQVRQLAEMQATVRSLEAEKQSANLRAERLEKELQSSSEQNTFLINKLHKAEREINTLSSKVKELKHSNKLEITDIKLETARAKSELERERNKIQSELDGLQSDNEILKAAVEHHKVLLVEKDRELIRKVQAAKEEGYQKLVVLQDEKLELENRLADLEKMKVEHDVWRQSEKDQYEEKLRASQMAEEITRKELQSVRLKLQQQIVTIENAEKEKNENSDLKQQISSLQIQVTSLAQSENDLLNSNQMLKEMVERLKQECRNFRSQAEKAQLEAEKTLEEKQIQWLEEKHKLHERITDREEKYNQAKEKLQRAAIAQKKLEQDLELGCPSVTDTYRESVFPPPPLKRDLLK

SEQ ID NO: 17002 - protein, 295 aa, Artificial Sequence
  Synthetic polypeptide
SQIFGRPSCVDHLRSGVRDQPGQHGETLSPLKIQILAGCSGTCLSSQLLRRILTPQKLELLRAQIQQELETPMRERFRNLDEEVEKYRAVYNKLRYEHTFLKSEFEHQKEEYARILDEGKIKYESEIARLEEDKEELRNQLLNVDLTKDSKRVEQLAREKVYLCQKLKGLEAEVAELKAEKENSEAQVENAQRIQVRQLAEMQATVRSLEAEKQSANLRAERLEKELQSSSEQNTFLINKLHKAEREINTLSSKVKELKHSNKLEITDIKLETARAKSELERERNKIQSELDGNM

SEQ ID NO: 17003 - protein, 50 aa, Artificial Sequence
  Synthetic polypeptide
SQIFGRPSCVDHLRSGVRDQPGQHDINSTKIGIAKSPNTTRIRNSNERTF

SEQ ID NO: 17004 - protein, 604 aa, Artificial Sequence
  Synthetic polypeptide
GQEFETSLANMILTPQKLELLRAQIQQELETPMRERFRNLDEEVEKYRAVYNKLRYEHTFLKSEFEHQKEEYARILDEGKIKYESEIARLEEDKEELRNQLLNVDLTKDSKRVEQLAREKVYLCQKLKGLEAEVAELKAEKENSEAQVENAQRIQVRQLAEMQATVRSLEAEKQSANLRAERLEKELQSSSEQNTFLINKLHKAEREINTLSSKVKELKHSNKLEITDIKLETARAKSELERERNKIQSELDGLQSDNEILKAAVEHHKVLLVEKDRELIRKVQAAKEEGYQKLVVLQDEKLELENRLADLEKMKVEHDVWRQSEKDQYEEKLRASQMAEEITRKELQSVRLKLQQQIVTIENAEKEKNENSDLKQQISSLQIQVTSLAQSENDLLNSNQMLKEMVERLKQECRNFRSQAEKAQLEAEKTLEEKQIQWLEEKHKLHERITDREEKYNQAKEKLQRAAIAQKKRKSLHENKLKRLQEKVEVLEAKKEELETENQVLNRQNVPFEDYTRLQKRLKDIQRRHNEFRSLILVPNMPPTASINPVSFQSSAMVPSMELPFPPHMQEEQHQRELSLLRKRLEELETTQRKQLEELGSSGE

SEQ ID NO: 17005 - protein, 504 aa, Artificial Sequence
  Synthetic polypeptide
GQEFETSLANMILTPQKLELLRAQIQQELETPMRERFRNLDEEVEKYRAVYNKLRYEHTFLKSEFEHQKEEYARILDEGKIKYESEIARLEEDKEELRNQLLNVDLTKDSKRVEQLAREKVYLCQKLKGLEAEVAELKAEKENSEAQVENAQRIQVRQLAEMQATVRSLEAEKQSANLRAERLEKELQSSSEQNTFLINKLHKAEREINTLSSKVKELKHSNKLEITDIKLETARAKSELERERNKIQSELDGLQSDNEILKAAVEHHKVLLVEKDRELIRKVQAAKEEGYQKLVVLQDEKLELENRLADLEKMKVEHDVWRQSEKDQYEEKLRASQMAEEITRKELQSVRLKLQQQIVTIENAEKEKNENSDLKQQISSLQIQVTSLAQSENDLLNSNQMLKEMVERLKQECRNFRSQAEKAQLEAEKTLEEKQIQWLEEKHKLHERITDREEKYNQAKEKLQRAAIAQKKLEQDLELGCPSVTDTYRESVFPPPPLKRDLLK

SEQ ID NO: 17006 - protein, 255 aa, Artificial Sequence
  Synthetic polypeptide
GQEFETSLANMILTPQKLELLRAQIQQELETPMRERFRNLDEEVEKYRAVYNKLRYEHTFLKSEFEHQKEEYARILDEGKIKYESEIARLEEDKEELRNQLLNVDLTKDSKRVEQLAREKVYLCQKLKGLEAEVAELKAEKENSEAQVENAQRIQVRQLAEMQATVRSLEAEKQSANLRAERLEKELQSSSEQNTFLINKLHKAEREINTLSSKVKELKHSNKLEITDIKLETARAKSELERERNKIQSELDGNM

SEQ ID NO: 17007 - protein, 93 aa, Artificial Sequence
  Synthetic polypeptide
ETSLDNMVKPCFYKKIQKLARLGGACLKSQLLRKLRLSRLLLRLPALRLMNATITEELFFKGLIGNIRIDSVIPHILKMEPADYNSQIIGHSI

SEQ ID NO: 17008 - protein, 54 aa, Artificial Sequence
  Synthetic polypeptide
DQPGQHGETLFLQKNTKISPAWWRMPEVPATQKAEVIQTTTQIASFKTDECYHH

SEQ ID NO: 17009 - protein, 329 aa, Artificial Sequence
  Synthetic polypeptide
PTWRNPVSSKNGKINWAWWRMPVIPATREAEAGESLEPEMQTNGDVSRAFDTLAKALNPGESTACQSSVAGMEGSVHLITGDSSINYTEKEGPLLSDSHVAFRLTMPSPMPEYLNVHYIGESASRLLFLSMHWALSIPSFQALGQENSISLVKAYWNELFTLGLAQCWQVMNVATILATFVNCLHNSLQQDKMSTERRKLLMEHIFKLQEFCNSMVKLCIDGYEYAYLKAIVLFSPDHPSLENMEQIEKFQEKAYVEFQDYITKTYPDDTYRLSRLLLRLPALRLMNATITEELFFKGLIGNIRIDSVIPHILKMEPADYNSQIIGHSI

SEQ ID NO: 17010 - protein, 33 aa, Artificial Sequence
  Synthetic polypeptide
SQLLGRLRQENRLNPKCRPTVMFQGHLTLLQKH

SEQ ID NO: 17011 - protein, 7 aa, Artificial Sequence
  Synthetic polypeptide
TRNADQR

SEQ ID NO: 17012 - protein, 58 aa, Artificial Sequence
  Synthetic polypeptide
PTWRNPVSSKNGKINWAWWRMPVIPATREAEAGESLEPEMQTNGDVSSSPCLLLCLST

SEQ ID NO: 17013 - protein, 32 aa, Artificial Sequence
  Synthetic polypeptide
SQLLGRLRQENRLNPKCRPTVMFQAHHAFSYA

SEQ ID NO: 17014 - protein, 193 aa, Artificial Sequence
  Synthetic polypeptide
PTWRNPVSSKNGKINWAWWRMPVIPATREAEAGESLEPEMQTNGDVSRAFDTLAKALNPGESTACQSSVAGMEGSVHLITGDSSINYTEKEGPLLSDSHVAFRLTMPSPMPEYLNVHYIGESASRLLFLSMHWALSIPSFQALGQENSISLVKAYWNELFTLGLAQCWQVMNVATILATFVNCLHNSLQQAEG

SEQ ID NO: 17015 - protein, 209 aa, Artificial Sequence
  Synthetic polypeptide
PTWRNPVSSKNGKINWAWWRMPVIPATREAEAGESLEPEMQTNGDVSRAFDTLAKALNPGESTACQSSVAGMEGSVHLITGDSSINYTEKEGPLLSDSHVAFRLTMPSPMPEYLNVHYIGESASRLLFLSMHWALSIPSFQALGQENSISLVKAYWNELFTLGLAQCWQVMNVATILATFVNCLHNSLQQDAKVIAALIHFTRRAITDL

SEQ ID NO: 17016 - protein, 39 aa, Artificial Sequence
  Synthetic polypeptide
PTWRNPVSSKNGKINWAWWRMPVIPATREAEAGESLEPG

SEQ ID NO: 17017 - protein, 357 aa, Artificial Sequence
  Synthetic polypeptide
SQLLGRLRQENRLNPAESCQGDLSTLANVVTSLANLGKTKDLSQNSNEMSMIESLSNDDTSLCEFQEMQTNGDVSRAFDTLAKALNPGESTACQSSVAGMEGSVHLITGDSSINYTEKEGPLLSDSHVAFRLTMPSPMPEYLNVHYIGESASRLLFLSMHWALSIPSFQALGQENSISLVKAYWNELFTLGLAQCWQVMNVATILATFVNCLHNSLQQDKMSTERRKLLMEHIFKLQEFCNSMVKLCIDGYEYAYLKAIVLFSPDHPSLENMEQIEKFQEKAYVEFQDYITKTYPDDTYRLSRLLLRLPALRLMNATITEELFFKGLIGNIRIDSVIPHILKMEPADYNSQIIGHSI

SEQ ID NO: 17018 - protein, 9 aa, Artificial Sequence
  Synthetic polypeptide
TRLNHVREI

SEQ ID NO: 17019 - protein, 221 aa, Artificial Sequence
  Synthetic polypeptide
SQLLGRLRQENRLNPAESCQGDLSTLANVVTSLANLGKTKDLSQNSNEMSMIESLSNDDTSLCEFQEMQTNGDVSRAFDTLAKALNPGESTACQSSVAGMEGSVHLITGDSSINYTEKEGPLLSDSHVAFRLTMPSPMPEYLNVHYIGESASRLLFLSMHWALSIPSFQALGQENSISLVKAYWNELFTLGLAQCWQVMNVATILATFVNCLHNSLQQAEG

SEQ ID NO: 17020 - protein, 237 aa, Artificial Sequence
  Synthetic polypeptide
SQLLGRLRQENRLNPAESCQGDLSTLANVVTSLANLGKTKDLSQNSNEMSMIESLSNDDTSLCEFQEMQTNGDVSRAFDTLAKALNPGESTACQSSVAGMEGSVHLITGDSSINYTEKEGPLLSDSHVAFRLTMPSPMPEYLNVHYIGESASRLLFLSMHWALSIPSFQALGQENSISLVKAYWNELFTLGLAQCWQVMNVATILATFVNCLHNSLQQDAKVIAALIHFTRRAITDL

SEQ ID NO: 17021 - protein, 9 aa, Artificial Sequence
  Synthetic polypeptide
PTWRNPVSS

SEQ ID NO: 17022 - protein, 372 aa, Artificial Sequence
  Synthetic polypeptide
SQHFGRPRHMDRLRSEVQDQPDQHGETPSPAESCQGDLSTLANVVTSLANLGKTKDLSQNSNEMSMIESLSNDDTSLCEFQEMQTNGDVSRAFDTLAKALNPGESTACQSSVAGMEGSVHLITGDSSINYTEKEGPLLSDSHVAFRLTMPSPMPEYLNVHYIGESASRLLFLSMHWALSIPSFQALGQENSISLVKAYWNELFTLGLAQCWQVMNVATILATFVNCLHNSLQQDKMSTERRKLLMEHIFKLQEFCNSMVKLCIDGYEYAYLKAIVLFSPDHPSLENMEQIEKFQEKAYVEFQDYITKTYPDDTYRLSRLLLRLPALRLMNATITEELFFKGLIGNIRIDSVIPHILKMEPADYNSQIIGHSI

SEQ ID NO: 17023 - protein, 24 aa, Artificial Sequence
  Synthetic polypeptide
GQKFKTSLTNMEKPRLQLNHVREI

SEQ ID NO: 17024 - protein, 236 aa, Artificial Sequence
  Synthetic polypeptide
SQHFGRPRHMDRLRSEVQDQPDQHGETPSPAESCQGDLSTLANVVTSLANLGKTKDLSQNSNEMSMIESLSNDDTSLCEFQEMQTNGDVSRAFDTLAKALNPGESTACQSSVAGMEGSVHLITGDSSINYTEKEGPLLSDSHVAFRLTMPSPMPEYLNVHYIGESASRLLFLSMHWALSIPSFQALGQENSISLVKAYWNELFTLGLAQCWQVMNVATILATFVNCLHNSLQQAEG

SEQ ID NO: 17025 - protein, 252 aa, Artificial Sequence
  Synthetic polypeptide
SQHFGRPRHMDRLRSEVQDQPDQHGETPSPAESCQGDLSTLANVVTSLANLGKTKDLSQNSNEMSMIESLSNDDTSLCEFQEMQTNGDVSRAFDTLAKALNPGESTACQSSVAGMEGSVHLITGDSSINYTEKEGPLLSDSHVAFRLTMPSPMPEYLNVHYIGESASRLLFLSMHWALSIPSFQALGQENSISLVKAYWNELFTLGLAQCWQVMNVATILATFVNCLHNSLQQDAKVIAALIHFTRRAITDL

SEQ ID NO: 17026 - protein, 41 aa, Artificial Sequence
  Synthetic polypeptide
GWAQWLTSVIPALWEAEAHGSLEKCRPTVMFQGHLTLLQKH

SEQ ID NO: 17027 - protein, 19 aa, Artificial Sequence
  Synthetic polypeptide
SQHFGRPRHMDRLRNADQR

SEQ ID NO: 17028 - protein, 40 aa, Artificial Sequence
  Synthetic polypeptide
GWAQWLTSVIPALWEAEAHGSLEKCRPTVMFQAHHAFSYA

SEQ ID NO: 17029 - protein, 365 aa, Artificial Sequence
  Synthetic polypeptide
GWAQWLTSVIPALWEAEAHGSLEAESCQGDLSTLANVVTSLANLGKTKDLSQNSNEMSMIESLSNDDTSLCEFQEMQTNGDVSRAFDTLAKALNPGESTACQSSVAGMEGSVHLITGDSSINYTEKEGPLLSDSHVAFRLTMPSPMPEYLNVHYIGESASRLLFLSMHWALSIPSFQALGQENSISLVKAYWNELFTLGLAQCWQVMNVATILATFVNCLHNSLQQDKMSTERRKLLMEHIFKLQEFCNSMVKLCIDGYEYAYLKAIVLFSPDHPSLENMEQIEKFQEKAYVEFQDYITKTYPDDTYRLSRLLLRLPALRLMNATITEELFFKGLIGNIRIDSVIPHILKMEPADYNSQIIGHSI

SEQ ID NO: 17030 - protein, 21 aa, Artificial Sequence
  Synthetic polypeptide
SQHFGRPRHMDRLRLNHVREI

SEQ ID NO: 17031 - protein, 229 aa, Artificial Sequence
  Synthetic polypeptide
GWAQWLTSVIPALWEAEAHGSLEAESCQGDLSTLANVVTSLANLGKTKDLSQNSNEMSMIESLSNDDTSLCEFQEMQTNGDVSRAFDTLAKALNPGESTACQSSVAGMEGSVHLITGDSSINYTEKEGPLLSDSHVAFRLTMPSPMPEYLNVHYIGESASRLLFLSMHWALSIPSFQALGQENSISLVKAYWNELFTLGLAQCWQVMNVATILATFVNCLHNSLQQAEG

SEQ ID NO: 17032 - protein, 245 aa, Artificial Sequence
  Synthetic polypeptide
GWAQWLTSVIPALWEAEAHGSLEAESCQGDLSTLANVVTSLANLGKTKDLSQNSNEMSMIESLSNDDTSLCEFQEMQTNGDVSRAFDTLAKALNPGESTACQSSVAGMEGSVHLITGDSSINYTEKEGPLLSDSHVAFRLTMPSPMPEYLNVHYIGESASRLLFLSMHWALSIPSFQALGQENSISLVKAYWNELFTLGLAQCWQVMNVATILATFVNCLHNSLQQDAKVIAALIHFTRRAITDL

SEQ ID NO: 17033 - protein, 21 aa, Artificial Sequence
  Synthetic polypeptide
KVIPSKSKMELNNLNDEPSLC

SEQ ID NO: 17034 - protein, 433 aa, Artificial Sequence
  Synthetic polypeptide
MMSPRCANLALKHYLLKPVQRIPQYRLLLTDYLKNLIEDAGDYRDTQDALAVVIEVANHANDTMKQGDNFQKLMQIQYSLNGHHEIVQPGRVFLKEGILMKLSRKVMQPRMFFLFNDALLYTTPVQSGMYKLNNMLSLAGMKVRKPTQEAYQNELKIESVERSFILSASSATERDEWLEAISRAIEEYAKKRITFCPSRSLDEADSENKEEVSPLGSKAPIWIPDTRATMCMICTSEFTLTWRRHHCRACGKIVCQACSSNKYGLDYLKNQPARVCEHCFQELQKLDHQHSPRIGSPGNHKSPSSALSSVLHSIPSGRKQKKIPAALKEVSANTEDSSMSGYLYRSKGNKKPWKHFWFVIKNKVLYTYAASEDVAALESQPLLGFTVIQVKDENSESKVFQLLHKNMLFYVFKAEDAHSAQKWIEAFQEGTIL

SEQ ID NO: 17035 - protein, 377 aa, Artificial Sequence
  Synthetic polypeptide
MMSPRCANLALKHYLLKPVQRIPQYRLLLTDYLKNLIEDAGDYRDTQDALAVVIEVANHANDTMKQGDNFQKLMQIQYSLNGHHEIVQPGRVFLKEGILMKLSRKVMQPRMFFLFNDALLYTTPVQSGMYKLNNMLSLAGMKVRKPTQEAYQNELKIESVERSFILSASSATERDEWLEAISRAIEEYAKKRITFCPSRSLDEADSENKEEVSPLGSKAPIWIPDTRATMCMICTSEFTLTWRRHHCRACGKIVCQACSSNKYGLDYLKNQPARVCEHCFQELQKLDHQHSPRIGSPGNHKSPSSALSSVLHSIPSGRKQKKIPAALKEVSANTEDSSMSGYLYRSKGNKKPWKHFWFVIKNKVLYTYAASEVRSEI

SEQ ID NO: 17036 - protein, 209 aa, Artificial Sequence
  Synthetic polypeptide
MMSPRCANLALKHYLLKPVQRIPQYRLLLTDYLKNLIEDAGDYRDTQDALAVVIEVANHANDTMKQGDNFQKLMQIQYSLNGHHEIVQPGRVFLKEGILMKLSRKVMQPRMFFLFNDALLYTTPVQSGMYKLNNMLSLAGMKVRKPTQEAYQNELKIESVERSFILSASSATERDEWLEAISRAIEEYAKKRITFCPSRSLDEADSENK

SEQ ID NO: 17037 - protein, 650 aa, Artificial Sequence
  Synthetic polypeptide
GQAWWLIPVISALWEAEAGGLLEPRSSRPAWATCSGASQEEQNDLGLGDLPSDEEEIINSSDEDDVSSESSKGEPDPLEDKQDEDNGMKSKVHHIAKEIMSSEKVFVDVLKLLHIDFRDAVAHASRQLGKPVIEDRILNQILYYLPQLYELNRDLLKELEERMLHWTEQQRIADIFVKKGPYLKMYSTYIKEFDKNIALLDEQCKKNPGFAAVVREFEMSPRCANLALKHYLLKPVQRIPQYRLLLTDYLKNLIEDAGDYRDTQDALAVVIEVANHANDTMKQGDNFQKLMQIQYSLNGHHEIVQPGRVFLKEGILMKLSRKVMQPRMFFLFNDALLYTTPVQSGMYKLNNMLSLAGMKVRKPTQEAYQNELKIESVERSFILSASSATERDEWLEAISRAIEEYAKKRITFCPSRSLDEADSENKEEVSPLGSKAPIWIPDTRATMCMICTSEFTLTWRRHHCRACGKIVCQACSSNKYGLDYLKNQPARVCEHCFQELQKLDHQHSPRIGSPGNHKSPSSALSSVLHSIPSGRKQKKIPAALKEVSANTEDSSMSGYLYRSKGNKKPWKHFWFVIKNKVLYTYAASEDVAALESQPLLGFTVIQVKDENSESKVFQLLHKNMLFYVFKAEDAHSAQKWIEAFQEGTIL

SEQ ID NO: 17038 - protein, 78 aa, Artificial Sequence
  Synthetic polypeptide
SQHFGRPRQEDCSSPGVRDQPGQHVQEHPRRNRMILVLVTFPLMRRKSSTVLMKMMSALSQVKESLTHWKINRMKIME

SEQ ID NO: 17039 - protein, 42 aa, Artificial Sequence
  Synthetic polypeptide
PGMVAHTCNLSTLGGRGRRIARAQEFETSLGNMFRSIPGGTE

SEQ ID NO: 17040 - protein, 88 aa, Artificial Sequence
  Synthetic polypeptide
GQAWWLIPVISALWEAEAGGLLEPRSSRPAWATCSGASQEEQNDLGLGDLPSDEEEIINSSDEDDVSSESSKGEPDPLEDKQDEDNGM

SEQ ID NO: 17041 - protein, 594 aa, Artificial Sequence
  Synthetic polypeptide
GQAWWLIPVISALWEAEAGGLLEPRSSRPAWATCSGASQEEQNDLGLGDLPSDEEEIINSSDEDDVSSESSKGEPDPLEDKQDEDNGMKSKVHHIAKEIMSSEKVFVDVLKLLHIDFRDAVAHASRQLGKPVIEDRILNQILYYLPQLYELNRDLLKELEERMLHWTEQQRIADIFVKKGPYLKMYSTYIKEFDKNIALLDEQCKKNPGFAAVVREFEMSPRCANLALKHYLLKPVQRIPQYRLLLTDYLKNLIEDAGDYRDTQDALAVVIEVANHANDTMKQGDNFQKLMQIQYSLNGHHEIVQPGRVFLKEGILMKLSRKVMQPRMFFLFNDALLYTTPVQSGMYKLNNMLSLAGMKVRKPTQEAYQNELKIESVERSFILSASSATERDEWLEAISRAIEEYAKKRITFCPSRSLDEADSENKEEVSPLGSKAPIWIPDTRATMCMICTSEFTLTWRRHHCRACGKIVCQACSSNKYGLDYLKNQPARVCEHCFQELQKLDHQHSPRIGSPGNHKSPSSALSSVLHSIPSGRKQKKIPAALKEVSANTEDSSMSGYLYRSKGNKKPWKHFWFVIKNKVLYTYAASEVRSEI

SEQ ID NO: 17042 - protein, 426 aa, Artificial Sequence
  Synthetic polypeptide
GQAWWLIPVISALWEAEAGGLLEPRSSRPAWATCSGASQEEQNDLGLGDLPSDEEEIINSSDEDDVSSESSKGEPDPLEDKQDEDNGMKSKVHHIAKEIMSSEKVFVDVLKLLHIDFRDAVAHASRQLGKPVIEDRILNQILYYLPQLYELNRDLLKELEERMLHWTEQQRIADIFVKKGPYLKMYSTYIKEFDKNIALLDEQCKKNPGFAAVVREFEMSPRCANLALKHYLLKPVQRIPQYRLLLTDYLKNLIEDAGDYRDTQDALAVVIEVANHANDTMKQGDNFQKLMQIQYSLNGHHEIVQPGRVFLKEGILMKLSRKVMQPRMFFLFNDALLYTTPVQSGMYKLNNMLSLAGMKVRKPTQEAYQNELKIESVERSFILSASSATERDEWLEAISRAIEEYAKKRITFCPSRSLDEADSENK

SEQ ID NO: 17043 - protein, 39 aa, Artificial Sequence
  Synthetic polypeptide
MDMVAHTCNPSTLRGQGSRALARSQWHALELPSLQNYEL

SEQ ID NO: 17044 - protein, 25 aa, Artificial Sequence
  Synthetic polypeptide
EAKAAEPLLEASGMLLNFPACRTMS

SEQ ID NO: 17045 - protein, 13 aa, Artificial Sequence
  Synthetic polypeptide
SQHFERPRQQSPC

SEQ ID NO: 17046 - protein, 11 aa, Artificial Sequence
  Synthetic polypeptide
VQGSLNAICLH

SEQ ID NO: 17047 - protein, 639 aa, Artificial Sequence
  Synthetic polypeptide
KNEFRDLSMLFAFISLLVMLPTWWIVSSWLVWGVILFVYLVIRALRLWRTAKLQVTLKKYSVHLEDMATNSRAFTNLVRKALRLIQETEVISRGFTLVSAACPFNKAGQHPSQHLIGLRKAVYRTLRANFQAARLATLYMLKNYPLNSESDNVTNYICVVPFKELGLGLSEEQISEEEAHNFTDGFSLPALKVLFQLWVAQSSEFFRRLALLLSTANSPPGPLLTPALLPHRILSDVTQGLPHAHSACLEELKRSYEFYRYFETQHQSVPQCLSKTQQKSRELNNVHTAVRSLQLHLKALLNEVIILEDELEKLVCTKETQELVSEAYPILEQKLKLIQPHVQASNNCWEEAISQVDKLLRRNTDKKGKPEIACENPHCTVVPLKQPTLHIADKDPIPEEQELEAYVDDIDIDSDFRKDDFYYLSQEDKERQKREHEESKRVLQELKSVLGFKASEAERQKWKQLLFSDHAVLKSLSPVDPVEPISNSEPSMNSDMGKVSKNDTEEESNKSATTDNEISRTEYLCENSLEGKNKDNSSNEVFPQGAEERMCYQCESEDEPQADGSGLTTAPPTPRDSLQPSIKQRLARLQLSPDFTFTAGLAAEVAARSLSFTTMQEQTFGGEEEEQIIEENKNEIEEK

SEQ ID NO: 17048 - protein, 42 aa, Artificial Sequence
  Synthetic polypeptide
QNPISTKHEKMSSGISQCYLPSLACSLCFPLGGLCLPGWYGE

SEQ ID NO: 17049 - protein, 14 aa, Artificial Sequence
  Synthetic polypeptide
KNEFRDLSMLFAFI

SEQ ID NO: 17050 - protein, 23 aa, Artificial Sequence
  Synthetic polypeptide
QNPISTKHEKMSSGISQCYLPSL

SEQ ID NO: 17051 - protein, 49 aa, Artificial Sequence
  Synthetic polypeptide
KNEFRDLSMLFAFISLLVMLPTWWIVSSWLVWGVILFVYLVIRALRLWR

SEQ ID NO: 17052 - protein, 30 aa, Artificial Sequence
  Synthetic polypeptide
KNEFRDLSMLFAFISLLVMLPTWWIVSSWL

SEQ ID NO: 17053 - protein, 38 aa, Artificial Sequence
  Synthetic polypeptide
QNPISTKHEKMSSGISQCYLPSLACSLCFPLGGLCLPG

SEQ ID NO: 17054 - protein, 21 aa, Artificial Sequence
  Synthetic polypeptide
KNEFRDLSMLFAFISLLVMLP

SEQ ID NO: 17055 - protein, 30 aa, Artificial Sequence
  Synthetic polypeptide
QNPISTKHEKMSSGISQCYLPSLACSLCFP

SEQ ID NO: 17056 - protein, 36 aa, Artificial Sequence
  Synthetic polypeptide
KNEFRDLSMLFAFISLLVMLPTWWIVSSWLVWGVIL

SEQ ID NO: 17057 - protein, 631 aa, Artificial Sequence
  Synthetic polypeptide
KNEFRDLSMLFAFISLLVMLPTWWIVSSWLVWGVILFVYLVIRALRLWRTAKLQVTLKKYSVHLEDMATNSRAFTNLVRKALRLIQETEVISRGFTLLLDRVSAACPFNKAGQHPSQHLIGLRKAVYRTLRANFQAARLATLYMLKNYPLNSESDNVTNYICVVPFKELGLGLSEEQISEEEAHNFTDGFSLPALKVLFQLWVAQSSEFFRRLALLLSTANSPPGPLLTPALLPHRILSDVTQGLPHAHSACLEELKRSYEFYRYFETQHQSVPQCLSKTQQKSRELNNVHTAVRSLQLHLKALLNEVIILEDELEKLVCTKETQELVSEAYPILEQKLKLIQPHVQASNNCWEEAISQVDKLLRRNTDKKGKPEIACENPHCTVVPLKQPTLHIADKDPIPEEQELEAYVDDIDIDSDFRKDDFYYLSQEDKERQKREHEESKRVLQELKSVLGFKASEAERQKWKQLLFSDHAVLKSLSPVDPVEPISNSEPSMNSDMGKVSKNDTEEESNKSATTDNEISRTEYLCENSLEGKNKDNSSNEVFPQGAEERMCYQCESEDEPQADGSGLTTAPPTPRDSLQPSIKQRLARLQLSPDFTFTAGLAAEVAARSLSFTTMQEQTFGGEEEEQ

SEQ ID NO: 17058 - protein, 76 aa, Artificial Sequence
  Synthetic polypeptide
SQDFFRHKEAKKKKKKVFHQQICIEGNPSDRRKMIPDGYLDLQKGMKIIKKEKLFSKLCHHHTIQRTLTVPKFRSS

SEQ ID NO: 17059 - protein, 50 aa, Artificial Sequence
  Synthetic polypeptide
RSSKRKSYFQSFVTTIRYREPLQCQSSGAAEDHQPSRAAAETTVLSLSEK

SEQ ID NO: 17060 - protein, 461 aa, Artificial Sequence
  Synthetic polypeptide
RKSFRQKKNDTRWISGPTKRNEDHQKGKVIFKALSPPYDTENPYSAKVQEQLKITNLRVQLLKRQSCPCQRNDLNEEPQHFTHYAIYDFIVKGSCFCNGHADQCIPVHGFRPVKAPGTFHMVHGKCMCKHNTAGSHCQHCAPLYNDRPWEAADGKTGAPNECRTCKCNGHADTCHFDVNVWEASGNRSGGVCDDCQHNTEGQYCQRCKPGFYRDLRRPFSAPDACKPCSCHPVGSAVLPANSVTFCDPSNGDCPCKPGVAGRRCDRCMVGYWGFGDYGCRPCDCAGSCDPITGDCISSHTDIDWYHEVPDFRPVHNKSEPAWEWEDAQGFSALLHSGKCECKEQTLGNAKAFCGMKYSYVLKIKILSAHDKGTHVEVNVKIKKVLKSTKLKIFRGKRTLYPESWTDRGCTCPILNPGLEYLVAGHEDIRTGKLIVNMKSFVQHWKPSLGRKVMDILKRECK

SEQ ID NO: 17061 - protein, 438 aa, Artificial Sequence
  Synthetic polypeptide
RKSFRQKKNDTRWISGPTKRNEDHQKGKVIFKALSPPYDTENPYSAKVQEQLKITNLRVQLLKRQSCPCQRNDLNEEPQHFTHYAIYDFIVKGSCFCNGHADQCIPVHGFRPVKAPGTFHMVHGKCMCKHNTAGSHCQHCAPLYNDRPWEAADGKTGAPNECRTCKCNGHADTCHFDVNVWEASGNRSGGVCDDCQHNTEGQYCQRCKPGFYRDLRRPFSAPDACKPCSCHPVGSAVLPANSVTFCDPSNGDCPCKPGVAGRRCDRCMVGYWGFGDYGCRPCDCAGSCDPITGDCISSHTDIDWYHEVPDFRPVHNKSEPAWEWEDAQGFSALLHSVLKIKILSAHDKGTHVEVNVKIKKVLKSTKLKIFRGKRTLYPESWTDRGCTCPILNPGLEYLVAGHEDIRTGKLIVNMKSFVQHWKPSLGRKVMDILKRECK

SEQ ID NO: 17062 - protein, 71 aa, Artificial Sequence
  Synthetic polypeptide
SQDFFRHKEAKKKKKKVFHQQICIEGNPSDRRKMIPDGYLDLQKGMKIIKKEKLFSKLCHHHTIQRTLTVP

SEQ ID NO: 17063 - protein, 25 aa, Artificial Sequence
  Synthetic polypeptide
RSSKRKSYFQSFVTTIRYREPLQCQ

SEQ ID NO: 17064 - protein, 46 aa, Artificial Sequence
  Synthetic polypeptide
RKSFRQKKNDTRWISGPTKRNEDHQKGKVIFKALSPPYDTENPYSA

SEQ ID NO: 17065 - protein, 443 aa, Artificial Sequence
  Synthetic polypeptide
WTVYLLTSCLVIFKALSPPYDTENPYSAKVQEQLKITNLRVQLLKRQSCPCQRNDLNEEPQHFTHYAIYDFIVKGSCFCNGHADQCIPVHGFRPVKAPGTFHMVHGKCMCKHNTAGSHCQHCAPLYNDRPWEAADGKTGAPNECRTCKCNGHADTCHFDVNVWEASGNRSGGVCDDCQHNTEGQYCQRCKPGFYRDLRRPFSAPDACKPCSCHPVGSAVLPANSVTFCDPSNGDCPCKPGVAGRRCDRCMVGYWGFGDYGCRPCDCAGSCDPITGDCISSHTDIDWYHEVPDFRPVHNKSEPAWEWEDAQGFSALLHSGKCECKEQTLGNAKAFCGMKYSYVLKIKILSAHDKGTHVEVNVKIKKVLKSTKLKIFRGKRTLYPESWTDRGCTCPILNPGLEYLVAGHEDIRTGKLIVNMKSFVQHWKPSLGRKVMDILKRECK

SEQ ID NO: 17066 - protein, 27 aa, Artificial Sequence
  Synthetic polypeptide
LLVLLFSKLCHHHTIQRTLTVPKFRSS

SEQ ID NO: 17067 - protein, 53 aa, Artificial Sequence
  Synthetic polypeptide
DCLPPDFLSCYFQSFVTTIRYREPLQCQSSGAAEDHQPSRAAAETTVLSLSEK

SEQ ID NO: 17068 - protein, 420 aa, Artificial Sequence
  Synthetic polypeptide
WTVYLLTSCLVIFKALSPPYDTENPYSAKVQEQLKITNLRVQLLKRQSCPCQRNDLNEEPQHFTHYAIYDFIVKGSCFCNGHADQCIPVHGFRPVKAPGTFHMVHGKCMCKHNTAGSHCQHCAPLYNDRPWEAADGKTGAPNECRTCKCNGHADTCHFDVNVWEASGNRSGGVCDDCQHNTEGQYCQRCKPGFYRDLRRPFSAPDACKPCSCHPVGSAVLPANSVTFCDPSNGDCPCKPGVAGRRCDRCMVGYWGFGDYGCRPCDCAGSCDPITGDCISSHTDIDWYHEVPDFRPVHNKSEPAWEWEDAQGFSALLHSVLKIKILSAHDKGTHVEVNVKIKKVLKSTKLKIFRGKRTLYPESWTDRGCTCPILNPGLEYLVAGHEDIRTGKLIVNMKSFVQHWKPSLGRKVMDILKRECK

SEQ ID NO: 17069 - protein, 28 aa, Artificial Sequence
  Synthetic polypeptide
WTVYLLTSCLVIFKALSPPYDTENPYSA

SEQ ID NO: 17070 - protein, 22 aa, Artificial Sequence
  Synthetic polypeptide
LLVLLFSKLCHHHTIQRTLTVP

SEQ ID NO: 17071 - protein, 28 aa, Artificial Sequence
  Synthetic polypeptide
DCLPPDFLSCYFQSFVTTIRYREPLQCQ

SEQ ID NO: 17072 - protein, 58 aa, Artificial Sequence
  Synthetic polypeptide
LSPPACIFLPCWMLPALKHCLQLWDSDWLPCSSACRRPIVGPHLVIVTEWSSWSEFPL

SEQ ID NO: 17073 - protein, 46 aa, Artificial Sequence
  Synthetic polypeptide
SSSLHLSPMLDASCPQTLSSALGLGLASLLLSLQTAYCGTSPCDCD

SEQ ID NO: 17074 - protein, 22 aa, Artificial Sequence
  Synthetic polypeptide
GAPLPGRDPVWERWIYKSYWSC

SEQ ID NO: 17075 - protein, 407 aa, Artificial Sequence
  Synthetic polypeptide
DVGSASAPPPHLGCEERLCPAETPSGRDGFIKAIGPADVIQRQFSGETFEEIIDCSGKCILPGLVDAHTHPVWAGERVHEFAMKLAGATYMEIHQAGGGIHFTVERTRQATEEELFRSLQQRLQCMMRAGTTLVECKSGYGLDLETELKMLRVIERARRELDIGISATYCGAHSVPKGKTATEAADDIINNHLPKLKELGRNGEIHVDNIDVFCEKGVFDLDSTRRILQRGKDIGLQINFHGDELHPMKAAELGAELGAQAISHLEEVSDEGIVAMATARCSAILLPTTAYMLRLKQPRARKMLDEGVIVALGSDFNPNAYCFSMPMVMHLACVNMRMSMPEALAAATINAAYALGKSHTHGSLEVGKQGDLIIINSSRWEHLIYQFGGHHELIEYVIAKGKLIYKT

SEQ ID NO: 17076 - protein, 41 aa, Artificial Sequence
  Synthetic polypeptide
RASLPGRPSSEMWGAPLPRRPIWDVRSASARPRPRLGEMDL

SEQ ID NO: 17077 - protein, 132 aa, Artificial Sequence
  Synthetic polypeptide
DVGSASAPPPHLGCEERLCPAETPSGRDGFIKAIGPADVIQRQFSGETFEEIIDCSGKCILPVGRSHLHGNSPGRRRDPLYRGAHAPSHRGGAVPLLAATAPVHDEGWHHAGGVQEWIWPRPGDRAQDAARD

SEQ ID NO: 17078 - protein, 11 aa, Artificial Sequence
  Synthetic polypeptide
ERWIYKSYWSC

SEQ ID NO: 17079 - protein, 408 aa, Artificial Sequence
  Synthetic polypeptide
EVRRPSAWQPPRLRSEEPLRPAAAPSEKDGFIKAIGPADVIQRQFSGETFEEIIDCSGKCILPGLVDAHTHPVWAGERVHEFAMKLAGATYMEIHQAGGGIHFTVERTRQATEEELFRSLQQRLQCMMRAGTTLVECKSGYGLDLETELKMLRVIERARRELDIGISATYCGAHSVPKGKTATEAADDIINNHLPKLKELGRNGEIHVDNIDVFCEKGVFDLDSTRRILQRGKDIGLQINFHGDELHPMKAAELGAELGAQAISHLEEVSDEGIVAMATARCSAILLPTTAYMLRLKQPRARKMLDEGVIVALGSDFNPNAYCFSMPMVMHLACVNMRMSMPEALAAATINAAYALGKSHTHGSLEVGKQGDLIIINSSRWEHLIYQFGGHHELIEYVIAKGKLIYKT

SEQ ID NO: 17080 - protein, 18 aa, Artificial Sequence
  Synthetic polypeptide
EVRSPSARQLPRLRKMDL

SEQ ID NO: 17081 - protein, 133 aa, Artificial Sequence
  Synthetic polypeptide
EVRRPSAWQPPRLRSEEPLRPAAAPSEKDGFIKAIGPADVIQRQFSGETFEEIIDCSGKCILPVGRSHLHGNSPGRRRDPLYRGAHAPSHRGGAVPLLAATAPVHDEGWHHAGGVQEWIWPRPGDRAQDAARD

SEQ ID NO: 17082 - protein, 87 aa, Artificial Sequence
  Synthetic polypeptide
EVRSLSARQPPHLGSEERLRPAATPSGREVGGVSPLPGQPPHPGGRWGVSPPARTAVPSRREVGGSAPRPASRPVRERWIYKSYWSC

SEQ ID NO: 17083 - protein, 455 aa, Artificial Sequence
  Synthetic polypeptide
GASPPGSHPIWEVRSVSDRQPPRPGGRWGGSAPCPASRPIREGGGGSAPPPGQPCRPGGRWGGQPPARPAAPSGRDGFIKAIGPADVIQRQFSGETFEEIIDCSGKCILPGLVDAHTHPVWAGERVHEFAMKLAGATYMEIHQAGGGIHFTVERTRQATEEELFRSLQQRLQCMMRAGTTLVECKSGYGLDLETELKMLRVIERARRELDIGISATYCGAHSVPKGKTATEAADDIINNHLPKLKELGRNGEIHVDNIDVFCEKGVFDLDSTRRILQRGKDIGLQINFHGDELHPMKAAELGAELGAQAISHLEEVSDEGIVAMATARCSAILLPTTAYMLRLKQPRARKMLDEGVIVALGSDFNPNAYCFSMPMVMHLACVNMRMSMPEALAAATINAAYALGKSHTHGSLEVGKQGDLIIINSSRWEHLIYQFGGHHELIEYVIAKGKLIYKT

SEQ ID NO: 17084 - protein, 65 aa, Artificial Sequence
  Synthetic polypeptide
GASPTGSHPVREGGGGGQPPARPAAPSGREVGGQPPRPDSRAVQEGGGGVSPPPGQPPRPGEMDL

SEQ ID NO: 17085 - protein, 180 aa, Artificial Sequence
  Synthetic polypeptide
GASPPGSHPIWEVRSVSDRQPPRPGGRWGGSAPCPASRPIREGGGGSAPPPGQPCRPGGRWGGQPPARPAAPSGRDGFIKAIGPADVIQRQFSGETFEEIIDCSGKCILPVGRSHLHGNSPGRRRDPLYRGAHAPSHRGGAVPLLAATAPVHDEGWHHAGGVQEWIWPRPGDRAQDAARD

SEQ ID NO: 17086 - protein, 409 aa, Artificial Sequence
  Synthetic polypeptide
RTWKPTNITEMQIGPRTLVWSEKEQVEKSAYEFSETESMLKIAEDLGGPYVWGQYDLLVLPPSFPYGGMENPCLTFVTPTLLAGDKSLSNVIAHEISHSWTGNLVTNKTWDHFWLNEGHTVYLERHICGRLFGEKFRHFNALGGWGELQNSVKTFGETHPFTKLVVDLTDIDPDVAYSSVPYEKGFALLFYLEQLLGGPEIFLGFLKAYVEKFSYKSITTDDWKDFLYSYFKDKVDVLNQVDWNAWLYSPGLPPIKPNYDMTLTNACIALSQRWITAKEDDLNSFNATDLKDLSSHQLNEFLAQTLQRAPLPLGHIKRMQEVYNFNAINNSEIRFRWLRLCIQSKWEDAIPLALKMATEQGRMKFTRPLFKDLAAFDKSHDQAVRTYQEHKASMHPVTAMLVGKDLKVD

SEQ ID NO: 17087 - protein, 61 aa, Artificial Sequence
  Synthetic polypeptide
CLTFYLIGWLCETNEIKYIKELGSLQILQKCKLAQELWCGLRKSRWKSLLMSFLRLNLCLK

SEQ ID NO: 17088 - protein, 24 aa, Artificial Sequence
  Synthetic polypeptide
NILKNLEAYKYYRNANWPKNFGVV

SEQ ID NO: 17089 - protein, 330 aa, Artificial Sequence
  Synthetic polypeptide
RTWKPTNITEMQIGPRTLVWSEKEQVEKSAYEFSETESMLKIAEDLGGPYVWGQYDLLVLPPSFPYGGMENPCLTFVTPTLLAGDKSLSNVIAHEISHSWTGNLVTNKTWDHFWLNEGHTVYLERHICGRLFGEKFRHFNALGGWGELQNSVKTFGETHPFTKLVVDLTDIDPDVAYSSVPYEKGFALLFYLEQLLGGPEIFLGFLKAYVEKFSYKSITTDDWKDFLYSYFKDKVDVLNQVDWNAWLYSPGLPPIKPNYDMTLTNACIALSQRWITAKEDDLNSFNATDLKDLSSHQLNEFLAQTLQRMAAALHSIQVGGRNSFGAKDGN

SEQ ID NO: 17090 - protein, 22 aa, Artificial Sequence
  Synthetic polypeptide
PHGTFCRLQLLAKIFLPRVRKS

SEQ ID NO: 17091 - protein, 14 aa, Artificial Sequence
  Synthetic polypeptide
GFISHMELFADSNC

SEQ ID NO: 17092 - protein, 2334 aa, Artificial Sequence
  Synthetic polypeptide
WFYKRSSPPQVLSLPTAIHVRCDLFLFAFCHDCEASLATWNFLQTPTVSKDISTKGPEKLKQSGSTDCFTELNIMNKIKKNTLSKAIYLMQKALLIFEKDATSTSSWELLMEAYSLIQRIEAEQNALYSYQKYLESSKRKKSRVPPPPILLSRTHCSVTLKPAPFTSEVKVSWYCILGCKAEGSYGKVRLNNNHLPNSGEAIPADGKSVFEVKGLETNEKYVFAVAAYSNNGKLVGGAIGETTKPILVYPPLSTITARMFLTQVAYQVGNYELAKKVFSPVWDYFVASPLQDEQSVICLSNIITITQRRLHSDILAETSSILLYLFLRNIFVTSDIKIKEENLFCDNIKGNEIFPSQQIARLIECERVLVALELSNFLNDSSYALQAVTQCYGLLAPIIYHNIVLVPVVQILIKCIVVLQGLPSIVCSKKHTASFESIQHMIACCIFYITKILRSWREYDLAVMIINYGKKMLDITPGCKSLFDGSNEQEEMPEEDSSKKSLKTKKPQQILLPEKINEQLALLETHLLKLTKQYVTSELSGGEDPIFLYPVVLNWSVKGAVKEVMKFKQKPRFLEFFTQVMLKCMNEEKFHLMVEVTTPVHDFLKRRNESLLGLIKVKYKDSALNKKANKSLKFKAAVMEIGRSAEMQQRIRSKKKETLRDFIFKNPAISEMVAHERNRRTSVRKAAQRYLMDYLNPLILSYVKRKRFHRLSLEEMPWRAQMNLYLAGAHFNLVLQKLWECTKMKFGTSHMMVSFRSCDPNMFSLYNSGTVLPTRKLTVENYKAMLDFLLTAKKRKANLPSDAEEFSTFINSIMSDENMSKTQTVYDSDSQSGSSAKEKDRGANLCVMDHFMKIFLYCRRAMVLAHRGGYWTLLQNCCRALWNFTQELQILLKQAVDLDKTFPISQDGFLCTSVLPFYLGAELLIDMLIQLQNTSSIKPIEDKGEFSVPSCYGNIKNDNGGSSLTFEHPLDDVNVVDLKWIHDFVLKSLEVLYQVEKWETLVSLAIQFNTVSHERYTEQVTPLLVYAQRQLLLRIQKFKGPDITQQPCARYEAEYGEKITCRNFIGKQLKINSSTIEATSNCTDLLKMLISSEYSRAKALVCVPVDVTDTLRCFRETLEKSKYHNRSIRHSRKLLSLFLAQTQDVLQASNQRSLKVQALHSLGSLLIFAEKKRAAFKCWCQALDDIFRKPDVLHTWKEFGPSLTNVTNSHSPPGFKDYSEEFLSRVGIWGCLQGAVISAKIAQFIKSLNVEKKTDCCILSALLFQGLLRTTLPHPKAERCYAQYEITQLLPGIELFSDRYRADICSVIASLYYIIRELHFVRQNLIVLPLLALYQYFVSGICQDITRNLEARILKIEVLIDLRFFSEAFYEISQIFYGKNMPCPIPAGYKATGKMKIFQSFDSGKLLTSKENIQAIDELRNKGLPAVLVTIGQPHLLNKFNFVKAYFFLSVAATINCVPENKFKTVITNKSKPNLPNLEEIYSKDDGSSFYNLTKLKDEITLSMLKSMLLMEAEDRLNFLLSEVEQKTLSQCSAGELEIVVEARLQLAAVALQRHRAAYSAAIVFSTLTLLQDSKLFEKKVVQDDTENPVSPGTSVTENKDDSEFLDPISLNAREYFNIHLWLRCRLALVTAFVAQIHGIGIVKEDDMTDCLSLINEVCMEAKSAGDTELQAEFLTQAVILGLQEKHLKADIMTNLQDIIHLLEGNEFISPQSRLTLARSLVLLDDLTKAEKFKESPSSKTGKLNLLTRAHSILTEQMLAFGETIEFRSSNTKYANPLQPLKNIYLPHVMLLAKIKMRIGHTVAKQVYYKNKRKDPSKWLPALHLFDVALKLCRTTAVEEHEVEAEILFQKGKIERQILMEEKSPSFQLESLYEAIQLSLKNDQNSGLIRDSYLEMALLYFHLKKPKIKISGSPLTLKPPLRRSSSVKETSANKFEMYSSLAWIAIRAAAQVSEAVLAINLLIGKKNTRMHKVNQVALPNIPEFAALDLLSSYTDYLLDNYQVLFQTSCTFLYQNDDVCDSADGRKKTQTKVDITWILLLRYYIHLQRINNLSKLLASATPVSGISLPDDTLLTSLYNSELILRQKEVHFFLKKFLQLYSSSCIDEFPKELLCQLENPPLSEKDLRESSAKLYRDSSVQSILSFKPVSGSSCVDITPIEMVTQASNKELCFQWYIPPLDRPPKETEPMVLLLYAYNLKPLKISDVRHSTYNSTCVGSLWIPLNRVIAIHEKLSNLAQIAELSLPAAPEITSNENIYEVEVEEESVDNEMEDMIIQCCSEIASLFLNDKEPTPLSEVPFDISLPSIFNLERLFDLANGCILSGGSLFNWIVSIIP

SEQ ID NO: 17093 - protein, 19 aa, Artificial Sequence
  Synthetic polypeptide
QVTDLHIVWNGCCFKRNKS

SEQ ID NO: 17094 - protein, 78 aa, Artificial Sequence
  Synthetic polypeptide
QTCTLCGMVAALSAIRANCHQEPSVCLQAACPESWIGFQRKCFYFSDDTKNWTSSQRFCDSQDADLAQVESFQELVRK

SEQ ID NO: 17095 - protein, 13 aa, Artificial Sequence
  Synthetic polypeptide
SNRPAHCVEWLLL

SEQ ID NO: 17096 - protein, 150 aa, Artificial Sequence
  Synthetic polypeptide
QTCTLCGMVAALSAIRANCHQEPSVCLQAACPESWIGFQRKCFYFSDDTKNWTSSQRFCDSQDADLAQVESFQELNFLLRYKGPSDHWIGLSREQGQPWKWINGTEWTRQLVMKEDGANLYVAKVSQVPRMNPRPVMVSYPGSRRVCLFE

SEQ ID NO: 17097 - protein, 147 aa, Artificial Sequence
  Synthetic polypeptide
QTCTLCGMVAALSAIRANCHQEPSVCLQAACPESWIGFQRKCFYFSDDTKNWTSSQRFCDSQDADLAQVESFQELNFLLRYKGPSDHWIGLSREQGQPWKWINGTEWTRQFPILGAGECAYLNDKGASSARHYTERKWICSKSDIHV

SEQ ID NO: 17098 - protein, 110 aa, Artificial Sequence
  Synthetic polypeptide
QTCTLCGMVAALSAIRANCHQEPSVCLQAACPESWIGFQRKCFYFSDDTKNWTSSQRFCDSQDADLAQVESFQELNFLLRYKGPSDHWIGLSREQGQPWKWINGTEWTRQ

SEQ ID NO: 17099 - protein, 88 aa, Artificial Sequence
  Synthetic polypeptide
QTCTLCGMVAALSAIRANCHQEPSVCLQAACPESWIGFQRKCFYFSDDTKNWTSSQRFCDSQDADLAQVESFQELVSYPGSRRVCLFE

SEQ ID NO: 17100 - protein, 37 aa, Artificial Sequence
  Synthetic polypeptide
SPLVMGGTQWEITESWSWLPSCCSCDSELSAFKRAFY

SEQ ID NO: 17101 - protein, 189 aa, Artificial Sequence
  Synthetic polypeptide
LNHGVGYPRAVLVIASCLHSKEHSIKATLIWRLFFLIMFLTIIVCGMVAALSAIRANCHQEPSVCLQAACPESWIGFQRKCFYFSDDTKNWTSSQRFCDSQDADLAQVESFQELNFLLRYKGPSDHWIGLSREQGQPWKWINGTEWTRQLVMKEDGANLYVAKVSQVPRMNPRPVMVSYPGSRRVCLFE

SEQ ID NO: 17102 - protein, 14 aa, Artificial Sequence
  Synthetic polypeptide
RVVCIQKSILLKLP

SEQ ID NO: 17103 - protein, 186 aa, Artificial Sequence
  Synthetic polypeptide
LNHGVGYPRAVLVIASCLHSKEHSIKATLIWRLFFLIMFLTIIVCGMVAALSAIRANCHQEPSVCLQAACPESWIGFQRKCFYFSDDTKNWTSSQRFCDSQDADLAQVESFQELNFLLRYKGPSDHWIGLSREQGQPWKWINGTEWTRQFPILGAGECAYLNDKGASSARHYTERKWICSKSDIHV

SEQ ID NO: 17104 - protein, 117 aa, Artificial Sequence
  Synthetic polypeptide
LNHGVGYPRAVLVIASCLHSKEHSIKATLIWRLFFLIMFLTIIVCGMVAALSAIRANCHQEPSVCLQAACPESWIGFQRKCFYFSDDTKNWTSSQRFCDSQDADLAQVESFQELVRK

SEQ ID NO: 17105 - protein, 29 aa, Artificial Sequence
  Synthetic polypeptide
LNHGVGYPRAVLVIASCLHSKEHSIKATL

SEQ ID NO: 17106 - protein, 149 aa, Artificial Sequence
  Synthetic polypeptide
LNHGVGYPRAVLVIASCLHSKEHSIKATLIWRLFFLIMFLTIIVCGMVAALSAIRANCHQEPSVCLQAACPESWIGFQRKCFYFSDDTKNWTSSQRFCDSQDADLAQVESFQELNFLLRYKGPSDHWIGLSREQGQPWKWINGTEWTRQ

SEQ ID NO: 17107 - protein, 127 aa, Artificial Sequence
  Synthetic polypeptide
LNHGVGYPRAVLVIASCLHSKEHSIKATLIWRLFFLIMFLTIIVCGMVAALSAIRANCHQEPSVCLQAACPESWIGFQRKCFYFSDDTKNWTSSQRFCDSQDADLAQVESFQELVSYPGSRRVCLFE

SEQ ID NO: 17108 - protein, 43 aa, Artificial Sequence
  Synthetic polypeptide
HFLSTFLLSINHVLPKTGRCIRENVTGLLKLRNLGTKVKMTVP

SEQ ID NO: 17109 - protein, 21 aa, Artificial Sequence
  Synthetic polypeptide
LCDCELEYPHFNTFFQLFYCP

SEQ ID NO: 17110 - protein, 82 aa, Artificial Sequence
  Synthetic polypeptide
ISALLSSNCVTVNLNIPILTLSFNFSTVHKSCPAKDWKVHKGKCYWIAETKKSWNKSQNDCAINNSYLMVIQDITAMKSNLF

SEQ ID NO: 17111 - protein, 82 aa, Artificial Sequence
  Synthetic polypeptide
ISALLSSNCVTVNLNIPILTLSFNFSTVHKSCPAKDWKVHKGKCYWIAETKKSWNKSQNDCAINNSYLMVIQDITAMVRFNI

SEQ ID NO: 17112 - protein, 8 aa, Artificial Sequence
  Synthetic polypeptide
LTYSPSNL

SEQ ID NO: 17113 - protein, 18 aa, Artificial Sequence
  Synthetic polypeptide
PPNEGISLLIVPATSRGS

SEQ ID NO: 17114 - protein, 75 aa, Artificial Sequence
  Synthetic polypeptide
SSEKALNVLSLSFLTVYLCGWICFMYFKNQSNRTKSNAEADGRIQQPSRRNDQLESSFSSFTSATKRKLSGRSAV

SEQ ID NO: 17115 - protein, 103 aa, Artificial Sequence
  Synthetic polypeptide
LCIYVAGFASCTSKTRVTEQNRMQKQMGESSNLLGGMINWNRLFPPLRQRQNVNYQGGRQSEPAAPPLEVSEEQVARLMEMGFSRGDALEALRASNNDLNVAT

SEQ ID NO: 17116 - protein, 109 aa, Artificial Sequence
  Synthetic polypeptide
LCIYVAGFASCTSKTRVTEQNRMQKQMGESSNLLGGMINWNRLFPPLRQRQNVNYQGGRQSEPAAPPLEVSEEQVARLMEMGFSRGDALEALRASNNDLNVATNFLLQH

SEQ ID NO: 17117 - protein, 253 aa, Artificial Sequence
  Synthetic polypeptide
ESSIYEPGSKSSPNTEFASALILDFPASRTNEARLRIVKTLEDIDLGPTEKCVRVNSVSSGLAEEDLETLLQSRVLPSSLMLPKVESPEEIQWAVCEETLKVGPQVGLFLDAVVFGGEDFRASIGATSSKETLDILYARQKIVVIAKAFGLQAIDLVYIDFRDGAGLLRQSREGAAMGFTGKQVIHPNQIAVVQEQFSPSPEKIKWAEELIAAFKEHQQLGKGAFTFQGSMIDMPLLKQAQNTVTLATSIKEK

SEQ ID NO: 17118 - protein, 13 aa, Artificial Sequence
  Synthetic polypeptide
SWTSQPPELMKLD

SEQ ID NO: 17119 - protein, 249 aa, Artificial Sequence
  Synthetic polypeptide
ESSIYEPGSKSSPNTEFASALILDFPASRTNEARLRIVKTLEDIDLGPTEKCVRVNSVSSGLAEEDLETLLQSRVLPSSLMLPKVESPEEIQWAVCEETLKVGPQVGLFLDAVVFGGEDFRASIGATSSKETLDILYARQKIVVIAKAFGLQAIDLVYIDFRDGAGLLRQSREGAAMGFTGKQVIHPNQIAVVQEQFSPSPEKIKWAEELIAAFKEHQQLGKTVSCSASQAGVQWRDLGSLQPPPPGFK

SEQ ID NO: 17120 - protein, 287 aa, Artificial Sequence
  Synthetic polypeptide
ESSIYEPGSKSSPNTEFASALILDFPASRTNEARLRIVKTLEDIDLGPTEKCVRVNSVSSGLAEEDLETLLQSRVLPSSLMLPKVESPEEIQWFADKFSFHLKGRKLEQPMNLIPFVETAMGLLNFKAVCEETLKVGPQVGLFLDAVVFGGEDFRASIGATSSKETLDILYARQKIVVIAKAFGLQAIDLVYIDFRDGAGLLRQSREGAAMGFTGKQVIHPNQIAVVQEQFSPSPEKIKWAEELIAAFKEHQQLGKGAFTFQGSMIDMPLLKQAQNTVTLATSIKEK

SEQ ID NO: 17121 - protein, 211 aa, Artificial Sequence
  Synthetic polypeptide
ESSIYEPGSKSSPNTEFASALILDFPASRTNEARLRIVKTLEDIDLGPTEKCVRVNSVSSGLAEEDLETLLQSRVLPSSLMLPKVESPEEIQWFADKFSFHLKGRKLEQPMNLIPFVETAMGLLNFKAVCEETLKVGPQVGLFLDAVVFGGEDFRASIGVKDISLSLFLCVCVYMCVYIFSLPLKDGHLHNNVYLPTMTMVFHDNGMDTTS

SEQ ID NO: 17122 - protein, 177 aa, Artificial Sequence
  Synthetic polypeptide
ESSIYEPGSKSSPNTEFASALILDFPASRTNEARLRIVKTLEDIDLGPTEKCVRVNSVSSGLAEEDLETLLQSRVLPSSLMLPKVESPEEIQWAVCEETLKVGPQVGLFLDAVVFGGEDFRASIGVKDISLSLFLCVCVYMCVYIFSLPLKDGHLHNNVYLPTMTMVFHDNGMDTTS

SEQ ID NO: 17123 - protein, 12 aa, Artificial Sequence
  Synthetic polypeptide
RRVLLSFCHDYF

SEQ ID NO: 17124 - protein, 657 aa, Artificial Sequence
  Synthetic polypeptide
VGSHRILRSYKCLEVPPLHYSPLLPCEEGSCFPSAMITFDKILVANRGEIACRVIRTCKKMGIKTVAIHSDVDASSVHVKMADEAVCVGPAPTSKSYLNMDAIMEAIKKTRAQAVHPGYGFLSENKEFARCLAAEDVVFIGPDTHAIQAMGDKIESKLLAKKAEVNTIPGFDGVVKDAEEAVRIAREIGYPVMIKASAGGGGKGMRIAWDDEETRDGFRLSSQEAASSFGDDRLLIEKFIDNPRHIEIQVLGDKHGNALWLNERECSIQRRNQKVVEEAPSIFLDAETRRAMGEQAVALARAVKYSSAGTVEFLVDSKKNFYFLEMNTRLQVEHPVTECITGLDLVQEMIRVAKGYPLRHKQADIRINGWAVECRVYAEDPYKSFGLPSIGRLSQYQEPLHLPGVRVDSGIQPGSDISIYYDPMISKLITYGSDRTEALKRMADALDNYVIRGVTHNIALLREVIINSRFVKGDISTKFLSDVYPDGFKGHMLTKSEKNQLLAIASSLFVAFQLRAQHFQENSRMPVIKPDIANWELSVKLHDKVHTVVASNNGSVFSVEVDGSKLNVTSTWNLASPLLSVSVDGTQRTVQCLSREAGGNMSIQFLGTVVAEGQEICVIEAMKMQNSMTAGKTGTVKSVHCQAGDTVGEGDLLVELE

SEQ ID NO: 17125 - protein, 704 aa, Artificial Sequence
  Synthetic polypeptide
VGSHRILRSYKCLEVPPLHYSPLLPCEEGSCFPSAMITFDKILVANRGEIACRVIRTCKKMGIKTVAIHSDVDASSVHVKMADEAVCVGPAPTSKSYLNMDAIMEAIKKTRAQAVHPGYGFLSENKEFARCLAAEDVVFIGPDTHAIQAMGDKIESKLLAKKAEVNTIPGFDGVVKDAEEAVRIAREIGYPVMIKASAGGGGKGMRIAWDDEETRDGFRLSSQEAASSFGDDRLLIEKFIDNPRHIEIQVLGDKHGNALWLNERECSIQRRNQKVVEEAPSIFLDAETRRAMGEQAVALARAVKYSSAGTVEFLVDSKKNFYFLEMNTRLQVEHPVTECITGLDLVQEMIRVAKGYPLRHKQADIRINGWAVECRVYAEDPYKSFGLPSIGRLSQYQEPLHLPGVRVDSGIQPGSDISIYYDPMISKLITYGSDRTEALKRMADALDNYVIRGVTHNIALLREVIINSRFVKGDISTKFLSDVYPDGFKGHMLTKSEKNQLLAIASSLFVAFQLRAQHFQENSRMPVIKPDIANWELSVKLHDKVHTVVASNNGSVFSVEVDGSKLNVTSTWNLASPLLSVSVDGTQRTVQCLSREAGGNMSIQFLGTVYKVNILTRLAAELNKFMLEKVTEDTSSVLRSPMPGVVVAVSVKPGDAVAEGQEICVIEAMKMQNSMTAGKTGTVKSVHCQAGDTVGEGDLLVELE

SEQ ID NO: 17126 - protein, 96 aa, Artificial Sequence
  Synthetic polypeptide
HSHLFWRMPLIASVEHVHPFPVAYKLWVWPVTEWVIPVLQPSEITLLSVAEGQEICVIEAMKMQNSMTAGKTGTVKSVHCQAGDTVGEGDLLVELE

SEQ ID NO: 17127 - protein, 17 aa, Artificial Sequence
  Synthetic polypeptide
QSGLYLSCSHPRSRFCL

SEQ ID NO: 17128 - protein, 33 aa, Artificial Sequence
  Synthetic polypeptide
ALGLASNRVGYTCLAAIRDHASVCSRRSRNLCD

SEQ ID NO: 17129 - protein, 15 aa, Artificial Sequence
  Synthetic polypeptide
PQRQFRDHQIPSSRV

SEQ ID NO: 17130 - protein, 43 aa, Artificial Sequence
  Synthetic polypeptide
SSDPKGNSEIIRSPAQGYSDQVILQARLLLANAPRWSSRWNQG

SEQ ID NO: 17131 - protein, 202 aa, Artificial Sequence
  Synthetic polypeptide
LCAFQENEVVTPKAIQRSSDPQLKGIVTRLYCRQGYYLQMHPDGALDGTKDDSTNSTLFNLIPVGLRVVAIQGVKTGLYIAMNGEGYLYPSELFTPECKFKESVFENYYVIYSSMLYRQQESGRAWFLGLNKEGQAMKGNRVKKTKPAAHFLPKPLEVAMYREPSLHDVGETVPKPGVTPSKSTSASAIMNGGKPVNKSKTT

SEQ ID NO: 17132 - protein, 14 aa, Artificial Sequence
  Synthetic polypeptide
VLSRGWILVTFITN

SEQ ID NO: 17133 - protein, 19 aa, Artificial Sequence
  Synthetic polypeptide
PTASCSGSVPAECSQEAGF

SEQ ID NO: 17134 - protein, 280 aa, Artificial Sequence
  Synthetic polypeptide
YLNQDHCLPFLSQLMSQKFYFRSCLQELQLLGEGRLSSLEEEDVIISHPDLLPVAAAQFQLSALKRLDSSDIYNELKETYPNYLPLYVARLHQLDAEKERMKRLNEIVDAANAVISHIDQTALAVYIAMKTDPRPDAATIKNDMDKQKSTLVDALCRKGCALADHLLHTQAQDGAISTDAEGKEEEGESPLDSLAETFWETTKWTDLFDNKVLTFAYKHALVNKMYGRGLKFATKLVEEKPTKENWKNCIQLMKLLGWTHCASFTENWLPIMYPPDYCVF

SEQ ID NO: 17135 - protein, 11 aa, Artificial Sequence
  Synthetic polypeptide
MGWILVTFITN

SEQ ID NO: 17136 - protein, 25 aa, Artificial Sequence
  Synthetic polypeptide
PEYINNSYNFIIQRQMAQFFKWAGF

SEQ ID NO: 17137 - protein, 225 aa, Artificial Sequence
  Synthetic polypeptide
YKGKWLNFLNGLDSSDIYNELKETYPNYLPLYVARLHQLDAEKERMKRLNEIVDAANAVISHIDQTALAVYIAMKTDPRPDAATIKNDMDKQKSTLVDALCRKGCALADHLLHTQAQDGAISTDAEGKEEEGESPLDSLAETFWETTKWTDLFDNKVLTFAYKHALVNKMYGRGLKFATKLVEEKPTKENWKNCIQLMKLLGWTHCASFTENWLPIMYPPDYCVF

SEQ ID NO: 17138 - protein, 18 aa, Artificial Sequence
  Synthetic polypeptide
VLASMWTKQNPQTLMAGF

SEQ ID NO: 17139 - protein, 29 aa, Artificial Sequence
  Synthetic polypeptide
SQMMSFGKYVDKAESSDTDGWILVTFITN

SEQ ID NO: 17140 - protein, 7 aa, Artificial Sequence
  Synthetic polypeptide
RWCGAEG

SEQ ID NO: 17141 - protein, 135 aa, Artificial Sequence
  Synthetic polypeptide
PQNLQTARKLAALDSGGTGNEGGVVQKVKLKIPFGNKLLDAVCLVPNKSLTYGIILTHGASGDMNLPHLMSLASHLASHGFFCLRFTCKGLNIVHRIKAYKSVLNYLKTSGEYKLAGVFLGELVGESGTENASSP

SEQ ID NO: 17142 - protein, 29 aa, Artificial Sequence
  Synthetic polypeptide
HRIFKLHGNWQHWTAVVLGMKVVWCRRLN

SEQ ID NO: 17143 - protein, 249 aa, Artificial Sequence
  Synthetic polypeptide
PQNLQTARKLAALDSGGTGNEGGVVQKVKLKIPFGNKLLDAVCLVPNKSLTYGIILTHGASGDMNLPHLMSLASHLASHGFFCLRFTCKGLNIVHRIKAYKSVLNYLKTSGEYKLAGVFLGGRSMGSRAAASVMCHIEPDDGDDFVRGLICISYPLHHPKQQHKLRDEDLFRLKEPVLFVSGSADEMCEKNLLEKVAQKMQAPHKIHWIEKANHSMAVKGRSTNDVFKEINTQILFWIQEITEMDKKCH

SEQ ID NO: 17144 - protein, 230 aa, Artificial Sequence
  Synthetic polypeptide
GLPSHAELVSMTTCSTLLALGMMPLCLLIYTKMWVDSGSIVIPYDNIGTSLVSLVVPVSIGMFVNHKWPQKAKIILKIGSIAGAILIVLIAVVGGILYQSAWIIAPKLWIIGTIFPVAGYSLGFLLARIAGLPWYRCRTVAFETGMQNTQLCSTIVQLSFTPEELNVVFTFPLIYSIFQLAFAAIFLGFYVAYKKCHGKNKAEIPESKENGTEPESSFYKANGGFQPDEK

SEQ ID NO: 17145 - protein, 40 aa, Artificial Sequence
  Synthetic polypeptide
FLLHSFSFLPPHDNVPCLPFAFHRDCKFPEVSPAMLNSSA

SEQ ID NO: 17146 - protein, 37 aa, Artificial Sequence
  Synthetic polypeptide
TRQHDHMLHTACPRNDAAVPPYLYQNVGRLWEHRNSL

SEQ ID NO: 17147 - protein, 52 aa, Artificial Sequence
  Synthetic polypeptide
EEPFTSCHDSDASPAMWNCWSQCPSPGCEWKYPIRLCCRRDRIQLYPVDLSG

SEQ ID NO: 17148 - protein, 1750 aa, Artificial Sequence
  Synthetic polypeptide
WVYQGFPFLLHPHFLLPLPCKKSLLPPAMILTPPQPCGTAGANVLLQDVNGNIPLDYAVEGTESSSILLTYLDENGVDLTSLRQMKLQRPMSMLTDVKHFLSSGGNVNEKNDEGVTLLHMACASGYKEVVSLILEHGGDLNIVDDQYWTPLHLAAKYGQTNLVKLLLMHQANPHLVNCNEEKASDIAASEFIEEMLLKAEIAWEEKMKEPLSASTLAQEEPYEEIIHDLPVLSSKLSPLVLPIAKQDSLLEKDIMFKDATKGLCKQQSQDSIPENPMMSGSTKPEQVKLMPPAPNDDLATLSELNDGSLLYEIQKRFGNNQIYTFIGDILLLVNPYKELPIYSSMVSQLYFSSSGKLCSSLPPHLFSCVERAFHQLFREQRPQCFILSGERGSGKSEASKQIIRHLTCRAGASRATLDSRFKHVVCILEAFGHAKTTLNDLSSCFIKYFELQFCERKQQLTGARIYTYLLEKSRLVSQPLGQSNFLIFYLLMDGLSAEEKYGLHLNNLCAHRYLNQTIQDDASTGERSLNREKLAVLKRALNVVGFSSLEVENLFVILAAILHLGDIRFTALNEGNSAFVSDLQLLEQVAGMLQVSTDELASALTTDIQYFKGDMIIRRHTIQIAEFFRDLLAKSLYSRLFSFLVNTMNSCLHSQDEQKSMQTLDIGILDIFGFEEFQKNEFEQLCVNMTNEKMHHYINEVLFLHEQVECVQEGVTMETAYSPGNQNGVLDFFFQKPSGFLTLLDEESQMIWSVESNFPKKLQSLLESSNTNAVYSPMKDGNGNVALKDHGTAFTIMHYAGRVMYDVVGAIEKNKDSLSQNLLFVMKTSENVVINHLFQSKLSQTGSLVSAYPSFKFRGHKSALLSKKMTASSIIGENKNYLELSKLLKKKGTSTFLQRLERGDPVTIASQLRKSLMDIIGKLQKCTPHFIHCIRPNNSKLPDTFDNFYVSAQLQYIGVLEMVKIFRYGYPVRLSFSDFLSRYKPLADTFLREKKEQSAAERCRLVLQQCKLQGWQMGVRKVFLKYWHADQLNDLCLQLQRKIITCQKVIRGFLARQHLLQRISIRQQEVTSINSFLQNTEDMGLKTYDALVIQNASDIARENDRLRSEMNAPYHKEKLEVRNMQEEGSKRTDDKSGPRHFHPSSMSVCAAVDGLGQCLVGPSIWSPSLHSVFSMDDSSSLPSPRKQPPPKPKRDPNTRLSASYEAVSACLSAAREAANEALARPRPHSDDYSTMKKIPPRKPKRSPNTKLSGSYEEISGSRPGDARPAGAPGAAARVLTPGTPQCALPPAAPPGDEDDSEPVYIEMLGHAARPDSPDPGESVYEEMKCCLPDDGGPGAGSFLLHGASPPLLHRAPEDEAAGPPGDACDIPPPFPNLLPHRPPLLVFPPTPVTCSPASDESPLTPLEVKKLPVLETNLKYPVQPEGSSPLSPQYSKSQKGDGDRPASPGLALFNGSGRASPPSTPPPPPPPPGPPPAPYRPCAHLAFPPEPAPVNAGKAGPSAEAPKVHPKPNSAPVAGPCSSFPKIPYSPVKATRADARKAGSSASPPAPYSPPSSRPLSSPLDELASLFNSGRSVLRKSAAGRKIREAEGFETNMNISSRDDPSTSEITSETQDRNANNHGIQLSNSLSSAITAENGNSISNGLPEEDGYSRLSISGTGTSTFQRHRDSHTTQVIHQLRLSENESVALQELLDWRRKLCEEGQDWQQILHHAEPRVPPPPPCKKPSLLKKPEGASCNRLPSELWDTTI

SEQ ID NO: 17149 - protein, 17 aa, Artificial Sequence
  Synthetic polypeptide
RLPSHVELLEPMSFSRM

SEQ ID NO: 17150 - protein, 832 aa, Artificial Sequence
  Synthetic polypeptide
WVYQGFPFLLHPHFLLPLPCKKSLLPPAMILTPPQPCGTAGANVLLQDVNGNIPLDYAVEGTESSSILLTYLDENGVDLTSLRQMKLQRPMSMLTDVKHFLSSGGNVNEKNDEGVTLLHMACASGYKEVVSLILEHGGDLNIVDDQYWTPLHLAAKYGQTNLVKLLLMHQANPHLVNCNEEKASDIAASEFIEEMLLKAEIAWEEKMKEPLSASTLAQEEPYEEIIHDLPVLSSKLSPLVLPIAKQDSLLEKDIMFKDATKGLCKQQSQDSIPENPMMSGSTKPEQVKLMPPAPNDDLATLSELNDGSLLYEIQKRFGNNQIYTFIGDILLLVNPYKELPIYSSMVSQLYFSSSGKLCSSLPPHLFSCVERAFHQLFREQRPQCFILSGERGSGKSEASKQIIRHLTCRAGASRATLDSRFKHVVCILEAFGHAKTTLNDLSSCFIKYFELQFCERKQQLTGARIYTYLLEKSRLVSQPLGQSNFLIFYLLMDGLSAEEKYGLHLNNLCAHRYLNQTIQDDASTGERSLNREKLAVLKRALNVVGFSSLEVENLFVILAAILHLGDIRFTALNEGNSAFVSDLQLLEQVAGMLQVSTDELASALTTDIQYFKGDMIIRRHTIQIAEFFRDLLAKSLYSRLFSFLVNTMNSCLHSQDEQKSMQTLDIGILDIFGFEEFQKNEFEQLCVNMTNEKMHHYINEVLFLHEQVECVQEGVTMETAYSPGNQNGVLDFFFQKPSGFLTLLDEESQMIWSVESNFPKKLQSLLESSNTNAVYSPMKDGNGNVALKDHGTAFTIMHYAGRVMYDVVGAIEKNKDSLSQNLLFVMKRGRCF

SEQ ID NO: 17151 - protein, 19 aa, Artificial Sequence
  Synthetic polypeptide
SRESPHEALWTAMTAMDLC

SEQ ID NO: 17152 - protein, 17 aa, Artificial Sequence
  Synthetic polypeptide
GNLCKAVSPHMRPYGQR

SEQ ID NO: 17153 - protein, 7 aa, Artificial Sequence
  Synthetic polypeptide
VAMSTSI

SEQ ID NO: 17154 - protein, 14 aa, Artificial Sequence
  Synthetic polypeptide
VVESRWQCLLRSEV

SEQ ID NO: 17155 - protein, 379 aa, Artificial Sequence
  Synthetic polypeptide
SWNLGGNVYFDLKSRGDKYGKLVGVVPGPVGEPADSDKRHASDFALWKAAKPQEVFWASPWGPGRPGWHIECSAIASMVFGSQLDIHSGGIDLAFPHHENEIAQCEVFHQCEQWGNYFLHSGHLHAKGKEEKMSKSLKNYITIKDFLKTFSPDVFRFFCLRSSYRSAIDYSDSAMLQAQQLLLGLGSFLEDARAYMKGQLACGSVREAMLWERLSSTKRAVKAALADDFDTPRVVDAILGLAHHGNGQLRASLKEPEGPRSPAVFGAIISYFEQFFETVGISLANQQYVSGDGSEATLHGVVDELVRFRQKVRQFALAMPEATGDARRQQLLERQPLLEACDTLRRGLTAHGINIKDRSSTTSTWELLDQRTKDQKSAG

SEQ ID NO: 17156 - protein, 3 aa, Artificial Sequence
  Synthetic polypeptide
GQV

SEQ ID NO: 17157 - protein, 491 aa, Artificial Sequence
  Synthetic polypeptide
ARYSCGPTVYDHAHLGHACSYVRFDIIRRILTKVFGCSIVMVMGITDVDDKIIKRANEMNISPASLASLYEEDFKQDMAALKVLPPTVYLRVTENIPQIISFIEGIIARGNAYSTAKGNVYFDLKSRGDKYGKLVGVVPGPVGEPADSDKRHASDFALWKAAKPQEVFWASPWGPGRPGWHIECSAIASMVFGSQLDIHSGGIDLAFPHHENEIAQCEVFHQCEQWGNYFLHSGHLHAKGKEEKMSKSLKNYITIKDFLKTFSPDVFRFFCLRSSYRSAIDYSDSAMLQAQQLLLGLGSFLEDARAYMKGQLACGSVREAMLWERLSSTKRAVKAALADDFDTPRVVDAILGLAHHGNGQLRASLKEPEGPRSPAVFGAIISYFEQFFETVGISLANQQYVSGDGSEATLHGVVDELVRFRQKVRQFALAMPEATGDARRQQLLERQPLLEACDTLRRGLTAHGINIKDRSSTTSTWELLDQRTKDQKSAG

SEQ ID NO: 17158 - protein, 30 aa, Artificial Sequence
  Synthetic polypeptide
PGIAVDQLYMIMRTLAMLAHMLDLISFEGS

SEQ ID NO: 17159 - protein, 59 aa, Artificial Sequence
  Synthetic polypeptide
ARYSCGPTVYDHAHLGHACSYVRFDIIRRILTKVFGCSIVMVMGITDVDDKIIKRANEA

SEQ ID NO: 17160 - protein, 117 aa, Artificial Sequence
  Synthetic polypeptide
ARYSCGPTVYDHAHLGHACSYVRFDIIRRILTKVFGCSIVMVMGITDVDDKIIKRANEMNISPASLASLYEEDFKQDMAALKVLPPTVYLRVTENIPQIISFIEGIIARGNAYSTAK

SEQ ID NO: 17161 - protein, 81 aa, Artificial Sequence
  Synthetic polypeptide
ARYSCGPTVYDHAHLGHACSYVRFDIIRRILTKVFGCSIVMVMGITDVDDKIIKRANERVLLCRPGWSAVAPSWLTATSAS

SEQ ID NO: 17162 - protein, 10 aa, Artificial Sequence
  Synthetic polypeptide
EQLLGTCWSA

SEQ ID NO: 17163 - protein, 54 aa, Artificial Sequence
  Synthetic polypeptide
NSCLAHVGVLSAVGESGSHTQRLHHTVRADASPHCSLWGTSSVPGLADSSRSQH

SEQ ID NO: 17164 - protein, 356 aa, Artificial Sequence
  Synthetic polypeptide
TVAWHMLECLVQLVRAGATLNVSTTRYAQTPAHIAAFGGHPQCLVWLIQAGANINKPDCEGETPIHKAARSGSLECISALVANGAHVDLRNASGLTAADIAQTQGFQECAQFLLNLQNCHLNHFYNNGILNGGHQNVFPNHISVGTNRKRCLEDSEDFGVKKARTEAQSLDSAVPLTNGDTEDDADKMHVDREFAVVTDMKNSSSVSNTLTNGCVINGHLDFPSTTPLSGMESRNGQCLTGTNGISSGLAPGQPFPSSQGSLCISGTEEPEKTLRANPELCGSLHLNGSPSSCIASRPSWVEDIGDNLYYGHYHGFGDTAESIPELNSVVEHSKSVKVQERYDSAVLGTMHLHHGS

SEQ ID NO: 17165 - protein, 156 aa, Artificial Sequence
  Synthetic polypeptide
TVAWHMLECLVQLVRAGATLNVSTTRYAQTPAHIAAFGGHPQCLVWLIQAGANINKPDCEGETPIHKAARSGSLECISALVANGAHVEFISQSSVHSCLPGELQHGVTFDPSVLIQCLKPEKCQWPDSSRHCTNPGFPRVCPVSLEPPELSSEPFL

SEQ ID NO: 17166 - protein, 97 aa, Artificial Sequence
  Synthetic polypeptide
TVAWHMLECLVQLVRAGATLNVSTTRYAQTPAHIAAFGGHPQCLVWLIQAGANINKPDCEGETPIHKAARSGSLECISALVANGAHVDNPRKGEHSI

SEQ ID NO: 17167 - protein, 9 aa, Artificial Sequence
  Synthetic polypeptide
RGAFCRDYV

SEQ ID NO: 17168 - protein, 722 aa, Artificial Sequence
  Synthetic polypeptide
GASPALPGTHSLSLSCEEVPFAVITFDANDLYQGQNFNKVLSSLVTLNKVTADIGLGSDSVCARPSSHRIKSFDSLGSQSLHTRTSKLFQGQYRSLDMTDNSNNQLVVRAKFNFQQTNEDELSFSKGDVIHVTRVEEGGWWEGTLNGRTGWFPSNYVREVKASEKPVSPKSGTLKSPPKGFDTTAINKSYYNVVLQNILETENEYSKELQTVLSTYLRPLQTSEKLSSANISYLMGNLEEICSFQQMLVQSLEECTKLPEAQQRVGGCFLNLMPQMKTLYLTYCANHPSAVNVLTEHSEELGEFMETKGASSPGILVLTTGLSKPFMRLDKYPTLLKELERHMEDYHTDRQDIQKSMAAFKNLSAQCQEVRKRKELELQILTEAIRNWEGDDIKTLGNVTYMSQVLIQCAGSEEKNERYLLLFPNVLLMLSASPRMSGFIYQGKLPTTGMTITKLEDSENHRNAFEISGSMIERILVSCNNQQDLQEWVEHLQKQTKVTSVGNPTIKPHSVPSHTLPSHPVTPSSKHADSKPAPLTPAYHTLPHPSHHGTPHTTINWGPLEPPKTPKPWSLSCLRPAPPLRPSAALCYKEDLSKSPKTMKKLLPKRKPERKPSDEEFASRKSTAALEEDAQILKVIEAYCTSAKTRQTLNSTWQGTDLMHNHVLADDDQPSLDSLGRRSSLSRLEPSDLSEDSDYDSIWTAHSYRMGSTSRKSCCSYISHQN

SEQ ID NO: 17169 - protein, 165 aa, Artificial Sequence
  Synthetic polypeptide
GASPALPGTHSLSLSCEEVPFAVITFDANDLYQGQNFNKVLSSLVTLNKVTADIGLGSDSVCARPSSHRIKSFDSLGSQSLHTRTSKLFQGQYRSLDMTDNSNNQLVVRAKFNFQQTNEDELSFSKGDVIHVTRVEEGGWWEGTLNGRTGWFPSNYVREVKASGK

SEQ ID NO: 17170 - protein, 743 aa, Artificial Sequence
  Synthetic polypeptide
GASPALPGTHSLSLSCEEVPFAVITFDANDLYQGQNFNKVLSSLVTLNKVTADIGLGSDSVCARPSSHRIKSFDSLGSQSLHTRTSKLFQGQYRSLDMTDNSNNQLVVRAKFNFQQTNEDELSFSKGDVIHVTRVEEGGWWEGTLNGRTGWFPSNYVREVKASEKPVSPKSGTLKSPPKGFDTTAINKSYYNVVLQNILETENEYSKELQTVLSTYLRPLQTSEKLSSANISYLMGNLEEICSFQQMLVQSLEECTKLPEAQQRVGGCFLNLMPQMKTLYLTYCANHPSAVNVLTEHSEELGEFMETKGASSPGILVLTTGLSKPFMRLDKYPTLLKELERHMEDYHTDRQDIQKSMAAFKNLSAQCQEVRKRKELELQILTEAIRNWEGDDIKTLGNVTYMSQVLIQCAGSEEKNERYLLLFPNVLLMLSASPRMSGFIYQGKLPTTGMTITKLEDSENHRNAFEISGSMIERILVSCNNQQDLQEWVEHLQKQTKVTSVGNPTIKPHSVPSHTLPSHPVTPSSKHADSKPAPLTPAYHTLPHPSHHGTPHTTINWGPLEPPKTPKPWSLSCLRPAPPLRPSAALCYKEDLSKSPKTMKKLLPKRKPERKPSDEEFASRKSTAALEEDAQILKVIEAYCTSAKTRQTLNSSSRKESAPQVLLPEEEKIIVEETKSNGQTVIEEKSLVDTVYALKDEVQELRQDNKKMKKSLEEEQRARKDLEKLVRKVLKNMNDPAWDETNL

SEQ ID NO: 17171 - protein, 17 aa, Artificial Sequence
  Synthetic polypeptide
ESESGCPKLSRESEAAF

SEQ ID NO: 17172 - protein, 56 aa, Artificial Sequence
  Synthetic polypeptide
TTLHTKKYLLKNQNQVARSSAESRRLLFKPDATDENPVPHVLCQSPFCSECPHGTQ

SEQ ID NO: 17173 - protein, 490 aa, Artificial Sequence
  Synthetic polypeptide
LSSPQEHQIEQLSTRRNTFLRIRIRLPEAQQRVGGCFLNLMPQMKTLYLTYCANHPSAVNVLTEHSEELGEFMETKGASSPGILVLTTGLSKPFMRLDKYPTLLKELERHMEDYHTDRQDIQKSMAAFKNLSAQCQEVRKRKELELQILTEAIRNWEGDDIKTLGNVTYMSQVLIQCAGSEEKNERYLLLFPNVLLMLSASPRMSGFIYQGKLPTTGMTITKLEDSENHRNAFEISGSMIERILVSCNNQQDLQEWVEHLQKQTKVTSVGNPTIKPHSVPSHTLPSHPVTPSSKHADSKPAPLTPAYHTLPHPSHHGTPHTTINWGPLEPPKTPKPWSLSCLRPAPPLRPSAALCYKEDLSKSPKTMKKLLPKRKPERKPSDEEFASRKSTAALEEDAQILKVIEAYCTSAKTRQTLNSTWQGTDLMHNHVLADDDQPSLDSLGRRSSLSRLEPSDLSEDSDYDSIWTAHSYRMGSTSRKSCCSYISHQN

SEQ ID NO: 17174 - protein, 511 aa, Artificial Sequence
  Synthetic polypeptide
LSSPQEHQIEQLSTRRNTFLRIRIRLPEAQQRVGGCFLNLMPQMKTLYLTYCANHPSAVNVLTEHSEELGEFMETKGASSPGILVLTTGLSKPFMRLDKYPTLLKELERHMEDYHTDRQDIQKSMAAFKNLSAQCQEVRKRKELELQILTEAIRNWEGDDIKTLGNVTYMSQVLIQCAGSEEKNERYLLLFPNVLLMLSASPRMSGFIYQGKLPTTGMTITKLEDSENHRNAFEISGSMIERILVSCNNQQDLQEWVEHLQKQTKVTSVGNPTIKPHSVPSHTLPSHPVTPSSKHADSKPAPLTPAYHTLPHPSHHGTPHTTINWGPLEPPKTPKPWSLSCLRPAPPLRPSAALCYKEDLSKSPKTMKKLLPKRKPERKPSDEEFASRKSTAALEEDAQILKVIEAYCTSAKTRQTLNSSSRKESAPQVLLPEEEKIIVEETKSNGQTVIEEKSLVDTVYALKDEVQELRQDNKKMKKSLEEEQRARKDLEKLVRKVLKNMNDPAWDETNL

SEQ ID NO: 17175 - protein, 312 aa, Artificial Sequence
  Synthetic polypeptide
LSSPQEHQIEQLSTRRNTFLRIRIRLPEAQQRVGGCFLNLMPQMKTLYLTYCANHPSAVNVLTEHSEELGEFMETKGASSPGILVLTTGLSKPFMRLDKYPTLLKELERHMEDYHTDRQDIQKSMAAFKNLSAQCQEVRKRKELELQILTEAIRNWEGDDIKTLGNVTYMSQVLIQCAGSEEKNERYLLLFPNVLLMLSASPRMSGFIYQGKLPTTGMTITKLEDSENHRNAFEISGSMIERILVSCNNQQDLQEWVEHLQKQTKVTSVGNPTIKPHSVPSHTLPSHPVTPSSKHADSKPAPLTPAYHTLPH

SEQ ID NO: 17176 - protein, 156 aa, Artificial Sequence
  Synthetic polypeptide
TTLHTKKYLLKNQNQVARSSAESRRLLFKPDATDENPVPHVLCQSPFCSECPHGTQDYHTDRQDIQKSMAAFKNLSAQCQEVRKRKELELQILTEAIRNWEGDDIKTLGNVTYMSQVLIQCAGSEEKNERYLLLFPNVLLMLSASPRMSGFIYQGA

SEQ ID NO: 17177 - protein, 102 aa, Artificial Sequence
  Synthetic polypeptide
LSSPQEHQIEQLSTRRNTFLRIRIRLPEAQQRVGGCFLNLMPQMKTLYLTYCANHPSAVNVLTEHRIIIQIDKIFKNPWLPSKTFQPNVKKSGRGKSLSCRS

SEQ ID NO: 17178 - protein, 570 aa, Artificial Sequence
  Synthetic polypeptide
LSSPQEHQIEQLSTRRNTFLRIRIRLPEAQQRVGGCFLNLMPQMKTLYLTYCANHPSAVNVLTEHSEELGEFMETKGASSPGILVLTTGLSKPFMRLDKYPTLLKELERHMEDYHTDRQDIQKSMAAFKNLSAQCQEVRKRKELELQILTEAIRNWEGDDIKTLGNVTYMSQVLIQCAGSEEKNERYLLLFPNVLLMLSASPRMSGFIYQGKLPTTGMTITKLEDSENHRNAFEISGSMIERILVSCNNQQDLQEWVEHLQKQTKVTSVGNPTIKPHSVPSHTLPSHPVTPSSKHADSKPAPLTPAYHTLPHPSHHGTPHTTINWGPLEPPKTPKPWSLSCLRPAPPLRPSAALCYKEDLSKSPKTMKKLLPKRKPERKPSDEEFASRKSTAALEEDAQILKVIEAYCTSAKTRQTLNSTWQGTDLMHNHVLADDDQPSLDSLGRRSSLSRLEPSDLSEDSDYDSIWTAHSYRMGSTSRSRKESAPQVLLPEEEKIIVEETKSNGQTVIEEKSLVDTVYALKDEVQELRQDNKKMKKSLEEEQRARKDLEKLVRKVLKNMNDPAWDETNL

SEQ ID NO: 17179 - protein, 883 aa, Artificial Sequence
  Synthetic polypeptide
RADVAQQFQYAVRVIGSNFAPTVERDEFLVAEKIKKELIRQRREADAALFSELHRKLHSQGVLKNKWSILYLLLSLSEDPRRQPSKVSSYATLFAQALPRDAHSTPYYYARPQTLPLSYQDRSAQSAQSSGSVGSSGISSIGLCALSGPAPAPQSLLPGQSNQAPGVGDCLRQQLGSRLAWTLTANQPSSQATTSKGVPSAVSRNMTRSRREGDTGGTMEITEAALVRDILYVFQGIDGKNIKMNNTENCYKVEGKANLSRSLRDTAVRLSELGWLHNKIRRYTDQRSLDRSFGLVGQSFCAALHQELREYYRLLSVLHSQLQLEDDQGVNLGLESSLTLRRLLVWTYDPKIRLKTLAALVDHCQGRKGGELASAVHAYTKTGDPYMRSLVQHILSLVSHPVLSFLYRWIYDGELEDTYHEFFVASDPTVKTDRLWHDKYTLRKSMIPSFMTMDQSRKVLLIGKSINFLHQVCHDQTPTTKMIAVTKSAESPQDAADLFTDLENAFQGKIDAAYFETSKYLLDVLNKKYSLLDHMQAMRRYLLLGQGDFIRHLMDLLKPELVRPATTLYQHNLTGILETAVRATNAQFDSPEILRRLDVRLLEVSPGDTGWDVFSLDYHVDGPIATVFTRECMSHYLRVFNFLWRAKRMEYILTDIRKGHMCNAKLLRNMPEFSGVLHQCHILASEMVHFIHQMQYYITFEVLECSWDELWNKVQQAQDLDHIIAAHEVFLDTIISRCLLDSDSRALLNQLRAVFDQIIELQNAQDAIYRAALEELQRRLQFEEKKKQREIEGQWGVTAAEEEEENKRIGEFKESIPKMCSQLRILTHFYQGIVQQFLVLLTTSSDESLRFLSFRLDFNEHYKAREPRLRVSLGTRGRRSSHT

SEQ ID NO: 17180 - protein, 28 aa, Artificial Sequence
  Synthetic polypeptide
GFKPSVEEGTADVVAIAGEVEEDLEELM

SEQ ID NO: 17181 - protein, 6 aa, Artificial Sequence
  Synthetic polypeptide
KRILKS

SEQ ID NO: 17182 - protein, 800 aa, Artificial Sequence
  Synthetic polypeptide
RADVAQQFQYAVRVIGSNFAPTVERDEFLVAEKIKKELIRQRREADAALFSELHRKLHSQGVLKNKWSILYLLLSLSEDPRRQPSKVSSYATLFAQALPRDAHSTPYYYARPQTLPLSYQDRSAQSAQSSGSVGSSGISSIGLCALSGPAPAPQSLLPGQSNQAPGVGDCLRQQLGSRLAWTLTANQPSSQATTSKGVPSAVSRNMTRSRREGDTGGTMEITEAALVRDILYVFQGIDGKNIKMNNTENCYKVEGKANLSRSLRDTAVRLSELGWLHNKIRRYTDQRSLDRSFGLVGQSFCAALHQELREYYRLLSVLHSQLQLEDDQGVNLGLESSLTLRRLLVWTYDPKIRLKTLAALVDHCQGRKGGELASAVHAYTKTGDPYMRSLVQHILSLVSHPVLSFLYRWIYDGELEDTYHEFFVASDPTVKTDRLWHDKYTLRKSMIPSFMTMDQSRKVLLIGKSINFLHQVCHDQTPTTKMIAVTKSAESPQDAADLFTDLENAFQGKIDAAYFETSKYLLDVLNKKYSLLDHMQAMRRYLLLGQGDFIRHLMDLLKPELVRPATTLYQHNLTGILETAVRATNAQFDSPEILRRLDVRLLEVSPGDTGWDVFSLDYHVDGPIATVFTRECMSHYLRVFNFLWRAKRMEYILTDIRKGHMCNAKLLRNMPEFSGVLHQCHILASEMVHFIHQMQYYITFEVLECSWDELWNKVQQAQDLDHIIAAHEVFLDTIISRCLLDSDSRALLNQLRAVFDQIIELQNAQDAIYRAALEELQRRLQFEEKKKQREIEVEMCLYCV

SEQ ID NO: 17183 - protein, 30 aa, Artificial Sequence
  Synthetic polypeptide
KELYTMTKWVYPSTHFGTLYPRIYLNNSEE

SEQ ID NO: 17184 - protein, 18 aa, Artificial Sequence
  Synthetic polypeptide
PSGFILVHILELYTQEFI

SEQ ID NO: 17185 - protein, 55 aa, Artificial Sequence
  Synthetic polypeptide
AQPGQYSCRRKLQTPSRPCRRPGSKSGFSRETRWRRPRPRATPASSSAGTRSCWS

SEQ ID NO: 17186 - protein, 155 aa, Artificial Sequence
  Synthetic polypeptide
GQEFEPSLGNIAAGESCRHHRGPAEGRDQSLGSHGRQDGDGRGHVLRLQALPQEHAAAGADHQEDRGAEPARRPVRAEQDGPAPQREPDQRQPVRTFSRYAGLRFNYRRSCTVSDNEASRRREFRQLQGALPGNLPELQRGALLPHGALAEGSDC

SEQ ID NO: 17187 - protein, 67 aa, Artificial Sequence
  Synthetic polypeptide
LLGRLRREDRLSPGVGGCGCRRKLQTPSRPCRRPGSKSGFSRETRWRRPRPRATPASSSAGTRSCWS

SEQ ID NO: 17188 - protein, 151 aa, Artificial Sequence
  Synthetic polypeptide
AQELEAAAAGESCRHHRGPAEGRDQSLGSHGRQDGDGRGHVLRLQALPQEHAAAGADHQEDRGAEPARRPVRAEQDGPAPQREPDQRQPVRTFSRYAGLRFNYRRSCTVSDNEASRRREFRQLQGALPGNLPELQRGALLPHGALAEGSDC

SEQ ID NO: 17189 - protein, 495 aa, Artificial Sequence
  Synthetic polypeptide
QAPVVLATWEAEEGGSLEPRSWRLRLQEKAADTIEALQKAGIKVWVLTGDKMETAAATCYACKLFRRNTQLLELTTKRIEEQSLHDVLFELSKTVLRHSGSLTRDNLSGLSADMQDYGLIIDGAALSLIMKPREDGSSGNYRELFLEICRSCSAVLCCRMAPLQKAQIVKLIKFSKEHPITLAIGDGANDVSMILEAHVGIGVIGKEGRQAARNSDYAIPKFKHLKKMLLVHGHFYYIRISELVQYFFYKNVCFIFPQFLYQFFCGFSQQTLYDTAYLTLYNISFTSLPILLYSLMEQHVGIDVLKRDPTLYRDVAKNALLRWRVFIYWTLLGLFDALVFFFGAYFVFENTTVTSNGQIFGNWTFGTLVFTVMVFTVTLKLALDTHYWTWINHFVIWGSLLFYVVFSLLWGGVIWPFLNYQRMYYVFIQMLSSGPAWLAIVLLVTISLLPDVLKKVLCRQLWPTATERVQTKSQCLSVEQSTIFMLSQTSSSLSF

SEQ ID NO: 17190 - protein, 552 aa, Artificial Sequence
  Synthetic polypeptide
QAPVVLATWEAEEGGSLEPRSWRLRLQEKAADTIEALQKAGIKVWVLTGDKMETAAATCYACKLFRRNTQLLELTTKRIEEQSLHDVLFELSKTVLRHSGSLTRDNLSGLSADMQDYGLIIDGAALSLIMKPREDGSSGNYRELFLEICRSCSAVLCCRMAPLQKAQIVKLIKFSKEHPITLAIGDGANDVSMILEAHVGIGVIGKEGRQAARNSDYAIPKFKHLKKMLLVHGHFYYIRISELVQYFFYKNVCFIFPQFLYQFFCGFSQQTLYDTAYLTLYNISFTSLPILLYSLMEQHVGIDVLKRDPTLYRDVAKNALLRWRVFIYWTLLGLFDALVFFFGAYFVFENTTVTSNGQIFGNWTFGTLVFTVMVFTVTLKLALDTHYWTWINHFVIWGSLLFYVVFSLLWGGVIWPFLNYQRMYYVFIQMLSSGPAWLAIVLLVTISLLPDVLKKVLCRQLWPTATERVQNGCAQPRDRDSEFTPLASLQSPGYQSTCPSAAWYSSHSQQVTLAAWKEKVSTEPPPILGGSHHHCSSIPSHSCPRSRVGMLV

SEQ ID NO: 17191 - protein, 321 aa, Artificial Sequence
  Synthetic polypeptide
QAPVVLATWEAEEGGSLEPRSWRLRLQEKAADTIEALQKAGIKVWVLTGDKMETAAATCYACKLFRRNTQLLELTTKRIEEQSLHDVLFELSKTVLRHSGSLTRDNLSGLSADMQDYGLIIDGAALSLIMKPREDGSSGNYRELFLEICRSCSAVLCCRMAPLQKAQIVKLIKFSKEHPITLAIGDGANDVSMILEAHVGIGVIGKEGRQAARNSDYAIPKFKHLKKMLLVHGHFYYIRISELVQYFFYKNVCFIFPQFLYQFFCGFSQQTLYDTAYLTLYNISFTSLPILLYSLMEQHVGIDVLKRDPTLYRYHPPNSLS

SEQ ID NO: 17192 - protein, 292 aa, Artificial Sequence
  Synthetic polypeptide
QAPVVLATWEAEEGGSLEPRSWRLRLQEKAADTIEALQKAGIKVWVLTGDKMETAAATCYACKLFRRNTQLLELTTKRIEEQSLHDVLFELSKTVLRHSGSLTRDNLSGLSADMQDYGLIIDGAALSLIMKPREDGSSGNYRELFLEICRSCSAVLCCRMAPLQKAQIVKLIKFSKEHPITLAIGDGANDVSMILEAHVGIGVIGKEGRQAARNSDYAIPKFKHLKKMLLVHGHFYYIRISELVQYFFYKNVCFIFPQFLYQFFCGFSQQGRRQECPAALARVHLLDAPGTV

SEQ ID NO: 17193 - protein, 1094 aa, Artificial Sequence
  Synthetic polypeptide
CGGMAARACCWWAHEIMHQDIVPLCAADIQDQLKKRFAYLSGGRGQDGSPVITFPDYPAFSEIPDKEFQNVMTYLTSIPSLQDAGIGFILVIDRRRDKWTSVKASVLRIAASFPANLQLVLVLRPTGFFQRTLSDIAFKFNRDDFKMKVPVIMLSSVPDLHGYIDKSQLTEDLGGTLDYCHSRWLCQRTAIESFALMVKQTAQMLQSFGTELAETELPNDVQSTSSVLCAHTEKKDKAKEDLRLALKEGHSVLESLRELQAEGSEPSVNQDQLDNQATVQRLLAQLNETEAAFDEFWAKHQQKLEQCLQLRHFEQGFREVKAILDAASQKIATFTDIGNSLAHVEHLLRDLASFEEKSGVAVERARALSLDGEQLIGNKHYAVDSIRPKCQELRHLCDQFSAEIARRRGLLSKSLELHRRLETSMKWCDEGIYLLASQPVDKCQSQDGAEAALQEIEKFLETGAENKIQELNAIYKEYESILNQDLMEHVRKVFQKQASMEEVFHRRQASLKKLAARQTRPVQPVAPRPEALAKSPCPSPGIRRGSENSSSEGGALRRGPYRRAKSEMSESRQGRGSAGEEEESLAILRRHVMSELLDTERAYVEELLCVLEGYAAEMDNPLMAHLLSTGLHNKKDVLFGNMEEIYHFHNRIFLRELENYTDCPELVGRCFLERMEDFQIYEKYCQNKPRSESLWRQCSDCPFFQECQRKLDHKLSLDSYLLKPVQRITKYQLLLKEMLKYSRNCEGAEDLQEALSSILGILKAVNDSMHLIAITGYDGNLGDLGKLLMQGSFSVWTDHKRGHTKVKELARFKPMQRHLFLHEKAVLFCKKREENGEGYEKAPSYSYKQSLNMAAVGITENVKGDAKKFEIWYNAREEVYIVQAPTPEIKAAWVNEIRKVLTSQLQACREASQHRALEQSQSLPLPAPTSTSPSRGNSRNIKKLEERKTDPLSLEGYVSSAPLTKPPEKGKGWSKTSHSLEAPEDDGGWSSAEEQINSSDAEEDGGLGPKKLVPGKYTVVADHEKGGPDALRVRSGDVVELVQEGDEGLWYVRDPTTGKEGWVPASSLSVRLGPSGSAQCLSSSGKAHVPRAHP

SEQ ID NO: 17194 - protein, 32 aa, Artificial Sequence
  Synthetic polypeptide
AEAWQPVHAVGGHMKSCTRTSSRSVLPTSRTS

SEQ ID NO: 17195 - protein, 13 aa, Artificial Sequence
  Synthetic polypeptide
RRHGSPCMLLVGT

SEQ ID NO: 17196 - protein, 1112 aa, Artificial Sequence
  Synthetic polypeptide
CGGMAARACCWWAHEIMHQDIVPLCAADIQDQLKKRFAYLSGGRGQDGSPVITFPDYPAFSEIPDKEFQNVMTYLTSIPSLQDAGIGFILVIDRRRDKWTSVKASVLRIAASFPANLQLVLVLRPTGFFQRTLSDIAFKFNRDDFKMKVPVIMLSSVPDLHGYIDKSQLTEDLGGTLDYCHSRWLCQRTAIESFALMVKQTAQMLQSFGTELAETELPNDVQSTSSVLCAHTEKKDKAKEDLRLALKEGHSVLESLRELQAEGSEPSVNQDQLDNQATVQRLLAQLNETEAAFDEFWAKHQQKLEQCLQLRHFEQGFREVKAILDAASQKIATFTDIGNSLAHVEHLLRDLASFEEKSGVAVERARALSLDGEQLIGNKHYAVDSIRPKCQELRHLCDQFSAEIARRRGLLSKSLELHRRLETSMKWCDEGIYLLASQPVDKCQSQDGAEAALQEIEKFLETGAENKIQELNAIYKEYESILNQDLMEHVRKVFQKQASMEEVFHRRQASLKKLAARQTRPVQPVAPRPEALAKSPCPSPGIRRGSENSSSEGGALRRGPYRRAKSEMSESRQGRGSAGEEEESLAILRRHVMSELLDTERAYVEELLCVLEGYAAEMDNPLMAHLLSTGLHNKKDVLFGNMEEIYHFHNRIFLRELENYTDCPELVGRCFLERMEDFQIYEKYCQNKPRSESLWRQCSDCPFFQECQRKLDHKLSLDSYLLKPVQRITKYQLLLKEMLKYSRNCEGAEDLQEALSSILGILKAVNDSMHLIAITGYDGNLGDLGKLLMQGSFSVWTDHKRGHTKVKELARFKPMQRHLFLHEKAVLFCKKREENGEGYEKAPSYSYKQSLNMAAVGITENVKGDAKKFEIWYNAREEVYIVQAPTPEIKAAWVNEIRKVLTSQLQACREASQHRALEQSQSLPLPAPTSTSPSRGNSRNIKKLEERKTDPLSLEGYVSSAPLTKPPEKGKGWSKTSHSLEAPEDDGGWSSAEEQINSSDAEEDGGLGPKKLVPGKYTVVADHEKGGPDALRVRSGDVVELVQEGDEGLWYVRDPTTGKEGWVPASSLSVRLGPSGSAQCLSSSESSPGSAVLSNSSSCSEGGQAPFSDLQG

SEQ ID NO: 17197 - protein, 1050 aa, Artificial Sequence
  Synthetic polypeptide
CGGMAARACCWWAHEIMHQDIVPLCAADIQDQLKKRFAYLSGGRGQDGSPVITFPDYPAFSEIPDKEFQNVMTYLTSIPSLQDAGIGFILVIDRRRDKWTSVKASVLRIAASFPANLQLVLVLRPTGFFQRTLSDIAFKFNRDDFKMKVPVIMLSSVPDLHGYIDKSQLTEDLGGTLDYCHSRWLCQRTAIESFALMVKQTAQMLQSFGTELAETELPNDVQSTSSVLCAHTEKKDKAKEDLRLALKEGHSVLESLRELQAEGSEPSVNQDQLDNQATVQRLLAQLNETEAAFDEFWAKHQQKLEQCLQLRHFEQGFREVKAILDAASQKIATFTDIGNSLAHVEHLLRDLASFEEKSGVAVERARALSLDGEQLIGNKHYAVDSIRPKCQELRHLCDQFSAEIARRRGLLSKSLELHRRLETSMKWCDEGIYLLASQPVDKCQSQDGAEAALQEIEKFLETGAENKIQELNAIYKEYESILNQDLMEHVRKVFQKQASMEEVFHRRQASLKKLAARQTRPVQPVAPRPEALAKSPCPSPGIRRGSENSSSEGGALRRGPYRRAKSEMSESRQGRGSAGEEEESLAILRRHVMSELLDTERAYVEELLCVLEGYAAEMDNPLMAHLLSTGLHNKKDVLFGNMEEIYHFHNRIFLRELENYTDCPELVGRCFLERMEDFQIYEKYCQNKPRSESLWRQCSDCPFFQECQRKLDHKLSLDSYLLKPVQRITKYQLLLKEMLKYSRNCEGAEDLQEALSSILGILKAVNDSMHLIAITGYDGNLGDLGKLLMQGSFSVWTDHKRGHTKVKELARFKPMQRHLFLHEKAVLFCKKREENGEGYEKAPSYSYKQSLNMAAVGITENVKGDAKKFEIWYNAREEVYIVQAPTPEIKAAWVNEIRKVLTSQLQACREASQHRALEQSQSLPLPAPTSTSPSRGNSRNIKKLEERKTDPLSLEGYVSSAPLTKPPEKGKGWSKTSHSLEAPEDDGGWSSAEEQINSSDAEEDGGLGPKKLVPGKYTVVADHEKGGPDALRVRSGDVVELVQEGDEGLW

SEQ ID NO: 17198 - protein, 78 aa, Artificial Sequence
  Synthetic polypeptide
CGGMAARACCWWAHEIMHQDIVPLCAADIQDQLKKRFAYLSGGRGQDGSPVITFPDYPAFSEIPDKEFQNVMTYLTSI

SEQ ID NO: 17199 - protein, 973 aa, Artificial Sequence
  Synthetic polypeptide
CGGMAARACCWWAHEIMHQDIVPLCAADIQDQLKKRFAYLSGGRGQDGSPVITFPDYPAFSEIPDKEFQNVMTYLTSIPSLQDAGIGFILVIDRRRDKWTSVKASVLRIAASFPANLQLVLVLRPTGFFQRTLSDIAFKFNRDDFKMKVPVIMLSSVPDLHGYIDKSQLTEDLGGTLDYCHSRWLCQRTAIESFALMVKQTAQMLQSFGTELAETELPNDVQSTSSVLCAHTEKKDKAKEDLRLALKEGHSVLESLRELQAEGSEPSVNQDQLDNQATVQRLLAQLNETEAAFDEFWAKHQQKLEQCLQLRHFEQGFREVKAILDAASQKIATFTDIGNSLAHVEHLLRDLASFEEKSGVAVERARALSLDGEQLIGNKHYAVDSIRPKCQELRHLCDQFSAEIARRRGLLSKSLELHRRLETSMKWCDEGIYLLASQPVDKCQSQDGAEAALQEIEKFLETGAENKIQELNAIYKEYESILNQDLMEHVRKVFQKQASMEEVFHRRQASLKKLAARQTRPVQPVAPRPEALAKSPCPSPGIRRGSENSSSEGGALRRGPYRRAKSEMSESRQGRGSAGEEEESLAILRRHVMSELLDTERAYVEELLCVLEGYAAEMDNPLMAHLLSTGLHNKKDVLFGNMEEIYHFHNRIFLRELENYTDCPELVGRCFLERMEDFQIYEKYCQNKPRSESLWRQCSDCPFFQECQRKLDHKLSLDSYLLKPVQRITKYQLLLKEMLKYSRNCEGAEDLQEALSSILGILKAVNDSMHLIAITGYDGNLGDLGKLLMQGSFSVWTDHKRGHTKVKELARFKPMQRHLFLHEKAVLFCKKREENGEGYEKAPSYSYKQSLNMAAVGITENVKGDAKKFEIWYNAREEVYIVQAPTPEIKAAWVNEIRKVLTSQLQACREASQHRALEQSQSLPLPAPTSTSPSRGNSRNIKKLEERKTDPLSLEGYVSSAPLTKPPEKGKEP

SEQ ID NO: 17200 - protein, 125 aa, Artificial Sequence
  Synthetic polypeptide
CGGMAARACCWWAHEIMHQDIVPLCAADIQDQLKKRFAYLSGGRGQDGSPVITFPDYPAFSEIPDKEFQNVMTYLTSIPSGGQESSIRPVSCRLTWEGCRGGLSSDVLVPASRKMLRMSASHQTV

SEQ ID NO: 17201 - protein, 351 aa, Artificial Sequence
  Synthetic polypeptide
RSKHVDSKLRAGNKEATDEELERTLDKIMILFRFIHGKDVFEAFYKKDLAKRLLVGKSASVDAEKSMLSKLKHECGAAFTSKLEGMFKDMELSKDIMVHFKQHMQNQSDSGPIDLTVNILTMGYWPTYTPMEVHLTPEMIKLQEVFKAFYLGKHSGRKLQWQTTLGHAVLKAEFKEGKKEFQVSLFQTLVLLMFNEGDGFSFEEIKMATGIEDSELRRTLQSLACGKARVLIKSPKGKEVEDGDKFIFNGEFKHKLFRIKINQIQMKETVEEQVSTTERVFQDRQYQIDAAIVRIMKMRKTLGHNLLVSELYNQLKFPVKPGDLKKRIESLIDRDYMERDKDNPNQYHYVA

SEQ ID NO: 17202 - protein, 14 aa, Artificial Sequence
  Synthetic polypeptide
LLITAEDQSMWIQS

SEQ ID NO: 17203 - protein, 40 aa, Artificial Sequence
  Synthetic polypeptide
LLLKIKACGFKVKSRQQRSHRRGAGADVGQDHDPVQVYPR

SEQ ID NO: 17204 - protein, 45 aa, Artificial Sequence
  Synthetic polypeptide
GWVQWLTPVIPALWEAEVGRSQGQEIETILADMTTGAWMICTGRW

SEQ ID NO: 17205 - protein, 299 aa, Artificial Sequence
  Synthetic polypeptide
GGQITRSGDRDHPGRHDYWCLDDLYREMVRCYVEIVEKLPERRPDPATIEGCAQLKPNNYLLAWHTPFNEKGSGFGAATKAMCIGLRYWKPERLETLIEVSVECGRMTHNHPTGFLGSLCTALFVSFAAQGKPLVQWGRDMLRAVPLAEEYCRKTIRHTAEYQEHWFYFEAKWQFYLEERKISKDSENKAIFPDNYDAEEREKTYRKWSSEGRGGRRGHDAPMIAYDALLAAGNSWTELCHRAMFHGGESAATGTIAGCLFGLLYGLDLVPKGLYQDLEDKEKLEDLGAALYRLSTEEK

SEQ ID NO: 17206 - protein, 305 aa, Artificial Sequence
  Synthetic polypeptide
GWVQWLTPVIPALWEAEVGRSQDYWCLDDLYREMVRCYVEIVEKLPERRPDPATIEGCAQLKPNNYLLAWHTPFNEKGSGFGAATKAMCIGLRYWKPERLETLIEVSVECGRMTHNHPTGFLGSLCTALFVSFAAQGKPLVQWGRDMLRAVPLAEEYCRKTIRHTAEYQEHWFYFEAKWQFYLEERKISKDSENKAIFPDNYDAEEREKTYRKWSSEGRGGRRGHDAPMIAYDALLAAGNSWTELCHRAMFHGGESAATGTIAGCLFGLLYGLDLVPKGLYQDLEDKEKLEDLGAALYRLSTEEK

SEQ ID NO: 17207 - protein, 25 aa, Artificial Sequence
  Synthetic polypeptide
SQHFGRLRWADHKTTGAWMICTGRW

SEQ ID NO: 17208 - protein, 11 aa, Artificial Sequence
  Synthetic polypeptide
GGQITRLLVPG

SEQ ID NO: 17209 - protein, 29 aa, Artificial Sequence
  Synthetic polypeptide
GWVQWLTPVIPALWEAETTGAWMICTGRW

SEQ ID NO: 17210 - protein, 13 aa, Artificial Sequence
  Synthetic polypeptide
SQHFGRLRLLVPG

SEQ ID NO: 17211 - protein, 23 aa, Artificial Sequence
  Synthetic polypeptide
VCHLSLPGRQVPAEGEKQHLLLL

SEQ ID NO: 17212 - protein, 186 aa, Artificial Sequence
  Synthetic polypeptide
CVTCHSLDGKCQLKVRSNTCYCCDLYACGSAEPSPAYYEFIGVSGCQDVLHLYRLLWASAVLNVLGLFLGIITAAVLGAFKDMVPLSQLAYGPAVPPQTLYNPAQQILAYAGFRLTPEPVPTCSSYPLPLQPCSRFPVAPSSALASSEDLQPPSPSSSGSGLPGQAPPCYAPTYFPPGEKPPPYAP

SEQ ID NO: 17213 - protein, 14 aa, Artificial Sequence
  Synthetic polypeptide
VCVSPVTPWTASAS

SEQ ID NO: 17214 - protein, 24 aa, Artificial Sequence
  Synthetic polypeptide
CVCHLSLPGRQVPAEGEKQHLLLL

SEQ ID NO: 17215 - protein, 187 aa, Artificial Sequence
  Synthetic polypeptide
VCVTCHSLDGKCQLKVRSNTCYCCDLYACGSAEPSPAYYEFIGVSGCQDVLHLYRLLWASAVLNVLGLFLGIITAAVLGAFKDMVPLSQLAYGPAVPPQTLYNPAQQILAYAGFRLTPEPVPTCSSYPLPLQPCSRFPVAPSSALASSEDLQPPSPSSSGSGLPGQAPPCYAPTYFPPGEKPPPYAP

SEQ ID NO: 17216 - protein, 41 aa, Artificial Sequence
  Synthetic polypeptide
MLILTFMPPGLFLPKILRLHQQVWVSVHQKLRLRHLRAKPA

SEQ ID NO: 17217 - protein, 641 aa, Artificial Sequence
  Synthetic polypeptide
PSCPQDYFYPRYLDCINKYGSPYTKNSGFATCVQNLPDQCTPNPCDRKGTQACQDLMGNFFCLCKAGWGGRLCDKDVNECSQENGGCLQICHNKPGSFHCSCHSGFELSSDGRTCQDIDECADSEACGEARCKNLPGSYSCLCDEGFAYSSQEKACRDVDECLQGRCEQVCVNSPGSYTCHCDGRGGLKLSQDMDTCELEAGWPLPRHRRDSGPAARPGRGAQGSRSEGHIPDRRGPRPWQDILPCVPFSVAKSVKSLYLGRMFSGTPVIRLRFKRLQPTRLVAEFDFRTFDPEGILLFAGGHQDSTWIVLALRAGRLELQLRYNGVGRVTSSGPVINHGMWQTISVEELARNLVIKVNRDAVMKIAVAGDLFQPERGLYHLNLTVGGIPFHEKDLVQPINPRLDGCMRSWNWLNGEDTTIQETVKVNTRMQCFSVTERGSFYPGSGFAFYSLDYMRTPLDVGTESTWEVEVVAHIRPAADTGVLFALWAPDLRAVPLSVALVDYHSTKKLKKQLVVLAVEHTALALMEIKVCDGQEHVVTVSLRDGEATLEVDGTRGQSEVSAAQLQERLAVLERHLRSPVLTFAGGLPDVPVTSAPVTAFYRGCMTLEVNRRLLDLDEAAYKHSDITAHSCPPVEPAAA

SEQ ID NO: 17218 - protein, 16 aa, Artificial Sequence
  Synthetic polypeptide
ANPDLHAPRIIFTQDT

SEQ ID NO: 17219 - protein, 598 aa, Artificial Sequence
  Synthetic polypeptide
PSCPQDYFYPRYLDCINKYGSPYTKNSGFATCVQNLPDQCTPNPCDRKGTQACQDLMGNFFCLCKAGWGGRLCDKDVNECSQENGGCLQICHNKPGSFHCSCHSGFELSSDGRTCQDIDECADSEACGEARCKNLPGSYSCLCDEGFAYSSQEKACRDVDECLQGRCEQVCVNSPGSYTCHCDGRGGLKLSQDMDTCEDILPCVPFSVAKSVKSLYLGRMFSGTPVIRLRFKRLQPTRLVAEFDFRTFDPEGILLFAGGHQDSTWIVLALRAGRLELQLRYNGVGRVTSSGPVINHGMWQTISVEELARNLVIKVNRDAVMKIAVAGDLFQPERGLYHLNLTVGGIPFHEKDLVQPINPRLDGCMRSWNWLNGEDTTIQETVKVNTRMQCFSVTERGSFYPGSGFAFYSLDYMRTPLDVGTESTWEVEVVAHIRPAADTGVLFALWAPDLRAVPLSVALVDYHSTKKLKKQLVVLAVEHTALALMEIKVCDGQEHVVTVSLRDGEATLEVDGTRGQSEVSAAQLQERLAVLERHLRSPVLTFAGGLPDVPVTSAPVTAFYRGCMTLEVNRRLLDLDEAAYKHSDITAHSCPPVEPAAA

SEQ ID NO: 17220 - protein, 9 aa, Artificial Sequence
  Synthetic polypeptide
SDPQRQKVG

SEQ ID NO: 17221 - protein, 880 aa, Artificial Sequence
  Synthetic polypeptide
ARRGPFASWKLFNLKIEGNPVSGHSRGHPGGHLLSRVSRAERTRPVDPADVRPQSSQIHRDRKWGEAKNLPSYPGPSKMRDCYCTVNLDQEEVFRTKIVEKSLCPFYGEDFYCEIPRSFRHLSFYIFDRDVFRRDSIIGKVAIQKEDLQKYHNRDTWFQLQHVDADSEVQGKVHLELRLSEVITDTGVVCHKLATRIVECQGLPIVNGQCDPYATVTLAGPFRSEAKKTKVKRKTNNPQFDEVFYFEVTRPCSYSKKSHFDFEEEDVDKLEIRVDLWNASNLKFGDEFLGELRIPLKVLRQSSSYEAWYFLQPRDNGSKSLKPDDLGSLRLNVVYTEDHVFSSDYYSPLRDLLLKSADVEPVSASAAHILGEVCREKQEAAVPLVRLFLHYGRVVPFISAIASAEVKRTQDPNTIFRGNSLASKCIDETMKLAGMHYLHVTLKPAIEEICQSHKPCEIDPVKLKDGENLENNMENLRQYVDRVFHAITESGVSCPTVMCDIFFSLREAAAKRFQDDPDVRYTAVSSFIFLRFFAPAILSPNLFQLTPHHTDPQTSRTLTLISKTVQTLGSLSKSKSASFKESYMATFYEFFNEQKYADAVKNFLDLISSSGRRDPKSVEQPIVLKEGFMIKRAQGRKRFGMKNFKKRWFRLTNHEFTYHKSKGDQPLYSIPIENILAVEKLEEESFKMKNMFQVIQPERALYIQANNCVEAKDWIDILTKVSQCNQKRLTVYHPSAYLSGHWLCCRAPSDSAPGCSPCTGGLPANIQLDIDGDRETERIYSLFNLYMSKLEKMQEACGSKSVYDGPEQEEYSTFVIDDPQETYKTLKQVIAGVGALEQEHAQYKRDKFKKTKYGSQEHPIGDKSFQNYIRQQSETSTHSI

SEQ ID NO: 17222 - protein, 27 aa, Artificial Sequence
  Synthetic polypeptide
GPRVVRSTETESGVKPKTFPLTRGRAR

SEQ ID NO: 17223 - protein, 178 aa, Artificial Sequence
  Synthetic polypeptide
ARRGPFASWKLFNLKIEGNPVSGHSRGHPGGHLLSRVSRAERTRPVDPADVRPQSSQIHRDRKWGEAKNLPSYPGPSKMRDCYCTVNLDQEEVFRTKIVEKSLCPFYGEDFYCEIPRSFRHLSFYIFDRDVFRRDSIIGQSAPGAAAERGHHRHWGRLPQARHTHRRVPGPPHREWAM

SEQ ID NO: 17224 - protein, 62 aa, Artificial Sequence
  Synthetic polypeptide
LPYCNLLGQGLTAFESLVPSKHCMKHVVTLQLGAIMLQKSTSRPLMFLTWKSPSIKDYLKNT

SEQ ID NO: 17225 - protein, 23 aa, Artificial Sequence
  Synthetic polypeptide
SPTVTSWGRALLLLNPWCLVNIV

SEQ ID NO: 17226 - protein, 554 aa, Artificial Sequence
  Synthetic polypeptide
TLYEACRYLAARCHYAAKEHQQALDVLDMEEPINKRLFEKYLKDESGFKDPSSDWEMSQSSIKSSICLLRGKIYDALDNRTLATYSYKEALKLDVYCFEAFDLLTSHHMLTAQEEKELLESLPLSKLCNEEQELLRFLFENKLKKYNKPSETVIPESVDGLQENLDVVVSLAERHYYNCDFKMCYKLTSVVMEKDPFHASCLPVHIGTLVELNKANELFYLSHKLVDLYPSNPVSWFAVGCYYLMVGHKNEHARRYLSKATTLEKTYGPAWIAYGHSFAVESEHDQAMAAYFTAAQLMKGCHLPMLYIGLEYGLTNNSKLAERFFSQALSIAPEDPFVMHEVGVVAFQNGEWKTAEKWFLDALEKIKAIGNEVTVDKWEPLLNNLGHVCRKLKKYAEALDYHRQALVLIPQNASTYSAIGYIHSLMGNFENAVDYFHTALGLRRDDTFSVTMLGHCIEMYIGDSEAYIGADIKDKLKCYDFDVHTMKTLKNIISPPWDFREFEVEKQTAEETGLTPLETSRKTPDSRPSLEETFEIEMNESDMMLETSMSDHST

SEQ ID NO: 17227 - protein, 338 aa, Artificial Sequence
  Synthetic polypeptide
CMCLEYPAVVEFAPFQKIAKKKLRKKDAKTGSIEDDPEYKKFLETYCVEEEKTSANPETLLGEMEAKTRELIARRTTPLLEYIKNRKLEKQRIREEKREERRRRELEKKRLREEEKRRRREEERCKKKETDKQKKIAEKEVRIKLLKKPEKGEEPTTEKPKERGEEIDTGGGKQESCAPGAVVKARPMEGSLEEPQETSHSGSDKEHRDVERSQEQESEAQRYHVDDGRRHRAHHEPERLSRRSEDEQRWGKGPGQDRGKKGSQDSGAPGEAMERLGRAQRCDDSPAPRKERLANKDRPALQLYDPGARFRARECGGNRRICKAEGSGTGPEKREEAE

SEQ ID NO: 17228 - protein, 3 aa, Artificial Sequence
  Synthetic polypeptide
VCA

SEQ ID NO: 17229 - protein, 34 aa, Artificial Sequence
  Synthetic polypeptide
YVPRISCSGRVCSIPEDSQKEAEKKRCQDWKHRR

SEQ ID NO: 17230 - protein, 305 aa, Artificial Sequence
  Synthetic polypeptide
CMYPEYKKFLETYCVEEEKTSANPETLLGEMEAKTRELIARRTTPLLEYIKNRKLEKQRIREEKREERRRRELEKKRLREEEKRRRREEERCKKKETDKQKKIAEKEVRIKLLKKPEKGEEPTTEKPKERGEEIDTGGGKQESCAPGAVVKARPMEGSLEEPQETSHSGSDKEHRDVERSQEQESEAQRYHVDDGRRHRAHHEPERLSRRSEDEQRWGKGPGQDRGKKGSQDSGAPGEAMERLGRAQRCDDSPAPRKERLANKDRPALQLYDPGARFRARECGGNRRICKAEGSGTGPEKREEAE

SEQ ID NO: 17231 - protein, 9 aa, Artificial Sequence
  Synthetic polypeptide
VCIQNIRSF

SEQ ID NO: 17232 - protein, 5 aa, Artificial Sequence
  Synthetic polypeptide
YVSRI

SEQ ID NO: 17233 - protein, 36 aa, Artificial Sequence
  Synthetic polypeptide
CMCMPRISCSGRVCSIPEDSQKEAEKKRCQDWKHRR

SEQ ID NO: 17234 - protein, 339 aa, Artificial Sequence
  Synthetic polypeptide
VCVCLEYPAVVEFAPFQKIAKKKLRKKDAKTGSIEDDPEYKKFLETYCVEEEKTSANPETLLGEMEAKTRELIARRTTPLLEYIKNRKLEKQRIREEKREERRRRELEKKRLREEEKRRRREEERCKKKETDKQKKIAEKEVRIKLLKKPEKGEEPTTEKPKERGEEIDTGGGKQESCAPGAVVKARPMEGSLEEPQETSHSGSDKEHRDVERSQEQESEAQRYHVDDGRRHRAHHEPERLSRRSEDEQRWGKGPGQDRGKKGSQDSGAPGEAMERLGRAQRCDDSPAPRKERLANKDRPALQLYDPGARFRARECGGNRRICKAEGSGTGPEKREEAE

SEQ ID NO: 17235 - protein, 4 aa, Artificial Sequence
  Synthetic polypeptide
YVYA

SEQ ID NO: 17236 - protein, 7 aa, Artificial Sequence
  Synthetic polypeptide
CMCISRI

SEQ ID NO: 17237 - protein, 306 aa, Artificial Sequence
  Synthetic polypeptide
VCVYPEYKKFLETYCVEEEKTSANPETLLGEMEAKTRELIARRTTPLLEYIKNRKLEKQRIREEKREERRRRELEKKRLREEEKRRRREEERCKKKETDKQKKIAEKEVRIKLLKKPEKGEEPTTEKPKERGEEIDTGGGKQESCAPGAVVKARPMEGSLEEPQETSHSGSDKEHRDVERSQEQESEAQRYHVDDGRRHRAHHEPERLSRRSEDEQRWGKGPGQDRGKKGSQDSGAPGEAMERLGRAQRCDDSPAPRKERLANKDRPALQLYDPGARFRARECGGNRRICKAEGSGTGPEKREEAE

SEQ ID NO: 17238 - protein, 10 aa, Artificial Sequence
  Synthetic polypeptide
YVYIQNIRSF

SEQ ID NO: 17239 - protein, 25 aa, Artificial Sequence
  Synthetic polypeptide
SQHFGRPKRVDHLRFLDLPVSFISQ

SEQ ID NO: 17240 - protein, 113 aa, Artificial Sequence
  Synthetic polypeptide
GVRWLTPIIPALWEAEAGGSLEILGSPSQLHFPVIRNSQGWILYHQWPYFVSRISSLQPNNNLLNQLKSLVQIAKSLYRRDRQLINEKDQLTSFALPPAFLPSLINVLKTHEA

SEQ ID NO: 17241 - protein, 474 aa, Artificial Sequence
  Synthetic polypeptide
PVIPALWEAKVPVPVFLPAPLDSSEKIPAAIEELKSKVSSDALDTELLTMTDMMSEDEGKTETTNINSVIIETDIIGSDLLKNSDPETQSSMPDVPYEPDLDIEIDFPRAAEELDMENEFLLPPVFGEEYEEQPRPRSKKKGAKRKAVSGYQSHDDSSDNSECSFPFKYTYGVNAWKHWVKTRQLDEDLLVLDELKSSKSVKLKEDLLSHTTAELNYGLAHFVNEIRRPNGENYAPDSIYYLCLGIQEYLCGSNRKDNIFIDPGYQTFEQELNKILRSWQPSILPDGSIFSRVEEDYLWRIKQLGSHSPVALLNTLFYFNTKYFGLKTVEQHLRLSFGTVFRHWKKNPLTMENKACLRYQVSSLCGTDNEDKITTGKRKHEDDEPVFEQIENTANPSRCPVKMFECYLSKSPQNLNQRMDVFYLQPECSSSTDSPVWYTSTSLDRNTLENMLVRVLLVKDIYDKDNYELDEDTD

SEQ ID NO: 17242 - protein, 31 aa, Artificial Sequence
  Synthetic polypeptide
SQHFGRLRCQFLFFCLLHWTAVRRFLQQLRS

SEQ ID NO: 17243 - protein, 40 aa, Artificial Sequence
  Synthetic polypeptide
DSPLNYQVQRGVGVKQQSHLLYLLGLSTNDAKCAPGSRDR

SEQ ID NO: 17244 - protein, 31 aa, Artificial Sequence
  Synthetic polypeptide
RMRLSSKLPGPERRGSETAVTSPLPSWAKYK

SEQ ID NO: 17245 - protein, 161 aa, Artificial Sequence
  Synthetic polypeptide
SQLFRRLRQKNRLNEGGGGSGEPRSRHCTPDWATQQDSSISLDEFKSFCHFTTHLEDFAIAMQMFSLAHRPVRLAEFKRAVKVATGQELSNNILDTVFKIFDLDGDECLSHEEFLGVLKNRMHRGLWVPQHQSIQEYWKCVKKESIKGVKEVWKQAGKGLF

SEQ ID NO: 17246 - protein, 53 aa, Artificial Sequence
  Synthetic polypeptide
MREAEVLVSQDHATALQTGQHSKTPALVWMNSSHFAILQPTWKTLLLPCRCSV

SEQ ID NO: 17247 - protein, 18 aa, Artificial Sequence
  Synthetic polypeptide
AKITPLHSRLGNTARLQH

SEQ ID NO: 17248 - protein, 22 aa, Artificial Sequence
  Synthetic polypeptide
KKPKKKKHLICRKTMVKLQSRS

SEQ ID NO: 17249 - protein, 25 aa, Artificial Sequence
  Synthetic polypeptide
RTEEREKNLERSQRRKNTLSVEKQW

SEQ ID NO: 17250 - protein, 318 aa, Artificial Sequence
  Synthetic polypeptide
KNNGKTSVKKLTKKDIEDTLSGIQTAGCGSTFFRDLGDKGLISYTEYLFLLTILTKPHSGFHVAFKMLDTDGNEMIEKREFFKLQKIISKQDDLMTVKTNETGYQEAIVKEPEINTTLQMRFFGKRGQRKLHYKEFRRFMENLQTEIQEMEFLQFSKGLSFMRKEDFAEWLLFFTNTENKDIYWKNVREKLSAGESISLDEFKSFCHFTTHLEDFAIAMQMFSLAHRPVRLAEFKRAVKVATGQELSNNILDTVFKIFDLDGDECLSHEEFLGVLKNRMHRGLWVPQHQSIQEYWKCVKKESIKGVKEVWKQAGKGLF

SEQ ID NO: 17251 - protein, 120 aa, Artificial Sequence
  Synthetic polypeptide
KNNGKTSVKKLTKKDIEDTLSGIQTAGCGSTFFRDLGDKGLISYTEYLFLLTILTKPHSGFHVAFKMLDTDGNEMIEKREFFKIDTIDSERQLQKIISKQDDLMTVKTNETGYQEAIVKE

SEQ ID NO: 17252 - protein, 9 aa, Artificial Sequence
  Synthetic polypeptide
EPTTGASFR

SEQ ID NO: 17253 - protein, 353 aa, Artificial Sequence
  Synthetic polypeptide
IHQRIEVTLELETEGKQIHRVSLLPTETSKNPPLEPASGKTSVKKLTKKDIEDTLSGIQTAGCGSTFFRDLGDKGLISYTEYLFLLTILTKPHSGFHVAFKMLDTDGNEMIEKREFFKLQKIISKQDDLMTVKTNETGYQEAIVKEPEINTTLQMRFFGKRGQRKLHYKEFRRFMENLQTEIQEMEFLQFSKGLSFMRKEDFAEWLLFFTNTENKDIYWKNVREKLSAGESISLDEFKSFCHFTTHLEDFAIAMQMFSLAHRPVRLAEFKRAVKVATGQELSNNILDTVFKIFDLDGDECLSHEEFLGVLKNRMHRGLWVPQHQSIQEYWKCVKKESIKGVKEVWKQAGKGLF

SEQ ID NO: 17254 - protein, 46 aa, Artificial Sequence
  Synthetic polypeptide
RFIRELRSHLSWKLKASRSIESAYYQQKPLRTHHWSQLQVKLQSRS

SEQ ID NO: 17255 - protein, 155 aa, Artificial Sequence
  Synthetic polypeptide
IHQRIEVTLELETEGKQIHRVSLLPTETSKNPPLEPASGKTSVKKLTKKDIEDTLSGIQTAGCGSTFFRDLGDKGLISYTEYLFLLTILTKPHSGFHVAFKMLDTDGNEMIEKREFFKIDTIDSERQLQKIISKQDDLMTVKTNETGYQEAIVKE

SEQ ID NO: 17256 - protein, 77 aa, Artificial Sequence
  Synthetic polypeptide
GRVRWLMPVIPALWEAEEGGSRGLISASTINPECDCKCAQLRRGGHRQVKSRSQNGRSPESTVSDQLQRRQATIYCR

SEQ ID NO: 17257 - protein, 205 aa, Artificial Sequence
  Synthetic polypeptide
SQHFGRPRRADHEDSSLLLQSTQNVTVNARNSEGEVTGRLKVGPKMVEVQNQQFQINSNDGKPLFTVDEKEVVVGTDKLRVTGPEGALFEHSVETPLVRADPFQDLRLESPTRSLSMDAPRGVHIQAHAGKIEALSQMDILFHSSDGMLVLDAETVCLPKLVQGTWGPSGSSQSLYEICVCPDGKLYLSVAGVSTTCQEHNHICL

SEQ ID NO: 17258 - protein, 33 aa, Artificial Sequence
  Synthetic polypeptide
PGSVADACNPSTLGGRGGRITRTHLCFYNQPRM

SEQ ID NO: 17259 - protein, 30 aa, Artificial Sequence
  Synthetic polypeptide
LSCTKSTLGWKRFIRMGAVLYCFPMELERK

SEQ ID NO: 17260 - protein, 187 aa, Artificial Sequence
  Synthetic polypeptide
FLYKVYFRVEKVYKNGCRVILFPNGTRKEVSADGKTITVTFFNGDVKQVMPDQRVIYYYAAAQTTHTTYPEGLEVLHFSSGQIEKHYPDGRKEITFPDQTVKNLFPDGQEESIFPDGTIVRVQRDGNKLIEFNNGQRELHTAQFKRREYPDGTVKTVYANGHQETKYRSGRIRVKDKEGNVLMDTEL

SEQ ID NO: 17261 - protein, 493 aa, Artificial Sequence
  Synthetic polypeptide
LRVAKPTASKKMETSVRQSPRDESCQQPEEGWKQVLLQSGLEATRAAITQHCTDLGNLLGKENDVALIIDGHTLKYALSFEVRRSFLDLALSCKAVICCRVSPLQKSEIVDVVKKRVKAITLAIGDGANDVGMIQTAHVGVGISGNEGMQATNNSDYAIAQFSYLEKLLLVHGAWSYNRVTKCILYCFYKNVVLYIIELWFAFVNGFSGQILFERWCIGLYNVIFTALPPFTLGIFERSCTQESMLRFPQLYKITQNGEGFNTKVFWGHCINALVHSLILFWFPMKALEHDTVLTSGHATDYLFVGNIVYTYVVVTVCLKAGLETTAWTKFSHLAVWGSMLTWLVFFGIYSTIWPTIPIAPDMRGQATMVLSSAHFWLGLFLVPTACLIEDVAWRAAKHTCKKTLLEEVQELETKSRVLGKAVLRDSNGKRLNERDRLIKRLGRKTPPTLFRGSSLQQGVPHGYAFSQEEHGAVSQEEVIRAYDTTKKKSRKK

SEQ ID NO: 17262 - protein, 65 aa, Artificial Sequence
  Synthetic polypeptide
EWPSLQPARKWRPQSDNHQEMNPANNLRKAGNRYFSSQALRPQGQPLLSTALTLGICWARKMTWP

SEQ ID NO: 17263 - protein, 468 aa, Artificial Sequence
  Synthetic polypeptide
LRVAKPTASKKMETSVRQSPRDESCQQPEEGWKQVLLQSGLEATRAAITQHCTDLGNLLGKENDVALIIDGHTLKYALSFEVRRSFLDLALSCKAVICCRVSPLQKSEIVDVVKKRVKAITLAIGDGANDVGMIQTAHVGVGISGNEGMQATNNSDYAIAQFSYLEKLLLVHGAWSYNRVTKCILYCFYKNVVLYIIEIFTALPPFTLGIFERSCTQESMLRFPQLYKITQNGEGFNTKVFWGHCINALVHSLILFWFPMKALEHDTVLTSGHATDYLFVGNIVYTYVVVTVCLKAGLETTAWTKFSHLAVWGSMLTWLVFFGIYSTIWPTIPIAPDMRGQATMVLSSAHFWLGLFLVPTACLIEDVAWRAAKHTCKKTLLEEVQELETKSRVLGKAVLRDSNGKRLNERDRLIKRLGRKTPPTLFRGSSLQQGVPHGYAFSQEEHGAVSQEEVIRAYDTTKKKSRKK

SEQ ID NO: 17264 - protein, 108 aa, Artificial Sequence
  Synthetic polypeptide
LRVAKPTASKKMETSVRQSPRDESCQQPEEGWKQVLLQSGLEATRAAITQHCTDLGNLLGKENDVALIIDGHTLKYALSFEVRRSFLDLALSCKAVICCRSLFLSKWR

SEQ ID NO: 17265 - protein, 2 aa, Artificial Sequence
  Synthetic polypeptide
HG

SEQ ID NO: 17266 - protein, 49 aa, Artificial Sequence
  Synthetic polypeptide
SSPYSMAERARPPDQEAGPEDAPDAVPGQLPAAGRPAWVCFFSRRTRSC

SEQ ID NO: 17267 - protein, 68 aa, Artificial Sequence
  Synthetic polypeptide
HHLIAWLNERDRLIKRLGRKTPPTLFRGSSLQQGVPHGYAFSQEEHGAVSQEEVIRAYDTTKKKSRKK

SEQ ID NO: 17268 - protein, 324 aa, Artificial Sequence
  Synthetic polypeptide
LTPVIPALWEAEKPANILVMGEGPERGRVKIADMGFARLFNSPLKPLADLDPVVVTFWYRAPELLLGARHYTKAIDIWAIGCIFAELLTSEPIFHCRQEDIKTSNPYHHDQLDRIFNVMGFPADKDWEDIKKMPEHSTLMKDFRRNTYTNCSLIKYMEKHKVKPDSKAFHLLQKLLTMDPIKRITSEQAMQDPYFLEDPLPTSDVFAGCQIPYPKREFLTEEEPDDKGDKKNQQQQQGNNHTNGTGHPGNQDSSHTQGPPLKKVRVVPPTTTSGGLIMTSDYQRSNPHAAYPNPGPSTSQPQSSMGYSATSQQPPQYSHQTHRY

SEQ ID NO: 17269 - protein, 13 aa, Artificial Sequence
  Synthetic polypeptide
SQHFGRLRNLLIF

SEQ ID NO: 17270 - protein, 40 aa, Artificial Sequence
  Synthetic polypeptide
DTILGNIARLYLYKKENTKFNRAWWRAPVVPATQEAEEFN

SEQ ID NO: 17271 - protein, 58 aa, Artificial Sequence
  Synthetic polypeptide
IPSWATLQDSISTKKKIQNLTVHGGVRRWFQLLRRLRNSTEKGAGAAGAGGQAGASGE

SEQ ID NO: 17272 - protein, 37 aa, Artificial Sequence
  Synthetic polypeptide
GQEMYKRSWKILSHQKAKKLSKTNVLISERLRTHLKG

SEQ ID NO: 17273 - protein, 7 aa, Artificial Sequence
  Synthetic polypeptide
KDEVSSC

SEQ ID NO: 17274 - protein, 119 aa, Artificial Sequence
  Synthetic polypeptide
EKLENLVTPESKETVKDQCTHFRKTQDPLERMKCPLASTNKRFLINTIKNTLPSHKEQDHEQKEGDKEPAKSQAQKEENPKKHRSHPYKHSFRARGSASYSPPRKRSSQDKYEKRSNRR

SEQ ID NO: 17275 - protein, 19 aa, Artificial Sequence
  Synthetic polypeptide
QARERIFSGESDQPLFFLQ

SEQ ID NO: 17276 - protein, 39 aa, Artificial Sequence
  Synthetic polypeptide
KQERESSLGSRTNRCFFCNDIWDYYKSRSACDQVCFNQS

SEQ ID NO: 17277 - protein, 992 aa, Artificial Sequence
  Synthetic polypeptide
SKRENLLWGVGPTVVFSAMIFGTITNQDLPVIKCVLINHKNNDSSVGKSSSYPMVSESPEDLGCALRPQSSGTVYEAAAVEVDVSASITLQVLVDAPGNISCLWVFKHSSLNCQPHFDLQNRGVVSMVILKMTETQAGEYLLFIQSEATNYTILFTVSIRNTLLYTLRRPYFRKMENQDALVCISESVPEPIVEWVLCDSQGESCKEESPAVVKKEEKVLHELFGTDIRCCARNELGRECTRLFTIDLNQTPQTTLPQLFLKVGEPLWIRCKAVHVNHGFGLTWELENKALEEGNYFEMSTYSTNRTMIRILFAFVSSVARNDTGYYTCSSSKHPSQSALVTIVEKGFINATNSSEDYEIDQYEEFCFSVRFKAYPQIRCTWTFSRKSFPCEQKGLDNGYSISKFCNHKHQPGEYIFHAENDDAQFTKMFTLNIRRKPQVLAEASASQASCFSDGYPLPSWTWKKCSDKSPNCTEEITEGVWNRKANRKVFGQWVSSSTLNMSEAIKGFLVKCCAYNSLGTSCETILLNSPGPFPFIQDNISFYATIGVCLLFIVVLTLLICHKYKKQFRYESQLQMVQVTGSSDNEYFYVDFREYEYDLKWEFPRENLEFGKVLGSGAFGKVMNATAYGISKTGVSIQVAVKMLKEKADSSEREALMSELKMMTQLGSHENIVNLLGACTLSGPIYLIFEYCCYGDLLNYLRSKREKFHRTWTEIFKEHNFSFYPTFQSHPNSSMPGSREVQIHPDSDQISGLHGNSFHSEDEIEYENQKRLEEEEDLNVLTFEDLLCFAYQVAKGMEFLEFKSCVHRDLAARNVLVTHGKVVKICDFGLARDIMSDSNYVVRGNARLPVKWMAPESLFEGIYTIKSDVWSYGILLWEIFSLGVNPYPGIPVDANFYKLIQNGFKMDQPFYATEEIYIIMQSCWAFDSRKRPSFPNLTSFLGCQLADAEEAMYQNVDGRVSECPHTYQNRRPFSREMDLGLLSPQAQVEDS

SEQ ID NO: 17278 - protein, 995 aa, Artificial Sequence
  Synthetic polypeptide
SKRENLLWGVGPTVVFSAMIFGTITNQDLPVIKCVLINHKNNDSSVGKSSSYPMVSESPEDLGCALRPQSSGTVYEAAAVEVDVSASITLQVLVDAPGNISCLWVFKHSSLNCQPHFDLQNRGVVSMVILKMTETQAGEYLLFIQSEATNYTILFTVSIRNTLLYTLRRPYFRKMENQDALVCISESVPEPIVEWVLCDSQGESCKEESPAVVKKEEKVLHELFGTDIRCCARNELGRECTRLFTIDLNQTPQTTLPQLFLKVGEPLWIRCKAVHVNHGFGLTWELENKALEEGNYFEMSTYSTNRTMIRILFAFVSSVARNDTGYYTCSSSKHPSQSALVTIVEKGFINATNSSEDYEIDQYEEFCFSVRFKAYPQIRCTWTFSRKSFPCEQKGLDNGYSISKFCNHKHQPGEYIFHAENDDAQFTKMFTLNIRRKPQVLAEASASQASCFSDGYPLPSWTWKKCSDKSPNCTEEITEGVWNRKANRKVFGQWVSSSTLNMSEAIKGFLVKCCAYNSLGTSCETILLNSPGPFPFIQDNISFYATIGVCLLFIVVLTLLICHKYKKQFRYESQLQMVQVTGSSDNEYFYVDFREYEYDLKWEFPRENLEFGKVLGSGAFGKVMNATAYGISKTGVSIQVAVKMLKEKADSSEREALMSELKMMTQLGSHENIVNLLGACTLSGPIYLIFEYCCYGDLLNYLRSKREKFHRTWTEIFKEHNFSFYPTFQSHPNSSMPGSREVQIHPDSDQISGLHGNSFHSEDEIEYENQKRLEEEEDLNVLTFEDLLCFAYQVAKGMEFLEFKSCVHRDLAARNVLVTHGKVVKICDFGLARDIMSDSNYVVRGNVRLARLPVKWMAPESLFEGIYTIKSDVWSYGILLWEIFSLGVNPYPGIPVDANFYKLIQNGFKMDQPFYATEEIYIIMQSCWAFDSRKRPSFPNLTSFLGCQLADAEEAMYQNVDGRVSECPHTYQNRRPFSREMDLGLLSPQAQVEDS

SEQ ID NO: 17279 - protein, 738 aa, Artificial Sequence
  Synthetic polypeptide
SKRENLLWGVGPTVVFSAMIFGTITNQDLPVIKCVLINHKNNDSSVGKSSSYPMVSESPEDLGCALRPQSSGTVYEAAAVEVDVSASITLQVLVDAPGNISCLWVFKHSSLNCQPHFDLQNRGVVSMVILKMTETQAGEYLLFIQSEATNYTILFTVSIRNTLLYTLRRPYFRKMENQDALVCISESVPEPIVEWVLCDSQGESCKEESPAVVKKEEKVLHELFGTDIRCCARNELGRECTRLFTIDLNQTPQTTLPQLFLKVGEPLWIRCKAVHVNHGFGLTWELENKALEEGNYFEMSTYSTNRTMIRILFAFVSSVARNDTGYYTCSSSKHPSQSALVTIVEKGFINATNSSEDYEIDQYEEFCFSVRFKAYPQIRCTWTFSRKSFPCEQKGLDNGYSISKFCNHKHQPGEYIFHAENDDAQFTKMFTLNIRRKPQVLAEASASQASCFSDGYPLPSWTWKKCSDKSPNCTEEITEGVWNRKANRKVFGQWVSSSTLNMSEAIKGFLVKCCAYNSLGTSCETILLNSPGPFPFIQDNISFYATIGVCLLFIVVLTLLICHKYKKQFRYESQLQMVQVTGSSDNEYFYVDFREYEYDLKWEFPRENLEFGKVLGSGAFGKVMNATAYGISKTGVSIQVAVKMLKEKADSSEREALMSELKMMTQLGSHENIVNLLGACTLSGPIYLIFEYCCYGDLLNYLRSKREKFHRTWTEIFKEHNFSFYPTFQSHPNSSKKK

SEQ ID NO: 17280 - protein, 951 aa, Artificial Sequence
  Synthetic polypeptide
SKRENLLWGVGPTVVFSAMIFGTITNQDLPVIKCVLINHKNNDSSVGKSSSYPMVSESPEDLGCALRPQSSGTVYEAAAVEVDVSASITLQVLVDAPGNISCLWVFKHSSLNCQPHFDLQNRGVVSMVILKMTETQAGEYLLFIQSEATNYTILFTVSIRNTLLYTLRRPYFRKMENQDALVCISESVPEPIVEWVLCDSQGESCKEESPAVVKKEEKVLHELFGTDIRCCARNELGRECTRLFTIDLNQTPQTTLPQLFLKVGEPLWIRCKAVHVNHGFGLTWELENKALEEGNYFEMSTYSTNRTMIRILFAFVSSVARNDTGYYTCSSSKHPSQSALVTIVEKGFINATNSSEDYEIDQYEEFCFSVRFKAYPQIRCTWTFSRKSFPCEQKGLDNGYSISKFCNHKHQPGEYIFHAENDDAQFTKMFTLNIRRKPQVLAEASASQASCFSDGYPLPSWTWKKCSDKSPNCTEEITEGVWNRKANRKVFGQWVSSSTLNMSEAIKGFLVKCCAYNSLGTSCETILLNSPGPFPFIQDNISFYATIGVCLLFIVVLTLLICHKYKKQFRYESQLQMVQVTGSSDNEYFYVDFREYEYDLKWEFPRENLEFGKVLGSGAFGKVMNATAYGISKTGVSIQVAVKMLKEKADSSEREALMSELKMMTQLGSHENIVNLLGACTLSGPIYLIFEYCCYGDLLNYLRSKREKFHRTWTEIFKEHNFSFYPTFQSHPNSSMPGSREVQIHPDSDQISGLHGNSFHSEDEIEYENQKRLEEEEDLNVLTFEDLLCFAYQVAKGMEFLEFKSARLPVKWMAPESLFEGIYTIKSDVWSYGILLWEIFSLGVNPYPGIPVDANFYKLIQNGFKMDQPFYATEEIYIIMQSCWAFDSRKRPSFPNLTSFLGCQLADAEEAMYQNVDGRVSECPHTYQNRRPFSREMDLGLLSPQAQVEDS

SEQ ID NO: 17281 - protein, 28 aa, Artificial Sequence
  Synthetic polypeptide
DFAVFKTMLTFLPGGLIPLQFQEWMEVL

SEQ ID NO: 17282 - protein, 13 aa, Artificial Sequence
  Synthetic polypeptide
YLCSSRNGWRCFN

SEQ ID NO: 17283 - protein, 758 aa, Artificial Sequence
  Synthetic polypeptide
NNVNFPPWRSDTSAVPGMDGGALTDTSLTDSYFSTSFIGVNGFGSPVETKYPLMQRMTNSSSSPSLLNDSAKPYSAHDPLTSPASSLFNDFGALNISQRRKPRKYRLGMLEERLVPMGSKARKAKNPIGCLADRCKSGVPINMVWWNRVTENNLQTPNPTASEFIPKGGSTSRLSNVSQSNMSAFSQVFSHPSMGSPATAGLAPGMSLSAGSSPLHSPKITPHTSPAPRRRSHTPNPASYMVPSSASTSVNNPVSQTPSSGQVIQKETVGGTTYFYTDTTPAPLTGMVFPNYHIYPPTAPHVAYMQPKANAPSFFMADELRQELINRHLITMAQIDQADMPAVPTEVDSYHSLFPLEPLPPPNRIQKSSNFGYITSCYKAVNSKDDLPYCLRRIHGFRLVNTKCMVLVDMWKKIQHSNIVTLREVFTTKAFAEPSLVFAYDFHAGGETMMSRHFNDPNADAYFTKRKWGQHEGPLPRQHAGLLPESLIWAYIVQLSSALRTIHTAGLACRVMDPTKILITGKTRLRVNCVGVFDVLTFDNSQNNNPLALMAQYQQADLISLGKVVLALACNSLAGIQRENLQKAMELVTINYSSDLKNLILYLLTDQNRMRSVNDIMPMIGARFYTQLDAAQMRNDVIEEDLAKEVQNGRLFRLLAKLGTINERPEFQKDPTWSETGDRYLLKLFRDHLFHQVTEAGAPWIDLSHIISCLNKLDAGVPEKISLISRDEKSVLVVTYSDLKRCFENTFQELIAAANGQL

SEQ ID NO: 17284 - protein, 44 aa, Artificial Sequence
  Synthetic polypeptide
SPIVVFNLPDVATTKEVSPGDAGGEASSDGIKGTKSKEPYWLPC

SEQ ID NO: 17285 - protein, 667 aa, Artificial Sequence
  Synthetic polypeptide
WFLTYQMLPQPRKYRLGMLEERLVPMGSKARKAKNPIGCLADRCKSGVPINMVWWNRVTENNLQTPNPTASEFIPKGGSTSRLSNVSQSNMSAFSQVFSHPSMGSPATAGLAPGMSLSAGSSPLHSPKITPHTSPAPRRRSHTPNPASYMVPSSASTSVNNPVSQTPSSGQVIQKETVGGTTYFYTDTTPAPLTGMVFPNYHIYPPTAPHVAYMQPKANAPSFFMADELRQELINRHLITMAQIDQADMPAVPTEVDSYHSLFPLEPLPPPNRIQKSSNFGYITSCYKAVNSKDDLPYCLRRIHGFRLVNTKCMVLVDMWKKIQHSNIVTLREVFTTKAFAEPSLVFAYDFHAGGETMMSRHFNDPNADAYFTKRKWGQHEGPLPRQHAGLLPESLIWAYIVQLSSALRTIHTAGLACRVMDPTKILITGKTRLRVNCVGVFDVLTFDNSQNNNPLALMAQYQQADLISLGKVVLALACNSLAGIQRENLQKAMELVTINYSSDLKNLILYLLTDQNRMRSVNDIMPMIGARFYTQLDAAQMRNDVIEEDLAKEVQNGRLFRLLAKLGTINERPEFQKDPTWSETGDRYLLKLFRDHLFHQVTEAGAPWIDLSHIISCLNKLDAGVPEKISLISRDEKSVLVVTYSDLKRCFENTFQELIAAANGQL

SEQ ID NO: 17286 - protein, 19 aa, Artificial Sequence
  Synthetic polypeptide
PTRCCHNQGSIAWGCWRRG

SEQ ID NO: 17287 - protein, 45 aa, Artificial Sequence
  Synthetic polypeptide
EAEAGGSLEPGKSRLQLAVIARLHSSLDDRARPYLKKMPEDLDLS

SEQ ID NO: 17288 - protein, 24 aa, Artificial Sequence
  Synthetic polypeptide
LLDCIPAWMTEQDPISKKCQRTWI

SEQ ID NO: 17289 - protein, 148 aa, Artificial Sequence
  Synthetic polypeptide
QSKTLSQKNARGLGSELKDSIPVTELSASGPFESHDLLRKGFSCVKNELLPSHPLELSEKNFQLNQDKMNFSTLRNIQGLFAPLKLQMEFKAVQQVQRLPFLSSSNLSLDVLRGNDETIGFEDILNDPSQSEVMGEPHLMVEYKLGLL

SEQ ID NO: 17290 - protein, 20 aa, Artificial Sequence
  Synthetic polypeptide
PRSLRPAWIHHKAKSWESHT

SEQ ID NO: 17291 - protein, 20 aa, Artificial Sequence
  Synthetic polypeptide
DQPGSITKRSHGRATLDGGI

SEQ ID NO: 17292 - protein, 52 aa, Artificial Sequence
  Synthetic polypeptide
MDVVAQIHNPSTLGGRGGRISLAKEFETSLDPSQSEVMGEPHLMVEYKLGLL

SEQ ID NO: 17293 - protein, 14 aa, Artificial Sequence
  Synthetic polypeptide
SKIHHKAKSWESHT

SEQ ID NO: 17294 - protein, 21 aa, Artificial Sequence
  Synthetic polypeptide
LPNLKSITKRSHGRATLDGGI

SEQ ID NO: 17295 - protein, 58 aa, Artificial Sequence
  Synthetic polypeptide
GQGLLFVCCFTPSTKNIACHSSSTSDQASQSRSKTSEERNGRSRSPGTCRPSTSYIKE

SEQ ID NO: 17296 - protein, 439 aa, Artificial Sequence
  Synthetic polypeptide
SFIFLYSTHCHLILLYYILYYIVCVLPFLLDCKLCKVRAFYLFAALPPAPRILPATVAPPQIRRPNREVRPLRKEMAGVGARGPVGRAHPISKSEKPSTSRDKDYRARGRDDKGRKNMQDGASDGEMPKFDGAGYDKDLVEALERDIVSRNPSIHWDDIADLEEAKKLLREAVVLPMWMPDFFKGIRRPWKGVLMVGPPGTGKTMLAKAVATECGTTFFNVSSSTLTSKYRGESEKLVRLLFEMARFYAPTTIFIDEIDSICSRRGTSDEHEASRRVKSELLIQMDGVGGALENDDPSKMVMVLAATNFPWDIDEALRRRLEKRIYIPLPTAKGRAELLKINLREVELDPDIQLEDIAEKIEGYSGADITNVCRDASLMAMRRRINGLSPEEIRALSKEELQMPVTKGDFELALKKIAKSVSAADLEKYEKWMVEFGSA

SEQ ID NO: 17297 - protein, 102 aa, Artificial Sequence
  Synthetic polypeptide
SFIFLYSTHCHLILLYYILYYIVCVLPFLLDCKLCKVRAFYLFAALPPAPRILPATVAPPQIRRPNREVRPLRKEMAGVGARGPVGRAHPISKSEKPSTSRD

SEQ ID NO: 17298 - protein, 99 aa, Artificial Sequence
  Synthetic polypeptide
SFIFLYSTHCHLILLYYILYYIVCVLPFLLDCKLCKVRAFYLFAALPPAPRILPATVAPPQIRRPNREVRPLRKEMAGVGARGPVGRAHPISKSEKPST

SEQ ID NO: 17299 - protein, 74 aa, Artificial Sequence
  Synthetic polypeptide
GAPLPGLDPIWEVKSVSARPPRLRSEETLCLATAPSENFSRWQRLHQASGSTCFWHAQGERAANHATHQCGPRQ

SEQ ID NO: 17300 - protein, 3004 aa, Artificial Sequence
  Synthetic polypeptide
EVRRPSAWQPPRLRTSPVGNGYIKPPVPPASGTHREKGPPTMLPINVDPDSKPGEYVLKSLFVNFTTQAERKIRIIMAEPLEKPLTKSLQRGEDPQFDQVISSMSSLSEYCLPSILRTLFDWYKRQNGIEDESHEYRPRTSNKSKSDEQQRDYLMERRDLAIDFIFSLVLIEVLKQIPLHPVIDSLIHDVINLAFKHFKYKEGYLGPNTGNMHIVADLYAEVIGVLAQAKFPAVKKKFMAELKELRHKEQNPYVVQSIISLIMGMKFFRIKMYPVEDFEASLQFMQECAHYFLEVKDKDIKHALAGLFVEILVPVAAAVKNEVNVPCLRNFVESLYDTTLELSSRKKHSLALYPLVTCLLCVSQKQLFLNRWHIFLNNCLSNLKNKDPKMARVALESLYRLLWVYMIRIKCESNTATQSRLITIITTLFPKGSRGVVPRDMPLNIFVKIIQFIAQERLDFAMKEIIFDFLCVGKPAKAFSLNPERMNIGLRAFLVIADSLQQKDGEPPMPVTGAVLPSGNTLRVKKTYLSKTLTEEEAKMIGMSLYYSQVRKAVDNILRHLDKEVGRCMMLTNVQMLNKEPEDMITGERKPKIDLFRTCVAAIPRLLPDGMSKLELIDLLARLSIHMDDELRHIAQNSLQGLLVDFSDWREDVLFGFTNFLLREVNDMHHTLLDSSLKLLLQLLTQWKLVIQTQGKVYEQANKIRNSELIANGSSHRIQSERGPHCSVLHAVEGFALVLLCSFQVATRKLSVLILKEIRALFIALGQPEDDDRPMIDVMDQLSSSILESFIHVAVSDSATLPLTHNVDLQWLVEWNAVLVNSHYDVKSPSHVWIFAQSVKDPWVLCLFSFLRQENLPKHCPTALSYAWPYAFTRLQSVMPLVDPNSPINAKKTSTAGSGDNYVTLWRNYLILCFGVAKPSIMSPGHLRASTPEIMATTPDGTVSYDNKAIGTPSVGVLLKQLVPLMRLESIEITESLVLGFGRTNSLVFRELVEELHPLMKEALERRPENKKRRERRDLLRLQLLRIFELLADAGVISDSTNGALERDTLALGALFLEYVDLTRMLLEAENDKEVEILKDIRAHFSAMVANLIQCVPVHHRRFLFPQQSLRHHLFILFSQWAGPFSIMFTPLDRYSDRNHQITRYQYCALKAMSAVLCCGPVFDNVGLSPDGYLYKWLDNILACQDLRVHQLGCEVVVLLLELNPDQINLFNWAIDRCYTGSYQLASGCFKAIATVCGSRNYPFDIVTLLNLVLFKASDTNREIYEISMQLMQILEAKLFVYSKKVAEQRPGSILYGTHGPLPPLYSVSLALLSCELARMYPELTLPLFSEVSQRFPTTHPNGRQIMLTYLLPWLHNIELVDSRLLLPGSSPSSPEDEVKDREGDVTASHGLRGNGWGSPEATSLVLNNLMYMTAKYGDEVPGPEMENAWNALANNEKWSNNLRITLQFLISLCGVSSDTVLLPYIKKVAIYLCRNNTIQTMEELLFELQQTEPVNPIVQHCDNPPFYRFTASSKASAAASGTTSSSNTVVAGQENFPDAEENKILKESDERFSNVIRAHTRLESRYSNSSGGSYDEDKNDPISPYTGWLLTITETKQPQPLPMPCTGGCWAPLVDYLPETITPRGPLHRCNIAVIFMTEMVVDHSVREDWALHLPLLLHAVFLGLDHYRPEVFEHSKKLLLHLLIALSCNSNFHSIASVLLQTREMGEAKTLTVQPAYQPEYLYTGGFDFLREDQSSPVPDSGLSSSSTSSSISLGGSSGNLPQMTQEVEDVDTAAETDEKANKLIEFLTTRAFGPLWCHEDITPKNQNSKSAEQLTNFLRHVVSVFKDSKSGFHLEHQLSEVALQTALASSSRHYAGRSFQIFRALKQPLSAHALSDLLSRLVEVIGEHGDEIQGYVMEALLTLEAAVDNLSDCLKNSDLLTVLSRSSSPDLSSSSKLTASRKSTGQLNMNPGTTSGNTATAERSRHQRSFSVPKKFGVIDRSSDPPRSATLDRIQACTQQGLSSKTRSSSSLKDSLTDPSHINHPTNLLATIFWVTVALMESDFEFEYLMALRLLSRLLAHMPLDKAENREKLEKLQAQLKWADFSGLQQLLLKGFTSLTTTDLTLQLFSLLTPVSKISMVDASHAIGFPLNVLCLLPQLIQHFENPNQFCKDIAERIAQVCLEEKNPKLSNLAHVMTLYKTHSYTRDCATWVNVVCRYLHEAYADITLNMVTYLAELLEKGLPSVQQPLLQVIYSLLSYMDLSVVPVKQFNVEVLKTIEKYVQSVHWREALNILKLVVSRSASLVLPSYQHSDLSKIEIHRVWTSASKELPGKTLDFHFDISETPIIGRRYDELQNSSGRDGKPRAMAVTRSTSSTSSGSNSNVLVPVSWKRPQYSQKRTKEKLVHVLSLCGQEVGLSKNPSVIFSSCGDLDLLEHQTSLVSSEDGAREQENMDDTNSEQQFRVFRDFDFLDVELEDGEGESMDNFNWGVRRRSLDSLDKCDMQILEERQLSGSTPSLNKMHHEDSDESSEEEDLTASQILEHSDLIMTLSPSEETNPMELLTTACDSTPAEPHSFNTRMSSFDASLPDMNNLQISEGSKAEAVREEEDTTVHEDDLSSSINELPAAFECSDSFSLDMTEGEEKGNRALDQFTLASFGEGDRGVSPPPSPFFSAILAAFQPAACDDAEEAWRSHINQLMCDSDGSCAVYTFHVFSSLFKNIQKRFCFLTCDAASYLGDNLRGIGSKFVSSSQMLTSCSECPTLFVDAETLLSCGLLDKLKFSVLELQEYLDTYNNRKEATLSWLANCKATFAGGSRDGVITCQPGDSEEKQLELCQRLYKLHFQLLLLFQSYCKLIGQVHEVSSMPELLNMSRELSDLKKHLKEASAVIAADPLYSDGAWSEPTFTSTEAAIQSMLECLKNNELGKALRQIRECRSLWPNDIFGSSSDDEVQTLLNIYFRHQTLGQTGTYALVGSNQSLTEICTKLMELNMEIRDMIRRAQSYRVLTTFLPDSSVSGTSL

SEQ ID NO: 17301 - protein, 71 aa, Artificial Sequence
  Synthetic polypeptide
ELLPLATVTSSLRFHLLLARTGRKGRQPCYPSMWTQTVNQENMSSKVYLSTSPLRLNARFVSLWQSPWKSH

SEQ ID NO: 17302 - protein, 144 aa, Artificial Sequence
  Synthetic polypeptide
EVRRPSAWQPPRLRTSPVGNGYIKPPVPPASGTHREKGPPTMLPINVDPDSKPGEYVLKSLFVNFTTQAERKIRIIMAEPLEKPLTKSLQRGEDPQFDQVISSMSSLSEYCLPSILRTLFDWYKRQNGIEDESHEYRPRTSNKS

SEQ ID NO: 17303 - protein, 40 aa, Artificial Sequence
  Synthetic polypeptide
GQARWLTPVIQHFGRPRTCPFRLFVRRMLQFTGNKVLDRP

SEQ ID NO: 17304 - protein, 340 aa, Artificial Sequence
  Synthetic polypeptide
SSTLGGQGLAPFVYLSDECYNLLAIKFWIDLNEDIIKPHMLIAASNLQWRPESKSGLLTLFAGDFSVFSASPKEGHFQETFNKMKNTVENIDILCNEAENKLMHILHANDPKWSTPTKDCTSGPYTAQIIPGTGNKLLMSSPNCEIYYQSPLSLCMAKRKSVSTPVSAQMTSKSCKGEKEIDDQKNCKKRRALDFLSRLPLPPPVSPICTFVSPAAQKAFQPPRSCGTKYETPIKKKELNSPQMTPFKKFNEISLLESNSIADEELALINTQALLSGSTGEKQFISVSESTRTAPTSSEDYLRLKRRCTTSLIKEQESSQASTEECEKNKQDTITTKKYI

SEQ ID NO: 17305 - protein, 33 aa, Artificial Sequence
  Synthetic polypeptide
PGAVANACNPALWEAKDLPLSSICQTNVTIYWQ

SEQ ID NO: 17306 - protein, 122 aa, Artificial Sequence
  Synthetic polypeptide
SSTLGGQGLAPFVYLSDECYNLLAIKFWIDLNEDIIKPHMLIAASNLQWRPESKSGLLTLFAGDFSVFSASPKEGHFQETFNKMKNTVERQSLALSPPGWSTIAQSRITAVSASWAQAILVP

SEQ ID NO: 17307 - protein, 7 aa, Artificial Sequence
  Synthetic polypeptide
FLHFHLR

SEQ ID NO: 17308 - protein, 519 aa, Artificial Sequence
  Synthetic polypeptide
RSQDGRIGTAPVYSSQRERRRRRVISAFPSEVMCLQDFFGDDDIFIACGPEKFRYQDDFLLDESECRVVKSTSYTKIASSSRRSTTKSPGPSRRSKSPASTSSVNGTPGSQLSTPRSGKSPSPSPTSPGSLRKQRSSQHGGSSTSLASTKVCSSMDENDGPGEEVSEEGFQIPATITERYKVGRTIGDGNFAVVKECVERSTAREYALKIIKKSKCRGKEHMIQNEVSILRRVKHPNIVLLIEEMDVPTELYLVMELVKGGDLFDAITSTNKYTERDASGMLYNLASAIKYLHSLNIVHRDIKPENLLVYEHQDGSKSLKLGDFGLATIVDGPLYTVCGTPTYVAPEIIAETGYGLKVDIWAAGVITYILLCGFPPFRGSGDDQEVLFDQILMGQVDFPSPYWDNVSDSAKELITMMLLVDVDQRFSAVQVLEHPWVNDDGLPENEHQLSVAGKIKKHFNTGPKPNSTAAGVSVIALDHGFTIKRSGSLDYYQQPGMYWIRPPLLIRRGRFSDEDATRM

SEQ ID NO: 17309 - protein, 530 aa, Artificial Sequence
  Synthetic polypeptide
RSQDGRIGTAPVYSSQRERRRRRVISAFPSEVMCLQDFFGDDDIFIACGPEKFRYQDDFLLDESECRVVKSTSYTKIASSSRRSTTKSPGPSRRSKSPASTSSVNGTPGSQLSTPRSGKSPSPSPTSPGSLRKQRSSQHGGSSTSLASTKVCSSMDENDGPGEEVSEEGFQIPATITERYKVGRTIGDGNFAVVKECVERSTAREYALKIIKKSKCRGKEHMIQNEVSILRRVKHPNIVLLIEEMDVPTELYLVMELVKGGDLFDAITSTNKYTERDASGMLYNLASAIKYLHSLNIVHRDIKPENLLVYEHQDGSKSLKLGDFGLATIVDGPLYTVCGTPTYVAPEIIAETGYGLKVDIWAAGVITYILLCGFPPFRGSGDDQEVLFDQILMGQVDFPSPYWDNVSDSAKELITMMLLVDVDQRFSAVQVLEHPWVNDDGLPENEHQLSVAGKIKKHFNTGPKPNSTAAGVSVIATTALDKERQVFRRRRNQDVRSRYKAQPAPPELNSESEDYSPSSSETVRSPNSPF

SEQ ID NO: 17310 - protein, 153 aa, Artificial Sequence
  Synthetic polypeptide
RSQDGRIGTAPVYSSQRERRRRRVISAFPSEVMCLQDFFGDDDIFIACGPEKFRYQDDFLLDESECRVVKSTSYTKIASSSRRSTTKSPGPSRRSKSPASTSSVNGTPGSQLSTPRSGKSPSPSPTSPGSLRKQRDLYRPLSSDDLDSVGDSV

SEQ ID NO: 17311 - protein, 54 aa, Artificial Sequence
  Synthetic polypeptide
TITDAELQLQHLAQRLQWNRRAVNICGMHGWTKDLSPHSRMPSMLEHVKHYMSC

SEQ ID NO: 17312 - protein, 26 aa, Artificial Sequence
  Synthetic polypeptide
RLKTDTARSPRKPPRPSRTLSFSSSI

SEQ ID NO: 17313 - protein, 26 aa, Artificial Sequence
  Synthetic polypeptide
ASAPASSTTSAMEQASCEYLWNAWVD

SEQ ID NO: 17314 - protein, 70 aa, Artificial Sequence
  Synthetic polypeptide
EAESNGYSMWISSSFRKRINCSAFLLPYSSHVWVPLSGVVPLCQRNQGHTVWVQIIYSRSSFTDVFISTR

SEQ ID NO: 17315 - protein, 155 aa, Artificial Sequence
  Synthetic polypeptide
QLVLLPFFVDHVSKSKKLNQMAIACGSRAHLEKESIAQRSYFRTLLMYGFHFLVWFLCVKGIRDTQCGFKLFTREAASRTFSSLHVERWAFDVELLYIAQFFKIPIAEIAVNWTEIEGSKLVPFWSWLQMGKDLLFIRLRYLTGAWRLEQTRKMN

SEQ ID NO: 17316 - protein, 23 aa, Artificial Sequence
  Synthetic polypeptide
EAESNGYSMWISSSFRKRINCSA

SEQ ID NO: 17317 - protein, 61 aa, Artificial Sequence
  Synthetic polypeptide
QLVLLPFFVDHVSKSKKLNQMAIACGSRAHLEKESIAQHKCSFGGLISQPVFIGSILYGRH

SEQ ID NO: 17318 - protein, 45 aa, Artificial Sequence
  Synthetic polypeptide
GRARRFTPVIPALWRTRRADHLTSGVRDQPGVHEPWNLWSITGDF

SEQ ID NO: 17319 - protein, 29 aa, Artificial Sequence
  Synthetic polypeptide
RQEFETSLVYMNRGTSGVLQEISERELPS

SEQ ID NO: 17320 - protein, 39 aa, Artificial Sequence
  Synthetic polypeptide
GRARRFTPVIPALWRTRRADHLTSGVRDQPGVHERELPS

SEQ ID NO: 17321 - protein, 269 aa, Artificial Sequence
  Synthetic polypeptide
RQEFETSLVYMKENCRPDGRELGEFRTTTVNIGSISTADGSALVKLGNTTVICGVKAEFAAPSTDAPDKGYVVPNVDLPPLCSSRFRSGPPGEEAQVASQFIADVIENSQIIQKEDLCISPGKLVWVLYCDLICLDYDGNILDACTFALLAALKNVQLPEVTINEETALAEVNLKKKSYLNIRTHPVATSFAVFDDTLLIVDPTGEEEHLATGTLTIVMDEEGKLCCLHKPGGSGLTGAKLQDCMSRAVTRHKEVKKLMDEVIKSMKPK

SEQ ID NO: 17322 - protein, 43 aa, Artificial Sequence
  Synthetic polypeptide
RQEFETSLVYMKENCRPDGRELGEFRTTTVNIGSISTADGSAL

SEQ ID NO: 17323 - protein, 113 aa, Artificial Sequence
  Synthetic polypeptide
GRTWLLTPRIPPLWETQQQQQQLSQFTPQQPQQPTTCSPQQPGEQGSEQGSTSQEQALSAQQAAVINLTGVGSFMQSQAAAVAILAASNGYGSSSSTNSSATSSSAYRQPVKK

SEQ ID NO: 17324 - protein, 70 aa, Artificial Sequence
  Synthetic polypeptide
AVHGCSHLESHHFGRPSSSNSSSPSLHHNNLSSPQLVVLNSQGSRVLSKVQPVKNRPYLLSKLLLLTLLE

SEQ ID NO: 17325 - protein, 28 aa, Artificial Sequence
  Synthetic polypeptide
NPTTLGDPAAATAALPVYTTTTSAAHNL

SEQ ID NO: 17326 - protein, 160 aa, Artificial Sequence
  Synthetic polypeptide
GRTWLLTPRIPPLWETQQQQQQLSQFTPQQPQQPTTCSPQQPGEQGSEQGSTSQEQALSAQQAAVINLTGVGSFMQSQAAVLSQLGSAENRPEQSLPQQRFQLSSAFQQQQQQIQQLRFLQHQMAMAAAAAQTAQLHHHRHTGSQSKSKMKRGTPTTPKF

SEQ ID NO: 17327 - protein, 27 aa, Artificial Sequence
  Synthetic polypeptide
LCFIIGQLTAKPQTSSSSITRTHLLLR

SEQ ID NO: 17328 - protein, 1175 aa, Artificial Sequence
  Synthetic polypeptide
LLNLRLLAALSQEPIFYFGDVEYSVDESAGYVEVQVWRTGTDLSKSSSVTVRSRKTDPPSADAGTDYVGISRNLDFAPGVNMQPVRVVILDDLGQPALEGIEKFELVLRMPMNAALGEPSKATVSINDSVSDLPKMQFKERIYTGSESDGQIVTMIHRTGDVQYRSSVRCYTRQGSAQVMMDFEERPNTDTSIITFLPGETEKPCILELMDDVLYEEVEELRLVLGTPQSNSPFGAAVGEQNETLIRIRDDADKTVIKFGETKFSVTEPKEPGESVVIRIPVIRQGDTSKVSIVRVHTKDGSATSGEDYHPVSEEIEFKEGETQHVVEIEVTFDGVREMREAFTVHLKPDENMIAEMQLTKAIVYIEEMSSMADVTFPSVPQIVSLLMYDDTSKAKESAEPMSGYPVICITACNPKYSDYDKTGSICASENINDTLTRYRWLISAPAGPDGVTSPMREVDFDTFFTSSKMVTLDSIYFQPGSRVQCAARAVNTNGDEGLELMSPIVTISREEGLCQPRVPGVVGAEPFSAKLRYTGPEDADYTNLIKLTVTMPHIDGMLPVISTRELSNFELTLSPDGTRVGNHKCSNLLDYTEVKTHYGFLTDATKNPEIIGETYPYQYSLSIRGSTTLRFYRNLNLEACLWEFVSYYDMSELLADCGGTIGTDGQVLNLVQSYVTLRVPLYVSYVFHSPVGVGGWQHFDLKSELRLTFVYDTAILWNDGIGSPPEAELQGSLYPTSMRIGDEGRLAVHFKTEAQFHGLFVLSHPASFTSSVIMSADHPGLTFSLRLIRSEPTYNQPVQQWSFVSDFAVRDYSGTYTVKLVPCTAPSHQEYRLPVTCNPREPVTFDLDIRFQQVSDPVAAEFSLNTQMYLLSKKSLWLSDGSMGFGQESDVAFAEGDIIYGRVMVDPVQNLGDSFYCSIEKVFLCTGADGYVPKYSPMNAEYGCLADSPSLLYRFKIVDKAQPETQATSFGNVLFNAKLAVDDPEAILLVNQPGSDGFKVDSTPLFQVALGREWYIHTIYTVRSKDNANRGIGKRSVEYHSLVSQGKPQSTTKSRKKREIRSTPSLAWEIGAENSRGTNIQHIALDRTKRQIPHGRAPPDGILPWELNSPSSAVSLVTVVGGTTVGLLTICLTVIAVLMCRGKESFRGKDAPKGSSSSEPMVPPQSHHNDSSEV

SEQ ID NO: 17329 - protein, 43 aa, Artificial Sequence
  Synthetic polypeptide
QLYHKNPSFTSVMWNTLWMRVLAMWKCRCGERALTCPSLLVSQ

SEQ ID NO: 17330 - protein, 53 aa, Artificial Sequence
  Synthetic polypeptide
GRSQDGRIGIAPVYSSQHEQRRRRVISAFPSEVSTINGLVYVAGSCFPSLSCW

SEQ ID NO: 17331 - protein, 10 aa, Artificial Sequence
  Synthetic polypeptide
FLHFHLRCQQ

SEQ ID NO: 17332 - protein, 112 aa, Artificial Sequence
  Synthetic polypeptide
GAFFPFALHFSLLLPCEEGRVCFPFRHDCKFPEASPVPWNCLLIGAGCALYPLGWDSEEVRQTCGYTSGQFDLGKCEIGWAYYCTGAGATAAMLLCTWLACFSGKKQKHYPY

SEQ ID NO: 17333 - protein, 46 aa, Artificial Sequence
  Synthetic polypeptide
WFFKGLFSLLLCTFPCCCHVKKDVFASPSAMIVSFLRPPQSHGTAC

SEQ ID NO: 17334 - protein, 24 aa, Artificial Sequence
  Synthetic polypeptide
GLPSPMELLVDWCWLCPLPLGLGQ

SEQ ID NO: 17335 - protein, 81 aa, Artificial Sequence
  Synthetic polypeptide
KTEGDWENPGLLIGAGCALYPLGWDSEEVRQTCGYTSGQFDLGKCEIGWAYYCTGAGATAAMLLCTWLACFSGKKQKHYPY

SEQ ID NO: 17336 - protein, 36 aa, Artificial Sequence
  Synthetic polypeptide
ITRTTFPGRLSIWHLDIQPVGGTFRRQKETGRIQAC

SEQ ID NO: 17337 - protein, 60 aa, Artificial Sequence
  Synthetic polypeptide
HPDLSLLGCKSQGLRFLEDLASGIWISSQWEALLEDRRRLGESRLVDWCWLCPLPLGLGQ

SEQ ID NO: 17338 - protein, 291 aa, Artificial Sequence
  Synthetic polypeptide
QDEILEPSITPVTSTIPPTSTSNQQKEKKEKKKRKKDPSKGRWVEGITSEGYHYYYDLISGASQWEKPEGFQGDLKKTAVKTVWVEGLSEDGFTYYYNTETGESRWEKPDDFIPHTSDLPSSKVNENSLGTLDESKSSDSHSDSDGEQEAEEGGVSTETEKPKIKFKEKNKNSDGGSDPETQKEKSIQKQNSLGSNEEKSKTLKKSNPYGEWQEIKQEVESHEEVDLELPSTENEYVSTSEADGGGEPKVVFKEKTVTSLGVMADGVAPVFKKRRTENGKSRNLRQRGDDQ

SEQ ID NO: 17339 - protein, 30 aa, Artificial Sequence
  Synthetic polypeptide
SQQFRRPEWEDCLSPGVQDQPSKMKFWSQA

SEQ ID NO: 17340 - protein, 227 aa, Artificial Sequence
  Synthetic polypeptide
AEIAPPHSSLDNKTAVKTVWVEGLSEDGFTYYYNTETGESRWEKPDDFIPHTSDLPSSKVNENSLGTLDESKSSDSHSDSDGEQEAEEGGVSTETEKPKIKFKEKNKNSDGGSDPETQKEKSIQKQNSLGSNEEKSKTLKKSNPYGEWQEIKQEVESHEEVDLELPSTENEYVSTSEADGGGEPKVVFKEKTVTSLGVMADGVAPVFKKRRTENGKSRNLRQRGDDQ

SEQ ID NO: 17341 - protein, 58 aa, Artificial Sequence
  Synthetic polypeptide
NPISPKNYKKISQAQSQLPVIPATQEAESGESLGPGAAEVNSEPRLHHRTPAWITKQQ

SEQ ID NO: 17342 - protein, 13 aa, Artificial Sequence
  Synthetic polypeptide
QNSSEDRLGRRFK

SEQ ID NO: 17343 - protein, 43 aa, Artificial Sequence
  Synthetic polypeptide
LNIHLLMVTSSVTSSSILINLDRYILIQGCKFLDKTGIAFFIC

SEQ ID NO: 17344 - protein, 439 aa, Artificial Sequence
  Synthetic polypeptide
IVVIKHPSLNGYLQCHIQLHSHQFRQIHLDTRLQVFRQNRNCILHLLSKNWSRRYCHQDTKMLWKHKALQKYMENLSKEYQTLEQCLQHIPVNEENRRSLNRRHAELAPLAAIYQEIQETEQAIEELESMCKSLNKQDEKQLQELALEERQTIDQKINMLYNELFQSLVPKEKYDKNDVILEVTAGRTTGGDICQQFTREIFDMYQNYSCYKHWQFELLNYTPADYGGLHHAAARISGDGVYKHLKYEGGIHRVQRIPEVGLSSRMQRIHTGTMSVIVLPQPDEVDVKLDPKDLRIDTFRAKGAGGQHVNKTDSAVRLVHIPTGLVVECQQERSQIKNKEIAFRVLRARLYQQIIEKDKRQQQSARKLQVGTRAQSERIRTYNFTQDRVSDHRIAYEVRDIKEFLCGGKGLDQLIQRLLQSADEEAIAELLDEHLKSAK

SEQ ID NO: 17345 - protein, 449 aa, Artificial Sequence
  Synthetic polypeptide
IVVIKHPSLNGYLQCHIQLHSHQFRQIHLDTRLQVFRQNRNCILHLLSKNWSRRYCHQDTKMLWKHKALQKYMENLSKEYQTLEQCLQHIPVNEENRRSLNRRHAELAPLAAIYQEIQETEQAIEELESMCKSLNKQDEKQLQELALEERQTIDQKINMLYNELFQSLVPKEKYDKNDVILEVTAGRTTGGDICQQFTREIFDMYQNYSCYKHWQFELLNYTPADYGGLHHAAARISGDGVYKHLKYEGGIHRVQRIPEVGLSSRMQRIHTGTMSVIVLPQPDEVDVKLDPKDLRIDTFRAKGAGGQHVNKTDSAVRLVHIPTGLVVECQQERSQIKNKEIAFRVLRARLYQQIIEKDKRQQQSARKLQVGTRAQSERIRTYNFTQDRVSDHRIAYEVRDIKAQSHSTGGSRDPAHSTFLSLDSVRSPGILIMTSSVRNFYVVGRAWIS

SEQ ID NO: 17346 - protein, 220 aa, Artificial Sequence
  Synthetic polypeptide
IVVIKHPSLNGYLQCHIQLHSHQFRQIHLDTRLQVFRQNRNCILHLLSKNWSRRYCHQDTKMLWKHKALQKYMENLSKEYQTLEQCLQHIPVNEENRRSLNRRHAELAPLAAIYQEIQETEQAIEELESMCKSLNKQDEKQLQELALEERQTIDQKINMLYNELFQSLVPKEKYDKNDVILEVTAGRTTGGDICQQFTREIFDMYQNYSCYKHWQFELLN

SEQ ID NO: 17347 - protein, 205 aa, Artificial Sequence
  Synthetic polypeptide
WHVPALPATWKAEVSIIQELVTNYEASLKTCDFFSPYENGEKEPPTTLLWVQYFLAQHFDKLGQYSLALDYINAAIASTPTLIELFYMKAKIYKHIGNLKEAAKWMDEAQSLDTADRFINSKCAKYMLRANMIKEAEEMCSKFTREGTSAMENLNEMQCMWFQTECISAYQRLGRYGDALKKCHEVERHSPSTWTTGGKEPQMHP

SEQ ID NO: 17348 - protein, 22 aa, Artificial Sequence
  Synthetic polypeptide
RQLVGHSGMYLHSQLLGRLRFL

SEQ ID NO: 17349 - protein, 539 aa, Artificial Sequence
  Synthetic polypeptide
WHVPALPATWKAEVSIIQELVTNYEASLKTCDFFSPYENGEKEPPTTLLWVQYFLAQHFDKLGQYSLALDYINAAIASTPTLIELFYMKAKIYKHIGNLKEAAKWMDEAQSLDTADRFINSKCAKYMLRANMIKEAEEMCSKFTREGTSAMENLNEMQCMWFQTECISAYQRLGRYGDALKKCHEVERHFFEITDDQFDFHTYCMRKMTLRAYVDLLRLEDILRRHAFYFKAARSAIEIYLKLYDNPLTNESKQQEINSENLSAKELKKMLSKQRRAQKKAKLEEERKHAERERQQKNQKKKRDEEEEEASGLKEELIPEKLERVENPLEEAVKFLIPLKNLVADNIDTHLLAFEIYFRKGKFLLMLQSVKRAFAINSNNPWLHECLIRFSKSVSNHSNLPDIVSKVLSQEMQKIFVKKDLESFNEDFLKRNATSLQHLLSGAKMMYFLDKSRQEKAIAIATRLDETIKDKDVKTLIKVSEALLDGSFGNCSSQYEEYRMACHNLLPFTSAFLPAVNEVDNPNVALNHTANYDVLANEI

SEQ ID NO: 17350 - protein, 104 aa, Artificial Sequence
  Synthetic polypeptide
WHVPALPATWKAEVSIIQELVTNYEASLKTCDFFSPYENGEKEPPTTLLWVQYFLAQHFDKLGQYSLALDYINAAIASTPTLIELFYMKAKIYKVKSESCFLSS

SEQ ID NO: 17351 - protein, 191 aa, Artificial Sequence
  Synthetic polypeptide
WHVPALPATWKAEVSIIQELVTNYEASLKTCDFFSPYENGEKEPPTTLLWVQYFLAQHFDKLGQYSLALDYINAAIASTPTLIELFYMKAKIYKHIGNLKEAAKWMDEAQSLDTADRFINSKCAKYMLRANMIKEAEEMCSKFTREGTSAMENLNEMQCMWFQTECISAYQRLGRYGDALKKCHEVERVSC

SEQ ID NO: 17352 - protein, 1447 aa, Artificial Sequence
  Synthetic polypeptide
SVRIAGGQEFKTRLDNRDMTARDLLQQRYTLPNGDTAWRSSPLVNAALEGKLVLLDGIHRVNAGTLAVLQRLIHDRELSLYDGSRLLREDRYMRLKEELQLSDEQLQKRSIFPIHPSFRIIALAEPPVIGSTAHQWLGPEFLTMFFFHYMKPLVKSEEIQVIKEKVPNVPQEALDKLLSFTHKLRETQDPTAQSLAASLSTRQLLRISRRLSQYPNENLHSAVTKACLSRFLPSLARSALEKNLADATIEINTDDNLEPELKDYKCEVTSGTLRIGAVSAPIYNAHEKMKVPDVLFYDNIQHVIVMEDMLKDFLLGEHLLLVGNQGVGKNKIVDRFLHLLNRPREYIQLHRDTTVQTLTLQPSVKDGLIVYEDSPLVKAVKLGHILVVDEADKAPTNVTCILKTLVENGEMILADGRRIVANSANVNGRENVVVIHPDFRMIVLANRPGFPFLGNDFFGTLGDIFSCHAVDNPKPHSELEMLRQYGPNVPEPILQKLVAAFGELRSLADQGIINYPYSTREVVNIVKHLQKFPTEGLSSVVRNVFDFDSYNNDMREILINTLHKYGIPIGAKPTSVQLAKELTLPEQTFMGYWTIGQARSGMQKLLCPVETHHIDIKGPALINIQEYPIERHEERSLNFTEECASWRIPLDEINIICDIATSHENEQNTLYVVTCNPASLYFMNMTGKSGFFVDFFDIFPRTANGVWHPFVTVAPLGSPLKGQVVLHEQQSNVILLLDTTGRALHRLILPSEKFTSKKPFWWNKEEAETYKMCKEFSHKNWLVFYKEKGNSLTVLDVLEGRTHTISLPINLKTVFLVAEDKWLLVESKTNQKYLLTKPAHIESEGSGVCQLYVLKEEPPSTGFGVTQETEFSIPHKISSDQLSSEHLSSAVEQKIASPNRILSDEKNYATIVVGFPDLMSPSEVYSWKRPSSLHKRSGTDTSFYRGKKKRGTPKQSNCVTLLDTNQVVRILPPGEVPLKDIYPKDVTPPQTSGYIEVTDLQSKKLRYIPIPRSESLSPYTTWLSTISDTDALLAEWDKSGVVTVDMGGHIRLWETGLERLQRSLMEWRNMIGQDDRNMQITINRDSGEDVSSPKHGKEDPDNMPHVGGNTWAGGTGGRDTAGLGGKGGPYRLDAGHTVYQVSQAEKDAVPEEVKRAAREMGQRAFQQRLKEIQMSEYDAATYERFSGAVRRQVHSLRIILDNLQAKGKERQWLRHQATGELDDAKIIDGLTGEKAIYKRRGELEPQLGSPQQKPKRLRLVVDVSGSMYRFNRMDGRLERTMEAVCMVMEAFENYEEKFQYDIVGHSGDGYNIGLVPMNKIPKDNKQRLEILKTMHAHSQFCMSGDHTLEGTEHAIKEIVKEEADEYFVIVLSDANLSRYGIHPAKFAQILTRDPQVNAFAIFIGSLGDQATRLQRTLPAGRSFVAMDTKDIPQILQQIFTSTMLSSV

SEQ ID NO: 17353 - protein, 16 aa, Artificial Sequence
  Synthetic polypeptide
GLLEARSSRPDWTTEI

SEQ ID NO: 17354 - protein, 29 aa, Artificial Sequence
  Synthetic polypeptide
SCHFGRLKCEDCWRPGVQDQTGQQRYDSA

SEQ ID NO: 17355 - protein, 581 aa, Artificial Sequence
  Synthetic polypeptide
SVRIAGGQEFKTRLDNRDMTARDLLQQRYTLPNGDTAWRSSPLVNAALEGKLVLLDGIHRVNAGTLAVLQRLIHDRELSLYDGSRLLREDRYMRLKEELQLSDEQLQKRSIFPIHPSFRIIALAEPPVIGSTAHQWLGPEFLTMFFFHYMKPLVKSEEIQVIKEKVPNVPQEALDKLLSFTHKLRETQDPTAQSLAASLSTRQLLRISRRLSQYPNENLHSAVTKACLSRFLPSLARSALEKNLADATIEINTDDNLEPELKDYKCEVTSGTLRIGAVSAPIYNAHEKMKVPDVLFYDNIQHVIVMEDMLKDFLLGEHLLLVGNQGVGKNKIVDRFLHLLNRPREYIQLHRDTTVQTLTLQPSVKDGLIVYEDSPLVKAVKLGHILVVDEADKAPTNVTCILKTLVENGEMILADGRRIVANSANVNGRENVVVIHPDFRMIVLANRPGFPFLGNDFFGTLGDIFSCHAVDNPKPHSELEMLRQYGPNVPEPILQKLVAAFGELRSLADQGIINYPYSTREVVNIVKHLQKFPTEGLSSVVRNVFDFDSYNNDMREILINTLHKYGIPIGAKPTSVQLAKE

SEQ ID NO: 17356 - protein, 16 aa, Artificial Sequence
  Synthetic polypeptide
EVRSPSARKPPHLRTL

SEQ ID NO: 17357 - protein, 1546 aa, Artificial Sequence
  Synthetic polypeptide
ERFELQDSGSSLLPKEIVKVEKMMENHVSQASVTIRIADKEVTIKVPAGTRLLSQPCASDRFIQTLSHKQLQAEMMQSHMVKDICLIGGKGCGKTVIAKNFADTLGYNIEPIMLYQDMTARDLLQQRYTLPNGDTAWRSSPLVNAALEGKLVLLDGIHRVNAGTLAVLQRLIHDRELSLYDGSRLLREDRYMRLKEELQLSDEQLQKRSIFPIHPSFRIIALAEPPVIGSTAHQWLGPEFLTMFFFHYMKPLVKSEEIQVIKEKVPNVPQEALDKLLSFTHKLRETQDPTAQSLAASLSTRQLLRISRRLSQYPNENLHSAVTKACLSRFLPSLARSALEKNLADATIEINTDDNLEPELKDYKCEVTSGTLRIGAVSAPIYNAHEKMKVPDVLFYDNIQHVIVMEDMLKDFLLGEHLLLVGNQGVGKNKIVDRFLHLLNRPREYIQLHRDTTVQTLTLQPSVKDGLIVYEDSPLVKAVKLGHILVVDEADKAPTNVTCILKTLVENGEMILADGRRIVANSANVNGRENVVVIHPDFRMIVLANRPGFPFLGNDFFGTLGDIFSCHAVDNPKPHSELEMLRQYGPNVPEPILQKLVAAFGELRSLADQGIINYPYSTREVVNIVKHLQKFPTEGLSSVVRNVFDFDSYNNDMREILINTLHKYGIPIGAKPTSVQLAKELTLPEQTFMGYWTIGQARSGMQKLLCPVETHHIDIKGPALINIQEYPIERHEERSLNFTEECASWRIPLDEINIICDIATSHENEQNTLYVVTCNPASLYFMNMTGKSGFFVDFFDIFPRTANGVWHPFVTVAPLGSPLKGQVVLHEQQSNVILLLDTTGRALHRLILPSEKFTSKKPFWWNKEEAETYKMCKEFSHKNWLVFYKEKGNSLTVLDVLEGRTHTISLPINLKTVFLVAEDKWLLVESKTNQKYLLTKPAHIESEGSGVCQLYVLKEEPPSTGFGVTQETEFSIPHKISSDQLSSEHLSSAVEQKIASPNRILSDEKNYATIVVGFPDLMSPSEVYSWKRPSSLHKRSGTDTSFYRGKKKRGTPKQSNCVTLLDTNQVVRILPPGEVPLKDIYPKDVTPPQTSGYIEVTDLQSKKLRYIPIPRSESLSPYTTWLSTISDTDALLAEWDKSGVVTVDMGGHIRLWETGLERLQRSLMEWRNMIGQDDRNMQITINRDSGEDVSSPKHGKEDPDNMPHVGGNTWAGGTGGRDTAGLGGKGGPYRLDAGHTVYQVSQAEKDAVPEEVKRAAREMGQRAFQQRLKEIQMSEYDAATYERFSGAVRRQVHSLRIILDNLQAKGKERQWLRHQATGELDDAKIIDGLTGEKAIYKRRGELEPQLGSPQQKPKRLRLVVDVSGSMYRFNRMDGRLERTMEAVCMVMEAFENYEEKFQYDIVGHSGDGYNIGLVPMNKIPKDNKQRLEILKTMHAHSQFCMSGDHTLEGTEHAIKEIVKEEADEYFVIVLSDANLSRYGIHPAKFAQILTRDPQVNAFAIFIGSLGDQATRLQRTLPAGRSFVAMDTKDIPQILQQIFTSTMLSSV

SEQ ID NO: 17358 - protein, 67 aa, Artificial Sequence
  Synthetic polypeptide
GAPPPGRDPVWEVRSVSARPPRLRSEETLRLATARLRSEEPLRPEAAPSENALNFKIQEALYFLKRL

SEQ ID NO: 17359 - protein, 680 aa, Artificial Sequence
  Synthetic polypeptide
ERFELQDSGSSLLPKEIVKVEKMMENHVSQASVTIRIADKEVTIKVPAGTRLLSQPCASDRFIQTLSHKQLQAEMMQSHMVKDICLIGGKGCGKTVIAKNFADTLGYNIEPIMLYQDMTARDLLQQRYTLPNGDTAWRSSPLVNAALEGKLVLLDGIHRVNAGTLAVLQRLIHDRELSLYDGSRLLREDRYMRLKEELQLSDEQLQKRSIFPIHPSFRIIALAEPPVIGSTAHQWLGPEFLTMFFFHYMKPLVKSEEIQVIKEKVPNVPQEALDKLLSFTHKLRETQDPTAQSLAASLSTRQLLRISRRLSQYPNENLHSAVTKACLSRFLPSLARSALEKNLADATIEINTDDNLEPELKDYKCEVTSGTLRIGAVSAPIYNAHEKMKVPDVLFYDNIQHVIVMEDMLKDFLLGEHLLLVGNQGVGKNKIVDRFLHLLNRPREYIQLHRDTTVQTLTLQPSVKDGLIVYEDSPLVKAVKLGHILVVDEADKAPTNVTCILKTLVENGEMILADGRRIVANSANVNGRENVVVIHPDFRMIVLANRPGFPFLGNDFFGTLGDIFSCHAVDNPKPHSELEMLRQYGPNVPEPILQKLVAAFGELRSLADQGIINYPYSTREVVNIVKHLQKFPTEGLSSVVRNVFDFDSYNNDMREILINTLHKYGIPIGAKPTSVQLAKE

SEQ ID NO: 17360 - protein, 1546 aa, Artificial Sequence; identical to SEQ ID NO: 17357
  Synthetic polypeptide

SEQ ID NO: 17361 - protein, 680 aa, Artificial Sequence; identical to SEQ ID NO: 17359
  Synthetic polypeptide

SEQ ID NO: 17362 - protein, 28 aa, Artificial Sequence
  Synthetic polypeptide
GDPPPGNRPSENALNFKIQEALYFLKRL

SEQ ID NO: 17363 - protein, 39 aa, Artificial Sequence
  Synthetic polypeptide
GAPPPGRDPVWEVRSVSARPPRLRSEETLRLATARLRTL

SEQ ID NO: 17364 - protein, 43 aa, Artificial Sequence
  Synthetic polypeptide
DVGRASALPPRLGCEEHLHPAATPSGSALNFKIQEALYFLKRL

SEQ ID NO: 17365 - protein, 39 aa, Artificial Sequence
  Synthetic polypeptide
GASLPGRPSSEMWGEPLPCRPVWDVRSTSTRPRPRLGAL

SEQ ID NO: 17366 - protein, 1557 aa, Artificial Sequence
  Synthetic polypeptide
GAPPPGRDPVWERFELQDSGSSLLPKEIVKVEKMMENHVSQASVTIRIADKEVTIKVPAGTRLLSQPCASDRFIQTLSHKQLQAEMMQSHMVKDICLIGGKGCGKTVIAKNFADTLGYNIEPIMLYQDMTARDLLQQRYTLPNGDTAWRSSPLVNAALEGKLVLLDGIHRVNAGTLAVLQRLIHDRELSLYDGSRLLREDRYMRLKEELQLSDEQLQKRSIFPIHPSFRIIALAEPPVIGSTAHQWLGPEFLTMFFFHYMKPLVKSEEIQVIKEKVPNVPQEALDKLLSFTHKLRETQDPTAQSLAASLSTRQLLRISRRLSQYPNENLHSAVTKACLSRFLPSLARSALEKNLADATIEINTDDNLEPELKDYKCEVTSGTLRIGAVSAPIYNAHEKMKVPDVLFYDNIQHVIVMEDMLKDFLLGEHLLLVGNQGVGKNKIVDRFLHLLNRPREYIQLHRDTTVQTLTLQPSVKDGLIVYEDSPLVKAVKLGHILVVDEADKAPTNVTCILKTLVENGEMILADGRRIVANSANVNGRENVVVIHPDFRMIVLANRPGFPFLGNDFFGTLGDIFSCHAVDNPKPHSELEMLRQYGPNVPEPILQKLVAAFGELRSLADQGIINYPYSTREVVNIVKHLQKFPTEGLSSVVRNVFDFDSYNNDMREILINTLHKYGIPIGAKPTSVQLAKELTLPEQTFMGYWTIGQARSGMQKLLCPVETHHIDIKGPALINIQEYPIERHEERSLNFTEECASWRIPLDEINIICDIATSHENEQNTLYVVTCNPASLYFMNMTGKSGFFVDFFDIFPRTANGVWHPFVTVAPLGSPLKGQVVLHEQQSNVILLLDTTGRALHRLILPSEKFTSKKPFWWNKEEAETYKMCKEFSHKNWLVFYKEKGNSLTVLDVLEGRTHTISLPINLKTVFLVAEDKWLLVESKTNQKYLLTKPAHIESEGSGVCQLYVLKEEPPSTGFGVTQETEFSIPHKISSDQLSSEHLSSAVEQKIASPNRILSDEKNYATIVVGFPDLMSPSEVYSWKRPSSLHKRSGTDTSFYRGKKKRGTPKQSNCVTLLDTNQVVRILPPGEVPLKDIYPKDVTPPQTSGYIEVTDLQSKKLRYIPIPRSESLSPYTTWLSTISDTDALLAEWDKSGVVTVDMGGHIRLWETGLERLQRSLMEWRNMIGQDDRNMQITINRDSGEDVSSPKHGKEDPDNMPHVGGNTWAGGTGGRDTAGLGGKGGPYRLDAGHTVYQVSQAEKDAVPEEVKRAAREMGQRAFQQRLKEIQMSEYDAATYERFSGAVRRQVHSLRIILDNLQAKGKERQWLRHQATGELDDAKIIDGLTGEKAIYKRRGELEPQLGSPQQKPKRLRLVVDVSGSMYRFNRMDGRLERTMEAVCMVMEAFENYEEKFQYDIVGHSGDGYNIGLVPMNKIPKDNKQRLEILKTMHAHSQFCMSGDHTLEGTEHAIKEIVKEEADEYFVIVLSDANLSRYGIHPAKFAQILTRDPQVNAFAIFIGSLGDQATRLQRTLPAGRSFVAMDTKDIPQILQQIFTSTMLSSV

SEQ ID NO: 17367 - protein, 691 aa, Artificial Sequence
  Synthetic polypeptide
GAPPPGRDPVWERFELQDSGSSLLPKEIVKVEKMMENHVSQASVTIRIADKEVTIKVPAGTRLLSQPCASDRFIQTLSHKQLQAEMMQSHMVKDICLIGGKGCGKTVIAKNFADTLGYNIEPIMLYQDMTARDLLQQRYTLPNGDTAWRSSPLVNAALEGKLVLLDGIHRVNAGTLAVLQRLIHDRELSLYDGSRLLREDRYMRLKEELQLSDEQLQKRSIFPIHPSFRIIALAEPPVIGSTAHQWLGPEFLTMFFFHYMKPLVKSEEIQVIKEKVPNVPQEALDKLLSFTHKLRETQDPTAQSLAASLSTRQLLRISRRLSQYPNENLHSAVTKACLSRFLPSLARSALEKNLADATIEINTDDNLEPELKDYKCEVTSGTLRIGAVSAPIYNAHEKMKVPDVLFYDNIQHVIVMEDMLKDFLLGEHLLLVGNQGVGKNKIVDRFLHLLNRPREYIQLHRDTTVQTLTLQPSVKDGLIVYEDSPLVKAVKLGHILVVDEADKAPTNVTCILKTLVENGEMILADGRRIVANSANVNGRENVVVIHPDFRMIVLANRPGFPFLGNDFFGTLGDIFSCHAVDNPKPHSELEMLRQYGPNVPEPILQKLVAAFGELRSLADQGIINYPYSTREVVNIVKHLQKFPTEGLSSVVRNVFDFDSYNNDMREILINTLHKYGIPIGAKPTSVQLAKE

SEQ ID NO: 17368 - protein, 12 aa, Artificial Sequence
  Synthetic polypeptide
FYIMFQTLWLNL

SEQ ID NO: 17369 - protein, 75 aa, Artificial Sequence
  Synthetic polypeptide
LQENKLRAPTDSTLCFRLSGSICSSASKMDNAEGSFGARCFSNRTSWASSTLYCYAVLGADQTGGRIHCPVKGHH

SEQ ID NO: 17370 - protein, 1854 aa, Artificial Sequence
  Synthetic polypeptide
RSLTVSHHPQMGLSSCKKTSSELPLILHYVSDSLAQSVVQHLRWIMQKDLLGQDVFLIGPPGPLRRSIAMQYLELTKREVEYIALSRDTTETDLKQRREIRAGTAFYIDQCAVRAATEGRTLILEGLEKAERNVLPVLNNLLENREMQLEDGRFLMSAERYDKLLRDHTKKELDSWKIVRVSENFRVIALGLPVPRYSGNPLDPPLRSRFQARDIYYLPFKDQLKLLYSIGANVSAEKVSQLLSFATTLCSQESSTLGLPDFPLDSLAAAVQILDSFPMMPIKHAIQWLYPYSILLGHEGKMAVEGVLKRFELQDSGSSLLPKEIVKVEKMMENHVSQASVTIRIADKEVTIKVPAGTRLLSQPCASDRFIQTLSHKQLQAEMMQSHMVKDICLIGGKGCGKTVIAKNFADTLGYNIEPIMLYQDMTARDLLQQRYTLPNGDTAWRSSPLVNAALEGKLVLLDGIHRVNAGTLAVLQRLIHDRELSLYDGSRLLREDRYMRLKEELQLSDEQLQKRSIFPIHPSFRIIALAEPPVIGSTAHQWLGPEFLTMFFFHYMKPLVKSEEIQVIKEKVPNVPQEALDKLLSFTHKLRETQDPTAQSLAASLSTRQLLRISRRLSQYPNENLHSAVTKACLSRFLPSLARSALEKNLADATIEINTDDNLEPELKDYKCEVTSGTLRIGAVSAPIYNAHEKMKVPDVLFYDNIQHVIVMEDMLKDFLLGEHLLLVGNQGVGKNKIVDRFLHLLNRPREYIQLHRDTTVQTLTLQPSVKDGLIVYEDSPLVKAVKLGHILVVDEADKAPTNVTCILKTLVENGEMILADGRRIVANSANVNGRENVVVIHPDFRMIVLANRPGFPFLGNDFFGTLGDIFSCHAVDNPKPHSELEMLRQYGPNVPEPILQKLVAAFGELRSLADQGIINYPYSTREVVNIVKHLQKFPTEGLSSVVRNVFDFDSYNNDMREILINTLHKYGIPIGAKPTSVQLAKELTLPEQTFMGYWTIGQARSGMQKLLCPVETHHIDIKGPALINIQEYPIERHEERSLNFTEECASWRIPLDEINIICDIATSHENEQNTLYVVTCNPASLYFMNMTGKSGFFVDFFDIFPRTANGVWHPFVTVAPLGSPLKGQVVLHEQQSNVILLLDTTGRALHRLILPSEKFTSKKPFWWNKEEAETYKMCKEFSHKNWLVFYKEKGNSLTVLDVLEGRTHTISLPINLKTVFLVAEDKWLLVESKTNQKYLLTKPAHIESEGSGVCQLYVLKEEPPSTGFGVTQETEFSIPHKISSDQLSSEHLSSAVEQKIASPNRILSDEKNYATIVVGFPDLMSPSEVYSWKRPSSLHKRSGTDTSFYRGKKKRGTPKQSNCVTLLDTNQVVRILPPGEVPLKDIYPKDVTPPQTSGYIEVTDLQSKKLRYIPIPRSESLSPYTTWLSTISDTDALLAEWDKSGVVTVDMGGHIRLWETGLERLQRSLMEWRNMIGQDDRNMQITINRDSGEDVSSPKHGKEDPDNMPHVGGNTWAGGTGGRDTAGLGGKGGPYRLDAGHTVYQVSQAEKDAVPEEVKRAAREMGQRAFQQRLKEIQMSEYDAATYERFSGAVRRQVHSLRIILDNLQAKGKERQWLRHQATGELDDAKIIDGLTGEKAIYKRRGELEPQLGSPQQKPKRLRLVVDVSGSMYRFNRMDGRLERTMEAVCMVMEAFENYEEKFQYDIVGHSGDGYNIGLVPMNKIPKDNKQRLEILKTMHAHSQFCMSGDHTLEGTEHAIKEIVKEEADEYFVIVLSDANLSRYGIHPAKFAQILTRDPQVNAFAIFIGSLGDQATRLQRTLPAGRSFVAMDTKDIPQILQQIFTSTMLSSV

SEQ ID NO: 17371 - protein, 988 aa, Artificial Sequence
  Synthetic polypeptide
RSLTVSHHPQMGLSSCKKTSSELPLILHYVSDSLAQSVVQHLRWIMQKDLLGQDVFLIGPPGPLRRSIAMQYLELTKREVEYIALSRDTTETDLKQRREIRAGTAFYIDQCAVRAATEGRTLILEGLEKAERNVLPVLNNLLENREMQLEDGRFLMSAERYDKLLRDHTKKELDSWKIVRVSENFRVIALGLPVPRYSGNPLDPPLRSRFQARDIYYLPFKDQLKLLYSIGANVSAEKVSQLLSFATTLCSQESSTLGLPDFPLDSLAAAVQILDSFPMMPIKHAIQWLYPYSILLGHEGKMAVEGVLKRFELQDSGSSLLPKEIVKVEKMMENHVSQASVTIRIADKEVTIKVPAGTRLLSQPCASDRFIQTLSHKQLQAEMMQSHMVKDICLIGGKGCGKTVIAKNFADTLGYNIEPIMLYQDMTARDLLQQRYTLPNGDTAWRSSPLVNAALEGKLVLLDGIHRVNAGTLAVLQRLIHDRELSLYDGSRLLREDRYMRLKEELQLSDEQLQKRSIFPIHPSFRIIALAEPPVIGSTAHQWLGPEFLTMFFFHYMKPLVKSEEIQVIKEKVPNVPQEALDKLLSFTHKLRETQDPTAQSLAASLSTRQLLRISRRLSQYPNENLHSAVTKACLSRFLPSLARSALEKNLADATIEINTDDNLEPELKDYKCEVTSGTLRIGAVSAPIYNAHEKMKVPDVLFYDNIQHVIVMEDMLKDFLLGEHLLLVGNQGVGKNKIVDRFLHLLNRPREYIQLHRDTTVQTLTLQPSVKDGLIVYEDSPLVKAVKLGHILVVDEADKAPTNVTCILKTLVENGEMILADGRRIVANSANVNGRENVVVIHPDFRMIVLANRPGFPFLGNDFFGTLGDIFSCHAVDNPKPHSELEMLRQYGPNVPEPILQKLVAAFGELRSLADQGIINYPYSTREVVNIVKHLQKFPTEGLSSVVRNVFDFDSYNNDMREILINTLHKYGIPIGAKPTSVQLAKE

SEQ ID NO: 17372 - protein, 17 aa, Artificial Sequence
  Synthetic polypeptide
INKFKRNRRLSVNRVCQ

SEQ ID NO: 17373 - protein, 202 aa, Artificial Sequence
  Synthetic polypeptide
IHCRLTNSKEIEDFQSTESVSSQQMNLSIGDDSTGSWSNLSFEDEHQDESSSFHHLSESNGNSSSWSSLGLEGDLYEDNLSFPTSDSDGPDDKDEEHEDEVEGLGQDGKTLLITNIDMEPCTVDPQLRIILQWLIASEAEVAELYFHDSANKEFMLLSKQLQEKGWKVGDLLQAVLQYYEVMEKASSEERCKSLFDWLLENA

SEQ ID NO: 17374 - protein, 5 aa, Artificial Sequence
  Synthetic polypeptide
QIQKK

SEQ ID NO: 17375 - protein, 60 aa, Artificial Sequence
  Synthetic polypeptide
LVLTDRGWAYVNANSDRGFKRLCMFLQVSLVLLPPAMRTASPRWILIEYQKMALTAFIEF

SEQ ID NO: 17376 - protein, 8 aa, Artificial Sequence
  Synthetic polypeptide
EQQVPDGS

SEQ ID NO: 17377 - protein, 267 aa, Artificial Sequence
  Synthetic polypeptide
KALHVSAGLSCAPASCHENSKSQMDPNRISEDGTHCIYRILRLHENADFQDTTLESQDTKLIPDSCRRIKQAFQGAVQKELQHIVGSQHIRAEKAMVDGSWLDLAKRSKLEAQPFAHLTINATDIPSGSHKVSLSSWYHDRGWAKISNMTFSNGKLIVNQDGFYYLYANICFRHHETSGDLATEYLQLMVYVTKTSIKIPSSHTLMKGGSTKYWSGNSEFHFYSINVGGFFKLRSGEEISIEVSNPSLLDPDQDATYFGAFKVRDID

SEQ ID NO: 17378 - protein, 19 aa, Artificial Sequence
  Synthetic polypeptide
ALPQTYRIRICILTSSPEQ

SEQ ID NO: 17379 - protein, 251 aa, Artificial Sequence
  Synthetic polypeptide
QAPQSNKLEEKKRLQENLRREAFREHQQYKTAEFLSKLNTESPDRSACQSAVCGPQSSTWKLPILPRDHSWARSWAYRDSLKAEENRKLQKMKDEQHQKSELLELKRQQQEQERAKIHQTEHRRVNNAFLDRLQGKSQPGGLEQSGGCWNMNSGNSWGSLLVFSRHLRVYEKILTPIWPSSTDLEKPHEMLFLNVILFSLTVFTLISTAHTLDRAVRSDWLLLVLIYACLEELIPELIFNLYCQGNATLFF

SEQ ID NO: 17380 - protein, 53 aa, Artificial Sequence
  Synthetic polypeptide
KSRILSPTSDLPNQNLHFNKLPRAINWRRKKDFKKTLEEKHLESISNTKPLSS

SEQ ID NO: 17381 - protein, 148 aa, Artificial Sequence
  Synthetic polypeptide
QAPQSNKLEEKKRLQENLRREAFREHQQYKTAEFLSKLNTESPDRSACQSAVCGPQSSTWARSWAYRDSLKAEENRKLQKMKDEQHQKSELLELKRQQQEQERAKIHQTEHRRVNNAFLDRLQGKSQPGGLEQSGGCWNMNSGNSWGI

SEQ ID NO: 17382 - protein, 159 aa, Artificial Sequence
  Synthetic polypeptide
QAPQSNKLEEKKRLQENLRREAFREHQQYKTAEFLSKLNTESPDRSACQSAVCGPQSSTWKLPILPRDHSWARSWAYRDSLKAEENRKLQKMKDEQHQKSELLELKRQQQEQERAKIHQTEHRRVNNAFLDRLQGKSQPGGLEQSGGCWNMNSGNSWGI

SEQ ID NO: 17383 - protein, 46 aa, Artificial Sequence
  Synthetic polypeptide
QAPQSNKLEEKKRLQENLRREAFREHQQYKTAEFLSKLNTESPDRS

SEQ ID NO: 17384 - protein, 355 aa, Artificial Sequence
  Synthetic polypeptide
GLPSHVELTSAYTLIAPNINRRNEIQRIAEQELANLEKWKEQNRAKPVHLVPRRLGGSQSETEVRQKQQLQLMQSKYKQKLKREESVRIKKEAEEAELQKMKAIQREKSNKLEEKKRLQENLRREAFREHQQYKTAEFLSKLNTESPDRSACQSAVCGPQSSTWKLPILPRDHSWARSWAYRDSLKAEENRKLQKMKDEQHQKSELLELKRQQQEQERAKIHQTEHRRVNNAFLDRLQGKSQPGGLEQSGGCWNMNSGNSWGSLLVFSRHLRVYEKILTPIWPSSTDLEKPHEMLFLNVILFSLTVFTLISTAHTLDRAVRSDWLLLVLIYACLEELIPELIFNLYCQGNATLFF

SEQ ID NO: 17385 - protein, 42 aa, Artificial Sequence
  Synthetic polypeptide
RAVPLHVLSCLPPCKMCLCSSFAFHHDCEASPAMWNSQVHTP

SEQ ID NO: 17386 - protein, 55 aa, Artificial Sequence
  Synthetic polypeptide
WFYKGQFLCTCSLACHHVRCAFAPPLPSTMIVRPPQPCGTHKCIHLDSTKYKPEK

SEQ ID NO: 17387 - protein, 252 aa, Artificial Sequence
  Synthetic polypeptide
GLPSHVELTSAYTLIAPNINRRNEIQRIAEQELANLEKWKEQNRAKPVHLVPRRLGGSQSETEVRQKQQLQLMQSKYKQKLKREESVRIKKEAEEAELQKMKAIQREKSNKLEEKKRLQENLRREAFREHQQYKTAEFLSKLNTESPDRSACQSAVCGPQSSTWARSWAYRDSLKAEENRKLQKMKDEQHQKSELLELKRQQQEQERAKIHQTEHRRVNNAFLDRLQGKSQPGGLEQSGGCWNMNSGNSWGI

SEQ ID NO: 17388 - protein, 263 aa, Artificial Sequence
  Synthetic polypeptide
GLPSHVELTSAYTLIAPNINRRNEIQRIAEQELANLEKWKEQNRAKPVHLVPRRLGGSQSETEVRQKQQLQLMQSKYKQKLKREESVRIKKEAEEAELQKMKAIQREKSNKLEEKKRLQENLRREAFREHQQYKTAEFLSKLNTESPDRSACQSAVCGPQSSTWKLPILPRDHSWARSWAYRDSLKAEENRKLQKMKDEQHQKSELLELKRQQQEQERAKIHQTEHRRVNNAFLDRLQGKSQPGGLEQSGGCWNMNSGNSWGI

SEQ ID NO: 17389 - protein, 52 aa, Artificial Sequence
  Synthetic polypeptide
ATHSGPISSRESCSFFLPIQLCSKLKSVCVVCVRDLRLLDCSTKSLELFILL

SEQ ID NO: 17390 - protein, 88 aa, Artificial Sequence
  Synthetic polypeptide
CVFATSVSLTVRPRALSFSSYYKGGFEQKMSRREAGLILGVSPSAGKAKIRTAHRRVMILNHPDKGGSPYVAAKINEAKDLLETTTKH

SEQ ID NO: 17391 - protein, 9 aa, Artificial Sequence
  Synthetic polypeptide
SQLLRRLRV

SEQ ID NO: 17392 - protein, 171 aa, Artificial Sequence
  Synthetic polypeptide
LGIVAHACDPSYSGGSESDKEEKPQHSVIPKEVTPALCSLMSSYGSLSGSESEPEETPIKTEADVLAENQVLDSSAPKSPSQDVKATVRNFSEAKSENRKKSFEKTNPKRKKDYHNYQTLFEPRTHHPYLLEMLLAPDIRHERNVILQCVRYIIKKDFFGLDTNSAKSKDV

SEQ ID NO: 17393 - protein, 24 aa, Artificial Sequence
  Synthetic polypeptide
WHTPVIPATQEAQSLIRRRNHNIL

SEQ ID NO: 17394 - protein, 176 aa, Artificial Sequence
  Synthetic polypeptide
LTLLPYSLDCSGLEPNLQYLQESDKEEKPQHSVIPKEVTPALCSLMSSYGSLSGSESEPEETPIKTEADVLAENQVLDSSAPKSPSQDVKATVRNFSEAKSENRKKSFEKTNPKRKKDYHNYQTLFEPRTHHPYLLEMLLAPDIRHERNVILQCVRYIIKKDFFGLDTNSAKSKDV

SEQ ID NO: 17395 - protein, 59 aa, Artificial Sequence
  Synthetic polypeptide
CYCTLHMLQYSVNITFICPEKPENLCDLLYCHIHLIAVVWNQIYNISKSLIRRRNHNIL

SEQ ID NO: 17396 - protein, 14 aa, Artificial Sequence
  Synthetic polypeptide
LQWSGTKSTISPRV

SEQ ID NO: 17397 - protein, 98 aa, Artificial Sequence
  Synthetic polypeptide
PPGVKDHQIALRRGEPAQLQDQLCPLIIKAVVQIHQTAMKTVVLCTKKEIKNLKKMTVVQLQENRGKIRMMTMMMMMGFLDQPFLLDLKSRMILLQGP

SEQ ID NO: 17398 - protein, 14 aa, Artificial Sequence
  Synthetic polypeptide
GGVNQPSCRTSSAP

SEQ ID NO: 17399 - protein, 314 aa, Artificial Sequence
  Synthetic polypeptide
TSPVAGPALPPNYKSSSSDSSDSDEDSSSLYEEGNQESEEDDSGPTARKQRKNQDDDDDDDDGFFGPALPPGFKKQDDSPPRPIIGPALPPGFIKSTQKSDKGRDDPGQQETDSSEDEDIIGPMPAKGPVNYNVTTEFEKRAQRMKEKLTKGDDDSSKPIVRESWMTELPPEMKDFGLGPRTFKRRADDTSGDRSIWTDTPADRERKAKETQEARKSSSKKDEEHILSGRDKRLAEQVSSYNESKRSESLMDIHHKKLKSKAAEDKNKPQERIPFDRDKDLKVNRFDEAQKKALIKKSRELNTRFSHGKGNMFL

SEQ ID NO: 17400 - protein, 128 aa, Artificial Sequence
  Synthetic polypeptide
PPGVKDHQIALRRGEPAQVGNKACENSGADQQWDRTCEKPLHFNLDNTLQDQLCPLIIKAVVQIHQTAMKTVVLCTKKEIKNLKKMTVVQLQENRGKIRMMTMMMMMGFLDQPFLLDLKSRMILLQGP

SEQ ID NO: 17401 - protein, 44 aa, Artificial Sequence
  Synthetic polypeptide
GGVNQPRSETKHVKTLVLISSGIAPVKSHCTSTWTTHCRTSSAP

SEQ ID NO: 17402 - protein, 321 aa, Artificial Sequence
  Synthetic polypeptide
KATALQPGQHIAGPALPPNYKSSSSDSSDSDEDSSSLYEEGNQESEEDDSGPTARKQRKNQDDDDDDDDGFFGPALPPGFKKQDDSPPRPIIGPALPPGFIKSTQKSDKGRDDPGQQETDSSEDEDIIGPMPAKGPVNYNVTTEFEKRAQRMKEKLTKGDDDSSKPIVRESWMTELPPEMKDFGLGPRTFKRRADDTSGDRSIWTDTPADRERKAKETQEARKSSSKKDEEHILSGRDKRLAEQVSSYNESKRSESLMDIHHKKLKSKAAEDKNKPQERIPFDRDKDLKVNRFDEAQKKALIKKSRELNTRFSHGKGNMFL

SEQ ID NO: 17403 - protein, 16 aa, Artificial Sequence
  Synthetic polypeptide
VQVYFPSRTASFSYIF

SEQ ID NO: 17404 - protein, 1381 aa, Artificial Sequence
  Synthetic polypeptide
MTVTPKNSECHINFVDKAAAGFERIESRSTSPAGQHHSPISSRHHSSSSQSGSSIQRHSPSPRRKRTPSPSYQRTLTPPLRRSASPYPSHSLSSPQRKQSPPRHRSPMREKGRHDHERTSQSHDRRHERREDTRGKRDREKDSREEREYEQDQSSSRDHRDDREPRDGRDRRDARDTRDRRELRDSRDMRDSREMRDYSRDTKESRDPRDSRSTRDAHDYRDREGRDTHRKEDTYPEESRSYGRNHLREESSRTEIRNESRNESRSEIRNDRMGRSRGRVPELPEKGSRGSRGSQIDSHSSNSNYHDSWETRSSYPERDRYPERDNRDQARDSSFERRHGERDRRDNRERDQRPSSPIRHQGRNDELERDERREERRVDRVDDRRDERARERDRERERDRERERERERERDREREKERELERERAREREREREKERDRERDRDRDHDRERERERERDREKEREREREERERERERERERERERERERERARERDKERERQRDWEDKDKGRDDRREKREEIREDRNPRDGHDERKSKKRYRNEGSPSPRQSPKRRREHSPDSDAYNSGDDKNEKHRLLSQVVRPQESRSLSPSHLTEDRQGRWKEEDRKPERKESSRRYEEQELKEKVSSVDKQREQTEILESSRMRAQDIIGHHQSEDRETSDRAHDENKKKAKIQKKPIKKKKEDDVGIERGNIETTSEDGQVFSPKKGQKKKSIEKKRKKSKGDSDISDEEAAQQSKKKRGPRTPPITTKEELVEMCNGKNGILEDSQKKEDTAFSDWSDEDVPDRTEVTEAEHTATATTPGSTPSPLSSLLPPPPPVATATATTVPATLAATTAAAATSFSTSAITISTSATPTNTTNNTFANEDSHRKCHRTRVEKVETPHVTIEDAQHRKPMDQKRSSSLGSNRSNRSHTSGRLRSPSNDSAHRSGDDQSGRKRVLHSGSRDREKTKSLEITGERKSRIDQLKRGEPSRSTSSDRQDSRSHSSRRSSPESDRQVHSRSGSFDSRDRLQERDRYEHDRERERERRDTRQREWDRDADKDWPRNRDRDRLRERERERERDKRRDLDRERERLISDSVERDRDRDRDRTFESSQIESVKRCEAKLEGEHERDLESTSRDSLALDKERMDKDLGSVQGFEETNKSERTESLEGDDESKLDDAHSLGSGAGEGYEPISDDELDEILAGDAEKREDQQDEEKMPDPLDVIDVDWSGLMPKHPKEPREPGAALLKFTPGAVMLRVGISKKLAGSELFAKVKETCQRLLEKPKDADNLFEHELGALNMAALLRKEERASLLSNLGPCCKALCFRRDSAIRKQLVKNEKGTIKQAYTSAPMVDNELLRLSLRLFKRKTTCHAPGHEKTEDNKLSQSSIQQELCVS

SEQ ID NO: 17405 - protein, 63 aa, Artificial Sequence
  Synthetic polypeptide
TLLTKQQQGLRGLSPGLLPQQDSIILLYLLDITHLPHNQDHLFKDILLLLVEKELLHHLISGH

SEQ ID NO: 17406 - protein, 1277 aa, Artificial Sequence
  Synthetic polypeptide
MTVTPKNSECHINFVDKAAAGFERIESRSTSPAGQHHSPISSRHHSSSSQSGSSIQRHSPSPRRKRTPSPSYQRTLTPPLRRSASPYPSHSLSSPQRKQSPPRHRSPMREKGRHDHERTSQSHDRRHERREDTRGKRDREKDSREEREYEQDQSSSRDHRDDREPRDGRDRRDARDTRDRRELRDSRDMRDSREMRDYSRDTKESRDPRDSRSTRDAHDYRDREGRDTHRKEDTYPEESRSYGRNHLREESSRTEIRNESRNESRSEIRNDRMGRSRGRVPELPEKGSRGSRGSQIDSHSSNSNYHDSWETRSSYPERDRYPERDNRDQARDSSFERRHGERDRRDNRERDQRPSSPIRHQGRNDELERDERREERRVDRVDDRRDERARERDRERERDRERERERERERDREREKERELERERAREREREREKERDRERDRDRDHDRERERERERDREKEREREREERERERERERERERERERERERARERDKERERQRDWEDKDKGRDDRREKREEIREDRNPRDGHDERKSKKRYRNEGSPSPRQSPKRRREHSPDSDAYNSGDDKNEKHRLLSQVVRPQESRSLSPSHLTEDRQGRWKEEDRKPERKESSRRYEEQELKEKVSSVDKQREQTEILESSRMRAQDIIGHHQSEDRETSDRAHDENKKKAKIQKKPIKKKKEDDVGIERGNIETTSEDGQVFSPKKGQKKKSIEKKRKKSKGDSDISDEEAAQQSKKKRGPRTPPITTKEELVEMCNGKNGILEDSQKKEDTAFSDWSDEDVPDRTEVTEAEHTATATTPGSTPSPLSSLLPPPPPVATATATTVPATLAATTAAAATSFSTSAITISTSATPTNTTNNTFANEDSHRKCHRTRVEKVETPHVTIEDAQHRKPMDQKRSSSLGSNRSNRSHTSGRLRSPSNDSAHRSGDDQSGRKRVLHSGSRDREKTKSLEITGERKSRIDQLKRGEPSRSTSSDRQDSRSHSSRRSSPESDRQVHSRSGSFDSRDRLQERDRYEHDRERERERRDTRQREWDRDADKDWPRNRDRDRLRERERERERDKRRDLDRERERLISDSVERDRDRDRDRTFESSQIESVKRCEAKLEGEHERDLESTSRDSLALDKERMDKDLGSVQGFEETNKSERTESLEAGDDESKLDDAHSLGSGAGEGYEPISDDELDEILAGDAEKREDQQDEEKMPDPLDVIDVDWSGLMPKHPKEPREPGAALLKFTPGAVMLRVGISKKLAGSELFAKVKETCQRLLEKPKGSFILL

SEQ ID NO: 17407 - protein, 62 aa, Artificial Sequence
  Synthetic polypeptide
FIEAHRCCVFLQMEGLLPQQDSIILLYLLDITHLPHNQDHLFKDILLLLVEKELLHHLISGH

SEQ ID NO: 17408 - protein, 28 aa, Artificial Sequence
  Synthetic polypeptide
LLKLTDVVYFYKWKVYFPSRTASFSYIF

SEQ ID NO: 17409 - protein, 1365 aa, Artificial Sequence
  Synthetic polypeptide
SSQMLCIFTNGRSTSPAGQHHSPISSRHHSSSSQSGSSIQRHSPSPRRKRTPSPSYQRTLTPPLRRSASPYPSHSLSSPQRKQSPPRHRSPMREKGRHDHERTSQSHDRRHERREDTRGKRDREKDSREEREYEQDQSSSRDHRDDREPRDGRDRRDARDTRDRRELRDSRDMRDSREMRDYSRDTKESRDPRDSRSTRDAHDYRDREGRDTHRKEDTYPEESRSYGRNHLREESSRTEIRNESRNESRSEIRNDRMGRSRGRVPELPEKGSRGSRGSQIDSHSSNSNYHDSWETRSSYPERDRYPERDNRDQARDSSFERRHGERDRRDNRERDQRPSSPIRHQGRNDELERDERREERRVDRVDDRRDERARERDRERERDRERERERERERDREREKERELERERAREREREREKERDRERDRDRDHDRERERERERDREKEREREREERERERERERERERERERERERARERDKERERQRDWEDKDKGRDDRREKREEIREDRNPRDGHDERKSKKRYRNEGSPSPRQSPKRRREHSPDSDAYNSGDDKNEKHRLLSQVVRPQESRSLSPSHLTEDRQGRWKEEDRKPERKESSRRYEEQELKEKVSSVDKQREQTEILESSRMRAQDIIGHHQSEDRETSDRAHDENKKKAKIQKKPIKKKKEDDVGIERGNIETTSEDGQVFSPKKGQKKKSIEKKRKKSKGDSDISDEEAAQQSKKKRGPRTPPITTKEELVEMCNGKNGILEDSQKKEDTAFSDWSDEDVPDRTEVTEAEHTATATTPGSTPSPLSSLLPPPPPVATATATTVPATLAATTAAAATSFSTSAITISTSATPTNTTNNTFANEDSHRKCHRTRVEKVETPHVTIEDAQHRKPMDQKRSSSLGSNRSNRSHTSGRLRSPSNDSAHRSGDDQSGRKRVLHSGSRDREKTKSLEITGERKSRIDQLKRGEPSRSTSSDRQDSRSHSSRRSSPESDRQVHSRSGSFDSRDRLQERDRYEHDRERERERRDTRQREWDRDADKDWPRNRDRDRLRERERERERDKRRDLDRERERLISDSVERDRDRDRDRTFESSQIESVKRCEAKLEGEHERDLESTSRDSLALDKERMDKDLGSVQGFEETNKSERTESLEGDDESKLDDAHSLGSGAGEGYEPISDDELDEILAGDAEKREDQQDEEKMPDPLDVIDVDWSGLMPKHPKEPREPGAALLKFTPGAVMLRVGISKKLAGSELFAKVKETCQRLLEKPKDADNLFEHELGALNMAALLRKEERASLLSNLGPCCKALCFRRDSAIRKQLVKNEKGTIKQAYTSAPMVDNELLRLSLRLFKRKTTCHAPGHEKTEDNKLSQSSIQQELCVS

SEQ ID NO: 17410 - protein, 1261 aa, Artificial Sequence
  Synthetic polypeptide
SSQMLCIFTNGRSTSPAGQHHSPISSRHHSSSSQSGSSIQRHSPSPRRKRTPSPSYQRTLTPPLRRSASPYPSHSLSSPQRKQSPPRHRSPMREKGRHDHERTSQSHDRRHERREDTRGKRDREKDSREEREYEQDQSSSRDHRDDREPRDGRDRRDARDTRDRRELRDSRDMRDSREMRDYSRDTKESRDPRDSRSTRDAHDYRDREGRDTHRKEDTYPEESRSYGRNHLREESSRTEIRNESRNESRSEIRNDRMGRSRGRVPELPEKGSRGSRGSQIDSHSSNSNYHDSWETRSSYPERDRYPERDNRDQARDSSFERRHGERDRRDNRERDQRPSSPIRHQGRNDELERDERREERRVDRVDDRRDERARERDRERERDRERERERERERDREREKERELERERAREREREREKERDRERDRDRDHDRERERERERDREKEREREREERERERERERERERERERERERARERDKERERQRDWEDKDKGRDDRREKREEIREDRNPRDGHDERKSKKRYRNEGSPSPRQSPKRRREHSPDSDAYNSGDDKNEKHRLLSQVVRPQESRSLSPSHLTEDRQGRWKEEDRKPERKESSRRYEEQELKEKVSSVDKQREQTEILESSRMRAQDIIGHHQSEDRETSDRAHDENKKKAKIQKKPIKKKKEDDVGIERGNIETTSEDGQVFSPKKGQKKKSIEKKRKKSKGDSDISDEEAAQQSKKKRGPRTPPITTKEELVEMCNGKNGILEDSQKKEDTAFSDWSDEDVPDRTEVTEAEHTATATTPGSTPSPLSSLLPPPPPVATATATTVPATLAATTAAAATSFSTSAITISTSATPTNTTNNTFANEDSHRKCHRTRVEKVETPHVTIEDAQHRKPMDQKRSSSLGSNRSNRSHTSGRLRSPSNDSAHRSGDDQSGRKRVLHSGSRDREKTKSLEITGERKSRIDQLKRGEPSRSTSSDRQDSRSHSSRRSSPESDRQVHSRSGSFDSRDRLQERDRYEHDRERERERRDTRQREWDRDADKDWPRNRDRDRLRERERERERDKRRDLDRERERLISDSVERDRDRDRDRTFESSQIESVKRCEAKLEGEHERDLESTSRDSLALDKERMDKDLGSVQGFEETNKSERTESLEAGDDESKLDDAHSLGSGAGEGYEPISDDELDEILAGDAEKREDQQDEEKMPDPLDVIDVDWSGLMPKHPKEPREPGAALLKFTPGAVMLRVGISKKLAGSELFAKVKETCQRLLEKPKGSFILL

SEQ ID NO: 17411 - protein, 9 aa, Artificial Sequence
  Synthetic polypeptide
RKRIFKRET

SEQ ID NO: 17412 - protein, 1560 aa, Artificial Sequence
  Synthetic polypeptide
EPNEEKESSRGRHREKEDIKITKERTPESEEENVEWETNRDDSDNGDINYDYVHELSLEMKRQKIQRELMKLEQENMEKREEIIIKKEVSPEVVRSKLSPSPSLRKSSKSPKRKSSPKSSSASKKDRKTSAVSSPLLDQQRNSKTNQSKKKGPRTPSPPPPIPEDIALGKKYKEKYKVKDRIEEKTRDGKDRGRDFERQREKRDKPRSTSPAGQHHSPISSRHHSSSSQSGSSIQRHSPSPRRKRTPSPSYQRTLTPPLRRSASPYPSHSLSSPQRKQSPPRHRSPMREKGRHDHERTSQSHDRRHERREDTRGKRDREKDSREEREYEQDQSSSRDHRDDREPRDGRDRRDARDTRDRRELRDSRDMRDSREMRDYSRDTKESRDPRDSRSTRDAHDYRDREGRDTHRKEDTYPEESRSYGRNHLREESSRTEIRNESRNESRSEIRNDRMGRSRGRVPELPEKGSRGSRGSQIDSHSSNSNYHDSWETRSSYPERDRYPERDNRDQARDSSFERRHGERDRRDNRERDQRPSSPIRHQGRNDELERDERREERRVDRVDDRRDERARERDRERERDRERERERERERDREREKERELERERAREREREREKERDRERDRDRDHDRERERERERDREKEREREREERERERERERERERERERERERARERDKERERQRDWEDKDKGRDDRREKREEIREDRNPRDGHDERKSKKRYRNEGSPSPRQSPKRRREHSPDSDAYNSGDDKNEKHRLLSQVVRPQESRSLSPSHLTEDRQGRWKEEDRKPERKESSRRYEEQELKEKVSSVDKQREQTEILESSRMRAQDIIGHHQSEDRETSDRAHDENKKKAKIQKKPIKKKKEDDVGIERGNIETTSEDGQVFSPKKGQKKKSIEKKRKKSKGDSDISDEEAAQQSKKKRGPRTPPITTKEELVEMCNGKNGILEDSQKKEDTAFSDWSDEDVPDRTEVTEAEHTATATTPGSTPSPLSSLLPPPPPVATATATTVPATLAATTAAAATSFSTSAITISTSATPTNTTNNTFANEDSHRKCHRTRVEKVETPHVTIEDAQHRKPMDQKRSSSLGSNRSNRSHTSGRLRSPSNDSAHRSGDDQSGRKRVLHSGSRDREKTKSLEITGERKSRIDQLKRGEPSRSTSSDRQDSRSHSSRRSSPESDRQVHSRSGSFDSRDRLQERDRYEHDRERERERRDTRQREWDRDADKDWPRNRDRDRLRERERERERDKRRDLDRERERLISDSVERDRDRDRDRTFESSQIESVKRCEAKLEGEHERDLESTSRDSLALDKERMDKDLGSVQGFEETNKSERTESLEGDDESKLDDAHSLGSGAGEGYEPISDDELDEILAGDAEKREDQQDEEKMPDPLDVIDVDWSGLMPKHPKEPREPGAALLKFTPGAVMLRVGISKKLAGSELFAKVKETCQRLLEKPKDADNLFEHELGALNMAALLRKEERASLLSNLGPCCKALCFRRDSAIRKQLVKNEKGTIKQAYTSAPMVDNELLRLSLRLFKRKTTCHAPGHEKTEDNKLSQSSIQQELCVS

SEQ ID NO: 17413 - protein, 30 aa, Artificial Sequence
  Synthetic polypeptide
MYLPQFITSYGENQMKKKNLQEGDIGKRKT

SEQ ID NO: 17414 - protein, 1456 aa, Artificial Sequence
  Synthetic polypeptide
EPNEEKESSRGRHREKEDIKITKERTPESEEENVEWETNRDDSDNGDINYDYVHELSLEMKRQKIQRELMKLEQENMEKREEIIIKKEVSPEVVRSKLSPSPSLRKSSKSPKRKSSPKSSSASKKDRKTSAVSSPLLDQQRNSKTNQSKKKGPRTPSPPPPIPEDIALGKKYKEKYKVKDRIEEKTRDGKDRGRDFERQREKRDKPRSTSPAGQHHSPISSRHHSSSSQSGSSIQRHSPSPRRKRTPSPSYQRTLTPPLRRSASPYPSHSLSSPQRKQSPPRHRSPMREKGRHDHERTSQSHDRRHERREDTRGKRDREKDSREEREYEQDQSSSRDHRDDREPRDGRDRRDARDTRDRRELRDSRDMRDSREMRDYSRDTKESRDPRDSRSTRDAHDYRDREGRDTHRKEDTYPEESRSYGRNHLREESSRTEIRNESRNESRSEIRNDRMGRSRGRVPELPEKGSRGSRGSQIDSHSSNSNYHDSWETRSSYPERDRYPERDNRDQARDSSFERRHGERDRRDNRERDQRPSSPIRHQGRNDELERDERREERRVDRVDDRRDERARERDRERERDRERERERERERDREREKERELERERAREREREREKERDRERDRDRDHDRERERERERDREKEREREREERERERERERERERERERERERARERDKERERQRDWEDKDKGRDDRREKREEIREDRNPRDGHDERKSKKRYRNEGSPSPRQSPKRRREHSPDSDAYNSGDDKNEKHRLLSQVVRPQESRSLSPSHLTEDRQGRWKEEDRKPERKESSRRYEEQELKEKVSSVDKQREQTEILESSRMRAQDIIGHHQSEDRETSDRAHDENKKKAKIQKKPIKKKKEDDVGIERGNIETTSEDGQVFSPKKGQKKKSIEKKRKKSKGDSDISDEEAAQQSKKKRGPRTPPITTKEELVEMCNGKNGILEDSQKKEDTAFSDWSDEDVPDRTEVTEAEHTATATTPGSTPSPLSSLLPPPPPVATATATTVPATLAATTAAAATSFSTSAITISTSATPTNTTNNTFANEDSHRKCHRTRVEKVETPHVTIEDAQHRKPMDQKRSSSLGSNRSNRSHTSGRLRSPSNDSAHRSGDDQSGRKRVLHSGSRDREKTKSLEITGERKSRIDQLKRGEPSRSTSSDRQDSRSHSSRRSSPESDRQVHSRSGSFDSRDRLQERDRYEHDRERERERRDTRQREWDRDADKDWPRNRDRDRLRERERERERDKRRDLDRERERLISDSVERDRDRDRDRTFESSQIESVKRCEAKLEGEHERDLESTSRDSLALDKERMDKDLGSVQGFEETNKSERTESLEAGDDESKLDDAHSLGSGAGEGYEPISDDELDEILAGDAEKREDQQDEEKMPDPLDVIDVDWSGLMPKHPKEPREPGAALLKFTPGAVMLRVGISKKLAGSELFAKVKETCQRLLEKPKGSFILL

SEQ ID NO: 17415 - protein, 10 aa, Artificial Sequence
  Synthetic polypeptide
LPESFNVAKF

SEQ ID NO: 17416 - protein, 14 aa, Artificial Sequence
  Synthetic polypeptide
FLSPSMWPSSSCSS

SEQ ID NO: 17417 - protein, 402 aa, Artificial Sequence
  Synthetic polypeptide
VLQCGQVLAALPRTSRQVQVLQNLTTTYEIVLWQPVTADLIVKKKQVHFFVNASDVDNVKAHLNVSGIPCSVLLADVEDLIQQQISNDTVSPRASASYYEQYHSLNEIYSWIEFITERHPDMLTKIHIGSSFEKYPLYVLKVSGKEQAAKNAIWIDCGIHAREWISPAFCLWFIGHITQFYGIIGQYTNLLRLVDFYVMPVVNVDGYDYSWKKNRMWRKNRSFYANNHCIGTDLNRNFASKHWCEEGASSSSCSETYCGLYPESEPEVKAVASFLRRNINQIKAYISMHSYSQHIVFPYSYTRSKSKDHEELSLVASEAVRAIEKISKNTRYTHGHGSETLYLAPGGGDDWIYDLGIKYSFTIELRDTGTYGFLLPERYIKPTCREAFAAVSKIAWHVIRNV

SEQ ID NO: 17418 - protein, 339 aa, Artificial Sequence
  Synthetic polypeptide
VLQCGQVLAALPRTSRQVQVLQNLTTTYEIVLWQPVTADLIVKKKQVHFFVNASDVDNVKAHLNVSGIPCSVLLADVEDLIQQQISNDTVSPRASASYYEQYHSLNEIYSWIEFITERHPDMLTKIHIGSSFEKYPLYVLKVSGKEQAAKNAIWIDCGIHAREWISPAFCLWFIGHNRMWRKNRSFYANNHCIGTDLNRNFASKHWCEEGASSSSCSETYCGLYPESEPEVKAVASFLRRNINQIKAYISMHSYSQHIVFPYSYTRSKSKDHEELSLVASEAVRAIEKISKNTRYTHGHGSETLYLAPGGGDDWIYDLGIKYSVTSNPPVEKLLPLSLK

SEQ ID NO: 17419 - protein, 16 aa, Artificial Sequence
  Synthetic polypeptide
CGGSAQRTENPCCSSQ

SEQ ID NO: 17420 - protein, 153 aa, Artificial Sequence
  Synthetic polypeptide
VVGARREQRIRAVQVSRRTISSNSFSPEVFVLPVDVEKENAHFYVADMIISAMEKMKCNILSQQQTESWSKEVSGLLGSDQPDSEMTFDTNIKQESGSSTSSYSGYEGCAVLQVSPVTETRTYHDVKEICKCDVDEFVILVSLMSQTSILQNY

SEQ ID NO: 17421 - protein, 35 aa, Artificial Sequence
  Synthetic polypeptide
WWERAENRESVLFKSVEEPFLRIPSHQRYLCCLLM

SEQ ID NO: 17422 - protein, 467 aa, Artificial Sequence
  Synthetic polypeptide
VVGARREQRIRAVQVSRRTISSNSFSPEVFVLPVDVEKENAHFYVADMIISAMEKMKCNILSQQQTESWSKEVSGLLGSDQPDSEMTFDTNIKQESGSSTSSYSGYEGCAVLQVSPVTETRTYHDVKEICKCDVDEFVILELGDFNDITETCSCSCSSSKSVTYEPDFNSAELLAKELYRVFQKCWILSVVNSQLAGSLSAAGSIVVNEECVRKDFESSMNVVQEIKFKSRIRGTEDWAPPRFQIIFNIHPPLKRDLVVAAQNFFCAGCGTPVEPKFVKRLRYCEYLGKYFCDCCHSYAESCIPARILMMWDFKKYYVSNFSKQLLDSIWHQPIFNLLSIGQSLYAKAKELDRVKEIQEQLFHIKKLLKTCRFANSCVKERALFVNFARIRLSSSHFRQQHVEDVQRAGLAFTNSASSPPSAPGVRGSQRGENFWKVWPLQQHDAPEYCEKDCSTCLMITPICVYYW

SEQ ID NO: 17423 - protein, 494 aa, Artificial Sequence
  Synthetic polypeptide
VVGARREQRIRAVQVSRRTISSNSFSPEVFVLPVDVEKENAHFYVADMIISAMEKMKCNILSQQQTESWSKEVSGLLGSDQPDSEMTFDTNIKQESGSSTSSYSGYEGCAVLQVSPVTETRTYHDVKEICKCDVDEFVILELGDFNDITETCSCSCSSSKSVTYEPDFNSAELLAKELYRVFQKCWILSVVNSQLAGSLSAAGSIVVNEECVRKDFESSMNVVQEIKFKSRIRGTEDWAPPRFQIIFNIHPPLKRDLVVAAQNFFCAGCGTPVEPKFVKRLRYCEYLGKYFCDCCHSYAESCIPARILMMWDFKKYYVSNFSKQLLDSIWHQPIFNLLSIGQSLYAKAKELDRVKEIQEQLFHIKKLLKTCRFANSALKEFEQVPGHLTDELHLFSLEDLVRIKKGLLAPLLKDILKASLAHVAGCELCQGKGFICEFCQNTTVIFPFQTATCRRCSACRACFHKQCFQSSECPRCARITARRKLLESVASAAT

SEQ ID NO: 17424 - protein, 119 aa, Artificial Sequence
  Synthetic polypeptide
VVGARREQRIRAVQVSRRTISSNSFSPEVFVLPVDVEKENAHFYVADMIISAMEKMKCNILSQQQTESWSKEVSGLLGSDQPDSEMTFDTNIKQESGSSTSSYSGYEGKLCCVTGQPSD

SEQ ID NO: 17425 - protein, 96 aa, Artificial Sequence
  Synthetic polypeptide
VVGARREQRIRAVQVSRRTISSNSFSPEVFVLPVDVEKENAHFYVADMIISAMEKMKCNILSQQQTESWSKEVSGLLGSDQPDSEMTFDTNIKQES

SEQ ID NO: 17426 - protein, 9 aa, Artificial Sequence
  Synthetic polypeptide
GRVNKRALR

SEQ ID NO: 17427 - protein, 7 aa, Artificial Sequence
  Synthetic polypeptide
GVSIKEH

SEQ ID NO: 17428 - protein, 109 aa, Artificial Sequence
  Synthetic polypeptide
KSIEMRLKVSLHEDLGAALMDGVVLCHLVNHIRPRSVASIHVPSPAVPKLSMAKCRRNVENFLEACRKLGVPEEKLCLPHHILEEKGLVKVGITIQALLDITVTKALFT

SEQ ID NO: 17429 - protein, 141 aa, Artificial Sequence
  Synthetic polypeptide
KSIEMRLKVSLHEDLGAALMDGVVLCHLVNHIRPRSVASIHVPSPAVPKLSMAKCRRNVENFLEACRKLGVPEADLCSPCDILQLDFRHIRKTVDTLLALGEKAPPPTSALRSRDLIGFCLVHILFIVLVYITYHWNALSA

SEQ ID NO: 17430 - protein, 9 aa, Artificial Sequence
  Synthetic polypeptide
EHMDTRVLY

SEQ ID NO: 17431 - protein, 26 aa, Artificial Sequence
  Synthetic polypeptide
KWELNDENTWTQGSCINRKFTWWCQH

SEQ ID NO: 17432 - protein, 293 aa, Artificial Sequence
  Synthetic polypeptide
MMRTHGHKGPVLIGSSHGGVNIEDVAAESPEAIIKEPIDIEEGIKKEQALQLAQKMGFPPNIVESAAENMVKLYSLFLKYDATMIEINPMVEDSDGAVLCMDAKINFDSNSAYRQKKIFDLQDWTQEDERDKDAAKANLNYIGLDGNIGCLVNGAGLAMATMDIIKLHGGTPANFLDVGGGATVHQVTEAFKLITSDKKVLAILVNIFGGIMRCDVIAQGIVMAVKDLEIKIPVVVRLQGTRVDDAKALIADSGLKILACDDLDEAARMVVKLSEIVTLAKQAHVDVKFQLPI

SEQ ID NO: 17433 - protein, 198 aa, Artificial Sequence
  Synthetic polypeptide
MMRTHGHKGPVLIGSSHGGVNIEDVAAESPEAIIKEPIDIEEGIKKEQALQLAQKMGFPPNIVESAAENMVKLYSLFLKYDATMIEINPMVEDSDGAVLCMDAKINFDSNSAYRQKKIFDLQDWTQEDERDKDAAKANLNYIGLDGNIGCLVNGAGLAMATMDIIKLHGGTPANFLDVGGGATVHQVTEAFKLITSDK

SEQ ID NO: 17434 - protein, 132 aa, Artificial Sequence
  Synthetic polypeptide
MMRTHGHKGPVLIGSSHGGVNIEDVAAESPEAIIKEPIDIEEGIKKEQALQLAQKMGFPPNIVESAAENMVKLYSLFLKYDATMIEINPMVEDSDGAVLCMDAKINFDSNSAYRQKKIFDLQDWTQEDERDK

SEQ ID NO: 17435 - protein, 29 aa, Artificial Sequence
  Synthetic polypeptide
VQRNKPKWEVIFKRKRNCGESVSLLQQLT

SEQ ID NO: 17436 - protein, 29 aa, Artificial Sequence
  Synthetic polypeptide
PECKETNQNGRLYSKEKGTVGNLYLYCSS

SEQ ID NO: 17437 - protein, 849 aa, Artificial Sequence
  Synthetic polypeptide
MSAKKQTKMGGYIQKKKELWGICIFIAAVDLDEMSFTFTELQKNIEISVHKFFNLLKEIDTSTKVDNAMSRLLKKYDVLFALFSKLERTCELIYLTQPSSSISTEINSALVLKVSWITFLLAKGEVLQMEDDLVISFQLMLCVLDYFIKLSPPMLLKEPYKTAVIPINGSPRTPRRGQNRSARIAKQLENDTRIIEVLCKEHECNIDEVKNVYFKNFIPFMNSLGLVTSNGLPEVENLSKRYEEIYLKNKDLDARLFLDHDKTLQTDSIDSFETQRTPRKSNLDEEVNVIPPHTPVRTVMNTIQQLMMILNSASDQPSENLISYFNNCTVNPKESILKRVKDIGYIFKEKFAKAVGQGCVEIGSQRYKLGVRLYYRVMESMLKSEEERLSIQNFSKLLNDNIFHMSLLACALEVVMATYSRSTSQNLDSGTDLSFPWILNVLNLKAFDFYKVIESFIKAEGNLTREMIKHLERCEHRIMESLAWLSDSPLFDLIKQSKDREGPTDHLESACPLNLPLQNNHTAADMYLSPVRSPKKKGSTTRVNSTANAETQATSAFQTQKPLKSTSLSLFYKKVYRLAYLRLNTLCERLLSEHPELEHIIWTLFQHTLQNEYELMRDRHLDQIMMCSMYGICKVKNIDLKFKIIVTAYKDLPHAVQETFKRVLIKEEEYDSIIVFYNSVFMQRLKTNILQYASTRPPTLSPIPHIPRSPYKFPSSPLRIPGGNIYISPLKSPYKISEGLPTPTKMTPRSRILVSIGESFGTSEKFQKINQMVCNSDRVLKRSAEGSNPPKPLKKLRFDIEGSDEADGSKHLPGESKFQQKLAEMTSTRTRMQKQKMNDSMDTSNKEEK

SEQ ID NO: 17438 - protein, 29 aa, Artificial Sequence
  Synthetic polypeptide
TRSCSGSNDVPKWFCASYLCASWICPTGY

SEQ ID NO: 17439 - protein, 1154 aa, Artificial Sequence
  Synthetic polypeptide
SLSTKDSGICISRLGPAQVPMMSPNGSVPPIYVPPGYAPQVIEDNGVRRVVVVPQAPEFHPGSHTVLHRSPHPPLPGFIPVPTMMPPPPRHMYSPVTGAGDMTTQYMPQYQSSQVYGDVDAHSTHGRSNFRDERSSKTYERLQKKLKDRQGTQKDKMSSPPSSPQKCPSPINEHNGLIKGQIAGGINTGSAKIKSGKGKGGTQVDTEIEEKDEETKAFEALLSNIVKPVASDIQARTVVLTWSPPSSLINGETDESSVPELYGYEVLISSTGKDGKYKSVYVGEETNITLNDLKPAMDYHAKVQAEYNSIKGTPSEAEIFTTLSCEPDIPNPPRIANRTKNSLTLQWKAPSDNGSKIQNFVLEWDEGKGNGEFCQCYMGSQKQFKITKLSPAMGCKFRLSARNDYGTSGFSEEVLYYTSGCAPSMPASPVLTKAGITWLSLQWSKPSGTPSDEGISYILEMEEETSGYGFKPKYDGEDLAYTVKNLRRSTKYKFKVIAYNSEGKSNPSEVVEFTTCPDKPGIPVKPSVKGKIHSHSFKITWDPPKDNGGATINKYVVEMAEGSNGNKWEMIYSGATREHLCDRLNPGCFYRLRVYCISDGGQSAVSESLLVQTPAVPPGPCLPPRLQGRPKAKEIQLRWGPPLVDGGSPISCYSVEMSPIEKDEPREVYQGSEVECTVSSLLPGKTYSFRLRAANKMGFGPFSEKCDITTAPGPPDQCKPPQVTCRSATCAQVNWEVPLSNGTDVTEYRLEWGGVEGSMQICYCGPGLSYEIKGLSPATTYYCRVQALSVVGAGPFSEVVACVTPPSVPGIVTCLQEISDDEIENPHYSPSTCLAISWEKPCDHGSEILAYSIDFGDKQSLTVGKVTSYIINNLQPDTTYRIRIQALNSLGAGPFSHMIKLKTKPLPPDPPRLECVAFSHQNLKLKWGEGTPKTLSTDSIQYHLQMEDKNGRFVSLYRGPCHTYKVQRLNESTSYKFCIQACNEAGEGPLSQEYIFTTPKSVPAALKAPKIEKVNDHICEITWECLQPMKGDPVIYSLQVMLGKDSEFKQIYKGPDSSFRYSSLQLNCEYRFRVCAIRQCQDSLGHQDLVGPYSTTVLFISQRTEPPASTNRDTVESTRTRRALSDEQCAAVILVLFAFFSILIAFIIQYFVIK

SEQ ID NO: 17440 - protein, 640 aa, Artificial Sequence
  Synthetic polypeptide
SLSTKDSGICISRLGPAQVPMMSPNGSVPPIYVPPGYAPQVIEDNGVRRVVVVPQAPEFHPGSHTVLHRSPHPPLPGFIPVPTMMPPPPRHMYSPVTGAGDMTTQYMPQYQSSQVYGDVDAHSTHGRSNFRDERSSKTYERLQKKLKDRQGTQKDKMSSPPSSPQKCPSPINEHNGLIKGQIAGGINTGSAKIKSGKGKGGTQVDTEIEEKDEETKAFEALLSNIVKPVASDIQARTVVLTWSPPSSLINGETDESSVPELYGYEVLISSTGKDGKYKSVYVGEETNITLNDLKPAMDYHAKVQAEYNSIKGTPSEAEIFTTLSCEPDIPNPPRIANRTKNSLTLQWKAPSDNGSKIQNFVLEWDEGKGNGEFCQCYMGSQKQFKITKLSPAMGCKFRLSARNDYGTSGFSEEVLYYTSGCAPSMPASPVLTKAGITWLSLQWSKPSGTPSDEGISYILEMEEETSGYGFKPKYDGEDLAYTVKNLRRSTKYKFKVIAYNSEGKSNPSEVVEFTTCPDKPGIPVKPSVKGKIHSHSFKITWDPPKDNGGATINKYVVEMAEGSNGNKWEMIYSGATREHLCDRLNPGCFYRLRVYCISDGGQSAVSESLLVQTPAVPPGPCLPPRLQGRPKAKEIQTPSG

SEQ ID NO: 17441 - protein, 102 aa, Artificial Sequence
  Synthetic polypeptide
GRARWLTPVIPALWEAEAGGSRDPEIETILANMVKRTGLVVVKNMKIVGLHCSSEDLHAGQIALIKHGSRLKNCDLYFSRKPCSACLKMIVNGLLEAAKMPR

SEQ ID NO: 17442 - protein, 24 aa, Artificial Sequence
  Synthetic polypeptide
SQHFGRPRRADHEIQRSRPSWLTW

SEQ ID NO: 17443 - protein, 21 aa, Artificial Sequence
  Synthetic polypeptide
HGKENWSCGGEKHENCWSPLF

SEQ ID NO: 17444 - protein, 463 aa, Artificial Sequence
  Synthetic polypeptide
GRARWLTPVIPALWEAEAGGSRDPEIETILANMVKRTGLVVVKNMKIVGLHCSSEDLHAGQIALIKHGSRLKNCDLYFSRKPCSACLKMIVNAGVNRISYWPADPEISLLTEASSSEDAKLDAKAVERLKSNSRAHVCVLLQPLVCYMVQFVEETSYKCDFIQKITKTLPDANTDFYYECKQERIKEYEMLFLVSNEEMHKQILMTIGLENLCENPYFSNLRQNMKDLILLLATVASSVPNFKHFGFYRSNPEQINEIHNQSLPQEIARHCMVQARLLAYRTEDHKTGVGAVIWAEGKSRSCDGTGAMYFVGCGYNAFPVGSEYADFPHMDDKQKDREIRKFRYIIHAEQNALTFRCQEIKPEERSMIFVTKCPCDECVPLIKGAGIKQIYAGDVDVGKKKADISYMRFGELEGVSKFTWQLNPSGAYGLEQNEPERRENGVLRPVPQKEEQHQDKKLRLGIH

SEQ ID NO: 17445 - protein, 37 aa, Artificial Sequence
  Synthetic polypeptide
PRLLEPGWQPLICKCKPLETRSTQTWLQKKCLNHCKQ

SEQ ID NO: 17446 - protein, 13 aa, Artificial Sequence
  Synthetic polypeptide
KLGPPKHGFRRSV

SEQ ID NO: 17447 - protein, 305 aa, Artificial Sequence
  Synthetic polypeptide
VHPNMASEEVSKSLQAMKEILCGTNEKEPPTEAVAQLAQELYSSGLLVTLIADLQLIDFEGKKDVTQIFNNILRRQIGTRSPTVEYISAHPHILFMLLKGYEAPQIALRCGIMLRECIRHEPLAKIILFSNQFRDFFKYVELSTFDIASDAFATFKDLLTRHKVLVADFLEQNYDTIFEDYEKLLQSENYVTKRQSLKLLGELILDRHNFAIMTKYISKPENLKLMMNLLRDKSPNIQFEAFHVFKVFVASPHKTQPIVEILLKNQPKLIEFLSSFQKERTDDEQFADEKNYLIKQIRDLKKTAP

SEQ ID NO: 17448 - protein, 285 aa, Artificial Sequence
  Synthetic polypeptide
VHPNMASEEVSKSLQAMKEILCGTNEKEPPTEAVAQLAQELYSSGLLVTLIADLQLIDFEGKKDVTQIFNNILRRQIGTRSPTVEYISAHPHILFMLLKGYEAPQIALRCGIMLRECIRHEPLAKIILFSNQFRDFFKYVELSTFDIASDAFATFKIFEDYEKLLQSENYVTKRQSLKLLGELILDRHNFAIMTKYISKPENLKLMMNLLRDKSPNIQFEAFHVFKVFVASPHKTQPIVEILLKNQPKLIEFLSSFQKERTDDEQFADEKNYLIKQIRDLKKTAP

SEQ ID NO: 17449 - protein, 156 aa, Artificial Sequence
  Synthetic polypeptide
VHPNMASEEVSKSLQAMKEILCGTNEKEPPTEAVAQLAQELYSSGLLVTLIADLQLIDFEGKKDVTQIFNNILRRQIGTRSPTVEYISAHPHILFMLLKGYEAPQIALRCGIMLRECIRHEPLAKIILFSNQFRDFFKYVELSTFDIASDAFATFK

SEQ ID NO: 17450 - protein, 96 aa, Artificial Sequence
  Synthetic polypeptide
VHPNMASEEVSKSLQAMKEILCGTNEKEPPTEAVAQLAQELYSSGLLVTLIADLQLIDFEGKKDVTQIFNNILRRQIGTRSPTVEYISAHPHILFM

SEQ ID NO: 17451 - protein, 61 aa, Artificial Sequence
  Synthetic polypeptide
VHPNMASEEVSKSLQAMKEILCGTNEKEPPTEAVAQLAQELYSSGLLVTLIADLQLIDFEV

SEQ ID NO: 17452 - protein, 50 aa, Artificial Sequence
  Synthetic polypeptide
LAVVVCACDSRYSRGCSGRIARAQEIKSAVSWDHTTVLQPSSLGKRILCL

SEQ ID NO: 17453 - protein, 24 aa, Artificial Sequence
  Synthetic polypeptide
ARESYACDSEGTGKQIQCISLYIM

SEQ ID NO: 17454 - protein, 675 aa, Artificial Sequence
  Synthetic polypeptide
FQVLKRLQWEDRSSPGNQVCSELGSHYCTPTFQPRQENPMPVTQKEQENKSNAFPSTSCENSFPEDCTFLTTENKEILSLEDKVVDFREKDSSSNLSYQSHDCSGACLMKMPLNLKGENPLQLPIKCHFQRRHAKTNSHSSALHVSYKTPCGRSLRNVEEVFRYLLETECNFLFTDNFSFNTYVQLARNYPKQKEVVSDVDISNGVESVPISFCNEIDSRKLPQFKYRKTVWPRAYNLTNFSSMFTDSCDCSEGCIDITKCACLQLTARNAKTSPLSSDKITTGYKYKRLQRQIPTGIYECSLLCKCNRQLCQNRVVQHGPQVRLQVFKTEQKGWGVRCLDDIDRGTFVCIYSGRLLSRANTEKSYGIDENGRDENTMKNIFSKKRKLEVACSDCEVEVLPLGLETHPRTAKTEKCPPKFSNNPKELTVETKYDNISRIQYHSVIRDPESKTAIFQHNGKKMEFVSSESVTPEDNDGFKPPREHLNSKTKGAQKDSSSNHVDEFEDNLLIESDVIDITKYREETPPRSRCNQATTLDNQNIKKAIEVQIQKPQEGRSTACQRQQVFCDEELLSETKNTSSDSLTKFNKGNVFLLDATKEGNVGRFLNHSCCPNLLVQNVFVETHNRNFPLVAFFTNRYVKARTELTWDYGYEAGTVPEKEIFCQCGVNKCRKKIL

SEQ ID NO: 17455 - protein, 516 aa, Artificial Sequence
  Synthetic polypeptide
FQVLKRLQWEDRSSPGNQVCSELGSHYCTPTFQPRQENPMPVTQKEQENKSNAFPSTSCENSFPEDCTFLTTENKEILSLEDKVVDFREKDSSSNLSYQSHDCSGACLMKMPLNLKGENPLQLPIKCHFQRRHAKTNSHSSALHVSYKTPCGRSLRNVEEVFRYLLETECNFLFTDNFSFNTYVQLARNYPKQKEVVSDVDISNGVESVPISFCNEIDSRKLPQFKYRKTVWPRAYNLTNFSSMFTDSCDCSEGCIDITKCACLQLTARNAKTSPLSSDKITTGYKYKRLQRQIPTGIYECSLLCKCNRQLCQNRVVQHGPQVRLQVFKTEQKGWGVRCLDDIDRGTFVCIYSGRLLSRANTEKSYGIDENGRDENTMKNIFSKKRKLEVACSDCEVEVLPLGLETHPRTAKTEKCPPKFSNNPKELTVETKYDNISRIQYHSVIRDPESKTAIFQHNGKKMEFVSSESVTPEDNDGFKPPREHLNSKTKGAQSRLCFFCECLPLLPVSLSLAQYL

SEQ ID NO: 17456 - protein, 9 aa, Artificial Sequence
  Synthetic polypeptide
FYIMSMKTF

SEQ ID NO: 17457 - protein, 211 aa, Artificial Sequence
  Synthetic polypeptide
SVTVSHHPQMGPSSCRKTSSGLPLILHYEHEDFLTVAESLKKEFDSPETADLKFRIDGKYIHVHKAVLKIRCEHFRSMFQSYWNEDMKEVIEIDQFSYPVYRAFLQYLYTDTVDLPPEDAIGLLDLATSYCENRLKKLCQHIIKRGITVENAFSLFSAAVRYDAEDLEEFCFKFCINHLTEVTQTAAFWQMDGPLLKEFIAKASKCGAFKN

SEQ ID NO: 17458 - protein, 54 aa, Artificial Sequence
  Synthetic polypeptide
KYKKLAGHGGGRLSSQLLGRCLLGVITTVAKWDQVLQQINQLLEKLQTVYILRG

SEQ ID NO: 17459 - protein, 20 aa, Artificial Sequence
  Synthetic polypeptide
PGMVAGACRPSYLGGVCLGL

SEQ ID NO: 17460 - protein, 411 aa, Artificial Sequence
  Synthetic polypeptide
HGETPSLLKIQKISRAWWRAPVVPATWEVFAWGYNNCGQVGSGSTANQPTPRKVTNCLHIKRVVGIACGQTSSMAVLDNGEVYGWGYNGNGQLGLGNNGNQLTPVRVAALHSVCVNQIVCGYAHTLALTDEGLLYAWGANTYGQLGTGNKNNLLSPAHIMVEKERVVEIAACHSAHTSAAKTQGGHVYMWGQCRGQSVILPHLTHFSCTDDVFACFATPAVSWRLLSVEHEDFLTVAESLKKEFDSPETADLKFRIDGKYIHVHKAVLKIRCEHFRSMFQSYWNEDMKEVIEIDQFSYPVYRAFLQYLYTDTVDLPPEDAIGLLDLATSYCENRLKKLCQHIIKRGITVENAFSLFSAAVRYDAEDLEEFCFKFCINHLTEVTQTAAFWQMDGPLLKEFIAKASKCGAFKN

SEQ ID NO: 17461 - protein, 235 aa, Artificial Sequence
  Synthetic polypeptide
HGETPSLLKIQKISRAWWRAPVVPATWEVFAWGYNNCGQVGSGSTANQPTPRKVTNCLHIKRVVGIACGQTSSMAVLDNGEVYGWGYNGNGQLGLGNNGNQLTPVRVAALHSVCVNQIVCGYAHTLALTDEGLLYAWGANTYGQLGTGNKNNLLSPAHIMVEKERVVEIAACHSAHTSAAKTQGGHVYMWGQCRGQSVILPHLTHFSCTDDVFACFATPAVSWRLLSVVSIVIGK

SEQ ID NO: 17462 - protein, 25 aa, Artificial Sequence
  Synthetic polypeptide
TWEAEVAVSRDHAIALQAGERIWQS

SEQ ID NO: 17463 - protein, 64 aa, Artificial Sequence
  Synthetic polypeptide
AEIMPLHSRLGKEYGKADARWVYFDPTIVSVEILTVALDGSLALFLIYAIVKEKYYRDRVAWGE

SEQ ID NO: 17464 - protein, 55 aa, Artificial Sequence
  Synthetic polypeptide
SQLFGRLRLENHLNLGGRGCSEPRSCHCTPGWGKNMAKLMQDGFILIQPLCLWKF

SEQ ID NO: 17465 - protein, 136 aa, Artificial Sequence
  Synthetic polypeptide
AEIMPLHSRLGKEYGKADARWVYFDPTIVSVEILTVALDGSLALFLIYAIVKEKYYRHFLQITLCVCELYGCWMTFLPEWLTRSPNLNTSNWLYCWLYLFFFNGVWVLIPGLLLWQSWLELKKMHQKETSSVKKFQ

SEQ ID NO: 17466 - protein, 15 aa, Artificial Sequence
  Synthetic polypeptide
QYYVCFDTWERIWQS

SEQ ID NO: 17467 - protein, 62 aa, Artificial Sequence
  Synthetic polypeptide
SIMSALIPGKEYGKADARWVYFDPTIVSVEILTVALDGSLALFLIYAIVKEKYYRDRVAWGE

SEQ ID NO: 17468 - protein, 25 aa, Artificial Sequence
  Synthetic polypeptide
YLGKNMAKLMQDGFILIQPLCLWKF

SEQ ID NO: 17469 - protein, 134 aa, Artificial Sequence
  Synthetic polypeptide
SIMSALIPGKEYGKADARWVYFDPTIVSVEILTVALDGSLALFLIYAIVKEKYYRHFLQITLCVCELYGCWMTFLPEWLTRSPNLNTSNWLYCWLYLFFFNGVWVLIPGLLLWQSWLELKKMHQKETSSVKKFQ

SEQ ID NO: 17470 - protein, 49 aa, Artificial Sequence
  Synthetic polypeptide
LTPVIPALWEAEAGGSRVDDSAILDCQFSEFYHTPPPGFEKILFEQQIF

SEQ ID NO: 17471 - protein, 45 aa, Artificial Sequence
  Synthetic polypeptide
SQHFGRLRQADHELMTVQFWIASSVSFIIRLHLVLKKYYLNSKSS

SEQ ID NO: 17472 - protein, 6 aa, Artificial Sequence
  Synthetic polypeptide
GRRITS

SEQ ID NO: 17473 - protein, 292 aa, Artificial Sequence
  Synthetic polypeptide
AEYLKDASKKMKNGLMFVKLVNPCSGEGAIYLFNMCLQQLFEVKVFKEKHHSWFINQSVQSGGLLHFATPVDPLFLLLHYLIKADKEGKFQPLDQVVVDNVFPNCILLLKLPGLEKLLHHVTEEKGNPEIDNKKYYKYSKEKTLKWLEKKVNQTVAALKTNNVNVSSRVQSTAFFSGDQASTDKEEDYIRYAHGLISDYIPKELSDDLSKYLKLPEPSASLPNPPSKKIKLSDEPVEAKEDYTKFNTKDLKTEKKNSKMTAAQKALAKVDKSGMKSIDTFFGVKNKKKIGKV

SEQ ID NO: 17474 - protein, 43 aa, Artificial Sequence
  Synthetic polypeptide
VWVYDSASCNGMVSCPGLVPALTLRCLERLQPVWTVKWNKQNI

SEQ ID NO: 17475 - protein, 24 aa, Artificial Sequence
  Synthetic polypeptide
NGISRIFKRCFKEDEKWANVCKTG

SEQ ID NO: 17476 - protein, 237 aa, Artificial Sequence
  Synthetic polypeptide
AEYLKDASKKMKNGLMFVKLVNPCSGEGAIYLFNMCLQQLFEVKVFKEKHHSWFINQSVQSGGLLHFATPVDPLFLLLHYLIKADKEGKFQPLDQVVVDNVFPNCILLLKLPGLEKLLHHVTEEKGNPEIDNKKYYKYSKEKTLKWLEKKVNQTVAALKTNNVNVSSRVQSTAFFSGDQASTDKEEDYIRYAHGLISDYIPKELSDDLSKYLKLPEPSASLPNPPSKMAAQRQKRGK

SEQ ID NO: 17477 - protein, 88 aa, Artificial Sequence
  Synthetic polypeptide
GQPCGQRDLFLLGLNSTPHAKAVLLTLLETTVLGIPWCKLQMVHLHLCRKWLPTLGGSLQTMPRTSWQSPHNQPEQWHRRSASYRSKA

SEQ ID NO: 17478 - protein, 28 aa, Artificial Sequence
  Synthetic polypeptide
ELLEDSLAASVICFSLDSIAPRMQKLFY

SEQ ID NO: 17479 - protein, 1041 aa, Artificial Sequence
  Synthetic polypeptide
HPACKSCSTNPLGNHSAGNSMVQTTDGTPTSVQEVAPHTGRLPANHAPDILAKSPQSTRAVAPQKCFLQIKGMTCASCVSNIERNLQKEAGVLSVLVALMAGKAEIKYDPEVIQPLEIAQFIQDLGFEAAVMEDYAGSDGNIELTITGMTCASCVHNIESKLTRTNGITYASVALATSKALVKFDPEIIGPRDIIKIIEEIGFHASLAQRNPNAHHLDHKMEIKQWKKSFLCSLVFGIPVMALMIYMLIPSNEPHQSMVLDHNIIPGLSILNLIFFILCTFVQLLGGWYFYVQAYKSLRHRSANMDVLIVLATSIAYVYSLVILVVAVAEKAERSPVTFFDTPPMLFVFIALGRWLEHLAKSKTSEALAKLMSLQATEATVVTLGEDNLIIREEQVPMELVQRGDIVKVVPGGKFPVDGKVLEGNTMADESLITGEAMPVTKKPGSTVIAGSINAHGSVLIKATHVGNDTTLAQIVKLVEEAQMSKAPIQQLADRFSGYFVPFIIIMSTLTLVVWIVIGFIDFGVVQRYFPNPNKHISQTEVIIRFAFQTSITVLCIACPCSLGLATPTAVMVGTGVAAQNGILIKGGKPLEMAHKIKTVMFDKTGTITHGVPRVMRVLLLGDVATLPLRKVLAVVGTAEASSEHPLGVAVTKYCKEELGTETLGYCTDFQAVPGCGIGCKVSNVEGILAHSERPLSAPASHLNEAGSLPAEKDAVPQTFSVLIGNREWLRRNGLTISSDVSDAMTDHEMKGQTAILVAIDGVLCGMIAIADAVKQEAALAVHTLQSMGVDVVLITGDNRKTARAIATQVGINKVFAEVLPSHKVAKVQELQNKGKKVAMVGDGVNDSPALAQADMGVAIGTGTDVAIEAADVVLIRNDLLDVVASIHLSKRTVRRIRINLVLALIYNLVGIPIAAGVFMPIGIVLQPWMGSAAMAASSVSVVLSSLQLKCYKKPDLERYEAQAHGHMKPLTASQVSVHIGMDDRWRDSPRATPWDQVSYVSQVSLSSLTSDKPSRHSAAADDDGDKWSLLLNGRDEEQYI

SEQ ID NO: 17480 - protein, 834 aa, Artificial Sequence
  Synthetic polypeptide
HPACKSCSTNPLGNHSAGNSMVQTTDGTPTSVQEVAPHTGRLPANHAPDILAKSPQSTRAVAPQKCFLQIKGMTCASCVSNIERNLQKEAGVLSVLVALMAGKAEIKYDPEVIQPLEIAQFIQDLGFEAAVMEDYAGSDGNIELTITGMTCASCVHNIESKLTRTNGITYASVALATSKALVKFDPEIIGPRDIIKIIESKTSEALAKLMSLQATEATVVTLGEDNLIIREEQVPMELVQRGDIVKVVPGGKFPVDGKVLEGNTMADESLITGEAMPVTKKPGSTVIAGSINAHGSVLIKATHVGNDTTLAQIVKLVEEAQMSKNPNKHISQTEVIIRFAFQTSITVLCIACPCSLGLATPTAVMVGTGVAAQNGILIKGGKPLEMAHKIKTVMFDKTGTITHGVPRVMRVLLLGDVATLPLRKVLAVVGTAEASSEHPLGVAVTKYCKEELGTETLGYCTDFQAVPGCGIGCKVSNVEGILAHSERPLSAPASHLNEAGSLPAEKDAVPQTFSVLIGNREWLRRNGLTISSDVSDAMTDHEMKGQTAILVAIDGVLCGMIAIADAVKQEAALAVHTLQSMGVDVVLITGDNRKTARAIATQVGINKVFAEVLPSHKVAKVQELQNKGKKVAMVGDGVNDSPALAQADMGVAIGTGTDVAIEAADVVLIRNDLLDVVASIHLSKRTVRRIRINLVLALIYNLVGIPIAAGVFMPIGIVLQPWMGSAAMAASSVSVVLSSLQLKCYKKPDLERYEAQAHGHMKPLTASQVSVHIGMDDRWRDSPRATPWDQVSYVSQVSLSSLTSDKPSRHSAAADDDGDKWSLLLNGRDEEQYI

SEQ ID NO: 17481 - protein, 963 aa, Artificial Sequence
  Synthetic polypeptide
HPACKSCSTNPLGNHSAGNSMVQTTDGTPTSVQEVAPHTGRLPANHAPDILAKSPQSTRAVAPQKCFLQIKGMTCASCVSNIERNLQKEAGVLSVLVALMAGKAEIKYDPEVIQPLEIAQFIQDLGFEAAVMEDYAGSDGNIELTITGMTCASCVHNIESKLTRTNGITYASVALATSKALVKFDPEIIGPRDIIKIIEEIGFHASLAQRNPNAHHLDHKMEIKQWKKSFLCSLVFGIPVMALMIYMLIPSNEPHQSMVLDHNIIPGLSILNLIFFILCTFVQSKTSEALAKLMSLQATEATVVTLGEDNLIIREEQVPMELVQRGDIVKVVPGGKFPVDGKVLEGNTMADESLITGEAMPVTKKPGSTVIAGSINAHGSVLIKATHVGNDTTLAQIVKLVEEAQMSKAPIQQLADRFSGYFVPFIIIMSTLTLVVWIVIGFIDFGVVQRYFPNPNKHISQTEVIIRFAFQTSITVLCIACPCSLGLATPTAVMVGTGVAAQNGILIKGGKPLEMAHKIKTVMFDKTGTITHGVPRVMRVLLLGDVATLPLRKVLAVVGTAEASSEHPLGVAVTKYCKEELGTETLGYCTDFQAVPGCGIGCKVSNVEGILAHSERPLSAPASHLNEAGSLPAEKDAVPQTFSVLIGNREWLRRNGLTISSDVSDAMTDHEMKGQTAILVAIDGVLCGMIAIADAVKQEAALAVHTLQSMGVDVVLITGDNRKTARAIATQVGINKVFAEVLPSHKVAKVQELQNKGKKVAMVGDGVNDSPALAQADMGVAIGTGTDVAIEAADVVLIRNDLLDVVASIHLSKRTVRRIRINLVLALIYNLVGIPIAAGVFMPIGIVLQPWMGSAAMAASSVSVVLSSLQLKCYKKPDLERYEAQAHGHMKPLTASQVSVHIGMDDRWRDSPRATPWDQVSYVSQVSLSSLTSDKPSRHSAAADDDGDKWSLLLNGRDEEQYI

SEQ ID NO: 17482 - protein, 976 aa, Artificial Sequence
  Synthetic polypeptide
HPACKSCSTNPLGNHSAGNSMVQTTDGTPTSVQEVAPHTGRLPANHAPDILAKSPQSTRAVAPQKCFLQIKGMTCASCVSNIERNLQKEAGVLSVLVALMAGKAEIKYDPEVIQPLEIAQFIQDLGFEAAVMEDYAGSDGNIELTITGMTCASCVHNIESKLTRTNGITYASVALATSKALVKFDPEIIGPRDIIKIIEEIGFHASLAQRNPNAHHLDHKMEIKQWKKSFLCSLVFGIPVMALMIYMLIPSNEPHQSMVLDHNIIPGLSILNLIFFILCTFVQLLGGWYFYVQAYKSLRHRSANMDVLIVLATSIAYVYSLVILVVAVAEKAERSPVTFFDTPPMLFVFIALGRWLEHLAKSKTSEALAKLMSLQATEATVVTLGEDNLIIREEQVPMELVQRGDIVKVVPGGKFPVDGKVLEGNTMADESLITGEAMPVTKKPGSTVIAGSINAHGSVLIKATHVGNDTTLAQIVKLVEEAQMSKAPIQQLADRFSGYFVPFIIIMSTLTLVVWIVIGFIDFGVVQRYFPIKTVMFDKTGTITHGVPRVMRVLLLGDVATLPLRKVLAVVGTAEASSEHPLGVAVTKYCKEELGTETLGYCTDFQAVPGCGIGCKVSNVEGILAHSERPLSAPASHLNEAGSLPAEKDAVPQTFSVLIGNREWLRRNGLTISSDVSDAMTDHEMKGQTAILVAIDGVLCGMIAIADAVKQEAALAVHTLQSMGVDVVLITGDNRKTARAIATQVGINKVFAEVLPSHKVAKVQELQNKGKKVAMVGDGVNDSPALAQADMGVAIGTGTDVAIEAADVVLIRNDLLDVVASIHLSKRTVRRIRINLVLALIYNLVGIPIAAGVFMPIGIVLQPWMGSAAMAASSVSVVLSSLQLKCYKKPDLERYEAQAHGHMKPLTASQVSVHIGMDDRWRDSPRATPWDQVSYVSQVSLSSLTSDKPSRHSAAADDDGDKWSLLLNGRDEEQYI

SEQ ID NO: 17483 - protein, 136 aa, Artificial Sequence
  Synthetic polypeptide
HPACKSCSTNPLGNHSAGNSMVQTTDGTPTSVQEVAPHTGRLPANHAPDILAKSPQSTRAVAPQKCFLQIKGMTCASCVSNIERNLQKEAAPRWVVLLRSGLQISETQVSQHGRAHRPGHKHCLCLFSGHPGGCCG

SEQ ID NO: 17484 - protein, 10 aa, Artificial Sequence
  Synthetic polypeptide
TSCGTWADLI

SEQ ID NO: 17485 - protein, 1455 aa, Artificial Sequence
  Synthetic polypeptide
QVVGPGQILSKLSLPTRAWEPAMKKSFAFDNVGYEGGLDGLGPSSQVATSTVRILGMTCQSCVKSIEDRISNLKGIISMKVSLEQGSATVKYVPSVVCLQQVCHQIGDMGFEASIAEGKAASWPSRSLPAQEAVVKLRVEGMTCQSCVSSIEGKVRKLQGVVRVKVSLSNQEAVITYQPYLIQPEDLRDHVNDMGFEAAIKSKVAPLSLGPIDIERLQSTNPKRPLSSANQNFNNSETLGHQGSHVVTLQLRIDGMHCKSCVLNIEENIGQLLGVQSIQVSLENKTAQVKYDPSCTSPVALQRAIEALPPGNFKVSLPDGAEGSGTDHRSSSSHSPGSPPRNQVQGTCSTTLIAIAGMTCASCVHSIEGMISQLEGVQQISVSLAEGTATVLYNPSVISPEELRAAIEDMGFEASVVSESCSTNPLGNHSAGNSMVQTTDGTPTSVQEVAPHTGRLPANHAPDILAKSPQSTRAVAPQKCFLQIKGMTCASCVSNIERNLQKEAGVLSVLVALMAGKAEIKYDPEVIQPLEIAQFIQDLGFEAAVMEDYAGSDGNIELTITGMTCASCVHNIESKLTRTNGITYASVALATSKALVKFDPEIIGPRDIIKIIEEIGFHASLAQRNPNAHHLDHKMEIKQWKKSFLCSLVFGIPVMALMIYMLIPSNEPHQSMVLDHNIIPGLSILNLIFFILCTFVQLLGGWYFYVQAYKSLRHRSANMDVLIVLATSIAYVYSLVILVVAVAEKAERSPVTFFDTPPMLFVFIALGRWLEHLAKSKTSEALAKLMSLQATEATVVTLGEDNLIIREEQVPMELVQRGDIVKVVPGGKFPVDGKVLEGNTMADESLITGEAMPVTKKPGSTVIAGSINAHGSVLIKATHVGNDTTLAQIVKLVEEAQMSKAPIQQLADRFSGYFVPFIIIMSTLTLVVWIVIGFIDFGVVQRYFPNPNKHISQTEVIIRFAFQTSITVLCIACPCSLGLATPTAVMVGTGVAAQNGILIKGGKPLEMAHKIKTVMFDKTGTITHGVPRVMRVLLLGDVATLPLRKVLAVVGTAEASSEHPLGVAVTKYCKEELGTETLGYCTDFQAVPGCGIGCKVSNVEGILAHSERPLSAPASHLNEAGSLPAEKDAVPQTFSVLIGNREWLRRNGLTISSDVSDAMTDHEMKGQTAILVAIDGVLCGMIAIADAVKQEAALAVHTLQSMGVDVVLITGDNRKTARAIATQVGINKVFAEVLPSHKVAKVQELQNKGKKVAMVGDGVNDSPALAQADMGVAIGTGTDVAIEAADVVLIRNDLLDVVASIHLSKRTVRRIRINLVLALIYNLVGIPIAAGVFMPIGIVLQPWMGSAAMAASSVSVVLSSLQLKCYKKPDLERYEAQAHGHMKPLTASQVSVHIGMDDRWRDSPRATPWDQVSYVSQVSLSSLTSDKPSRHSAAADDDGDKWSLLLNGRDEEQYI

SEQ ID NO: 17486 - protein, 22 aa, Artificial Sequence
  Synthetic polypeptide
KLWDLGRSYLSFLCLPVPGNQQ

SEQ ID NO: 17487 - protein, 1248 aa, Artificial Sequence
  Synthetic polypeptide
QVVGPGQILSKLSLPTRAWEPAMKKSFAFDNVGYEGGLDGLGPSSQVATSTVRILGMTCQSCVKSIEDRISNLKGIISMKVSLEQGSATVKYVPSVVCLQQVCHQIGDMGFEASIAEGKAASWPSRSLPAQEAVVKLRVEGMTCQSCVSSIEGKVRKLQGVVRVKVSLSNQEAVITYQPYLIQPEDLRDHVNDMGFEAAIKSKVAPLSLGPIDIERLQSTNPKRPLSSANQNFNNSETLGHQGSHVVTLQLRIDGMHCKSCVLNIEENIGQLLGVQSIQVSLENKTAQVKYDPSCTSPVALQRAIEALPPGNFKVSLPDGAEGSGTDHRSSSSHSPGSPPRNQVQGTCSTTLIAIAGMTCASCVHSIEGMISQLEGVQQISVSLAEGTATVLYNPSVISPEELRAAIEDMGFEASVVSESCSTNPLGNHSAGNSMVQTTDGTPTSVQEVAPHTGRLPANHAPDILAKSPQSTRAVAPQKCFLQIKGMTCASCVSNIERNLQKEAGVLSVLVALMAGKAEIKYDPEVIQPLEIAQFIQDLGFEAAVMEDYAGSDGNIELTITGMTCASCVHNIESKLTRTNGITYASVALATSKALVKFDPEIIGPRDIIKIIESKTSEALAKLMSLQATEATVVTLGEDNLIIREEQVPMELVQRGDIVKVVPGGKFPVDGKVLEGNTMADESLITGEAMPVTKKPGSTVIAGSINAHGSVLIKATHVGNDTTLAQIVKLVEEAQMSKNPNKHISQTEVIIRFAFQTSITVLCIACPCSLGLATPTAVMVGTGVAAQNGILIKGGKPLEMAHKIKTVMFDKTGTITHGVPRVMRVLLLGDVATLPLRKVLAVVGTAEASSEHPLGVAVTKYCKEELGTETLGYCTDFQAVPGCGIGCKVSNVEGILAHSERPLSAPASHLNEAGSLPAEKDAVPQTFSVLIGNREWLRRNGLTISSDVSDAMTDHEMKGQTAILVAIDGVLCGMIAIADAVKQEAALAVHTLQSMGVDVVLITGDNRKTARAIATQVGINKVFAEVLPSHKVAKVQELQNKGKKVAMVGDGVNDSPALAQADMGVAIGTGTDVAIEAADVVLIRNDLLDVVASIHLSKRTVRRIRINLVLALIYNLVGIPIAAGVFMPIGIVLQPWMGSAAMAASSVSVVLSSLQLKCYKKPDLERYEAQAHGHMKPLTASQVSVHIGMDDRWRDSPRATPWDQVSYVSQVSLSSLTSDKPSRHSAAADDDGDKWSLLLNGRDEEQYI

SEQ ID NO: 17488 - protein, 1344 aa, Artificial Sequence
  Synthetic polypeptide
QVVGPGQILSKLSLPTRAWEPAMKKSFAFDNVGYEGGLDGLGPSSQVATSTVRILGMTCQSCVKSIEDRISNLKGIISMKVSLEQGSATVKYVPSVVCLQQVCHQIGDMGFEASIAEGKAASWPSRSLPAQEAVVKLRVEGMTCQSCVSSIEGKVRKLQGVVRVKVSLSNQEAVITYQPYLIQPEDLRDHVNDMGFEAAIKSKVAPLSLGPIDIERLQSTNPKRPLSSANQNFNNSETLGHQGSHVVTLQLRIDGMHCMISQLEGVQQISVSLAEGTATVLYNPSVISPEELRAAIEDMGFEASVVSESCSTNPLGNHSAGNSMVQTTDGTPTSVQEVAPHTGRLPANHAPDILAKSPQSTRAVAPQKCFLQIKGMTCASCVSNIERNLQKEAGVLSVLVALMAGKAEIKYDPEVIQPLEIAQFIQDLGFEAAVMEDYAGSDGNIELTITGMTCASCVHNIESKLTRTNGITYASVALATSKALVKFDPEIIGPRDIIKIIEEIGFHASLAQRNPNAHHLDHKMEIKQWKKSFLCSLVFGIPVMALMIYMLIPSNEPHQSMVLDHNIIPGLSILNLIFFILCTFVQLLGGWYFYVQAYKSLRHRSANMDVLIVLATSIAYVYSLVILVVAVAEKAERSPVTFFDTPPMLFVFIALGRWLEHLAKSKTSEALAKLMSLQATEATVVTLGEDNLIIREEQVPMELVQRGDIVKVVPGGKFPVDGKVLEGNTMADESLITGEAMPVTKKPGSTVIAGSINAHGSVLIKATHVGNDTTLAQIVKLVEEAQMSKAPIQQLADRFSGYFVPFIIIMSTLTLVVWIVIGFIDFGVVQRYFPNPNKHISQTEVIIRFAFQTSITVLCIACPCSLGLATPTAVMVGTGVAAQNGILIKGGKPLEMAHKIKTVMFDKTGTITHGVPRVMRVLLLGDVATLPLRKVLAVVGTAEASSEHPLGVAVTKYCKEELGTETLGYCTDFQAVPGCGIGCKVSNVEGILAHSERPLSAPASHLNEAGSLPAEKDAVPQTFSVLIGNREWLRRNGLTISSDVSDAMTDHEMKGQTAILVAIDGVLCGMIAIADAVKQEAALAVHTLQSMGVDVVLITGDNRKTARAIATQVGINKVFAEVLPSHKVAKVQELQNKGKKVAMVGDGVNDSPALAQADMGVAIGTGTDVAIEAADVVLIRNDLLDVVASIHLSKRTVRRIRINLVLALIYNLVGIPIAAGVFMPIGIVLQPWMGSAAMAASSVSVVLSSLQLKCYKKPDLERYEAQAHGHMKPLTASQVSVHIGMDDRWRDSPRATPWDQVSYVSQVSLSSLTSDKPSRHSAAADDDGDKWSLLLNGRDEEQYI

SEQ ID NO: 17489 - protein, 1025 aa, Artificial Sequence
  Synthetic polypeptide
QVVGPGQILSKLSLPTRAWEPAMKKSFAFDNVGYEGGLDGLGPSSQVATSTVRILGMTCQSCVKSIEDRISNLKGIISMKVSLEQGSATVKYVPSVVCLQQVCHQIGDMGFEASIAEGKAASWPSRSLPAQEAVVKLRVEGMTCQSCVSSIEGKVRKLQGVVRVKVSLSNQEAVITYQPYLIQPEDLRDHVNDMGFEAAIKSKVAPLSLGPIDIERLQSTNPKRPLSSANQNFNNSETLGHQGSHVVTLQLRIDGMHCKSCVLNIEENIGQLLGVQSIQVSLENKTAQVKYDPSCTSPVALQRAIEALPPGNFKVSLPDGAEGSGTDHRSSSSHSPGSPPRNQVQGTCSTTLIAIAGMTCASCVHSIEGMISQLEGVQQISVSLAEGTATVLYNPSVISPEELRAAIEDMGFEASVVSGEAMPVTKKPGSTVIAGSINAHGSVLIKATHVGNDTTLAQIVKLVEEAQMSKAPIQQLADRFSGYFVPFIIIMSTLTLVVWIVIGFIDFGVVQRYFPNPNKHISQTEVIIRFAFQTSITVLCIACPCSLGLATPTAVMVGTGVAAQNGILIKGGKPLEMAHKIKTVMFDKTGTITHGVPRVMRVLLLGDVATLPLRKVLAVVGTAEASSEHPLGVAVTKYCKEELGTETLGYCTDFQAVPGCGIGCKVSNVEGILAHSERPLSAPASHLNEAGSLPAEKDAVPQTFSVLIGNREWLRRNGLTISSDVSDAMTDHEMKGQTAILVAIDGVLCGMIAIADAVKQEAALAVHTLQSMGVDVVLITGDNRKTARAIATQVGINKVFAEVLPSHKVAKVQELQNKGKKVAMVGDGVNDSPALAQADMGVAIGTGTDVAIEAADVVLIRNDLLDVVASIHLSKRTVRRIRINLVLALIYNLVGIPIAAGVFMPIGIVLQPWMGSAAMAASSVSVVLSSLQLKCYKKPDLERYEAQAHGHMKPLTASQVSVHIGMDDRWRDSPRATPWDQVSYVSQVSLSSLTSDKPSRHSAAADDDGDKWSLLLNGRDEEQYI

SEQ ID NO: 17490 - protein, 1377 aa, Artificial Sequence
  Synthetic polypeptide
QVVGPGQILSKLSLPTRAWEPAMKKSFAFDNVGYEGGLDGLGPSSQVATSTVRILGMTCQSCVKSIEDRISNLKGIISMKVSLEQGSATVKYVPSVVCLQQVCHQIGDMGFEASIAEGKAASWPSRSLPAQEAVVKLRVEGMTCQSCVSSIEGKVRKLQGVVRVKVSLSNQEAVITYQPYLIQPEDLRDHVNDMGFEAAIKSKVAPLSLGPIDIERLQSTNPKRPLSSANQNFNNSETLGHQGSHVVTLQLRIDGMHCKSCVLNIEENIGQLLGVQSIQVSLENKTAQVKYDPSCTSPVALQRAIEALPPGNFKVSLPDGAEGSGTDHRSSSSHSPGSPPRNQVQGTCSTTLIAIAGMTCASCVHSIEGMISQLEGVQQISVSLAEGTATVLYNPSVISPEELRAAIEDMGFEASVVSESCSTNPLGNHSAGNSMVQTTDGTPTSVQEVAPHTGRLPANHAPDILAKSPQSTRAVAPQKCFLQIKGMTCASCVSNIERNLQKEAGVLSVLVALMAGKAEIKYDPEVIQPLEIAQFIQDLGFEAAVMEDYAGSDGNIELTITGMTCASCVHNIESKLTRTNGITYASVALATSKALVKFDPEIIGPRDIIKIIEEIGFHASLAQRNPNAHHLDHKMEIKQWKKSFLCSLVFGIPVMALMIYMLIPSNEPHQSMVLDHNIIPGLSILNLIFFILCTFVQSKTSEALAKLMSLQATEATVVTLGEDNLIIREEQVPMELVQRGDIVKVVPGGKFPVDGKVLEGNTMADESLITGEAMPVTKKPGSTVIAGSINAHGSVLIKATHVGNDTTLAQIVKLVEEAQMSKAPIQQLADRFSGYFVPFIIIMSTLTLVVWIVIGFIDFGVVQRYFPNPNKHISQTEVIIRFAFQTSITVLCIACPCSLGLATPTAVMVGTGVAAQNGILIKGGKPLEMAHKIKTVMFDKTGTITHGVPRVMRVLLLGDVATLPLRKVLAVVGTAEASSEHPLGVAVTKYCKEELGTETLGYCTDFQAVPGCGIGCKVSNVEGILAHSERPLSAPASHLNEAGSLPAEKDAVPQTFSVLIGNREWLRRNGLTISSDVSDAMTDHEMKGQTAILVAIDGVLCGMIAIADAVKQEAALAVHTLQSMGVDVVLITGDNRKTARAIATQVGINKVFAEVLPSHKVAKVQELQNKGKKVAMVGDGVNDSPALAQADMGVAIGTGTDVAIEAADVVLIRNDLLDVVASIHLSKRTVRRIRINLVLALIYNLVGIPIAAGVFMPIGIVLQPWMGSAAMAASSVSVVLSSLQLKCYKKPDLERYEAQAHGHMKPLTASQVSVHIGMDDRWRDSPRATPWDQVSYVSQVSLSSLTSDKPSRHSAAADDDGDKWSLLLNGRDEEQYI

SEQ ID NO: 17491 - protein, 1390 aa, Artificial Sequence
  Synthetic polypeptide
QVVGPGQILSKLSLPTRAWEPAMKKSFAFDNVGYEGGLDGLGPSSQVATSTVRILGMTCQSCVKSIEDRISNLKGIISMKVSLEQGSATVKYVPSVVCLQQVCHQIGDMGFEASIAEGKAASWPSRSLPAQEAVVKLRVEGMTCQSCVSSIEGKVRKLQGVVRVKVSLSNQEAVITYQPYLIQPEDLRDHVNDMGFEAAIKSKVAPLSLGPIDIERLQSTNPKRPLSSANQNFNNSETLGHQGSHVVTLQLRIDGMHCKSCVLNIEENIGQLLGVQSIQVSLENKTAQVKYDPSCTSPVALQRAIEALPPGNFKVSLPDGAEGSGTDHRSSSSHSPGSPPRNQVQGTCSTTLIAIAGMTCASCVHSIEGMISQLEGVQQISVSLAEGTATVLYNPSVISPEELRAAIEDMGFEASVVSESCSTNPLGNHSAGNSMVQTTDGTPTSVQEVAPHTGRLPANHAPDILAKSPQSTRAVAPQKCFLQIKGMTCASCVSNIERNLQKEAGVLSVLVALMAGKAEIKYDPEVIQPLEIAQFIQDLGFEAAVMEDYAGSDGNIELTITGMTCASCVHNIESKLTRTNGITYASVALATSKALVKFDPEIIGPRDIIKIIEEIGFHASLAQRNPNAHHLDHKMEIKQWKKSFLCSLVFGIPVMALMIYMLIPSNEPHQSMVLDHNIIPGLSILNLIFFILCTFVQLLGGWYFYVQAYKSLRHRSANMDVLIVLATSIAYVYSLVILVVAVAEKAERSPVTFFDTPPMLFVFIALGRWLEHLAKSKTSEALAKLMSLQATEATVVTLGEDNLIIREEQVPMELVQRGDIVKVVPGGKFPVDGKVLEGNTMADESLITGEAMPVTKKPGSTVIAGSINAHGSVLIKATHVGNDTTLAQIVKLVEEAQMSKAPIQQLADRFSGYFVPFIIIMSTLTLVVWIVIGFIDFGVVQRYFPIKTVMFDKTGTITHGVPRVMRVLLLGDVATLPLRKVLAVVGTAEASSEHPLGVAVTKYCKEELGTETLGYCTDFQAVPGCGIGCKVSNVEGILAHSERPLSAPASHLNEAGSLPAEKDAVPQTFSVLIGNREWLRRNGLTISSDVSDAMTDHEMKGQTAILVAIDGVLCGMIAIADAVKQEAALAVHTLQSMGVDVVLITGDNRKTARAIATQVGINKVFAEVLPSHKVAKVQELQNKGKKVAMVGDGVNDSPALAQADMGVAIGTGTDVAIEAADVVLIRNDLLDVVASIHLSKRTVRRIRINLVLALIYNLVGIPIAAGVFMPIGIVLQPWMGSAAMAASSVSVVLSSLQLKCYKKPDLERYEAQAHGHMKPLTASQVSVHIGMDDRWRDSPRATPWDQVSYVSQVSLSSLTSDKPSRHSAAADDDGDKWSLLLNGRDEEQYI

SEQ ID NO: 17492 - protein, 55 aa, Artificial Sequence
  Synthetic polypeptide
EVPYTSCRDSEVSPAIWNCFFIHYSSLGSLYVELYVCVWSLSFGESDCCYRERKN

SEQ ID NO: 17493 - protein, 82 aa, Artificial Sequence
  Synthetic polypeptide
DLMGLSGVSAFAASSFFSCPLPCKKCLTPPAVILRSPQPYGTVFLFIILPWAHCMWNFMCVFGHCPLGNQTAATEKEKISVN

SEQ ID NO: 17494 - protein, 485 aa, Artificial Sequence
  Synthetic polypeptide
GLPSHMELFFYSLFFPGLIVCGTLCVCLVIVLWGIRLLLQRKKKLVSTSKNGKNQMVIAFFHPYCNAGGGGERVLWCALRALQKKYPEAVYVVYTGDVNVNGQQILEGAFRRFNIRLIHPVQFVFLRKRYLVEDSLYPHFTLLGQSLGSIFLGWEALMQCVPDVYIDSMGYAFTLPLFKYIGGCQVGSYVHYPTISTDMLSVVKNQNIGFNNAAFITRNPFLSKVKLIYYYLFAFIYGLVGSCSDVVMVNSSWTLNHILSLWKVGNCTNIVYPPCDVQTFLDIPLHEKKMTPGHLLVSVGQFRPEKNHPLQIRAFAKLLNKKMVESPPSLKLVLIGGCRNKDDELRVNQLRRLSEDLGVQEYVEFKINIPFDELKNYLSEATIGLHTMWNEHFGIGVVECMAAGTIILAHNSGGPKLDIVVPHEGDITGFLAESEEDYAETIAHILSMSAEKRLQIRKSARASVSRFSDQEFEVTFLSSVEKLFK

SEQ ID NO: 17495 - protein, 33 aa, Artificial Sequence
  Synthetic polypeptide
SQLLGRLRQENRLNPGGGGCGFRKGIPNIRRVC

SEQ ID NO: 17496 - protein, 63 aa, Artificial Sequence
  Synthetic polypeptide
TREAEVAVSEKGSLTSEEFAKLVGMSVLLAKERLLLAEKMGHLCRDDSVEGLRFYPNLFMTQS

SEQ ID NO: 17497 - protein, 40 aa, Artificial Sequence
  Synthetic polypeptide
KYKISQVWWHMPVIPATGEAEAGESLEPGRRRLRFQKRDP

SEQ ID NO: 17498 - protein, 100 aa, Artificial Sequence
  Synthetic polypeptide
PTWRNPVSPKNTKLARLRVFDSGVMVIELQSHKEEEMVASALETVSEKGSLTSEEFAKLVGMSVLLAKERLLLAEKMGHLCRDDSVEGLRFYPNLFMTQS

SEQ ID NO: 17499 - protein, 11 aa, Artificial Sequence
  Synthetic polypeptide
PGSVCLTVASW

SEQ ID NO: 17500 - protein, 10 aa, Artificial Sequence
  Synthetic polypeptide
KYKISQAPCV

SEQ ID NO: 17501 - protein, 332 aa, Artificial Sequence
  Synthetic polypeptide
QECCMAILLSQIVFIEEQAAGIGKSAKIVVHLHPAPPNKEPGPFQSSKNSYIKLSFKEHGQIEFYRRLSEEMTQRRWENMPVSQSLQTNRGPQPGRIRAVGIVGIERKLEEKRKETDKNISEAFEDLSKLMIKAKEMVELSKSIANKIKDKQGDITEDETIRFKSYLLSMGIANPVTRETYGSGTQYHMQLAKQLAGILQVPLEERGGIMSLTEVYCLVNRARGMELLSPEDLVNACKMLEALKLPLRLRVFDSGVMVIELQSHKEEEMVASALETVSEKGSLTSEEFAKLVGMSVLLAKERLLLAEKMGHLCRDDSVEGLRFYPNLFMTQS

SEQ ID NO: 17502 - protein, 37 aa, Artificial Sequence
  Synthetic polypeptide
ELGHIAGISDRSVAWPFSFPKLCSLKNRRLELGRVPK

SEQ ID NO: 17503 - protein, 16 aa, Artificial Sequence
  Synthetic polypeptide
VTGVLHGHSPFPNCVH

SEQ ID NO: 17504 - protein, 31 aa, Artificial Sequence
  Synthetic polypeptide
KMINKMTEREEKRKILKRRNRLRKKLKNLSF

SEQ ID NO: 17505 - protein, 9 aa, Artificial Sequence
  Synthetic polypeptide
QKEKRRGRY

SEQ ID NO: 17506 - protein, 551 aa, Artificial Sequence
  Synthetic polypeptide
KAPYRADTQMRKDANIVITENHQTTKINREEERNKGYTKQLENDQQNDRKRREEEDIEEKKSIKKKIKELKFLDSKIAQNLSIFLSSFRVPYEEIRMMILEVDETRLAESMIQNLIKHLPDQEQLNSLSQFKSEYSNLCEPEQFVVVMSNVKRLRPRLSAILFKLQFEEQVNNIKPDIMAVSTACEEIKKSKSFSKLLELVLLMGNYMNAGSRNAQTFGFNLSSLCKLKDTKSADQKTTLLHFLVEICEEKYPDILNFVDDLEPLDKASKVSVETLEKNLRQMGRQLQQLEKELETFPPPEDLHDKFVTKMSRFVISAKEQYETLSKLHENMEKLYQSIIGYYAIDVKKVSVEDFLTDLNNFRTTFMQAIKENIKKREAEEKEKRVRIAKELAERERLERQQKKKRLLEMKTEGDETGVMDNLLEALQSGAAFRDRRKRTPMPKDVRQSLSPMSQRPVLKVCNHENQKVQLTEGSRSHYNINCNSTRTPVAKELNYNLDTHTSTGRIKAAEKKEACNVESNRKKETELLGSFSKNESVPEVEALLARLRAL

SEQ ID NO: 17507 - protein, 551 aa, Artificial Sequence
  Synthetic polypeptide
KAPYRADTQMRKDANIVITENHQTTKINREEERNKGYTKQLENDQQNDRKRREEEDIEEKKSIKKKIKELKFLDSKIAQNLSIFLSSFRVPYEEIRMMILEVDETRLAESMIQNLIKHLPDQEQLNSLSQFKSEYSNLCEPEQFVVVMSNVKRLRPRLSAILFKLQFEEQVNNIKPDIMAVSTACEEIKKSKSFSKLLELVLLMGNYMNAGSRNAQTFGFNLSSLCKLKDTKSADQKTTLLHFLVEICEEKYPDILNFVDDLEPLDKASKVSVETLEKNLRQMGRQLQQLEKELETFPPPEDLHDKFVTKMSIFVISAKEQYETLSKLHENMEKLYQSIIGYYAIDVKKVSVEDFLTDLNNFRTTFMQAIKENIKKREAEEKEKRVRIAKELAERERLERQQKKKRLLEMKTEGDETGVMDNLLEALQSGAAFRDRRKRTPMPKDVRQSLSPMSQRPVLKVCNHENQKVQLTEGSRSHYNINCNSTRTPVAKELNYNLDTHTSTGRIKAAEKKEACNVESNRKKETELLGSFSKNESVPEVEALLARLRAL

SEQ ID NO: 17508 - protein, 470 aa, Artificial Sequence
  Synthetic polypeptide
KAPYRADTQMRKDANIVITENHQTTKINREEERNKGYTKQLENDQQNDRKRREEEDIEEKKSIKKKIKELKFLDSKIAQNLSIFLSSFRVPYEEIRMMILEVDETRLAESMIQNLIKHLPDQEQLNSLSQFKSEYSNLCEPEQFVVVMSNVKRLRPRLSAILFKLQFEEQVNNIKPDIMAVSTACEEIKKSKSFSKLLELVLLMGNYMNAGSRNAQTFGFNLSSLCKLKDTKSADQKTTLLHFLVEICEEKYPDILNFVDDLEPLDKASKVSVETLEKNLRQMGRQLQQLEKELETFPPPEDLHDKFVTKMSRFVISAKEQYETLSKLHENMEKLYQSIIGYYAIDVKKVSVEDFLTDLNNFRTTFMQAIKENIKKREAEEKEKRVRIAKELAERERLERQQKKKRLLEMKTEGDETGVMDNLLEALQSGAAFRDRRKRTPMPKDVRQSLSPMSQRPVLKVCNHGNKPYL

SEQ ID NO: 17509 - protein, 721 aa, Artificial Sequence
  Synthetic polypeptide
KKCLSPPTMILRPPQPCGTTDLRTIGKKFLPSDINSGKVEKLEGPCVLQIQKIRNVAAPKDNEESQAAPRMLRLQMTDGHISCTAVEFSYMSKISLNTPPGTKVKLSGIVDIKNGFLLLNDSNTTVLGGEVEHLIEKWELQRSLSKHNRSNIGTEGGPPPFVPFGQKCVSHVQVDSRELDRRKTLQVTMPVKPTNDNDEFEKQRTAAIAEVAKSKETKTFGGGGGGARSNLNMNAAGNRNREVLQKEKSTKSEGKHEGVYRELVDEKALKHITEMGFSKEASRQALMDNGNNLEAALNVLLTSNKQKPVMGPPLRGRGKGRGRIRSEDEEDLGNARPSAPSTLFDFLESKMGTLNVEEPKSQPQQLHQGQYRSSNTEQNGVKDNNHLRHPPRNDTRQPRNEKPPRFQRDSQNSKSVLEGSGLPRNRGSERPSTSSVSEVWAEDRIKCDRPYSRYDRTKDTSYPLGSQHSDGAFKKRDNSMQSRSGKGPSFAEAKENPLPQGSVDYNNQKRGKRESQTSIPDYFYDRKSQTINNEAFSGIKIEKHFNVNTDYQNPVRSNSFIGVPNGEVEMPLKGRRIGPIKPAGPVTAVPCDDKIFYNSGPKRRSGPIKPEKILESSIPMEYAKMWKPGDECFALYWEDNKFYRAEVEALHSSGMTAVVKFIDYGNYEEVLLSNIKPIQTEAWEEEGTYDQTLEFRRGGDGQPRRSTRPTQQFYQPPRARN

SEQ ID NO: 17510 - protein, 10 aa, Artificial Sequence
  Synthetic polypeptide
GLPSHVELQI

SEQ ID NO: 17511 - protein, 52 aa, Artificial Sequence
  Synthetic polypeptide
WVYQGFLLLLRPHFSLAIAMKEVPFTSHHDSEASPAMWNYRSENNWQEIPPQ

SEQ ID NO: 17512 - protein, 699 aa, Artificial Sequence
  Synthetic polypeptide
KKCLSPPTMILRPPQPCGTLEGPCVLQIQKIRNVAAPKDNEESQAAPRMLRLQMTDGHISCTAVEFSYMSKISLNTPPGTKVKLSGIVDIKNGFLLLNDSNTTVLGGEVEHLIEKWELQRSLSKHNRSNIGTEGGPPPFVPFGQKCVSHVQVDSRELDRRKTLQVTMPVKPTNDNDEFEKQRTAAIAEVAKSKETKTFGGGGGGARSNLNMNAAGNRNREVLQKEKSTKSEGKHEGVYRELVDEKALKHITEMGFSKEASRQALMDNGNNLEAALNVLLTSNKQKPVMGPPLRGRGKGRGRIRSEDEEDLGNARPSAPSTLFDFLESKMGTLNVEEPKSQPQQLHQGQYRSSNTEQNGVKDNNHLRHPPRNDTRQPRNEKPPRFQRDSQNSKSVLEGSGLPRNRGSERPSTSSVSEVWAEDRIKCDRPYSRYDRTKDTSYPLGSQHSDGAFKKRDNSMQSRSGKGPSFAEAKENPLPQGSVDYNNQKRGKRESQTSIPDYFYDRKSQTINNEAFSGIKIEKHFNVNTDYQNPVRSNSFIGVPNGEVEMPLKGRRIGPIKPAGPVTAVPCDDKIFYNSGPKRRSGPIKPEKILESSIPMEYAKMWKPGDECFALYWEDNKFYRAEVEALHSSGMTAVVKFIDYGNYEEVLLSNIKPIQTEAWEEEGTYDQTLEFRRGGDGQPRRSTRPTQQFYQPPRARN

SEQ ID NO: 17513 - protein, 42 aa, Artificial Sequence
  Synthetic polypeptide
GLPSHVELSKVHVFCKFKKFAMLLHQRIMKNLRLHQGCCDYR

SEQ ID NO: 17514 - protein, 59 aa, Artificial Sequence
  Synthetic polypeptide
WVYQGFLLLLRPHFSLAIAMKEVPFTSHHDSEASPAMWNSRRSMCFANSKNSQCCCTKG

SEQ ID NO: 17515 - protein, 82 aa, Artificial Sequence
  Synthetic polypeptide
QLILNSTDLNCVSSLIRGFSLISTMPPLRQQDQPLLFFLLLSLLNMKTMRMKTLMMVSFHIMNSIFQMKALKLAQALQTKSM

SEQ ID NO: 17516 - protein, 5 aa, Artificial Sequence
  Synthetic polypeptide
TVSFR

SEQ ID NO: 17517 - protein, 793 aa, Artificial Sequence
  Synthetic polypeptide
VDLEQYGFELCEFTYTWIFFDFYHATTETARPTPPLLPPPQPTQHEDNEDEDLNDGLFPHNEQYLSDEGIEACTSSPDKVNVNDIILIALNTDLRTIGKKFLPSDINSGKVEKLEGPCVLQIQKIRNVAAPKDNEESQAAPRMLRLQMTDGHISCTAVEFSYMSKISLNTPPGTKVKLSGIVDIKNGFLLLNDSNTTVLGGEVEHLIEKWELQRSLSKHNRSNIGTEGGPPPFVPFGQKCVSHVQVDSRELDRRKTLQVTMPVKPTNDNDEFEKQRTAAIAEVAKSKETKTFGGGGGGARSNLNMNAAGNRNREVLQKEKSTKSEGKHEGVYRELVDEKALKHITEMGFSKEASRQALMDNGNNLEAALNVLLTSNKQKPVMGPPLRGRGKGRGRIRSEDEEDLGNARPSAPSTLFDFLESKMGTLNVEEPKSQPQQLHQGQYRSSNTEQNGVKDNNHLRHPPRNDTRQPRNEKPPRFQRDSQNSKSVLEGSGLPRNRGSERPSTSSVSEVWAEDRIKCDRPYSRYDRTKDTSYPLGSQHSDGAFKKRDNSMQSRSGKGPSFAEAKENPLPQGSVDYNNQKRGKRESQTSIPDYFYDRKSQTINNEAFSGIKIEKHFNVNTDYQNPVRSNSFIGVPNGEVEMPLKGRRIGPIKPAGPVTAVPCDDKIFYNSGPKRRSGPIKPEKILESSIPMEYAKMWKPGDECFALYWEDNKFYRAEVEALHSSGMTAVVKFIDYGNYEEVLLSNIKPIQTEAWEEEGTYDQTLEFRRGGDGQPRRSTRPTQQFYQPPRARN

SEQ ID NO: 17518 - protein, 446 aa, Artificial Sequence
  Synthetic polypeptide
VLRRSGCLKVCSNSPFALFLCSSHVRCASFLFAFCHDCKFPEASSAMLRVQACGTNINTFENRMLMLDGMPAVRVKTELLESEQGSPNVHNYPDMEAVPLLLNNVKGEPPEDSLSVDHFQTQTEPVDLSINKARTSPTAVSSSPVSMTASASSPSSTSTSSSSSSRLASSPTVITSVSSASSSSTVLTPGPLVASASGVGGQQFLHIIHPVPPSSPMNLQSNKLSHVHRIPVVVQSVPVVYTAVRSPGNVNNTIVVPLLEDGRGHGKAQMDPRGLSPRQSKSDSDDDDLPNVTLDSVNETGSTALSIARAVQEVHPSPVSRVRGNRMNNQKFPCSISPFSIESTRRQRRSESPDSRKRRIHRCDFEGCNKVYTKSSHLKAHRRTHTGEKPYKCTWEGCTWKFARSDELTRHYRKHTGVKPFKCADCDRSFSRSDHLALHRRRHMLV

SEQ ID NO: 17519 - protein, 39 aa, Artificial Sequence
  Synthetic polypeptide
DVPPSSSPSAMIVSFLRPPQPCFVYKPVELISTPLRTEC

SEQ ID NO: 17520 - protein, 10 aa, Artificial Sequence
  Synthetic polypeptide
RFQFLMLLAA

SEQ ID NO: 17521 - protein, 11 aa, Artificial Sequence
  Synthetic polypeptide
RNEFSPRDSSS

SEQ ID NO: 17522 - protein, 1184 aa, Artificial Sequence
  Synthetic polypeptide
CEEDSTRYCRLCRWKKGATRLGICMSFRNLEQPSGDSLKEDHKEMNSPLEIPVPDVISSIRQLSKAAMKEDAKPSKDNEDAFYNSQKFEVLYCGKVTVTHKKAPSSLIDDCMEKFSLHEQQRLKIQGEQRGPDPGEDLADLEVVVPGSPGDCLPEEADGTDTHLGLPAGASQPALTSSRVCFPERILEDSGFDEQQEFRSRCSSVTGVQRRVHEGSQKSQPRRRHASAPSHVQPSDSEKNRTMLFQVGRFEINLISPDTKSVVLEKNFKDISSCSQGIKHVDHFGFICRESPEPGLSQYICYVFQCASESLVDEVMLTLKQAFSTAAALQSAKTQIKLCEACPMHSLHKLCERIEGLYPPRAKLVIQRHLSSLTDNEQADIFERVQKMKPVSDQEENELVILHLRQLCEAKQKTHVHIGEGPSTISNSTIPENATSSGRFKLDILKNKAKRSLTSSLENIFSRGANRMRGRLGSVDSFERSNSLASEKDYSPGDSPPGTPPASPPSSAWQTFPEEDSDSPQFRRRAHTFSHPPSSTKRKLNLQDGRAQGVRSPLLRQSSSEQCSNLSSVRRMYKESNSSSSLPSLHTSFSAPSFTAPSFLKSFYQNSGRLSPQYENEIRQDTASESSDGEGRKRTSSTCSNESLSVGGTSVTPRRISWRQRIFLRVASPMNKSPSAMQQQDGLDRNELLPLSPLSPTMEEEPLVVFLSGEDDPEKIEERKKSKELRSLWRKAIHQQILLLRMEKENQKLEASRDELQSRKVKLDYEEVGACQKEVLITWDKKLLNCRAKIRCDMEDIHTLLKEGVPKSRRGEIWQFLALQYRLRHRLPNKQQPPDISYKELLKQLTAQQHAILVDLGRTFPTHPYFSVQLGPGQLSLFNLLKAYSLLDKEVGYCQGISFVAGVLLLHMSEEQAFEMLKFLMYDLGFRKQYRPDMMSLQIQMYQLSRLLHDYHRDLYNHLEENEISPSLYAAPWFLTLFASQFSLGFVARVFDIIFLQGTEVIFKVALSLLSSQETLIMECESFENIVEFLKNTLPDMNTSEMEKIITQVFEMDISKQLHAYEVEYHVLQDELQESSYSCEDSETLEKLERANSQLKRQNMDLLEKLQVAHTKIQALESNLENLLTRETKMKSLIRTLEQEKMAYQKTVEQLRKLLPADALVNCDLLLRDLNCNPNNKAKIGNKP

SEQ ID NO: 17523 - protein, 1121 aa, Artificial Sequence
  Synthetic polypeptide
CEEDSTRYCRLCRWKKGATRLGICMSFRNLEQPSGDSLKEDHKEMNSPLEIPVPDVISSIRQLSKAAMKEDAKPSKDNEDAFYNSQKFEVLYCGKVTVTHKKAPSSLIDDCMEKFSLHEQQRLKIQGEQRGPDPGEDLADLEVVVPGSPGDCLPEEADGTDTHLGLPAGASQPALTSSRVCFPERILEDSGFDEQQEFRSRCSSVTGVQRRVHEGSQKSQPRRRHASAPSHVQPSDSEKNRTMLFQVGRFEINLISPDTKSVVLEKNFKDISSCSQGIKHVDHFGFICRESPEPGLSQYICYVFQCASESLVDEVMLTLKQAFSTAAALQSAKTQIKLCEACPMHSLHKLCERIEGLYPPRAKLVIQRHLSSLTDNEQADIFERVQKMKPVSDQEENELVILHLRQLCEAKQKTHVHIGEGPSTISNSTIPENATSSGRFKLDILKNKAKRSLTSSLENIFSRGANRMRGRLGSVDSFERSNSLASEKDYSPGDSPPGTPPASPPSSAWQTFPEEDSDSPQFRRRAHTFSHPPSSTKRKLNLQDGRAQGVRSPLLRQSSSEQCSDGEGRKRTSSTCSNESLSVGGTSVTPRRISWRQRIFLRVASPMNKSPSAMQQQDGLDRNELLPLSPLSPTMEEEPLVVFLSGEDDPEKIEERKKSKELRSLWRKAIHQQILLLRMEKENQKLEASRDELQSRKVKLDYEEVGACQKEVLITWDKKLLNCRAKIRCDMEDIHTLLKEGVPKSRRGEIWQFLALQYRLRHRLPNKQQPPDISYKELLKQLTAQQHAILVDLGRTFPTHPYFSVQLGPGQLSLFNLLKAYSLLDKEVGYCQGISFVAGVLLLHMSEEQAFEMLKFLMYDLGFRKQYRPDMMSLQIQMYQLSRLLHDYHRDLYNHLEENEISPSLYAAPWFLTLFASQFSLGFVARVFDIIFLQGTEVIFKVALSLLSSQETLIMECESFENIVEFLKNTLPDMNTSEMEKIITQVFEMDISKQLHAYEVEYHVLQDELQESSYSCEDSETLEKLERANSQLKRQNMDLLEKLQVAHTKIQALESNLENLLTRETKMKSLIRTLEQEKMAYQKTVEQLRKLLPADALVNCDLLLRDLNCNPNNKAKIGNKP

SEQ ID NO: 17524 - protein, 1176 aa, Artificial Sequence
  Synthetic polypeptide
CEEDSTRYCRLCRWKKGATRLGICMSFRNLEQPSGDSLKEDHKEMNSPLEIPVPDVISSIRQLSKAAMKEDAKPSKDNEDAFYNSQKFEVLYCGKVTVTHKKAPSSLIDDCMEKFSLHEQQRLKIQGEQRGPDPGEDLADLEVVVPGSPGDCLPEEADGTDTHLGLPAGASQPALTSSRVCFPERILEDSGFDEQQEFRSRCSSVTGVQRRVHEGSQKSQPRRRHASAPSHVQPSDSEKNRTMLFQVGRFEINLISPDTKSVVLEKNFKDISSCSQGIKHVDHFGFICRESPEPGLSQYICYVFQCASESLVDEVMLTLKQAFSTAAALQSAKTQIKLCEACPMHSLHKLCERIEGLYPPRAKLVIQRHLSSLTDNEQADIFERVQKMKPVSDQEENELVILHLRQLCEAKQKTHVHIGEGPSTISNSTIPENATSSGRFKLDILKNKAKRSLTSSLENIFSRGANRMRGRLGSVDSFERSNSLASEKDYSPGDSPPGTPPASPPSSAWQTFPEEDSDSPQFRRRAHTFSHPPSSTKRKLNLQDGRAQGVRSPLLRQSSSEQCSNLSSVRRMYKESNSSSSLPSLHTSFSAPSFTAPSFLKSFYQNSGRLSPQYENEISDGEGRKRTSSTCSNESLSVGGTSVTPRRISWRQRIFLRVASPMNKSPSAMQQQDGLDRNELLPLSPLSPTMEEEPLVVFLSGEDDPEKIEERKKSKELRSLWRKAIHQQILLLRMEKENQKLEASRDELQSRKVKLDYEEVGACQKEVLITWDKKLLNCRAKIRCDMEDIHTLLKEGVPKSRRGEIWQFLALQYRLRHRLPNKQQPPDISYKELLKQLTAQQHAILVDLGRTFPTHPYFSVQLGPGQLSLFNLLKAYSLLDKEVGYCQGISFVAGVLLLHMSEEQAFEMLKFLMYDLGFRKQYRPDMMSLQIQMYQLSRLLHDYHRDLYNHLEENEISPSLYAAPWFLTLFASQFSLGFVARVFDIIFLQGTEVIFKVALSLLSSQETLIMECESFENIVEFLKNTLPDMNTSEMEKIITQVFEMDISKQLHAYEVEYHVLQDELQESSYSCEDSETLEKLERANSQLKRQNMDLLEKLQVAHTKIQALESNLENLLTRETKMKSLIRTLEQEKMAYQKTVEQLRKLLPADALVNCDLLLRDLNCNPNNKAKIGNKP

SEQ ID NO: 17525 - protein, 15 aa, Artificial Sequence
  Synthetic polypeptide
EKQELLLLKIVSLFR

SEQ ID NO: 17526 - protein, 1233 aa, Artificial Sequence
  Synthetic polypeptide
KLSVSLDNINVFLKACEQIGLKEAQLFHPGDLQDLSNRVTVKQEETDRRVKNVLITLYWLGRKAQSNPYYNGPHLNLKAFENLLGQALTKALEDSSFLKRSGRDSGYGDIWCPERGEFLAPPRHHKREDSFESLDSLGSRSLTSCSSDITLRGGREGFESDTDSEFTFKMQDYNKDDMSYRRISAVEPKTALPFNRFLPNKSRQPSYVPAPLRKKKPDKHEDNRRSWASPVYTEADGTFSRLFQKIYGENGSKSMSDVSAEDVQNLRQLRYEEMQKIKSQLKEQDQKWQDDLAKWKDRRKSYTSDLQKKKEEREEIEKQALEKSKRSSKTFKEMLQDRESQNQKSTVPSRRRMYSFDDVLEEGKRPPTMTVSEASYQSERVEEKGATYPSEIPKEDSTTFAKREDRVTTEIQLPSQSPVEEQSPASLSSLRSRSTQMESTRVSASLPRSYRKTDTVRLTSVVTPRPFGSQTRGISSLPRSYTMDDAWKYNGDVEDIKRTPNNVVSTPAPSPDASQLASSLSSQKEVAATEEDVTRLPSPTSPFSSLSQDQAATSKATLSSTSGLDLMSESGEGEISPQREVSRSQDQFSDMRISINQTPGKSLDFGFTIKWDIPGIFVASVEAGSPAEFSQLQVDDEIIAINNTKFSYNDSKEWEEAMAKAQETGHLVMDVRRYGKAGSPETKWIDATSGIYNSEKSSNLSVTTDFSESLQSSNIESKEINGIHDESNAFESKASESISLKNLKRRSQFFEQGSSDSVVPDLPVPTISAPSRWVWDQEEERKRQERWQKEQDRLLQEKYQREQEKLREEWQRAKQEAERENSKYLDEELMVLSSNSMSLTTREPSLATWEATWSEGSKSSDREGTRAGEEERRQPQEEVVHEDQGKKPQDQLVIERERKWEQQLQEEQEQKRLQAEAEEQKRPAEEQKRQAEIERETSVRIYQYRRPVDSYDIPKTEEASSGFLPGDRNKSRSTTELDDYSTNKNGNNKYLDQIGNMTSSQRRSKKEQVPSGAELERQQILQEMRKRTPLHNDNSWIRQRSASVNKEPVSLPGIMRRGESLDNLDSPRSNSWRQPPWLNQPTGFYASSSVQDFSRPPPQLVSTSNRAYMRNPSSSVPPPSAGSVKTSTTGVATTQSPTPRSHSPSASQSGSQLRNRSVSGKRICSYCNNILGKGAAMIIESLGLCYHLHCFKCVACECDLGGSSSGAEVRIRNHQLYCNDCYLRFKSGRPTAM

SEQ ID NO: 17527 - protein, 1554 aa, Artificial Sequence
  Synthetic polypeptide
KLSVSLDNINVFLKACEQIGLKEAQLFHPGDLQDLSNRVTVKQEETDRRVKNVLITLYWLGRKAQSNPYYNGPHLNLKAFENLLGQALTKALEDSSFLKRSGRDSGYGDIWCPERGEFLAPPRHHKREDSFESLDSLGSRSLTSCSSDITLRGGREGFESDTDSEFTFKMQDYNKDDMSYRRISAVEPKTALPFNRFLPNKSRQPSYVPAPLRKKKPDKHEDNRRSWASPVYTEADGTFSSNQRRIWGTNVENWPTVQGTSKSSCYLEEEKAKTRSIPNIVKDDLYVRKLSPVMPNPGNAFDQFLPKCWTPEDVNWKRIKRETYKPWYKEFQGFSQFLLLQALQTYSDDILSSETHTKIDPTSGPRLITRRKNLSYAPGYRRDDLEMAALDPDLENDDFFVRKTGAFHANPYVLRAFEDFRKFSEQDDSVERDIILQCREGELVLPDLEKDDMIVRRIPAQKKEVPLSGAPDRYHPVPFPEPWTLPPEIQAKFLCVLERTCPSKEKSNSCRILVPSYRQKKDDMLTRKIQSWKLGTTVPPISFTPGPCSEADLKRWEAIREASRLRHKKRLMVERLFQKIYGENGSKSMSDVSAEDVQNLRQLRYEEMQKIKSQLKEQDQKWQDDLAKWKDRRKSYTSDLQKKKEEREEIEKQALEKSKRSSKTFKEMLQDRESQNQKSTVPSRRRMYSFDDVLEEGKRPPTMTVSEASYQSERVEEKGATYPSEIPKEDSTTFAKREDRVTTEIQLPSQSPVEEQSPASLSSLRSRSTQMESTRVSASLPRSYRKTDTVRLTSVVTPRPFGSQTRGISSLPRSYTMDDAWKYNGDVEDIKRTPNNVVSTPAPSPDASQLASSLSSQKEVAATEEDVTRLPSPTSPFSSLSQDQAATSKATLSSTSGLDLMSESGEGEISPQREVSRSQDQFSDMRISINQTPGKSLDFGFTIKWDIPGIFVASVEAGSPAEFSQLQVDDEIIAINNTKFSYNDSKEWEEAMAKAQETGHLVMDVRRYGKAGSPETKWIDATSGIYNSEKSSNLSVTTDFSESLQSSNIESKEINGIHDESNAFESKASESISLKNLKRRSQFFEQGSSDSVVPDLPVPTISAPSRWVWDQEEERKRQERWQKEQDRLLQEKYQREQEKLREEWQRAKQEAERENSKYLDEELMVLSSNSMSLTTREPSLATWEATWSEGSKSSDREGTRAGEEERRQPQEEVVHEDQGKKPQDQLVIERERKWEQQLQEEQEQKRLQAEAEEQKRPAEEQKRQAEIERETSVRIYQYRRPVDSYDIPKTEEASSGFLPGDRNKSRSTTELDDYSTNKNGNNKYLDQIGNMTSSQRRSKKEQVPSGAELERQQILQEMRKRTPLHNDNSWIRQRSASVNKEPVSLPGIMRRGESLDNLDSPRSNSWRQPPWLNQPTGFYASSSVQDFSRPPPQLVSTSNRAYMRNPSSSVPPPSAGSVKTSTTGVATTQSPTPRSHSPSASQSGSQLRNSVLPVSVTSEALPQELKSGSETTNCTATTAISDSNLDGQPPCDVSLHTKALLQIEEEVVAAHVDL

SEQ ID NO: 17528 - protein, 1498 aa, Artificial Sequence
  Synthetic polypeptide
KLSVSLDNINVFLKACEQIGLKEAQLFHPGDLQDLSNRVTVKQEETDRRVKNVLITLYWLGRKAQSNPYYNGPHLNLKAFENLLGQALTKALEDSSFLKRSGRDSGYGDIWCPERGEFLAPPRHHKREDSFESLDSLGSRSLTSCSSDITLRGGREGFESDTDSEFTFKMQDYNKDDMSYRRISAVEPKTALPFNRFLPNKSRQPSYVPAPLRKKKPDKHEDNRRSWASPVYTEADGTFSSNQRRIWGTNVENWPTVQGTSKSSCYLEEEKAKTRSIPNIVKDDLYVRKLSPVMPNPGNAFDQFLPKCWTPEDVNWKRIKRETYKPWYKEFQGFSQFLLLQALQTYSDDILSSETHTKIDPTSGPRLITRRKNLSYAPGYRRDDLEMAALDPDLENDDFFVRKTGAFHANPYVLRAFEDFRKFSEQDDSVERDIILQCREGELVLPDLEKDDMIVRRIPAQKKEVPLSGAPDRYHPVPFPEPWTLPPEIQAKFLCVLERTCPSKEKSNSCRILVPSYRQKKDDMLTRKIQSWKLGTTVPPISFTPGPCSEADLKRWEAIREASRLRHKKRLMVERLFQKIYGENGSKSMSDVSAEDVQNLRQLRYEEMQKIKSQLKEQDQKWQDDLAKWKDRRKSYTSDLQKKKEEREEIEKQALEKSKRSSKTFKEMLQDRESQNQKSTVPSRRRMYSFDDVLEEGKRPPTMTVSEASYQSERVEEKGATYPSEIPKEDSTTFAKREDRVTTEIQLPSQSPVEEQSPASLSSLRSRSTQMESTRVSASLPRSYRKTDTVRLTSVVTPRPFGSQTRGISSLPRSYTMDDAWKYNGDVEDIKRTPNNVVSTPAPSPDASQLASSLSSQKEVAATEEDVTRLPSPTSPFSSLSQDQAATSKATLSSTSGLDLMSESGEGEISPQREVSRSQDQFSDMRISINQTPGKSLDFGFTIKWDIPGIFVASVEAGSPAEFSQLQVDDEIIAINNTKFSYNDSKEWEEAMAKAQETGHLVMDVRRYGKAGSPETKWIDATSGIYNSEKSSNLSVTTDFSESLQSSNIESKEINGIHDESNAFESKASESISLKNLKRRSQFFEQGSSDSVVPDLPVPTISAPSRWVWDQEEERKRQERWQKEQDRLLQEKYQREQEKLREEWQRAKQEAERENSKYLDEELMVLSSNSMSLTTREPSLATWEATWSEGSKSSDREGTRAGEEERRQPQEEVVHEDQGKKPQDQLVIERERKWEQQLQEEQEQKRLQAEAEEQKRPAEEQKRQAEIERETSVRIYQYRRPVDSYDIPKTEEASSGFLPGDRNKSRSTTELDDYSTNKNGNNKYLDQIGNMTSSQRRSKKEQVPSGAELERQQILQEMRKRTPLHNDNSWIRQRSASVNKEPVSLPGIMRRGESLDNLDSPRSNSWRQPPWLNQPTGFYASSSVQDFSRPPPQLVSTSNRAYMRNPSSSVPPPSAGSVKTSTTGVATTQSPTPRSHSPSASQSGSQLRNSWTANRHVM

SEQ ID NO: 17529 - protein, 981 aa, Artificial Sequence
  Synthetic polypeptide
KLSVSLDNINVFLKACEQIGLKEAQLFHPGDLQDLSNRVTVKQEETDRRVKNVLITLYWLGRKAQSNPYYNGPHLNLKAFENLLGQALTKALEDSSFLKRSGRDSGYGDIWCPERGEFLAPPRHHKREDSFESLDSLGSRSLTSCSSDITLRGGREGFESDTDSEFTFKMQDYNKDDMSYRRISAVEPKTALPFNRFLPNKSRQPSYVPAPLRKKKPDKHEDNRRSWASPVYTEADGTFSRLFQKIYGENGSKSMSDVSAEDVQNLRQLRYEEMQKIKSQLKEQDQKWQDDLAKWKDRRKSYTSDLQKKKEEREEIEKQALEKSKRSSKTFKEMLQDRESQNQKSTVPSRRRMYSFDDVLEEGKRPPTMTVSEASYQSERVEEKGATYPSEIPKEDSTTFAKREDRVTTEIQLPSQSPVEEQSPASLSSLRSRSTQMESTRVSASLPRSYRKTDTVRLTSVVTPRPFGSQTRGISSLPRSYTMDDAWKYNGDVEDIKRTPNNVVSTPAPSPDASQLASSLSSQKEVAATEEDVTRLPSPTSPFSSLSQDQAATSKATLSSTSGLDLMSESGEGEISPQREVSRSQDQFSDMRISINQTPGKSLDFGFTIKWDIPGIFVASVEAGSPAEFSQLQVDDEIIAINNTKFSYNDSKEWEEAMAKAQETGHLVMDVRRYGKAGSPETKWIDATSGIYNSEKSSNLSVTTDFSESLQSSNIESKEINGIHDESNAFESKASESISLKNLKRRSQFFEQGSSDSVVPDLPVPTISAPSRWVWDQEEERKRQERWQKEQDRLLQEKYQREQEKLREEWQRAKQEAERENSKYLDEELMVLSSNSMSLTTREPSLATWEATWSEGSKSSDREGTRAGEEERRQPQEEVVHEDQGKKPQDQLVIERERKWEQQLQEEQEQKRLQAEAEEQKRPAEEQKRQAEIERETSVRIYQYRRPVDSYDIPKTEEASSGFLPGDRNKSRSTTELDDYS

SEQ ID NO: 17530 - protein, 1250 aa, Artificial Sequence
  Synthetic polypeptide
KLSVSLDNINVFLKACEQIGLKEAQLFHPGDLQDLSNRVTVKQEETDRRVKNVLITLYWLGRKAQSNPYYNGPHLNLKAFENLLGQALTKALEDSSFLKRSGRDSGYGDIWCPERGEFLAPPRHHKREDSFESLDSLGSRSLTSCSSDITLRGGREGFESDTDSEFTFKMQDYNKDDMSYRRISAVEPKTALPFNRFLPNKSRQPSYVPAPLRKKKPDKHEDNRRSWASPVYTEADGTFSRSKSMSDVSAEDVQNLRQLRYEEMQKIKSQLKEQDQKWQDDLAKWKDRRKSYTSDLQKKKEEREEIEKQALEKSKRSSKTFKEMLQDRESQNQKSTVPSRRRMYSFDDVLEEGKRPPTMTVSEASYQSERVEEKGATYPSEIPKEDSTTFAKREDRVTTEIQLPSQSPVEEQSPASLSSLRSRSTQMESTRVSASLPRSYRKTDTVRLTSVVTPRPFGSQTRGISSLPRSYTMDDAWKYNGDVEDIKRTPNNVVSTPAPSPDASQLASSLSSQKEVAATEEDVTRLPSPTSPFSSLSQDQAATSKATLSSTSGLDLMSESGEGEISPQREVSRSQDQFSDMRISINQTPGKSLDFGFTIKWDIPGIFVASVEAGSPAEFSQLQVDDEIIAINNTKFSYNDSKEWEEAMAKAQETGHLVMDVRRYGKADWGKDQPSLPFIRHKTLNLTSMATKIIGSPETKWIDATSGIYNSEKSSNLSVTTDFSESLQSSNIESKEINGIHDESNAFESKASESISLKNLKRRSQFFEQGSSDSVVPDLPVPTISAPSRWVWDQEEERKRQERWQKEQDRLLQEKYQREQEKLREEWQRAKQEAERENSKYLDEELMVLSSNSMSLTTREPSLATWEATWSEGSKSSDREGTRAGEEERRQPQEEVVHEDQGKKPQDQLVIERERKWEQQLQEEQEQKRLQAEAEEQKRPAEEQKRQAEIERETSVRIYQYRRPVDSYDIPKTEEASSGFLPGDRNKSRSTTELDDYSTNKNGNNKYLDQIGNMTSSQRRSKKEQVPSGAELERQQILQEMRKRTPLHNDNSWIRQRSASVNKEPVSLPGIMRRGESLDNLDSPRSNSWRQPPWLNQPTGFYASSSVQDFSRPPPQLVSTSNRAYMRNPSSSVPPPSAGSVKTSTTGVATTQSPTPRSHSPSASQSGSQLRNRSVSGKRICSYCNNILGKGAAMIIESLGLCYHLHCFKCVACECDLGGSSSGAEVRIRNHQLYCNDCYLRFKSGRPTAM

SEQ ID NO: 17531 - protein, 9 aa, Artificial Sequence
  Synthetic polypeptide
LGKKRLTGE

SEQ ID NO: 17532 - protein, 31 aa, Artificial Sequence
  Synthetic polypeptide
SGSQLGAVLPTRGCLATSGDTSSCHSWARRD

SEQ ID NO: 17533 - protein, 1218 aa, Artificial Sequence
  Synthetic polypeptide
VVLNWGQFCQPGDVWPLPEILPVVIAGQEETDRRVKNVLITLYWLGRKAQSNPYYNGPHLNLKAFENLLGQALTKALEDSSFLKRSGRDSGYGDIWCPERGEFLAPPRHHKREDSFESLDSLGSRSLTSCSSDITLRGGREGFESDTDSEFTFKMQDYNKDDMSYRRISAVEPKTALPFNRFLPNKSRQPSYVPAPLRKKKPDKHEDNRRSWASPVYTEADGTFSRLFQKIYGENGSKSMSDVSAEDVQNLRQLRYEEMQKIKSQLKEQDQKWQDDLAKWKDRRKSYTSDLQKKKEEREEIEKQALEKSKRSSKTFKEMLQDRESQNQKSTVPSRRRMYSFDDVLEEGKRPPTMTVSEASYQSERVEEKGATYPSEIPKEDSTTFAKREDRVTTEIQLPSQSPVEEQSPASLSSLRSRSTQMESTRVSASLPRSYRKTDTVRLTSVVTPRPFGSQTRGISSLPRSYTMDDAWKYNGDVEDIKRTPNNVVSTPAPSPDASQLASSLSSQKEVAATEEDVTRLPSPTSPFSSLSQDQAATSKATLSSTSGLDLMSESGEGEISPQREVSRSQDQFSDMRISINQTPGKSLDFGFTIKWDIPGIFVASVEAGSPAEFSQLQVDDEIIAINNTKFSYNDSKEWEEAMAKAQETGHLVMDVRRYGKAGSPETKWIDATSGIYNSEKSSNLSVTTDFSESLQSSNIESKEINGIHDESNAFESKASESISLKNLKRRSQFFEQGSSDSVVPDLPVPTISAPSRWVWDQEEERKRQERWQKEQDRLLQEKYQREQEKLREEWQRAKQEAERENSKYLDEELMVLSSNSMSLTTREPSLATWEATWSEGSKSSDREGTRAGEEERRQPQEEVVHEDQGKKPQDQLVIERERKWEQQLQEEQEQKRLQAEAEEQKRPAEEQKRQAEIERETSVRIYQYRRPVDSYDIPKTEEASSGFLPGDRNKSRSTTELDDYSTNKNGNNKYLDQIGNMTSSQRRSKKEQVPSGAELERQQILQEMRKRTPLHNDNSWIRQRSASVNKEPVSLPGIMRRGESLDNLDSPRSNSWRQPPWLNQPTGFYASSSVQDFSRPPPQLVSTSNRAYMRNPSSSVPPPSAGSVKTSTTGVATTQSPTPRSHSPSASQSGSQLRNRSVSGKRICSYCNNILGKGAAMIIESLGLCYHLHCFKCVACECDLGGSSSGAEVRIRNHQLYCNDCYLRFKSGRPTAM

SEQ ID NO: 17534 - protein, 1539 aa, Artificial Sequence
  Synthetic polypeptide
VVLNWGQFCQPGDVWPLPEILPVVIAGQEETDRRVKNVLITLYWLGRKAQSNPYYNGPHLNLKAFENLLGQALTKALEDSSFLKRSGRDSGYGDIWCPERGEFLAPPRHHKREDSFESLDSLGSRSLTSCSSDITLRGGREGFESDTDSEFTFKMQDYNKDDMSYRRISAVEPKTALPFNRFLPNKSRQPSYVPAPLRKKKPDKHEDNRRSWASPVYTEADGTFSSNQRRIWGTNVENWPTVQGTSKSSCYLEEEKAKTRSIPNIVKDDLYVRKLSPVMPNPGNAFDQFLPKCWTPEDVNWKRIKRETYKPWYKEFQGFSQFLLLQALQTYSDDILSSETHTKIDPTSGPRLITRRKNLSYAPGYRRDDLEMAALDPDLENDDFFVRKTGAFHANPYVLRAFEDFRKFSEQDDSVERDIILQCREGELVLPDLEKDDMIVRRIPAQKKEVPLSGAPDRYHPVPFPEPWTLPPEIQAKFLCVLERTCPSKEKSNSCRILVPSYRQKKDDMLTRKIQSWKLGTTVPPISFTPGPCSEADLKRWEAIREASRLRHKKRLMVERLFQKIYGENGSKSMSDVSAEDVQNLRQLRYEEMQKIKSQLKEQDQKWQDDLAKWKDRRKSYTSDLQKKKEEREEIEKQALEKSKRSSKTFKEMLQDRESQNQKSTVPSRRRMYSFDDVLEEGKRPPTMTVSEASYQSERVEEKGATYPSEIPKEDSTTFAKREDRVTTEIQLPSQSPVEEQSPASLSSLRSRSTQMESTRVSASLPRSYRKTDTVRLTSVVTPRPFGSQTRGISSLPRSYTMDDAWKYNGDVEDIKRTPNNVVSTPAPSPDASQLASSLSSQKEVAATEEDVTRLPSPTSPFSSLSQDQAATSKATLSSTSGLDLMSESGEGEISPQREVSRSQDQFSDMRISINQTPGKSLDFGFTIKWDIPGIFVASVEAGSPAEFSQLQVDDEIIAINNTKFSYNDSKEWEEAMAKAQETGHLVMDVRRYGKAGSPETKWIDATSGIYNSEKSSNLSVTTDFSESLQSSNIESKEINGIHDESNAFESKASESISLKNLKRRSQFFEQGSSDSVVPDLPVPTISAPSRWVWDQEEERKRQERWQKEQDRLLQEKYQREQEKLREEWQRAKQEAERENSKYLDEELMVLSSNSMSLTTREPSLATWEATWSEGSKSSDREGTRAGEEERRQPQEEVVHEDQGKKPQDQLVIERERKWEQQLQEEQEQKRLQAEAEEQKRPAEEQKRQAEIERETSVRIYQYRRPVDSYDIPKTEEASSGFLPGDRNKSRSTTELDDYSTNKNGNNKYLDQIGNMTSSQRRSKKEQVPSGAELERQQILQEMRKRTPLHNDNSWIRQRSASVNKEPVSLPGIMRRGESLDNLDSPRSNSWRQPPWLNQPTGFYASSSVQDFSRPPPQLVSTSNRAYMRNPSSSVPPPSAGSVKTSTTGVATTQSPTPRSHSPSASQSGSQLRNSVLPVSVTSEALPQELKSGSETTNCTATTAISDSNLDGQPPCDVSLHTKALLQIEEEVVAAHVDL

SEQ ID NO: 17535 - protein, 1483 aa, Artificial Sequence
  Synthetic polypeptide
VVLNWGQFCQPGDVWPLPEILPVVIAGQEETDRRVKNVLITLYWLGRKAQSNPYYNGPHLNLKAFENLLGQALTKALEDSSFLKRSGRDSGYGDIWCPERGEFLAPPRHHKREDSFESLDSLGSRSLTSCSSDITLRGGREGFESDTDSEFTFKMQDYNKDDMSYRRISAVEPKTALPFNRFLPNKSRQPSYVPAPLRKKKPDKHEDNRRSWASPVYTEADGTFSSNQRRIWGTNVENWPTVQGTSKSSCYLEEEKAKTRSIPNIVKDDLYVRKLSPVMPNPGNAFDQFLPKCWTPEDVNWKRIKRETYKPWYKEFQGFSQFLLLQALQTYSDDILSSETHTKIDPTSGPRLITRRKNLSYAPGYRRDDLEMAALDPDLENDDFFVRKTGAFHANPYVLRAFEDFRKFSEQDDSVERDIILQCREGELVLPDLEKDDMIVRRIPAQKKEVPLSGAPDRYHPVPFPEPWTLPPEIQAKFLCVLERTCPSKEKSNSCRILVPSYRQKKDDMLTRKIQSWKLGTTVPPISFTPGPCSEADLKRWEAIREASRLRHKKRLMVERLFQKIYGENGSKSMSDVSAEDVQNLRQLRYEEMQKIKSQLKEQDQKWQDDLAKWKDRRKSYTSDLQKKKEEREEIEKQALEKSKRSSKTFKEMLQDRESQNQKSTVPSRRRMYSFDDVLEEGKRPPTMTVSEASYQSERVEEKGATYPSEIPKEDSTTFAKREDRVTTEIQLPSQSPVEEQSPASLSSLRSRSTQMESTRVSASLPRSYRKTDTVRLTSVVTPRPFGSQTRGISSLPRSYTMDDAWKYNGDVEDIKRTPNNVVSTPAPSPDASQLASSLSSQKEVAATEEDVTRLPSPTSPFSSLSQDQAATSKATLSSTSGLDLMSESGEGEISPQREVSRSQDQFSDMRISINQTPGKSLDFGFTIKWDIPGIFVASVEAGSPAEFSQLQVDDEIIAINNTKFSYNDSKEWEEAMAKAQETGHLVMDVRRYGKAGSPETKWIDATSGIYNSEKSSNLSVTTDFSESLQSSNIESKEINGIHDESNAFESKASESISLKNLKRRSQFFEQGSSDSVVPDLPVPTISAPSRWVWDQEEERKRQERWQKEQDRLLQEKYQREQEKLREEWQRAKQEAERENSKYLDEELMVLSSNSMSLTTREPSLATWEATWSEGSKSSDREGTRAGEEERRQPQEEVVHEDQGKKPQDQLVIERERKWEQQLQEEQEQKRLQAEAEEQKRPAEEQKRQAEIERETSVRIYQYRRPVDSYDIPKTEEASSGFLPGDRNKSRSTTELDDYSTNKNGNNKYLDQIGNMTSSQRRSKKEQVPSGAELERQQILQEMRKRTPLHNDNSWIRQRSASVNKEPVSLPGIMRRGESLDNLDSPRSNSWRQPPWLNQPTGFYASSSVQDFSRPPPQLVSTSNRAYMRNPSSSVPPPSAGSVKTSTTGVATTQSPTPRSHSPSASQSGSQLRNSWTANRHVM

SEQ ID NO: 17536 - protein, 966 aa, Artificial Sequence
  Synthetic polypeptide
VVLNWGQFCQPGDVWPLPEILPVVIAGQEETDRRVKNVLITLYWLGRKAQSNPYYNGPHLNLKAFENLLGQALTKALEDSSFLKRSGRDSGYGDIWCPERGEFLAPPRHHKREDSFESLDSLGSRSLTSCSSDITLRGGREGFESDTDSEFTFKMQDYNKDDMSYRRISAVEPKTALPFNRFLPNKSRQPSYVPAPLRKKKPDKHEDNRRSWASPVYTEADGTFSRLFQKIYGENGSKSMSDVSAEDVQNLRQLRYEEMQKIKSQLKEQDQKWQDDLAKWKDRRKSYTSDLQKKKEEREEIEKQALEKSKRSSKTFKEMLQDRESQNQKSTVPSRRRMYSFDDVLEEGKRPPTMTVSEASYQSERVEEKGATYPSEIPKEDSTTFAKREDRVTTEIQLPSQSPVEEQSPASLSSLRSRSTQMESTRVSASLPRSYRKTDTVRLTSVVTPRPFGSQTRGISSLPRSYTMDDAWKYNGDVEDIKRTPNNVVSTPAPSPDASQLASSLSSQKEVAATEEDVTRLPSPTSPFSSLSQDQAATSKATLSSTSGLDLMSESGEGEISPQREVSRSQDQFSDMRISINQTPGKSLDFGFTIKWDIPGIFVASVEAGSPAEFSQLQVDDEIIAINNTKFSYNDSKEWEEAMAKAQETGHLVMDVRRYGKAGSPETKWIDATSGIYNSEKSSNLSVTTDFSESLQSSNIESKEINGIHDESNAFESKASESISLKNLKRRSQFFEQGSSDSVVPDLPVPTISAPSRWVWDQEEERKRQERWQKEQDRLLQEKYQREQEKLREEWQRAKQEAERENSKYLDEELMVLSSNSMSLTTREPSLATWEATWSEGSKSSDREGTRAGEEERRQPQEEVVHEDQGKKPQDQLVIERERKWEQQLQEEQEQKRLQAEAEEQKRPAEEQKRQAEIERETSVRIYQYRRPVDSYDIPKTEEASSGFLPGDRNKSRSTTELDDYS

SEQ ID NO: 17537 - protein, 1235 aa, Artificial Sequence
  Synthetic polypeptide
VVLNWGQFCQPGDVWPLPEILPVVIAGQEETDRRVKNVLITLYWLGRKAQSNPYYNGPHLNLKAFENLLGQALTKALEDSSFLKRSGRDSGYGDIWCPERGEFLAPPRHHKREDSFESLDSLGSRSLTSCSSDITLRGGREGFESDTDSEFTFKMQDYNKDDMSYRRISAVEPKTALPFNRFLPNKSRQPSYVPAPLRKKKPDKHEDNRRSWASPVYTEADGTFSRSKSMSDVSAEDVQNLRQLRYEEMQKIKSQLKEQDQKWQDDLAKWKDRRKSYTSDLQKKKEEREEIEKQALEKSKRSSKTFKEMLQDRESQNQKSTVPSRRRMYSFDDVLEEGKRPPTMTVSEASYQSERVEEKGATYPSEIPKEDSTTFAKREDRVTTEIQLPSQSPVEEQSPASLSSLRSRSTQMESTRVSASLPRSYRKTDTVRLTSVVTPRPFGSQTRGISSLPRSYTMDDAWKYNGDVEDIKRTPNNVVSTPAPSPDASQLASSLSSQKEVAATEEDVTRLPSPTSPFSSLSQDQAATSKATLSSTSGLDLMSESGEGEISPQREVSRSQDQFSDMRISINQTPGKSLDFGFTIKWDIPGIFVASVEAGSPAEFSQLQVDDEIIAINNTKFSYNDSKEWEEAMAKAQETGHLVMDVRRYGKADWGKDQPSLPFIRHKTLNLTSMATKIIGSPETKWIDATSGIYNSEKSSNLSVTTDFSESLQSSNIESKEINGIHDESNAFESKASESISLKNLKRRSQFFEQGSSDSVVPDLPVPTISAPSRWVWDQEEERKRQERWQKEQDRLLQEKYQREQEKLREEWQRAKQEAERENSKYLDEELMVLSSNSMSLTTREPSLATWEATWSEGSKSSDREGTRAGEEERRQPQEEVVHEDQGKKPQDQLVIERERKWEQQLQEEQEQKRLQAEAEEQKRPAEEQKRQAEIERETSVRIYQYRRPVDSYDIPKTEEASSGFLPGDRNKSRSTTELDDYSTNKNGNNKYLDQIGNMTSSQRRSKKEQVPSGAELERQQILQEMRKRTPLHNDNSWIRQRSASVNKEPVSLPGIMRRGESLDNLDSPRSNSWRQPPWLNQPTGFYASSSVQDFSRPPPQLVSTSNRAYMRNPSSSVPPPSAGSVKTSTTGVATTQSPTPRSHSPSASQSGSQLRNRSVSGKRICSYCNNILGKGAAMIIESLGLCYHLHCFKCVACECDLGGSSSGAEVRIRNHQLYCNDCYLRFKSGRPTAM

SEQ ID NO: 17538 - protein, 2486 aa, Artificial Sequence
  Synthetic polypeptide
TRESEVEVCKTHSGILGKGLALSHSPTILEALEGNLPLQIQSNEQSFLDDFIACVPGSSGGRLARWLQPDSYADPQKTSLILNKDDIRCGWPTTITVQTKDQYGDVVHVPNMKVEVKAVPVSQKKMSLQQDQAKKPQRIPGSPAVTAASSNTDMTYGGLASPKLDVSYEPMIVKEARYIAITMMKVYENYSFEELRFASPTPKRPSENMLIRVNNDGTYCANWTPGAIGLYTLHVTIDGIEIDAGLEVKVKDPPKGMIPPGTQLVKPKSEPQPNKVRKFVAKDSAGLRIRSHPSLQSEQIGIVKVNGTITFIDEIHNDDGVWLRLNDETIKKYVPNMNGYTEAWCLSFNQHLGKSLLVPVDESKTNTDDFFKDINSCCPQEATMQEQDMPFLRGGPGMYKVVKTGPSGHNIRSCPNLRGIPIGMLVLGNKVKAVGEVTNSEGTWVQLDQNSMVEFCESDEGEAWSLARDRGGNQYLRHEDEQALLDQNSQTPPPSPFSVQAFNKGASCSAQGFDYGLGNSKGDRGNISTSSKPASTSGKSELSSKHSRSLKPDGRMSRTTADQKKPRGTESLSASESLILKSDAAKLRSDSHSRSLSPNHNTLQTLKSDGRMPSSSRAESPGPGSRLSSPKPKTLPANRSSPSGASSPRSSSPHDKNLPQKSTAPVKTKLDPPRERSKSDSYTLDPDTLRKKKMPLTEPLRGRSTSPKPKSVPKDSTDSPGSENRAPSPHVVQENLHSEVVEVCTSSTLKTNSLTDSTCDDSSEFKSVDEGSNKVHFSIGKAPLKDEQEMRASPKISRKCANRHTRPKKEKSSFLFKGDGSKPLEPAKQAMSPSVAECARAVFASFLWHEGIVHDAMACSSFLKFHPELSKEHAPIRSSLNSQQPTEEKETKLKNRHSLEISSALNMFNIAPHGPDISKMGSINKNKVLSMLKEPPLHEKCEDGKTETTFEMSMHNTMKSKSPLPLTLQHLVAFWEDISLATIKAASQNMIFPSPGSCAVLKKKECEKENKKSKKEKKKKEKAEVRPRGNLFGEMAQLAVGGPEKDTICELCGESHPYPVTYHMRQAHPGCGRYAGGQGYNSIGHFCGGWAGNCGDGGIGGSTWYLVCDRCREKYLREKQAAAREKVKQSRRKPMQVKTPRALPTMEAHQVIKANALFLLSLSSAAEPSILCYHPAKPFQSQLPSVKEGISEDLPVKMPCLYLQTLARHHHENFVGYQDDNLFQDEMRYLRSTSVPAPYISVTPDASPNVFEEPESNMKSMPPSLETSPITDTDLAKRTVFQRSYSVVASEYDKQHSILPARVKAIPRRRVNSGDTEVGSSLLRHPSPELSRLISAHSSLSKGERNFQWPVLAFVIQHHDLEGLEIAMKQALRKSACRVFAMEAFNWLLCNVIQTTSLHDILWHFVASLTPAPVEPEEEEDEENKTSKENSEQEKDTRVCEHPLSDIVIAGEAAHPLPHTFHRLLQTISDLMMSLPSGSSLQQMALRCWSLKFKQSDHQFLHQSNVFHHINNILSKSDDGDSEESFSISIQSGFEAMSQELCIVMCLKDLTSIVDIKTSSRPAMIGSLTDGSTETFWESGDEDKNKTKNITINCVKGINARYVSVHVDNSRDLGNKVTSMTFLTGKAVEDLCRIKQVDLDSRHIGWVTSELPGGDNHIIKIELKGPENTLRVRQVKVLGWKDGESTKIAGQISASVAQQRNCEAETLRVFRLITSQVFGKLISGDAEPTPEQEEKALLSSPEGEEKVYNATSDADLKEHMVGIIFSRSKLTNLQKQVCAHIVQAIRMEATRVREEWEHAISSKENANSQPNDEDASSDAYCFELLSMVLALSGSNVGRQYLAQQLTLLQDLFSLLHTASPRVQRQVTSLLRRVLPEVTPSRLASIIGVKSLPPADISDIIHSTEKGDWNKLGILDMFLGCIAKALTVQLKAKGTTITGTAGTTVGKGVTTVTLPMIFNSSYLRRGESHWWMKGSTPTQISEIIIKLIKDMAAGHLSEAWSRVTKNAIAETIIALTKMEEEFRSPVRCIATTRLWLALASLCVLDQDHVDRLSSGRWMGKDGQQKQMPMCDNHDDGETAAIILCNVCGNLCTDCDRFLHLHRRTKTHQRQVFKEEEEAIKVDLHEGCGRTKLFWLMALADSKTMKAMVEFREHTGKPTTSSSEACRFCGSRSGTELSAVGSVCSDADCQEYAKIACSKTHPCGHPCGGVKNEEHCLPCLHGCDKSATSLKQDADDMCMICFTEALSAAPAIQLDCSHIFHLQCCRRVLENRWLGPRITFGFISCPICKNKINHIVLKDLLDPIKELYEDVRRKALMRLEYEGLHKSEAITTPGVRFYNDPAGYAMNRYAYYVCYKCRKAYFGGEARCDAEAGRGDDYDPRELICGACSDVSRAQMCPKHGTDFLEYKCRYCCSVAVFFCFGTTHFCNACHDDFQRMTSIPKEELPHCPAGPKGKQLEGTECPLHVVHPPTGEEFALGCGVCRNAHTF

SEQ ID NO: 17539 - protein, 47 aa, Artificial Sequence
  Synthetic polypeptide
KPRLISWAWWRMPVIPATQEAEAGESLEPGSRRLRCAKPILEFLERV

SEQ ID NO: 17540 - protein, 36 aa, Artificial Sequence
  Synthetic polypeptide
SLMKNVLVSPSPSAMIVSFLEPPQPYGTRPEPGKFN

SEQ ID NO: 17541 - protein, 156 aa, Artificial Sequence
  Synthetic polypeptide
VSWSLPSHMELDQNLENLIEVNSHVSENKNGSSNTGAKQAGPQDTVVYTRTYVENSKSPKDGYQENISGKYIQTVYSTSDRSVIERDMCTYCRKPLGVETKMILDELQICCHSTCFKCEICKQPLENLQAGDSIWIYRQTIHCEPCYSKIMAKWIP

SEQ ID NO: 17542 - protein, 94 aa, Artificial Sequence
  Synthetic polypeptide
ACPVEHSGGGLWPARATWILRALPGRHLPRWDALPEQCVAGPRGGSTQWLNTGKELVLGVWTSETCCWQRTGHLELRCVSWCLSYRKPLWESLC

SEQ ID NO: 17543 - protein, 25 aa, Artificial Sequence
  Synthetic polypeptide
TLGRNWYLESGHLKLAAGRGLAIWS

SEQ ID NO: 17544 - protein, 277 aa, Artificial Sequence
  Synthetic polypeptide
NLLLAEDWPFGAEMCKLVPFIQKASVGITVLSLCALSIDRYRAVASWSRIKGIGVPKWTAVEIVLIWVVSVVLAVPEAIGFDIITMDYKGSYLRICLLHPVQKTAFMQFYKTAKDWWLFSFYFCLPLAITAFFYTLMTCEMLRKKSGMQIALNDHLKQRREVAKTVFCLVLVFALCWLPLHLSRILKLTLYNQNDPNRCELLSFLLVLDYIGINMASLNSCINPIALYLVSKRFKNCFKAGPHVGNKLVMLFSVNIECDGTVNQNPTMWPERKSNNN

SEQ ID NO: 17545 - protein, 283 aa, Artificial Sequence
  Synthetic polypeptide
NLLLAEDWPFGAEMCKLVPFIQKASVGITVLSLCALSIDRYRAVASWSRIKGIGVPKWTAVEIVLIWVVSVVLAVPEAIGFDIITMDYKGSYLRICLLHPVQKTAFMQFYKTAKDWWLFSFYFCLPLAITAFFYTLMTCEMLRKKSGMQIALNDHLKQRREVAKTVFCLVLVFALCWLPLHLSRILKLTLYNQNDPNRCELLSFLLVLDYIGINMASLNSCINPIALYLVSKRFKNCFKSCLCCWCQSFEEKQSLEEKQSCLKFKANDHGYDNFRSSNKYSSS

SEQ ID NO: 17546 - protein, 144 aa, Artificial Sequence
  Synthetic polypeptide
ACPVEHSGGGLWPARATWILRALPGRHLPRWDALPEQCVAGPRGGSTQWLNTGKELVLGVWTSETCRDPEQTVEATLSGILAAFRQSRTRLQLKGGVLLSQSRLEPSWVPPPGKVVSIRRSASGLSDPRGSETAERPPDAFWSR

SEQ ID NO: 17547 - protein, 538 aa, Artificial Sequence
  Synthetic polypeptide
TLGRNWYLESGHLKLAETPSKRWRLHCLAFSQRFVRAGPACSSREACSSPRAGWNPAGFRLPGRWSPFVALHLVCQIREALKLRSGHRTPSGAGSSMQPPPSLCGRALVALVLACGLSRIWGEERGFPPDRATPLLQTAEIMTPPTKTLWPKGSNASLARSLAPAEVPKGDRTAGSPPRTISPPPCQGPIEIKETFKYINTVVSCLVFVLGIIGNSTLLRIIYKNKCMRNGPNILIASLALGDLLHIVIDIPINVYKLLAEDWPFGAEMCKLVPFIQKASVGITVLSLCALSIDRYRAVASWSRIKGIGVPKWTAVEIVLIWVVSVVLAVPEAIGFDIITMDYKGSYLRICLLHPVQKTAFMQFYKTAKDWWLFSFYFCLPLAITAFFYTLMTCEMLRKKSGMQIALNDHLKQRREVAKTVFCLVLVFALCWLPLHLSRILKLTLYNQNDPNRCELLSFLLVLDYIGINMASLNSCINPIALYLVSKRFKNCFKSCLCCWCQSFEEKQSLEEKQSCLKFKANDHGYDNFRSSNKYSSS

SEQ ID NO: 17548 - protein, 67 aa, Artificial Sequence
  Synthetic polypeptide
NLQRPRANGGGYTVWHSRSVSSEPDPPAAQGRRAPLPEQAGTQLGSASREGGLHSSLCIWFVRSERL

SEQ ID NO: 17549 - protein, 41 aa, Artificial Sequence
  Synthetic polypeptide
QGSPTPGPWAHAGLWPLRNWATQQVDEKRKRPRNSLPCMCW

SEQ ID NO: 17550 - protein, 56 aa, Artificial Sequence
  Synthetic polypeptide
RGPQPLGHGPMLVCGLLGTGPHSRWMKRESDQGTPFPACAGNHEPGRLYSDFLLLA

SEQ ID NO: 17551 - protein, 54 aa, Artificial Sequence
  Synthetic polypeptide
QGSPTPGPWAHAGLWPLRNWATQQVDEKRKRPRNSLPCMCWFFIPLLMPSLMSG

SEQ ID NO: 17552 - protein, 46 aa, Artificial Sequence
  Synthetic polypeptide
RGPQPLGHGPMLVCGLLGTGPHSRWMKRESDQGTPFPACAGSSFLY

SEQ ID NO: 17553 - protein, 178 aa, Artificial Sequence
  Synthetic polypeptide
KSSQVWWNALEGFDKADGTLDSQVMSLHNLVHSFLNGTNALPHSAANDPIFVVLHSFTDAIFDEWMKRFNPPADAWPQELAPIGHNRMYNMVPFFPPVTNEELFLTSDQLGYSYAIDLPVSVEETPGWPTTLLVVMGTLVALVGLFVLLAFLQYRRLRKGYTPLMETHLSSKRYTEEA

SEQ ID NO: 17554 - protein, 44 aa, Artificial Sequence
  Synthetic polypeptide
VQEFETTWATEQDPVSTKKYKKVARCGGMLWKGLIKQMGLWILK

SEQ ID NO: 17555 - protein, 10 aa, Artificial Sequence
  Synthetic polypeptide
PGVVECFGRV

SEQ ID NO: 17556 - protein, 82 aa, Artificial Sequence
  Synthetic polypeptide
KSSQVWWNALEGFDKADGTLDSQVMSLHNLVHSFLNGTNALPHSAANDPIFVKRESDQGTPFPACAGNHEPGRLYSDFLLLA

SEQ ID NO: 17557 - protein, 211 aa, Artificial Sequence
  Synthetic polypeptide
KSSQVWWNALEGFDKADGTLDSQVMSLHNLVHSFLNGTNALPHSAANDPIFVVISNRLLYNATTNILEHVRKEKATKELPSLHVLVLHSFTDAIFDEWMKRFNPPADAWPQELAPIGHNRMYNMVPFFPPVTNEELFLTSDQLGYSYAIDLPVSVEETPGWPTTLLVVMGTLVALVGLFVLLAFLQYRRLRKGYTPLMETHLSSKRYTEEA

SEQ ID NO: 17558 - protein, 10 aa, Artificial Sequence
  Synthetic polypeptide
KSSQECFGRV

SEQ ID NO: 17559 - protein, 196 aa, Artificial Sequence
  Synthetic polypeptide
VQEFETTWATEQDPVSTKKYKKVARNALEGFDKADGTLDSQVMSLHNLVHSFLNGTNALPHSAANDPIFVVLHSFTDAIFDEWMKRFNPPADAWPQELAPIGHNRMYNMVPFFPPVTNEELFLTSDQLGYSYAIDLPVSVEETPGWPTTLLVVMGTLVALVGLFVLLAFLQYRRLRKGYTPLMETHLSSKRYTEEA

SEQ ID NO: 17560 - protein, 18 aa, Artificial Sequence
  Synthetic polypeptide
PGMLWKGLIKQMGLWILK

SEQ ID NO: 17561 - protein, 100 aa, Artificial Sequence
  Synthetic polypeptide
VQEFETTWATEQDPVSTKKYKKVARNALEGFDKADGTLDSQVMSLHNLVHSFLNGTNALPHSAANDPIFVKRESDQGTPFPACAGNHEPGRLYSDFLLLA

SEQ ID NO: 17562 - protein, 229 aa, Artificial Sequence
  Synthetic polypeptide
VQEFETTWATEQDPVSTKKYKKVARNALEGFDKADGTLDSQVMSLHNLVHSFLNGTNALPHSAANDPIFVVISNRLLYNATTNILEHVRKEKATKELPSLHVLVLHSFTDAIFDEWMKRFNPPADAWPQELAPIGHNRMYNMVPFFPPVTNEELFLTSDQLGYSYAIDLPVSVEETPGWPTTLLVVMGTLVALVGLFVLLAFLQYRRLRKGYTPLMETHLSSKRYTEEA

SEQ ID NO: 17563 - protein, 13 aa, Artificial Sequence
  Synthetic polypeptide
GLPSHVELKLCRL

SEQ ID NO: 17564 - protein, 63 aa, Artificial Sequence
  Synthetic polypeptide
ISLTRFDDFLRGSPCCWLSFSLLPAAMIVRPPQPRGTETLPAIIVETASLAGPVPTASGRNHQ

SEQ ID NO: 17565 - protein, 484 aa, Artificial Sequence
  Synthetic polypeptide
LMRLTLLQVVGVVSVAVAVIPWIAIPLVPLGIIFIFLRRYFLETSRDVKRLESTTRSPVFSHLSSSLQGLWTIRAYKAEERCQELFDAHQDLHSEAWFLFLTTSRWFAVRLDAICAMFVIIVAFGSLILAKTLDAGQVGLALSYALTLMGMFQWCVRQSAEVENMMISVERVIEYTDLEKEAPWEYQKRPPPAWPHEGVIIFDNVNFMYSPGGPLVLKHLTALIKSQEKVGIVGRTGAGKSSLISALFRLSEPEGKIWIDKILTTEIGLHDLRKKMSIIPQEPVLFTGTMRKNLDPFNEHTDEELWNALQEVQLKETIEDLPGKMDTELAESGSNFSVGQRQLVCLARAILRKNQILIIDEATANVDPRTDELIQKKIREKFAHCTVLTIAHRLNTIIDSDKIMVLDSGRLKEYDEPYVLLQNKESLFYKMVQQLGKAEAAALTETAKQVYFKRNYPHIGHTDHMVTNTSNGQPSTLTIFETAL

SEQ ID NO: 17566 - protein, 88 aa, Artificial Sequence
  Synthetic polypeptide
CLTHEADIATSGWCGLCGCGRDSLDRNTLGSPWNHFHFSSAIFFGNVKRCEAPGIYNSESSVFPLIIFSPGALDHPGIQSRREVSGTV

SEQ ID NO: 17567 - protein, 37 aa, Artificial Sequence
  Synthetic polypeptide
RAALSREIRFTLYGCKGRISSNDWMFPEGKIRFNEEF

SEQ ID NO: 17568 - protein, 71 aa, Artificial Sequence
  Synthetic polypeptide
GTQGIGACEKSGKLVINFLQVVEELPCQEKFDSLCMVVRAESAATIGCSRKARFGLMKNFKSFLQRHWTLG

SEQ ID NO: 17569 - protein, 19 aa, Artificial Sequence
  Synthetic polypeptide
AMIMPLHPSLSDKVAQSLV

SEQ ID NO: 17570 - protein, 1256 aa, Artificial Sequence
  Synthetic polypeptide
VTKWLNPLFKIGHKRRLEEDDMYSVLPEDRSQHLGEELQGFWDKEVLRAENDAQKPSLTRAIIKCYWKSYLVLGIFTLIEESAKVIQPIFLGKIINYFENYDPMDSVALNTAYAYATVLTFCTLILAILHHLYFYHVQCAGMRLRVAMCHMIYRKALRLSNMAMGKTTTGQIVNLLSNDVNKFDQVTVFLHFLWAGPLQAIAVTALLWMEIGISCLAGMAVLIILLPLQSCFGKLFSSLRSKTATFTDARIRTMNEVITGIRIIKMYAWEKSFSNLITNLRKKEISKILRSSCLRGMNLASFFSASKIIVFVTFTTYVLLGSVITASRVFVAVTLYGAVRLTVTLFFPSAIERVSEAIVSIRRIQTFLLLDEISQRNRQLPSDGKKMVHVQDFTAFWDKASETPTLQGLSFTVRPGELLAVVGPVGAGKSSLLSAVLGELAPSHGLVSVHGRIAYVSQQPWVFSGTLRSNILFGKKYEKERYEKVIKACALKKDLQLLEDGDLTVIGDRGTTLSGGQKARVNLARAVYQDADIYLLDDPLSAVDAEVSRHLFELCICQILHEKITILVTHQLQYLKAASQILILKDGKMVQKGTYTEFLKSGIDFGSLLKKDNEESEQPPVPGTPTLRNRTFSESSVWSQQSSRPSLKDGALESQDVAYVLQDWWLSYWANKQSMLNVTVNGGGNVTEKLDLNWYLGIYSGLTVATVLFGIARSLLVFYVLVNSSQTLHNKMFESILKAPVLFFDRNPIGRILNRFSKDIGHLDDLLPLTFLDFIQTLLQVVGVVSVAVAVIPWIAIPLVPLGIIFIFLRRYFLETSRDVKRLESTTRSPVFSHLSSSLQGLWTIRAYKAEERCQELFDAHQDLHSEAWFLFLTTSRWFAVRLDAICAMFVIIVAFGSLILAKTLDAGQVGLALSYALTLMGMFQWCVRQSAEVENMMISVERVIEYTDLEKEAPWEYQKRPPPAWPHEGVIIFDNVNFMYSPGGPLVLKHLTALIKSQEKVGIVGRTGAGKSSLISALFRLSEPEGKIWIDKILTTEIGLHDLRKKMSIIPQEPVLFTGTMRKNLDPFNEHTDEELWNALQEVQLKETIEDLPGKMDTELAESGSNFSVGQRQLVCLARAILRKNQILIIDEATANVDPRTDELIQKKIREKFAHCTVLTIAHRLNTIIDSDKIMVLDSGRLKEYDEPYVLLQNKESLFYKMVQQLGKAEAAALTETAKQVYFKRNYPHIGHTDHMVTNTSNGQPSTLTIFETAL

SEQ ID NO: 17571 - protein, 15 aa, Artificial Sequence
  Synthetic polypeptide
QSGSIPCLKLAINGD

SEQ ID NO: 17572 - protein, 1303 aa, Artificial Sequence
  Synthetic polypeptide
VTKWLNPLFKIGHKRRLEEDDMYSVLPEDRSQHLGEELQGFWDKEVLRAENDAQKPSLTRAIIKCYWKSYLVLGIFTLIEESAKVIQPIFLGKIINYFENYDPMDSVALNTAYAYATVLTFCTLILAILHHLYFYHVQCAGMRLRVAMCHMIYRKALRLSNMAMGKTTTGQIVNLLSNDVNKFDQVTVFLHFLWAGPLQAIAVTALLWMEIGISCLAGMAVLIILLPLQSCFGKLFSSLRSKTATFTDARIRTMNEVITGIRIIKMYAWEKSFSNLITNLRKKEISKILRSSCLRGMNLASFFSASKIIVFVTFTTYVLLGSVITASRVFVAVTLYGAVRLTVTLFFPSAIERVSEAIVSIRRIQTFLLLDEISQRNRQLPSDGKKMVHVQDFTAFWDKASETPTLQGLSFTVRPGELLAVVGPVGAGKSSLLSAVLGELAPSHGLVSVHGRIAYVSQQPWVFSGTLRSNILFGKKYEKERYEKVIKACALKKDLQLLEDGDLTVIGDRGTTLSGGQKARVNLARAVYQDADIYLLDDPLSAVDAEVSRHLFELCICQILHEKITILVTHQLQYLKAASQILILKDGKMVQKGTYTEFLKSGIDFGSLLKKDNEESEQPPVPGTPTLRNRTFSESSVWSQQSSRPSLKDGALESQDTENVPVTLSEENRSEGKVGFQAYKNYFRAGAHWIVFIFLILLNTAAQVAYVLQDWWLSYWANKQSMLNVTVNGGGNVTEKLDLNWYLGIYSGLTVATVLFGIARSLLVFYVLVNSSQTLHNKMFESILKAPVLFFDRNPIGRILNRFSKDIGHLDDLLPLTFLDFIQTLLQVVGVVSVAVAVIPWIAIPLVPLGIIFIFLRRYFLETSRDVKRLESTTRSPVFSHLSSSLQGLWTIRAYKAEERCQELFDAHQDLHSEAWFLFLTTSRWFAVRLDAICAMFVIIVAFGSLILAKTLDAGQVGLALSYALTLMGMFQWCVRQSAEVENMMISVERVIEYTDLEKEAPWEYQKRPPPAWPHEGVIIFDNVNFMYSPGGPLVLKHLTALIKSQEKVGIVGRTGAGKSSLISALFRLSEPEGKIWIDKILTTEIGLHDLRKKMSIIPQEPVLFTGTMRKNLDPFNEHTDEELWNALQEVQLKETIEDLPGKMDTELAESGSNFSVGQRQLVCLARAILRKNQILIIDEATANVDPRTDELIQKKIREKFAHCTVLTIAHRLNTIIDSDKIMVLDSGRLKEYDEPYVLLQNKESLFYKMVQQLGKAEAAALTETAKQVYFKRNYPHIGHTDHMVTNTSNGQPSTLTIFETAL

SEQ ID NO: 17573 - protein, 762 aa, Artificial Sequence
  Synthetic polypeptide
VTKWLNPLFKIGHKRRLEEDDMYSVLPEDRSQHLGEELQGFWDKEVLRAENDAQKPSLTRAIIKCYWKSYLVLGIFTLIEALRLSNMAMGKTTTGQIVNLLSNDVNKFDQVTVFLHFLWAGPLQAIAVTALLWMEIGISCLAGMAVLIILLPLQSCFGKLFSSLRSKTATFTDARIRTMNEVITGIRIIKMYAWEKSFSNLITNLRKKEISKILRSSCLRGMNLASFFSASKIIVFVTFTTYVLLGSVITASRVFVAVTLYGAVRLTVTLFFPSAIERVSEAIVSIRRIQTFLLLDEISQRNRQLPSDGKKMVHVQDFTAFWDKASETPTLQGLSFTVRPGELLAVVGPVGAGKSSLLSAVLGELAPSHGLVSVHGRIAYVSQQPWVFSGTLRSNILFGKKYEKERYEKVIKACALKKDLQLLEDGDLTVIGDRGTTLSGGQKARVNLARAVYQDADIYLLDDPLSAVDAEVSRHLFELCICQILHEKITILVTHQLQYLKAASQILILKDGKMVQKGTYTEFLKSGIDFGSLLKKDNEESEQPPVPGTPTLRNRTFSESSVWSQQSSRPSLKDGALESQDTENVPVTLSEENRSEGKVGFQAYKNYFRAGAHWIVFIFLILLNTAAQVAYVLQDWWLSYWANKQSMLNVTVNGGGNVTEKLDLNWYLGIYSGLTVATVLFGIARSLLVFYVLVNSSQTLHNKMFESILKAPVLFFDRNPIGRILNRFSKDIGHLDDLLPLTFLDFIQRWDLAVLSWLVSNS

SEQ ID NO: 17574 - protein, 837 aa, Artificial Sequence
  Synthetic polypeptide
VTKWLNPLFKIGHKRRLEEDDMYSVLPEDRSQHLGEELQGFWDKEVLRAENDAQKPSLTRAIIKCYWKSYLVLGIFTLIEESAKVIQPIFLGKIINYFENYDPMDSVALNTAYAYATVLTFCTLILAILHHLYFYHVQCAGMRLRVAMCHMIYRKALRLSNMAMGKTTTGQIVNLLSNDVNKFDQVTVFLHFLWAGPLQAIAVTALLWMEIGISCLAGMAVLIILLPLQSCFGKLFSSLRSKTATFTDARIRTMNEVITGIRIIKMYAWEKSFSNLITNLRKKEISKILRSSCLRGMNLASFFSASKIIVFVTFTTYVLLGSVITASRVFVAVTLYGAVRLTVTLFFPSAIERVSEAIVSIRRIQTFLLLDEISQRNRQLPSDGKKMVHVQDFTAFWDKASETPTLQGLSFTVRPGELLAVVGPVGAGKSSLLSAVLGELAPSHGLVSVHGRIAYVSQQPWVFSGTLRSNILFGKKYEKERYEKVIKACALKKDLQLLEDGDLTVIGDRGTTLSGGQKARVNLARAVYQDADIYLLDDPLSAVDAEVSRHLFELCICQILHEKITILVTHQLQYLKAASQILILKDGKMVQKGTYTEFLKSGIDFGSLLKKDNEESEQPPVPGTPTLRNRTFSESSVWSQQSSRPSLKDGALESQDTENVPVTLSEENRSEGKVGFQAYKNYFRAGAHWIVFIFLILLNTAAQVAYVLQDWWLSYWANKQSMLNVTVNGGGNVTEKLDLNWYLGIYSGLTVATVLFGIARSLLVFYVLVNSSQTLHNKMFESILKAPVLFFDRNPIGRILNRFSKDIGHLDDLLPLTFLDFIQRWDLAVLSWLVSNS

SEQ ID NO: 17575 - protein, 18 aa, Artificial Sequence
  Synthetic polypeptide
TNLNLQHPQVIYRHVEDL

SEQ ID NO: 17576 - protein, 11 aa, Artificial Sequence
  Synthetic polypeptide
ICNTLRLYTGM

SEQ ID NO: 17577 - protein, 175 aa, Artificial Sequence
  Synthetic polypeptide
RGSVSTPHPRLNESESATPSGYIQACRGLMIAAVSLGFFGSIFALFGMKCTKVGGSDKAKAKIACLAGIVFILSGLCSMTGCSLYANKITTEFFDPLFVEQKYELGAALFIGWAGASLCIIGGVIFCFSISDNNKTPRYTYNGATSVMSSRTKYHGGEDFKTTNPSKQFDKNAYV

SEQ ID NO: 17578 - protein, 44 aa, Artificial Sequence
  Synthetic polypeptide
VWWLTTVIPVFWEAKMGGLLEPRSSRPVCATWNMKCRKQKRKTF

SEQ ID NO: 17579 - protein, 26 aa, Artificial Sequence
  Synthetic polypeptide
SQYFGRPRWEDCSSPGVQDQSAQHGI

SEQ ID NO: 17580 - protein, 628 aa, Artificial Sequence
  Synthetic polypeptide
VVAHNCNPSILGGQDGRIARAQEFKTSLRNMEYEMQKTKEEDFLKLFDRWKEEEKEKLVDEMEKVKEMFMKEFKELTSKNSALEYQLSEIQKSNMQIKSNIGTLKDAHEFKEDRSPYPQDFHNVMQLLDSQESKWTARVQAIHQEHKKEKGRLLSHIEKLRTSMIDDLNASNVFYKKRIEELGQRLQEQNELIITQRQQIKDFTCNPLNSISEPKGNPLAWQAFESQPAAPAVPMNAPALHTLETKSSLPMVHEQAFSSHILEPIEELSEEEKGRENEQKLNNNKMHLRKALKSNSSLTKGLRTMVEQNLMEKLETLGINADIRGISSDQLHRVLKSVESERHKQEREIPNFHQIREFLEHQVSCKIEEKALLSSDQCSVSQMDTLSTGEVPKMIQLPSKNRQLIRQKAVSTDRTSVPKIKKNVMEDPFPRKSSTITTPPFSSEEEQEDDDLIRAYASPGPLPVPPPQNKGSFGKNTVKSDADGTEGSEIEDTDDSPKPAGVAVKTPTEKVEKMFPHRKNVNKPVGGTNVPEMFIKKEELQELKCADVEDEDWDISSLEEEISLGKKSGKEQKEPPPAKNEPHFAHVLNAWGAFNPKGPKGEGLQENESSTLKSSLVTVTDWSDTSDV

SEQ ID NO: 17581 - protein, 609 aa, Artificial Sequence
  Synthetic polypeptide
VVAHNCNPSILGGQDGRIARAQEFKTSLRNMEYEMQKTKEEDFLKLFDRWKEEEKEKLVDEMEKVKEMFMKEFKELTSKNSALEYQLSEIQKSNMQIKSNIGTLKDAHEFKEDRSPYPQDFHNVMQLLDSQESKWTARVQAIHQEHKKEKGRLLSHIEKLRTSMIDDLNASNVFYKKRIEELGQRLQEQNELIITQRQQIKDFTCNPLNSISEPKVNAPALHTLETKSSLPMVHEQAFSSHILEPIEELSEEEKGRENEQKLNNNKMHLRKALKSNSSLTKGLRTMVEQNLMEKLETLGINADIRGISSDQLHRVLKSVESERHKQEREIPNFHQIREFLEHQVSCKIEEKALLSSDQCSVSQMDTLSTGEVPKMIQLPSKNRQLIRQKAVSTDRTSVPKIKKNVMEDPFPRKSSTITTPPFSSEEEQEDDDLIRAYASPGPLPVPPPQNKGSFGKNTVKSDADGTEGSEIEDTDDSPKPAGVAVKTPTEKVEKMFPHRKNVNKPVGGTNVPEMFIKKEELQELKCADVEDEDWDISSLEEEISLGKKSGKEQKEPPPAKNEPHFAHVLNAWGAFNPKGPKGEGLQENESSTLKSSLVTVTDWSDTSDV

SEQ ID NO: 17582 - protein, 31 aa, Artificial Sequence
  Synthetic polypeptide
RYILKYLQMKYIISRIYFRVIQGAIFVTRPL

SEQ ID NO: 17583 - protein, 6 aa, Artificial Sequence
  Synthetic polypeptide
SRVPFL

SEQ ID NO: 17584 - protein, 697 aa, Artificial Sequence
  Synthetic polypeptide
SPVFLLEIHSEIFTNEIYNIQDLLQSNPGCHFCDKAFMNQAFLQSHIQRRHTEENSHFEYQKNAQIEKLRSEIVVLKEELQLTRSELEAAHHASAVRFSKEYEMQKTKEEDFLKLFDRWKEEEKEKLVDEMEKVKEMFMKEFKELTSKNSALEYQLSEIQKSNMQIKSNIGTLKDAHEFKEDRSPYPQDFHNVMQLLDSQESKWTARVQAIHQEHKKEKGRLLSHIEKLRTSMIDDLNASNVFYKKRIEELGQRLQEQNELIITQRQQIKDFTCNPLNSISEPKGNPLAWQAFESQPAAPAVPMNAPALHTLETKSSLPMVHEQAFSSHILEPIEELSEEEKGRENEQKLNNNKMHLRKALKSNSSLTKGLRTMVEQNLMEKLETLGINADIRGISSDQLHRVLKSVESERHKQEREIPNFHQIREFLEHQVSCKIEEKALLSSDQCSVSQMDTLSTGEVPKMIQLPSKNRQLIRQKAVSTDRTSVPKIKKNVMEDPFPRKSSTITTPPFSSEEEQEDDDLIRAYASPGPLPVPPPQNKGSFGKNTVKSDADGTEGSEIEDTDDSPKPAGVAVKTPTEKVEKMFPHRKNVNKPVGGTNVPEMFIKKEELQELKCADVEDEDWDISSLEEEISLGKKSGKEQKEPPPAKNEPHFAHVLNAWGAFNPKGPKGEGLQENESSTLKSSLVTVTDWSDTSDV

SEQ ID NO: 17585 - protein, 678 aa, Artificial Sequence
  Synthetic polypeptide
SPVFLLEIHSEIFTNEIYNIQDLLQSNPGCHFCDKAFMNQAFLQSHIQRRHTEENSHFEYQKNAQIEKLRSEIVVLKEELQLTRSELEAAHHASAVRFSKEYEMQKTKEEDFLKLFDRWKEEEKEKLVDEMEKVKEMFMKEFKELTSKNSALEYQLSEIQKSNMQIKSNIGTLKDAHEFKEDRSPYPQDFHNVMQLLDSQESKWTARVQAIHQEHKKEKGRLLSHIEKLRTSMIDDLNASNVFYKKRIEELGQRLQEQNELIITQRQQIKDFTCNPLNSISEPKVNAPALHTLETKSSLPMVHEQAFSSHILEPIEELSEEEKGRENEQKLNNNKMHLRKALKSNSSLTKGLRTMVEQNLMEKLETLGINADIRGISSDQLHRVLKSVESERHKQEREIPNFHQIREFLEHQVSCKIEEKALLSSDQCSVSQMDTLSTGEVPKMIQLPSKNRQLIRQKAVSTDRTSVPKIKKNVMEDPFPRKSSTITTPPFSSEEEQEDDDLIRAYASPGPLPVPPPQNKGSFGKNTVKSDADGTEGSEIEDTDDSPKPAGVAVKTPTEKVEKMFPHRKNVNKPVGGTNVPEMFIKKEELQELKCADVEDEDWDISSLEEEISLGKKSGKEQKEPPPAKNEPHFAHVLNAWGAFNPKGPKGEGLQENESSTLKSSLVTVTDWSDTSDV

SEQ ID NO: 17586 - protein, 61 aa, Artificial Sequence
  Synthetic polypeptide
SPVFLLEIHSEIFTNEIYNIQDLLQSNPGCHFCDKAFMNQAFLQSHIQRRHTEENSHFGHL

SEQ ID NO: 17587 - protein, 858 aa, Artificial Sequence
  Synthetic polypeptide
EGTLNDRTNAIDFLMDRNNVVPRINTLILRTNQQYLNLISTSVTADVEDFSTFFFLDSQDKSAVIAKNMYYLTQDDESIISAVTLWIIADFDKPSGRKLLFNALKHMKTSVHSRLGIIYNPTSKINEENTAISRGILAAFLTQKNMFLRSFLGQLAKEEIATAIYSGDKIKTFLIEGMDKNAFEKKYNTVGVNIFRTHQLFCQDVLKLRPGEMGIVSNGRFLGPLDEDFYAEDFYLLEKITFSNLGEKIKGIVENMGINANNMSDFIMKVDALMSSVPKRASRYDVTFLRENHSVIKTNPQENDMFFNVIAIVDPLTREAQKMAQLLVVLGKIINMKIKLFMNCRGRLSEAPLESFYRFVLEPELMSGANDVSSLGPVAKFLDIPESPLLILNMITPEGWLVETVHSNCDLDNIHLKDTEKTVTAEYELEYLLLEGQCFDKVTEQPPRGLQFTLGTKNKPAVVDTIVMAHHGYFQLKANPGAWILRLHQGKSEDIYQIVGHEGTDSQADLEDIIVVLNSFKSKILKVKVKKETDKIKEDILTDEDEKTKGLWDSIKSFTVSLHKENKKEKDVLNIFSVASGHLYERFLRIMMLSVLRNTKTPVKFWLLKNYLSPTFKEVIPHMAKEYGFRYELVQYRWPRWLRQQTERQRIIWGYKILFLDVLFPLAVDKIIFVDADQIVRHDLKELRDFDLDGAPYGYTPFCDSRREMDGYRFWKTGYWASHLLRRKYHISALYVVDLKKFRRIGAGDRLRSQYQALSQDPNSLSNLDQDLPNNMIYQVAIKSLPQDWLWCETWCDDESKQRAKTIDLCNNPKTKESKLKAAARIVPEWVEYDAEIRQLLDHLENKKQDTILTHDEL

SEQ ID NO: 17588 - protein, 53 aa, Artificial Sequence
  Synthetic polypeptide
GASLPGYPPSGMWGAPLPRRPVWAVKSTSAPPRPRLGTEECLCPATTPSERAH

SEQ ID NO: 17589 - protein, 29 aa, Artificial Sequence
  Synthetic polypeptide
RAPLPRRDPVWELRSVSAPPPPRLRGHIK

SEQ ID NO: 17590 - protein, 7 aa, Artificial Sequence
  Synthetic polypeptide
HRRCTKK

SEQ ID NO: 17591 - protein, 65 aa, Artificial Sequence
  Synthetic polypeptide
RKYSFKIFKRNKFLFKIPDLPTEETQKNPLIVRFDTGDVPKSEEGSKYTHCGQCEECSPKYISSC

SEQ ID NO: 17592 - protein, 962 aa, Artificial Sequence
  Synthetic polypeptide
DLTQEMYQKVKKDQNILTVDNVKSVLQNTFPHANIWDILGIHSKYDEERKAGASFYKMTGLGPLPQALYNGEPFKHEEMNIKELKMAVLQRMMDASVYLQREVFLGTLNDRTNAIDFLMDRNNVVPRINTLILRTNQQYLNLISTSVTADVEDFSTFFFLDSQDKSAVIAKNMYYLTQDDESIISAVTLWIIADFDKPSGRKLLFNALKHMKTSVHSRLGIIYNPTSKINEENTAISRGILAAFLTQKNMFLRSFLGQLAKEEIATAIYSGDKIKTFLIEGMDKNAFEKKYNTVGVNIFRTHQLFCQDVLKLRPGEMGIVSNGRFLGPLDEDFYAEDFYLLEKITFSNLGEKIKGIVENMGINANNMSDFIMKVDALMSSVPKRASRYDVTFLRENHSVIKTNPQENDMFFNVIAIVDPLTREAQKMAQLLVVLGKIINMKIKLFMNCRGRLSEAPLESFYRFVLEPELMSGANDVSSLGPVAKFLDIPESPLLILNMITPEGWLVETVHSNCDLDNIHLKDTEKTVTAEYELEYLLLEGQCFDKVTEQPPRGLQFTLGTKNKPAVVDTIVMAHHGYFQLKANPGAWILRLHQGKSEDIYQIVGHEGTDSQADLEDIIVVLNSFKSKILKVKVKKETDKIKEDILTDEDEKTKGLWDSIKSFTVSLHKENKKEKDVLNIFSVASGHLYERFLRIMMLSVLRNTKTPVKFWLLKNYLSPTFKEVIPHMAKEYGFRYELVQYRWPRWLRQQTERQRIIWGYKILFLDVLFPLAVDKIIFVDADQIVRHDLKELRDFDLDGAPYGYTPFCDSRREMDGYRFWKTGYWASHLLRRKYHISALYVVDLKKFRRIGAGDRLRSQYQALSQDPNSLSNLDQDLPNNMIYQVAIKSLPQDWLWCETWCDDESKQRAKTIDLCNNPKTKESKLKAAARIVPEWVEYDAEIRQLLDHLENKKQDTILTHDEL

SEQ ID NO: 17593 - protein, 52 aa, Artificial Sequence
  Synthetic polypeptide
PNRNSSSLQLPARSTQKEFLLHHNVTGSSVTLPERVETCPERGHLENLSSYV

SEQ ID NO: 17594 - protein, 256 aa, Artificial Sequence
  Synthetic polypeptide
WQDSRIGTAPVCSSQRDQHRRNFYYITMLRDPVSRYLSEWKHVQRGATWKTSLHMCDGRSPTPDELPTCYPGDDWSGVSLREFMDCTYNLANNRQVRMLADLSLVGCYNLTFMNESERNTILLQSAKNNLKNMAFFGLTEFQRKTQFLFERTFNLKFISPFTQFNITRASNVEINEGARQRIEDLNFLDMQLYEYAKDLFQQRYHHTKQLEHQRDRQKRREERRLQREHRDHQWPKEDGAAEGTVTEDYNSQVVRW

SEQ ID NO: 17595 - protein, 30 aa, Artificial Sequence
  Synthetic polypeptide
EQLQSAAPSEINTEGISITSQCYGIQCHVT

SEQ ID NO: 17596 - protein, 91 aa, Artificial Sequence
  Synthetic polypeptide
SLKPGTCVCSVCTILLLHTKSPSGTNSGSVVHHKQDIDLYIGTAAFHLWFLHLDCSHKWTYVRSVLRQQNVPGASGALHPQLDGKILFLDT

SEQ ID NO: 17597 - protein, 36 aa, Artificial Sequence
  Synthetic polypeptide
LKAWHLCLLCLYHFTAPYQESKWHKFWVRCPSQTRH

SEQ ID NO: 17598 - protein, 105 aa, Artificial Sequence
  Synthetic polypeptide
ASQLNSLGRHLTVYKIKPGTCVCSVCTILLLHTKSPSGTNSGSVVHHKQDIDLYIGTAAFHLWFLHLDCSHKWTYVRSVLRQQNVPGASGALHPQLDGKILFLDT

SEQ ID NO: 17599 - protein, 36 aa, Artificial Sequence
  Synthetic polypeptide
NKAWHLCLLCLYHFTAPYQESKWHKFWVRCPSQTRH

SEQ ID NO: 17600 - protein, 57 aa, Artificial Sequence
  Synthetic polypeptide
PDCELIKVRATPCTSCLTQSMERRGLRALPADLLPAHRGSAGRPVGSLWPAHPQWWL

SEQ ID NO: 17601 - protein, 272 aa, Artificial Sequence
  Synthetic polypeptide
HRVWNAVDSGHCLQTYSLHTEAVRAARWAPCGRRILSGGFDFALHLTDLETGTQLFSGRSDFRITTLKFHPKDHNIFLCGGFSSEMKAWDIRTGKVMRSYKATIQQTLDILFLREGSEFLSSTDASTRDSADRTIIAWDFRTSAKISNQIFHERFTCPSLALHPREPVFLAQTNGNYLALFSTVWPYRMSRRRRYEGHKVEGYSVGCECSPGGDLLVTGSADGRVLMYSFRTASRACTLQGHTQACVGTTYHPVLPSVLATCSWGGDMKIWH

SEQ ID NO: 17602 - protein, 59 aa, Artificial Sequence
  Synthetic polypeptide
VDQGQGHTLHFLPDTEYGTPWTPGTACRPTPCTQRQCGPPGGLPVAGASSVVALTSRCT

SEQ ID NO: 17603 - protein, 162 aa, Artificial Sequence
  Synthetic polypeptide
SRQKNVKRLDWPSLPACIFLLCWMLPDLEHRNPSSSALGLGLASLLLSLRRPIVGPCDCGRSRKRAVLHNKRKNCLNGGVSGMSHRPGVEEESVKQGTGTSWDVGSSRSPARRTSHFLSRTPASLESDAPTVWPRQPDVSHHTGRRSCYRKTSDFASSRWLF

SEQ ID NO: 17604 - protein, 26 aa, Artificial Sequence
  Synthetic polypeptide
DGLSWDLVIVGGAGREQCFTIKGRIA

SEQ ID NO: 17605 - protein, 12 aa, Artificial Sequence
  Synthetic polypeptide
LWEEPEESSASQ

SEQ ID NO: 17606 - protein, 36 aa, Artificial Sequence
  Synthetic polypeptide
GRAWWLTPVIPALWEAEAGRSQGQEIETILANTVYL

SEQ ID NO: 17607 - protein, 338 aa, Artificial Sequence
  Synthetic polypeptide
SQHFGRPRRADHKVRRSRPYWLTRFIYETEHHNGIAELLEILGSIINGFALPLKEEHKIFLLKVLLPLHKVKSLSVYHPQLAYCVVQFLEKDSTLTEPVVMALLKYWPKTHSPKEVMFLNELEEILDVIEPSEFVKIMEPLFRQLAKCVSSPHFQVAERALYYWNNEYIMSLISDNAAKILPIMFPSLYRNSKTHWNKTIHGLIYNALKLFMEMNQKLFDDCTQQFKAEKLKEKLKMKEREEAWVKIENLAKANPQYTVYSQASTMSIPVAMETDGPLFEDVQMLRKTVKDEAHQAQKDPKKDRPLARRKSELPQDPHTKKALEAHCRADELASQDGR

SEQ ID NO: 17608 - protein, 12 aa, Artificial Sequence
  Synthetic polypeptide
HGLFMKQSIIMA

SEQ ID NO: 17609 - protein, 299 aa, Artificial Sequence
  Synthetic polypeptide
SQHFGRPRRADHKVRRSRPYWLTRFIYETEHHNGIAELLEILGSIINGFALPLKEEHKIFLLKVLLPLHKVKSLSVYHPQLAYCVVQFLEKDSTLTEPVVMALLKYWPKTHSPKEVMFLNELEEILDVIEPSEFVKIMEPLFRQLAKCVSSPHFQVAERALYYWNNEYIMSLISDNAAKILPIMFPSLYRNSKTHWNKTIHGLIYNALKLFMEMNQKLFDDCTQQFKAEKLKEKLKMKEREEAWVKIENLAKANPQAQKDPKKDRPLARRKSELPQDPHTKKALEAHCRADELASQDGR

SEQ ID NO: 17610 - protein, 61 aa, Artificial Sequence
  Synthetic polypeptide
SQHFGRPRRADHKVRRSRPYWLTRFIYETEHHNGIAELLEILGSIINGFALPLKEEHKIFL

SEQ ID NO: 17611 - protein, 263 aa, Artificial Sequence
  Synthetic polypeptide
SQHFGRPRRADHKVRRSRPYWLTRFIYETEHHNGIAELLEILGSIINGFALPLKEEHKIFLLKVLLPLHKVKSLSVYHPQLAYCVVQFLEKDSTLTEPVVMALLKYWPKTHSPKEVMFLNELEEILDVIEPSEFVKIMEPLFRQLAKCVSSPHFQVAERALYYWNNEYIMSLISDNAAKILPIMFPSLYRNSKTHWNKTIHGLIYNALKLFMEMNQKLFDDCTQQFKAEKLKEKLKMKEREEAWVKIENLAKANPQVLKKRIT

SEQ ID NO: 17612 - protein, 198 aa, Artificial Sequence
  Synthetic polypeptide
SQHFGRPRRADHKVRRSRPYWLTRFIYETEHHNGIAELLEILGSIINGFALPLKEEHKIFLLKVLLPLHKVKSLSVYHPQLAYCVVQFLEKDSTLTEPVVMALLKYWPKTHSPKEVMFLNELEEILDVIEPSEFVKIMEPLFRQLAKCVSSPHFQVAERALYYWNNEYIMSLISDNAAKILPIMFPSLYRNSKTHWNK

SEQ ID NO: 17613 - protein, 27 aa, Artificial Sequence
  Synthetic polypeptide
SQHFGRPRRADHKVRRSRPYWLTRFIY

SEQ ID NO: 17614 - protein, 5 aa, Artificial Sequence
  Synthetic polypeptide
HGLFM

SEQ ID NO: 17615 - protein, 168 aa, Artificial Sequence
  Synthetic polypeptide
SQHFGRPRRADHKVRRSRPYWLTRFIYETEHHNGIAELLEILGSIINGFALPLKEEHKIFLLKVLLPLHKVKSLSVYHPQLAYCVVQFLEKDSTLTEPVVMALLKYWPKTHSPKEVMFLNELEEILDVIEPSEFVKIMEPLFRQLAKCVSSPHFQREAKNERTGRSMG

SEQ ID NO: 17616 - protein, 1037 aa, Artificial Sequence
  Synthetic polypeptide
MMRTHGHTEEQHTLGPFRAWRFRLITRDVESYDPVLNPVLNREVRRTGGRVLITLGDQDIDLSPSFVIFLSTRDPTVEFPPDLCSRVTFVNFTVTRSSLQSQCLNEVLKAERPDVDEKRSDLLKLQGEFQLRLRQLEKSLLQALNEVKGRILDDDTIITTLENLKREAAEVTRKVEETDIVMQEVETVSQQYLPLSTACSSIYFTMESLKQIHFLYQYSLQFFLDIYHNVLYENPNLKGVTDHTQRLSIITKDLFQVAFNRVARGMLHQDHITFAMLLARIKLKGTVGEPTYDAEFQHFLRGNEIVLSAGSTPRIQGLTVEQAEAVVRLSCLPAFKDLIAKVQADEQFGIWLDSSSPEQTVPYLWSEETPATPIGQAIHRLLLIQAFRPDRLLAMAHMFVSTNLGESFMSIMEQPLDLTHIVGTEVKPNTPVLMCSVPGYDASGHVEDLAAEQNTQITSIAIGSAEGFNQADKAINTAVKSGRWVMLKNVHLAPGWLMQLEKKLHSLQPHACFRLFLTMEINPKVPVNLLRAGRIFVFEPPPGVKANMLRTFSSIPVSRICKSPNERARLYFLLAWFHAIIQERLRYAPLGWSKKYEFGESDLRSACDTVDTWLDDTAKGRQNISPDKIPWSALKTLMAQSIYGGRVDNEFDQRLLNTFLERLFTTRSFDSEFKLACKVDGHKDIQMPDGIRREEFVQWVELLPDTQTPSWLGLPNNAERVLLTTQGVDMISKMLKMQMLEDEDDLAYAETEKKTRTDSTSDGRPAWMRTLHTTASNWLHLIPQTLSHLKRTVENIKDPLFRFFEREVKMGAKLLQDVRQDLADVVQVCEGKKKQTNYLRTLINELVKGILPRSWSHYTVPAGMTVIQWVSDFSERIKQLQNISLAAASGGAKELKNIHVCLGGLFVPEAYITATRQYVAQANSWSLEELCLEVNVTTSQGATLDACSFGVTGLKLQGATCNNNKLSLSNAISTALPLTQLRWVKQTNTEKKASVVTLPVYLNFTRADLIFTVDFEIATKEDPRSFYERGVAVLCTE

SEQ ID NO: 17617 - protein, 10 aa, Artificial Sequence
  Synthetic polypeptide
PGMWKATIQF

SEQ ID NO: 17618 - protein, 19 aa, Artificial Sequence
  Synthetic polypeptide
AYNQGCGKLRSSFEPGAEP

SEQ ID NO: 17619 - protein, 1019 aa, Artificial Sequence
  Synthetic polypeptide
EFLILVHLNDVESYDPVLNPVLNREVRRTGGRVLITLGDQDIDLSPSFVIFLSTRDPTVEFPPDLCSRVTFVNFTVTRSSLQSQCLNEVLKAERPDVDEKRSDLLKLQGEFQLRLRQLEKSLLQALNEVKGRILDDDTIITTLENLKREAAEVTRKVEETDIVMQEVETVSQQYLPLSTACSSIYFTMESLKQIHFLYQYSLQFFLDIYHNVLYENPNLKGVTDHTQRLSIITKDLFQVAFNRVARGMLHQDHITFAMLLARIKLKGTVGEPTYDAEFQHFLRGNEIVLSAGSTPRIQGLTVEQAEAVVRLSCLPAFKDLIAKVQADEQFGIWLDSSSPEQTVPYLWSEETPATPIGQAIHRLLLIQAFRPDRLLAMAHMFVSTNLGESFMSIMEQPLDLTHIVGTEVKPNTPVLMCSVPGYDASGHVEDLAAEQNTQITSIAIGSAEGFNQADKAINTAVKSGRWVMLKNVHLAPGWLMQLEKKLHSLQPHACFRLFLTMEINPKVPVNLLRAGRIFVFEPPPGVKANMLRTFSSIPVSRICKSPNERARLYFLLAWFHAIIQERLRYAPLGWSKKYEFGESDLRSACDTVDTWLDDTAKGRQNISPDKIPWSALKTLMAQSIYGGRVDNEFDQRLLNTFLERLFTTRSFDSEFKLACKVDGHKDIQMPDGIRREEFVQWVELLPDTQTPSWLGLPNNAERVLLTTQGVDMISKMLKMQMLEDEDDLAYAETEKKTRTDSTSDGRPAWMRTLHTTASNWLHLIPQTLSHLKRTVENIKDPLFRFFEREVKMGAKLLQDVRQDLADVVQVCEGKKKQTNYLRTLINELVKGILPRSWSHYTVPAGMTVIQWVSDFSERIKQLQNISLAAASGGAKELKNIHVCLGGLFVPEAYITATRQYVAQANSWSLEELCLEVNVTTSQGATLDACSFGVTGLKLQGATCNNNKLSLSNAISTALPLTQLRWVKQTNTEKKASVVTLPVYLNFTRADLIFTVDFEIATKEDPRSFYERGVAVLCTE

SEQ ID NO: 17620 - protein, 22 aa, Artificial Sequence
  Synthetic polypeptide
GWAQWLTPVILALWEAEAEEED

SEQ ID NO: 17621 - protein, 463 aa, Artificial Sequence
  Synthetic polypeptide
HFGRQKRKKKIKEKYIDQEELNKTKPIWTRNPDDITNEEYGEFYKSLTNDWEDHLAVKHFSVEGQLEFRALLFVPRRAPFDLFENRKKKNNIKLYVRRVFIMDNCEELIPEYLNFIRGVVDSEDLPLNISREMLQQSKILKVIRKNLVKKCLELFTELAEDKENYKKFYEQFSKNIKLGIHEDSQNRKKLSELLRYYTSASGDEMVSLKDYCTRMKENQKHIYYITGETKDQVANSAFVERLRKHGLEVIYMIEPIDEYCVQQLKEFEGKTLVSVTKEGLELPEDEEEKKKQEEKKTKFENLCKIMKDILEKKVEKVVVSNRLVTSPCCIVTSTYGWTANMERIMKAQALRDNSTMGYMAAKKHLEINPDHSIIETLRQKAEADKNDKSVKDLVILLYETALLSSGFSLEDPQTHANRIYRMIKLGLGIDEDDPTADDTSAAVTEEMPPLEGDDDTSRMEEVD

SEQ ID NO: 17622 - protein, 57 aa, Artificial Sequence
  Synthetic polypeptide
MGAVAHACNPSTLGGRSGRRRLRKSTSIKKSSTKQSPSGPEIPTILLMRSTENSIRA

SEQ ID NO: 17623 - protein, 323 aa, Artificial Sequence
  Synthetic polypeptide
HFGRQKRKKKIKEKYIDQEELNKTKPIWTRNPDDITNEEYGEFYKSLTNDWEDHLAVKHFSVEGQLEFRALLFVPRRAPFDLFENRKKKNNIKLYVRRVFIMDNCEELIPEYLNFIRGVVDSEDLPLNISREMLQQSKILKVIRKNLVKKCLELFTELAEDKENYKKFYEQFSKNIKLGIHEDSQNRKKLSELLRYYTSASGDEMVSLKDYCTRMKENQKHIYYITGETKDQVANSAFVERLRKHGLEVIYMIEPIDEYCVQQLKEFEGKTLVSVTKEGLELPEDEEEKKKQEEKKTKFENLCKIMKDILEKKVEKVCEYSIS

SEQ ID NO: 17624 - protein, 502 aa, Artificial Sequence
  Synthetic polypeptide
LACQAADLSKPIDKRIYKGTQPTCHDFNHLTATAESVSLLVGFSAGQVQLIDPIKKETSKLFNEERLIDKSRVTCVKWVPGSESLFLVAHSSGNMYLYNVEHTCGTTAPHYQLLKQGESFAVHTCKSKSTRNPLLKWTVGEGALNEFAFSPDGKFLACVSQDGFLRVFNFDSVELHGTMKSYFGGLLCVCWSPDGKYIVTGGEDDLVTVWSFVDCRVIARGHGHKSWVSVVAFDPYTTSVEEGDPMEFSGSDEDFQDLLHFGRDRANSTQSRLSKRNSTDSRPVSVTYRFGSVGQDTQLCLWDLTEDILFPHQPLSRARTHTNVMNATSPPAGSNGNSVTTPGNSVPPPLPRSNSLPHSAVSNAGSKSSVMDGAIASGVSKFATLSLHDRKERHHEKDHKRNHSMGHISSKSSDKLNLVTKTKTDPAKTLGTPLCPRMEDVPLLEPLICKKIAHERLTVLIFLEDCIVTACQEGFICTWGRPGKVGSLSSPSQASSPGGTVV

SEQ ID NO: 17625 - protein, 6 aa, Artificial Sequence
  Synthetic polypeptide
HARLLT

SEQ ID NO: 17626 - protein, 51 aa, Artificial Sequence
  Synthetic polypeptide
VVLLGVVPAQQYQRPLRTCGNEDSGPLHLNTASGTVRAGSAICGVTSMPGC

SEQ ID NO: 17627 - protein, 116 aa, Artificial Sequence
  Synthetic polypeptide
LACQAADLSKPIDKRIYKGTQPTCHDFNHLTATAESVSLLVGFSAGQVQLIDPIKKETSKLFNEENSCQHLWKVDWNEERQNEGSKTSEEALVTVQPAEHFCRQEDRMQGVLQDQN

SEQ ID NO: 17628 - protein, 490 aa, Artificial Sequence
  Synthetic polypeptide
LACQAADLSKPIDKRIYKGTQPTCHDFNHLTATAESVSLLVGFSAGQVQLIDPIKKETSKLFNEERLIDKSRVTCVKWVPGSESLFLVAHSSGNMYLYNVEHTCGTTAPHYQLLKQGESFAVHTCKSKSTRNPLLKWTVGEGALNEFAFSPDGKFLACVSQDGFLRVFNFDSVELHGTMKSYFGGLLCVCWSPDGKYIVTGGEDDLVTVWSFVDCRVIARGHGHKSWVSVVAFDPYTTSVEEGDPMEFSGSDEDFQDLLHFGRDRANSTQSRLSKRNSTDSRPVSVTYRFGSVGQDTQLCLWDLTEDILFPHQPLSRARTHTNVMNATSPPAGSNGNSVTTPGNSVPPPLPRSNSLPHSAVSNAGSKSSVMDGAIASGVSKFATLSLHDRKERHHEKDHKRNHSMGHISSKSSDKLNLVTKTKTDPAKTLGTPLCPRMEDVPLLEPLICKKIAHERLTVLIFLEDCIVTACQEGFICTWGRPGKVVSFNP

SEQ ID NO: 17629 - protein, 97 aa, Artificial Sequence
  Synthetic polypeptide
LACQAADLSKPIDKRIYKGTQPTCHDFNHLTATAESVSLLVGFSAGQVQLIDPIKKETSKLFNEERRDFTMLARLVWNSWLQVIHPPQLPKVLELQA

SEQ ID NO: 17630 - protein, 521 aa, Artificial Sequence
  Synthetic polypeptide
LACQAADLSKPIDKRIYKGTQPTCHDFNHLTATAESVSLLVGFSAGQVQLIDPIKKETSKLFNEENSCQHLWKVDWNEERQNEGSKTSEEALVTVQRLIDKSRVTCVKWVPGSESLFLVAHSSGNMYLYNVEHTCGTTAPHYQLLKQGESFAVHTCKSKSTRNPLLKWTVGEGALNEFAFSPDGKFLACVSQDGFLRVFNFDSVELHGTMKSYFGGLLCVCWSPDGKYIVTGGEDDLVTVWSFVDCRVIARGHGHKSWVSVVAFDPYTTSVEEGDPMEFSGSDEDFQDLLHFGRDRANSTQSRLSKRNSTDSRPVSVTYRFGSVGQDTQLCLWDLTEDILFPHQPLSRARTHTNVMNATSPPAGSNGNSVTTPGNSVPPPLPRSNSLPHSAVSNAGSKSSVMDGAIASGVSKFATLSLHDRKERHHEKDHKRNHSMGHISSKSSDKLNLVTKTKTDPAKTLGTPLCPRMEDVPLLEPLICKKIAHERLTVLIFLEDCIVTACQEGFICTWGRPGKVVSFNP

SEQ ID NO: 17631 - protein, 6 aa, Artificial Sequence
  Synthetic polypeptide
LACQAA

SEQ ID NO: 17632 - protein, 5 aa, Artificial Sequence
  Synthetic polypeptide
HARLL

SEQ ID NO: 17633 - protein, 16 aa, Artificial Sequence
  Synthetic polypeptide
AMIAPLHSSLDDRLTP

SEQ ID NO: 17634 - protein, 14 aa, Artificial Sequence
  Synthetic polypeptide
SHHFIPAWMTDSLH

SEQ ID NO: 17635 - protein, 5 aa, Artificial Sequence
  Synthetic polypeptide
QTHSI

SEQ ID NO: 17636 - protein, 32 aa, Artificial Sequence
  Synthetic polypeptide
CTCSPSYSEDSARRGQLGQRPFQPQRPDAVGA

SEQ ID NO: 17637 - protein, 199 aa, Artificial Sequence
  Synthetic polypeptide
SHFGRLRQEDHLSLGVQDQPGQHSKTSSLPKKKKLPGPDSAPVVPATQKTQPAGVSLVSVHSSPNDQMLWVLDSRWNVHVRTGITEEMPVGTAWEHVPGLQACQLALSTRTVWARCPNGDLARRYGVTDKNPAGDYWKKIPGSVSCFTVTASDELWAVGPPGYLLQRLTKTFSHSHGTQKSSQAAMPHPEDLEDEWEVI

SEQ ID NO: 17638 - protein, 63 aa, Artificial Sequence
  Synthetic polypeptide
SQLLRRLSPPGSAWSASIPAPTTRCCGCLTAGGTCTCGPGSPRRCLWGPPGSMCQGCRPASWR

SEQ ID NO: 17639 - protein, 36 aa, Artificial Sequence
  Synthetic polypeptide
GQALWLTRVILAHWEAEAGGSPGVRSSRPAWPTWLQ

SEQ ID NO: 17640 - protein, 28 aa, Artificial Sequence
  Synthetic polypeptide
HIGRPRQVDHLGSGVRDQPGQHGCNKNN

SEQ ID NO: 17641 - protein, 611 aa, Artificial Sequence
  Synthetic polypeptide
PGAVAHTCNPSTLGGRGRWITWGQEFETSLANMVAIKIIDKTQLNPTSLQKLFREVRIMKILNHPNIVKLFEVIETEKTLYLIMEYASGGEVFDYLVAHGRMKEKEARSKFRQIVSAVQYCHQKRIVHRDLKELRERVLRGKYRIPFYMSTDCENLLKRFLVLNPIKRGTLEQIMKDRWINAGHEEDELKPFVEPELDISDQKRIDIMVGMGYSQEEIQESLSKMKYDEITATYLLLGRKSSELDASDSSSSSNLSLAKVRPSSDLNNSTGQSPHHKVQRSVFSSQKQRRYSDHAGPAIPSVVAYPKRSQTSTADSDLKEDGISSRKSSGSAVGGKGIAPASPMLGNASNPNKADIPERKKSSTVPSSNTASGGMTRRNTYVCSERTTADRHSVIQNGKENSTIPDQRTPVASTHSISSAATPDRIRFPRGTASRSTFHGQPRERRTATYNGPPASPSLSHEATPLSQTRSRGSTNLFSKLTSKLTRRNMSFRFIKSRNVSAEQKDENKEAKPRSLRFTWSMKTTSSMDPGDMMREIRKVLDANNCDYEQRERFLLFCVHGDGHAENLVQWEMEVCKLPRLSLNGVRFKRISGTSIAFKNIASKIANELKL

SEQ ID NO: 17642 - protein, 704 aa, Artificial Sequence
  Synthetic polypeptide
PGAVAHTCNPSTLGGRGRWITWGQEFETSLANMVAIKIIDKTQLNPTSLQKLFREVRIMKILNHPNIVKLFEVIETEKTLYLIMEYASGGEVFDYLVAHGRMKEKEARSKFRQGCQAGQTIKVQVSFDLLSLMFTFIVSAVQYCHQKRIVHRDLKAENLLLDADMNIKIADFGFSNEFTVGGKLDTFCGSPPYAAPELFQGKKYDGPEVDVWSLGVILYTLVSGSLPFDGQNLKELRERVLRGKYRIPFYMSTDCENLLKRFLVLNPIKRGTLEQIMKDRWINAGHEEDELKPFVEPELDISDQKRIDIMVGMGYSQEEIQESLSKMKYDEITATYLLLGRKSSELDASDSSSSSNLSLAKVRPSSDLNNSTGQSPHHKVQRSVFSSQKQRRYSDHAGPAIPSVVAYPKRSQTSTADSDLKEDGISSRKSSGSAVGGKGIAPASPMLGNASNPNKADIPERKKSSTVPSSNTASGGMTRRNTYVCSERTTADRHSVIQNGKENSTIPDQRTPVASTHSISSAATPDRIRFPRGTASRSTFHGQPRERRTATYNGPPASPSLSHEATPLSQTRSRGSTNLFSKLTSKLTRSRNVSAEQKDENKEAKPRSLRFTWSMKTTSSMDPGDMMREIRKVLDANNCDYEQRERFLLFCVHGDGHAENLVQWEMEVCKLPRLSLNGVRFKRISGTSIAFKNIASKIANELKL

SEQ ID NO: 17643 - protein, 705 aa, Artificial Sequence
  Synthetic polypeptide
PGAVAHTCNPSTLGGRGRWITWGQEFETSLANMVAIKIIDKTQLNPTSLQKLFREVRIMKILNHPNIVKLFEVIETEKTLYLIMEYASGGEVFDYLVAHGRMKEKEARSKFRQIVSAVQYCHQKRIVHRDLKAENLLLDADMNIKIADFGFSNEFTVGGKLDTFCGSPPYAAPELFQGKKYDGPEVDVWSLGVILYTLVSGSLPFDGQNLKELRERVLRGKYRIPFYMSTDCENLLKRFLVLNPIKRGTLEQIMKDRWINAGHEEDELKPFVEPELDISDQKRIDIMVGMGYSQEEIQESLSKMKYDEITATYLLLGRKSSELDASDSSSSSNLSLAKVRPSSDLNNSTGQSPHHKVQRSVFSSQKQRRYSDHAGPAIPSVVAYPKRSQTSTADSDLKEDGISSRKSSGSAVGGKGIAPASPMLGNASNPNKADIPERKKSSTVPSSNTASGGMTRRNTYVCSERTTADRHSVIQNGKENSTIPDQRTPVASTHSISSAATPDRIRFPRGTASRSTFHGQPRERRTATYNGPPASPSLSHEATPLSQTRSRGSTNLFSKLTSKLTRRNMSFRFIKRLPTEYERNGRYEGSSRNVSAEQKDENKEAKPRSLRFTWSMKTTSSMDPGDMMREIRKVLDANNCDYEQRERFLLFCVHGDGHAENLVQWEMEVCKLPRLSLNGVRFKRISGTSIAFKNIASKIANELKL

SEQ ID NO: 17644 - protein, 681 aa, Artificial Sequence
  Synthetic polypeptide
PGAVAHTCNPSTLGGRGRWITWGQEFETSLANMVAIKIIDKTQLNPTSLQKLFREVRIMKILNHPNIVKLFEVIETEKTLYLIMEYASGGEVFDYLVAHGRMKEKEARSKFRQIVSAVQYCHQKRIVHRDLKAENLLLDADMNIKIADFGFSNEFTVGGKLDTFCGSPPYAAPELFQGKKYDGPEVDVWSLGVILYTLVSGSLPFDGQNLKELRERVLRGKYRIPFYMSTDCENLLKRFLVLNPIKRGTLEQIMKDRWINAGHEEDELKPFVEPELDISDQKRIDIMVGMGYSQEEIQESLSKMKYDEITATYLLLGRKSSELDASDSSSSSNLSLAKVRPSSDLNNSTGQSPHHKVQRSVFSSQKQRRYSDHAGPAIPSVVAYPKRSQTSTADSDLKEDGISSRKSSGSAVGGKGIAPASPMLGNASNPNKADIPERKKSSTVPSSNTASGGMTRRNTYVCSERTTADRHSVIQNGKENSTIPDQRTPVASTHSISSAATPDRIRFPRGTASRSTFHGQPRERRTATYNGPPASPSLSHEATPLSQTRSRGSTNLFSKLTSKLTRSRNVSAEQKDENKEAKPRSLRFTWSMKTTSSMDPGDMMREIRKVLDANNCDYEQRERFLLFCVHGDGHAENLVQWEMEVCKLPRLSLNGVRFKRISGTSIAFKNIASKIANELKL
